United States Patent Application Publication US 2011/0014706 A2 - sequence listing, part 7

SEQ ID NO: 10957 - DNA, 1089 bp, Arabidopsis thaliana landsberg
ggaggcaggcactatccgtataatttttgcaataatcattttataaatgtttcgaaacaaatcctccaatacatactctaaagcaataaaacagtaacttttctatcaaattgagtactctaaaaaaatttacaaatcttatcatttacttattttgctatcaaattcaacattagcatataattacttttaactttcctatatttttcaataaacagtaaatatctcatagtaacttttcttacttccttggcctagcacatgcactgaacaaggagaaacgtctctctcgacttcttcgtgatcgcatagaagtccctttgatctataatcaagtaatcaaaaacgtcagataaatagataaattattttttggttgattgcaactttaaacaagattttgtgaatttaactcactttggttcttcttggagacttttgtgtgttccaacagaaaagcagactgcaaactcctctccctgattctgattcatatcctctgcacaaaccaaacaaaacaattgtttattgtgaagatcttacttattcggttttctcttcactgaagcaagattacttacagattgtctttgttgtttgtgaagttactattgtgtagtaagcttggagaaacaggacagtgttccattcttttaccactctgattctcctgaaactcacccatttcacaaatcttcaagactttaactccattggtgtcttcttgaggtagaatttggttcctttcgggttttaaccggccttgtgaaccaggagtcttctgtaaccactcagtttctaatctctgttcttggatgattgcttcaatccttttcattggaatctcattcccactttcagtatatgaactagttgtcactgctatttgtctggtctgcttggagttgagtaactcagtttcagacaagaggattatcctgacctctacgtttcgccgtagtaccatttcaatcgagtatgtgatactgcttacaaacctttcagctctcgctttgatctctgcttctccaaatgcaatataagcaactagaatacctgcaacgaaaaatctattagtatgcttagagt

SEQ ID NO: 10958 - DNA, 916 bp, Arabidopsis thaliana landsberg
  unsure (1)..(916): unsure at all n locations
acttaaaccgatacaaatttcggtttaccacaacttttctaaaaatacgcgttctccgctcacgttagcatcaaccaatcgggagtttggtgctattgctgccgtcataaaagtacgcaggcacacaaggcgcactctagatggctgtcataatcgcgccatagttacagacgccattacacgtgtcattcttctgactaatccacgtcatcctcctcctcttatactattgccatttttaggttttcctgcaaaacaaacaaatcagtccttcttcttcacttttgttaccttcttctctgcaaaatcgactaaagttttgagtttcttcaccgtacgattaaccggagatggagtcttctcccgatccaggagagttgattaagtcgtctcagccgagtttctttgagtttcagaagcaggcgtctctaatgacgagctgcaatcttcnnnnnnnnnnnnnnnnnnnnnntttcacttccatggagcaaaacctgatgaagaaatctgaagctctgagacagatgattgaaaccctagataatcaaacgcagagctcgattgagttactcaagcatcgtgaggtgactatagaccacagcgtcgagatcgcggaggggaaagttgaggaacgcgttagagcggcgttggattcgctggagaaagctagagactgtggtgatgaagataccggagaagtcgacgacggcgacgggcttttatcggcgctgaagtcgctttgtttgaagatggacgcaagaggattttgggggcttgtgattgcgaggaagaaggaattggagaatctccgggcacagattcctgtggcgtcggtagattgtgtggatccgcgaagtgagtacttgaagctgtatctgagggttttccggggataaaagaggtggtggagagaaag

SEQ ID NO: 10959 - DNA, 1235 bp, Arabidopsis thaliana landsberg
gaagtagacttgtactctacgatccgtgcttggtgttagtgaatagtcaccacagattataggcctgatccaactcataatcatgatgcatcgttagtatacgtatatttttgttgttgttgtaagagcgttaattatatgggtttattatatattaattattatcctattttcattgttgatgtgtcaacacctatgtatgaactcgtattatttatacatgttattaacaaagaagtgtttacttttcagtaatataataaattaatttcgaatattttaaaattaaaaatatacttagtagctttttttttttttggacaaaatacttagtagctaacttatgtttttttgcatatgttttgaatttttgtttaatctatttttctctcataattttctataacacataatcatattagtcaaattaattgaaaaaatcaattatatgtattcttctttttagtcctatagtgtttttggtttacattttaaaattaaatatgaattttattaatttcatgtttatgtctttctacgtacatatactgatgtactcagggacttatcctgctcacaatccaagcccggcgtccgtccttaatgccgccgccatgcaagagctctgccgcattgcgatgcgaggtcgttggtggttcgaaggcggcgtttctgtttgtgggactatatctagtgtctctaggaatcggagggataaaagggtcattaccgtcacacggagcagagcaattcgacgagggcacgcccaaaggtcgaaaacaaagatccacattcttcaactactatgtgttctgtctctcatgtggagcacttgtggccgtgacgttcgttgtctggatcgaggacaacaaaggctgggagtggggatttggagtctccaccatctctatatttctctccattcttgtctttctattaggttcgaggttttataaaaacaaaatccctcgtggtagtcctcttaccacaatctttaaggtaacttgaaaaaacatgttttctattattatcagtgaatcatatttttctttttgtttcctaacatctctacaggttcttctcgcagcttccatagttagttgctcgagtaaaacttcgagtaatcactttgcttccagagaagttcaatcagaacatgaagaaaaaacgccttctcagtcactaaccaatagcttgacatgtctaaacaaagcgatagaggggaaaacgcatca

SEQ ID NO: 10960 - DNA, 1253 bp, Arabidopsis thaliana landsberg
ccgaataaaaaaaatgagtatcgtgttaaatgttaatattaacaagtaaatattgggaaaaaaaaactgtattattttagcatcttttgaagggacatctgcaaaataaaaatctaaacctatagtcgtttcaactaaaaaatctgattaaatttgaactggtaattaagcatattctaaaaatgaaaagtaaaaaacacctaatgctattaattcgcaaacatatgtgtaaagtaaacgtgattcgcaaacatttttaaatctgttatactcaaattttaattaaacgtttttttagaaaccctcacaattatttatgaaactgctacattttggatttgagttttgcaattttctctcatatgatattaaaaggtcaatgaacatattttttaacaccagtcaaaaatagtttgggaaaattcacgtggactatacatacttttcattcttcttgtaattacggatataagctcatgaactcggatttcacgtaggacacagcagaaacattcctcatgtacctgtcgcttgtaccacaagaaagaagacacgagacatgagctgccctgtttctcctttttttttatggtaacgtatggtacaatccaccttcggtattctctcaatttcatattacatttttgtctaaatctgaatccatgttttttatctacggtccctgaaaccttaaattgtgccgttaacttcttttcctctgtaagtcaactctctgtttgtctctacatccatctatctacatacatccatcctttgtggactaaagtttaagagagaaaatgggtgtatttcctggatttggtagctggatcaatcaaaacactcaacagcctcctcacaaggtcagtttcattccatcaattatacgacccgagaactcaaaacaaataaacaatcaatagataatgattatgtttgttgttgtaggcagagtccgagagatctgagaatgcgaaatttaagtcaaagtcagagacaaacactcatgaggcgagagatgaaatgaaacagcaattaaaactttggagagatacagagaagaaggaacaatggaatgatgctcctcctaatgtgaaggtaaagaccaaatcagttaaaataaataaaaatcagctaacaaagacaatatttttgattctttgcctttcaaaatggtatatagaattaagaataaagatcttttcttttgtaatgtttgaaggtggaaagaacaatgatgtagaatgggtaga

SEQ ID NO: 10961 - DNA, 779 bp, Arabidopsis thaliana landsberg
gttctcgccaaggaagcacacgaacgggcggggactatgttaacttaatcctcaacacacaataacaaaaacaaaaaaaaatctctttgccccttttctctgaatcttacgtcctctggatctttcttctctctctctctctcttgtctatactttaagtgtctgtctgaagaagcttgaatctgtcgtgatcatcaagattcaagttctgtctttttgagtctttttcttctacttctattgagtttctcttccttaattgtcggaatcagaatcttttcagatggaggagagagaaggaactaacatcaacaacatcccaaccagttttggtctgaaacaacatgaaactcctcttcctcctcctggttacccaccacggtctgaaaaccctaatctttttccggtgggtcaatccagcacttcctccgccgccgccgcggtgaaaccttctgagaatgttgctcctccttttagcttaacaatgccggtggagaattcttcttctgagttgaagaagaagagagggagaccaagaaagtataaccctgacggctcactcgctgtgactctctctcctatgcctatctcatcctccgttccgttgacgtcggagtttggttctcggaaacgaggaagaggtcgaggaagaggcagaggaagaggacgaggacgtggacaaggacaaggaagcagagagccccaataacaacaacaacgacaacaattggctcaagaatcctcagatgttcgaatttaacaacaacactcctacttct

SEQ ID NO: 10962 - DNA, 1120 bp, Arabidopsis thaliana landsberg
gttatcaaccaagcccaactaaatgactgaaatacccaaactaacataacatattcgaactaagaagaagcaaaaactaagtataggttgtcgttatttattacctcattgattatcacatggcaggcccaatagacaaggagactttaggaaggctttaaaagcccaataatgaagttaaggcctattgatgaaatatgaaacccacgtggcaatatgtagaagaaacggacgtccattcgtgtgagatatgtggaaaacgacgatggctcgtcttcacctaatacttgtcggcttttaccatccaacgtcacatgcttctcttttaggttttttatttatttatacagttatatcattgtttcaagtcagtggctgaggtaatcactacacatcccattcaaatccaatggtattggtccgtatattgaattaaagaaaggtcaaccataactagattttatcttctacaactatgaaactataatggcgcgttagatcaattttttgtaagttggcaaaattacgaaccaaaaattgcaattgaatcactaaccatcgcataattaaattttgcattaaagaaatggttagtgataaaatgatctgtcaaaatgttgtgcttacaaatctccattagataaataaattagtttctctctctcatctatctttttttttggttttccgacatagaatgctatctctctctctctaagcctatctcaaaacagagatcttaggagaagaagacaaaatctttaccaccagatcttttcttcttccttcatctttacaggttgtcacatcactataaccaccgaaactctcggcccaacccaaaaaaaaaaaagcttcctttcgaaaaaaatcaaagctttttcttttatcttcaattctcctccgatgaggtgtaaaagacacaccgtcgatctcagcagcagcaacggcgtttgcgcttcttgcctccgtgaacgtctcctctctctcgccgcttccgccgccgtatcagccgccgtagaagataatcaatcaaagaaatctaataacaataatcatcctccgcttttgattttccctcgctctgtttctccttacgttacccgtagaaaatccgacg

SEQ ID NO: 10963 - DNA, 869 bp, Arabidopsis thaliana landsberg
ttcctactgaatcttaggttaatgttttggatttggaatcttacccgaaatttctctgctttttgttgtttttgcgaagtatgggagacgctagagacaacgaagcctacgaggaggagctcttggactatgaagaagaagacgagaaggtcccagattctggaaacaaagttaacggtgaagccgtgaaaaagtgagttttatgatttcctcgatctgtttcatgagagagtggatgtttaaatttagggttttcttagattactgcttgataacaaccgactaagttcttcaattatctatgtgtttggttagttgcttaactttatgacaattgactaagttcttcaatgctaaaattcctggaacctacccaatattagacggtcatgtgtttatcatcttgtattttctctttgtgacagagggtacgtgggaatacacagttctggattcagagacttccttttaaaaccggagcttctcagagctattgttgactctggatttgaacatccatctgaaggttattacaatgaaatgcaccctacctttgacttttctgccttgcctttcaccattctattaccgaatgatattgtataatttacagaagtgacttctccataagatgttttagttgtccggaaacttttaattatatgtacttcgtctagttttgagaagatatgttggttaaagatattttatactttatcttggtcctttgcttatcatctaactaaattaaaaaaagtttgtgttgaggtgaaagtcttttttatttcctgatataaccgttcctgttttctttgtttattaacgttatcactgcatactttttccaggtaataaacgatatttccatc

SEQ ID NO: 10964 - DNA, 729 bp, Arabidopsis thaliana landsberg
attctaccatatcattcagattcagtaacagaatggtgaaaggcaacaaaaatgaatttttattggtaattaccttcagatggatgttcaaatcctgagtcaacaatagctctgagaagctccggtttcaaaaggaagtctctgaatccagaactgtgtattcccacgtaccctctgtcacaaagagaaaatacaatatgagaaacacacgacagtctaatattgggtgggtttcaggaattatagcaatgaagaactcagtcaattgttatatgttaagcaactaattaaacacatactgctacttgttatcaagtagtaatctaagaatcgacaaatttaaacacacagtagtatacatgaaacagatcgaggaaaccataaaactcactttttcacagcttcgccgttaactttgtttccagaatctgggaccttctcgtcttcttcttcatagtccaagagctcctcctcgtaggcttcgttgtctctagcgtctcccatacttcgcaaattcaacaagctgcagagaaatttcgggtaagattccaaatccaaaacattaacctaagattcagtaggaaagcatcttcaattggaactttggataagcaattgagttctcgagcgagaattttacctgagataaggagcagagttagttggatctcgaaatcgactagggtttcgaaatctctgactgaagaaaattaaatatcaacgctgggt

SEQ ID NO: 10965 - DNA, 1276 bp, Arabidopsis thaliana landsberg
ataaattttgtttttgtaaaaaaaaaaaaaaattgttttctaaggcagaaaaaaaaaaagtttatttgatcagcaaaccaaaaacaaaccaattttcaacaaattctgttcaagggatgtgtggcatgaattttgtttaaaatatttagtatttttaggacaaatacgtcaacatatatagatgaccatatcattttttatcatttagaacgttttaccaaaaaagtaaaattaatttaagaccagtatttggctgcattaccatgattccggagttgaataacactttgtcgttgcctgaagctgagagttgtggatagtagaagagatgatcaagtttcttgaggatgatgaaatctgcgtctatgaacacaagtttatcgtagtcagttacttgccacacacgtaatttgctatagttccactcattataagagtcttttttgcgaaaaaggacttgtggatcctgtcgattagccggagattccatcccgcagcgctgagaccaataagagacttgttggttatggtatgatcatggaggagaatcatgtccttatgcgatcctgattgtcttatactttgcgctaaagctattgccccacaaacataggcttctgacgagtgtagtactgtcacgtaggcaacccgtaagcgacggggtaaggctgtgactgcctttgatgcaagattatcttcatgttttggtctccatgcttcttgacctgtaaatagtaatagttcaaaaggtacacgtgagataatgaatatggaaattgaatagaggtgttgaaagaaagagtagaaagaggaaatttggtgaatcagtagggtttgtggtaagcaggtataaggttgttgaatccctacctaattgttttcaagctaaatttgggtatgattaattatgatgataagatttataattaatgtgtatatatatccacgttgacatacgttattatcttggttgtaataaatatttattaaaggttttccggaaagaatttacagaaattaattaaaagtgttctacaataatataatctaatcattcagcttcaatttgaagtaattgatagttttgtttatcatccacatctataattctaaaagtagaaaaaaaaaatgattttagttagaaaacttttggacacaaaatgttaatgtcatatgtgaacgtacaaaacaatggttgtgtgctatttaaatatgcacaaagaatcaatgttaagacttcagattacttcaacaaaactatatatgcatactgtga

SEQ ID NO: 10966 - DNA, 1324 bp, Arabidopsis thaliana landsberg
cttataattgcgaaaataatttccccttgtgttggttgtgctcactgtctcaattgtcactacctaaggaagccgatcttttgttgttttacgtcttaagtttgcgatttttttggacttacgaaaattaaatgcaaaaaaaacaagaaatagaaagttgacaaaaacaagaaatataaatcttctaaagcttgctttatataaactcataaaatcctcctttttgggcattgacaagttcatctgtctctcttgtcgtagtgaaagagaaaaagaaacaagtttttttctgttgggtaattttctactcgtcattggtttgatcgacattgaactagaaccaggtttgtctccgttcaagcattgcttatagtttcttcccaattagatctgtatgcaatcaaattaaattgctaatgtgtttgctatgatcacagagttactcagggtttcactatcgagtttttttagatctttaatcacgataattagtttgctaattatagaatctaccacaaaatttggtttctttttttctccagaatggctactgctacgtctcaccaatcagtcgtttcatttgcttctctccggtcttctccttcttccacaatctctcaatgtggatttaagatcgattcttcactgagctttacatcgaaaaagacaaacttttgcaagattaaagcaattacatcatcagtttcttatgacaacactctcttgtctccttccaagaccatccctgacaattctcaaaagaaatcaagtaagtgctctgttttttttaattcctcaaatctcactttggttaatgattatttatctaaatacaagtttgtgtgttttgatggtttagatgaagcagctttgatattgattaggcatggagaatctttatggaacgagaagaatctttttactggttgtgttgatgtgccattgactgagaaaggtgttgaagaagctattgaagcagggaagaggattagtaacattcctgttgatgttatctttacatcttctttgattcgtgctcagatgactgcaatgcttgctatgattcaacaccgtcgtaagaaggtaccgatcatcttgcacgatgaaagcgaacaggcgaagacttggagtcaagtttttagtgatgagactaaaaaccaatccattcctgtcatacctgcttggcagctcaatgaaagaatgtataaatatatctggctttcactgtctctcaacatattgagctttgaactgataataaactttatctgctttaaaacgtttttgggatctaggtatggagaattgcaaggtcttaacaagc

SEQ ID NO: 10967 - DNA, 1039 bp, Arabidopsis thaliana landsberg
  unsure (1)..(1039): unsure at all n locations
gaataatgtaccaatgaaattcagacaaaaaagattcaagattgaagcaactgcttctcagatatctgtcgttgacaacactttcttgtctccgtctccttccaagaacaaaccacatgaatctaagaagaaatcaagtatgttgcttttgtccttgtgtcatgagtgtatatatatcaagagaagagaaacattgaatcaagtttttatgtttttgtttagatgaagcagctttgatattgattaggcatggagaatcgttatggaatgagaagaatttgttcacgggttgtgttgatgtgccattgactcagaaaggtgttggagaagctattgaagctgggaagaagattagtaacattcctgtagatttgattttcacttcttctttaatccgtgctcagatgactgcaatgcttgccatgactcagcatcgtcgcaagaaggttacaaaatgatctaaatggtttatagctctttgtcatgaaactgctctattttgacttgtgtaaatttatcttaggttccaatcatcttgcacaacgagagtgtaaaggcgaaaacttggagtcatgttttcagcgaagaaactagaaaacaatctatcccggttatagcggcttggcaactgaatgagagaatgtaaaccaaatgtcaattttcttgtgtttgtttcttatgtacacaaactctttaaaaatgttgatttgaagtttccatcttttgagttaggtatggagagttgcagggtttgaacaagaaagaaacagcggaaagatacgggacacaacaagttcacgaatggcgcaggagttacgaaattcctcctccgaaaggcgagagcttggagatgtgtgctgagagagcagtggcttattttgaagacaatgtatgaatgagagattcttttgttttttcccttattaatgttgtcgtttatactgatgtctaatcttttatgcagatcanaccagagcttgcatctggaaacaatgtaatgatggctgctcacgggaacctcatgagatctatcatatgt

SEQ ID NO: 10968 - DNA, 1127 bp, Arabidopsis thaliana landsberg
  unsure (1)..(1127): unsure at all n locations
ttttctgcaagataaatcacaggggagatggctatacgatgtggcgaaccaaacatatgattcagaaattgtagccttgtaggcaaaatgccttacagttataaccatagcatagctaagaatctgaatgagctcttgatgcatgaaacccatatttctagttccaaagaagccaattgttcttggtcctnnnnnnnnnnnnnnnnnnnnnnnnnnnnnnnnnncatatgttcacaacctaaaagactaataaaacatttgatcttccattgtactggcaatgaaaattagttgaacttacttgtatataatctacatcagggactcgttgtagctccgacacagcaagtgaaccaggtccttcaacgatagcttgagcttgtgttggaatccggagtccggtggtggtggtgtcttcatctgagtcaaacctacaagtcacattgtcctctttgttcacccaactatccacgtcgtcttgatctttcgtttgttcaggaaagcactatacagcatcacatagaaacagagcccctgggagtaaatcattagtgaaaacccaaatgcaattcataacacatagattattgggatgttgtgagcatttaagctcgaaacaaagagggcacaccacatcttcgacaaatcaaagctgatgttctgagaaaactaaacttttcattcattgacgatcaaaagagtgcatcgtcttattcaatgcaatgaataactatttgagttcttaagagaaggtaatcaattggccacataatcaacctataccaatggctaacaaagtcttcaaagaatcaatctcgaatcaaaaagcagtaatagaataagaaggcgagtgatcagaaattaccatgggaatagagggagaggaggatctggatcggcgtcgtctaacagagaaaagctgaaacgattgggattgagaagaacacgaagtagaggaagaggaacgacggcgatagaagttatggttatccgatcggaaaggagaaggtagcaatgaagttgttgtaagaggcaacaaaagcttcaaaggtagagccgaactcatctccactacgaccacgtacgagtttctttcacttgaattggaagatgattatacagagaga

SEQ ID NO: 10969 - DNA, 1123 bp, Arabidopsis thaliana landsberg
ccgaaatggtcgcgttgatgcttgctcgttttaacaacgcattcttattcctcttctgatcattacactttttttctccatcagaggataaaagaatggtgaccattcatatgcattaaacaataataacgaaatcgatgctcacacgacacattagactattagagcagaaagccatcaaagattagagagaggagtaatttcacaaaatcaagcaatattaagataaaatggtcaaactacataatattctccggtagatggatcaaaagagagttattgttttggtttgttaacataccaaagttcaaacgggtttagagtttcatatacaacccgaaatgaaccacaaaagccaaaccatttcttcttagatagatacaactacgttagataaacatcaccaaatcagacggatttagggaaatgtggtgagaggagcttcatgatctctgtgattccgactttgtctttgccatcgaaaatcgtcttcaacttatcatcgcagtgaatctccttcttgttcgccggattctacaatgaggcaagaaatgaatcactcaaacagaaactatgaataatccagaaaacagagaagtttatggtctacattagctgcttgttgtttacattgaacaaccaattcaacatatagacatcatctgtgtgtattacattaaatagactaattccaaaactcaaagaacactacaattccaagttctctaagataatgaccaacacaacaatccaagtaatcttcacaaccaaacccacaagatgcttcatgtatatagtcaaaaccaaacaatccattctcaaccacaagataacatgcattttactcaagatccatgttctacataacaatcaaatcatccgccactaaaatgcttaatcgatttagtttacatgcaacaattccttctctaaagcaaccaaatccctaagttcataaacagatctacgcaaagtaaaaaccttagaaagctccaaaatcaaacaaacctggagattgtgaagcttcacatactcccaaactttcttcagagcggaaccacgagtgagttccctttctcggcgaagctagctagctgctgtgacaccggacgagtcttgaata

SEQ ID NO: 10970 - DNA, 756 bp, Arabidopsis thaliana landsberg
acaaactcggtaacaccatcctcgaacatcacctggaccaagtttaaagatgttaacagaggtcttaattgagaatgattttgccaagttcaatggtgaaaacaagtattggctaattgtaataccgagtgctttcttgaatactcatcaaaatgtctaacgaggccaaaacacctgaaaactcaaaagataaaacattggattagaaaagcatagaatgagtcataaaactaatccacgagttcaaaactcaataaatacctatcactcgtggggcgagataacctgatcaccacaccaatgcaattacgcgaacatgtatccctttgactaagattgttccatgattttcctggagaaacatgggaatccaaattactttcttacaaccaaaacacaataagctactctcgcaaattgagcagaaaaaatccaaacttacctgcatctatgtgtctatttacaagtccattttgatgcacctaaccaaaagtggggatagaaatagagtcacttagacctcatcacacaaatttttcagtgactgtgaaactatgccagggcaaagacgagatatatatttgattcttcttttcagataaaatttgaaaataccttgggcagtgtctgggccaattcatgtgccactagattaaaagcttcatccgaggctatcttaggtttgtaggttttacaccaagctttcttctgaacctacagccccacaatggcagtcttgatctgcaccaactgaac

SEQ ID NO: 10971 - DNA, 754 bp, Arabidopsis thaliana landsberg
taattaatgctttagtgaatgatacgaacacaaatcccatttacttaccgaaatgagtttgtgactattacaggacaaaagttgcagcttgtgcaaagcattttgttggagatggaggtacagtgagaggaattgatgagaacaacacggtgattgactcgaagggcctgttcggaattcacatgcctggatattacaatgctgtaaacaagggtgttgcaacaataatggtgtcttactctgcctggaacggtttgagaatgcatgctaacaaggaacttgtcacgggtttcctcaagaacaagttgaagttcagggtaagaaatgatacatgtggattcacataatcttctgtgctatggttcttaaggcccttctttctgtttttttctgcagggttttgtcatctctgattggcaggggattgataggatcacgactcctcctcatcttaactattcatactctgtttacgcgggaatcagtgctggaattgacatggttagtctcaatagtgattctatcttacacatctatggtatgcgctccatggttgcttgattgttgtgcttgtgcttctgtttaattgcagattatggttccgtacaactacactgagttcatagacgaaatcaacagtcagatacagaaaaagcttattccgattagcaggatcgatgacgccgtgaagagaatcttaagggtcaaattcacaatgggactctttgaggaaccactggctgatctcagcttt

SEQ ID NO: 10972 - DNA, 1504 bp, Arabidopsis thaliana landsberg
  unsure (1)..(1504): unsure at all n locations
gaacatttctctgcatggatcctctccatcaagattgaccaccattcgctaccagagagtctgttgaactattcgagaccatatcaggctgaataacatatggagcataagtaggcgaannnnnnnnnnnnnnnnncggagggtctgagtaatattgttggaatccaacaaaagaagaatcaacgcctattgaagctcctggtatgtaaggattgtagggattgtagggagactgtgcatatccataacttggtgtatagcagatatagggagcattttcattttgcccaccctgaagacccacagatgaatcataacctgaaaaaaggttccagaattttaggcaatttgcaaccacaaaagcaagagtgaaaagtaaatttcatgaaccagcctatcaacctgaagagtaataagcgggataatacatgctctggtcaatgacaaaatcagaggctccctcggtatacattgcttcagtttatctgataaaaagttttgttcaattgactttgaactttgaataaacacctgaaatttttatatataaaaaggtcagaaaatgagacactcatgtaaattaaactaaagaaatcagctaaaaacctaaaatagatatatcagtgaagatacaaatccaggaatggagagaaactcataactagcacggcagcaatactatcagataaaatctgagactccctttctatacaaaaagaagagctctaaatgtacacagagaatccctaatttactagatggacggaaatctaaactatacaaaaccaaaaataacaccaataaaatctcaaaatgcaaagtaacgaaatcaaattaagcttagaagcttacatcaacgtgaagctaaaaatcctaagaaacgaaatcaaataagcttattaaaaaaacaaatccagcttaaaaagcagaaatttgataaatataccagaaatttggcagaattaagtcatacttgacctaaacagttcttcgagtgaagaagaatttggtaccgacaaagagttagagtgacagagagagaagttaggaaagcgagttcagcagagatagttgaaataatattctgccaaatcgaagaaaccctaacacttcgatgagtgaggtagagagaaacgaagaagacgacgagaggattcgctgagtgagaaaaaatagaataacccagaagacgcgcaaagacagattctccgctgttttgttgcaatacgcagcgttttcgactgaagaatctaattaatcctaaagtcgaaaatacccttgaaattgacctttataggccaatggtctagaagatcccttaccagaaacggtaaataaaggtggtcacttgccagatttgtatggcctacattatccaaatatgtactacatggaataaaaccactgaacagtgacatttgatatcgacaacgatcaatttacaaaatttnaataagaattttgtatgtatgactgaccacgtaatctacctacacgtactgag

SEQ ID NO: 10973 - DNA, 3094 bp, Arabidopsis thaliana landsberg
  unsure (1)..(3094): unsure at all n locations
ccccttttagcatcaatctaagatagcccgcaacgtttctttaaaccttttatttttgataaaagatggtttgataagcctgggtttaaagaatctgttcatggagggtgggatgtcccttctaatgaaggagtttctttttctcaaaaagttaaaaattgtaggaaatcaatttctatttggaaaaaatctaattcttcaaattcggagaagaaaatcttggaactccagaatcagattgatcttgctgaagaagacgagtctatctccgctgaagacttattagctttgaaatggagactttgcgacgcgtttagagaagaggagattttctggcgtttaaaaagtcgggaaatttggtttaaagagggtgacaaaaatacaaaatattttcatgcgataacaaagcaaaaacgagcgaggaacaagattataggtttactgaaccaagatggactatgggtagacaaggagggggggattgaaaatcttgctgttgagtactttagagatttgtttaccccctcagacccacaagatttccattccgcccttcgggatgtgccagtcatgatctcagaaataatgaatcagagactcactaaagagatttcaccagaggaagtcaaacgggcccttttttcgcttaacccagataaagccccgggcccggatggtatgacagctcttttctaccagcggttttgggatttgaccggaccagatctagttaaagtagttcaaaacttccattcatctgcctcgtttgatgagcgcttgaatgagacgaatatttgtttgatcccaaaaatagatcgaccaaggaggatggcggaattcagaccaatcagcctgtgtaatgttatatttcaaaagtactcagctctcgtctaaagaagattctttcggatttaatatctgagacccaatctgcctttgtggctgggagactcattacagacaatattcttgtagctcaggagaattttcatgccctccggacaaatccggcttgtaggaaaaaattcatggctataaagactgacatgagtaaagcctatgatcgtgtggaatggccttttctgcgagctctcatgttgaagatgggattcgcccagaaatgggtagacttgattatgttttgcgtctcttcagtctcatataaagttctcctaaatggggcaccaagaggttttattaaaccaacaaggggaattagacaaggcgaccctatttcaccattcctctttattttgtgtacggaagcgttggtggcgaatctgaaagaagctgaatggaatggcaggatccaaggtcttcaaatctcacgcgcaagcccttccacctagcatctctcgtttgcagatgacatcttatttttttgtagagctgacccagctcaaggtcaagagaccatcaatattctccgcattcatggtgaggcatcaggacaacagccaaatgctgctaagccgtctgtaatgtttggtcatgatgtggacaatacgacccagagtaccataaaatcaaacttgggtatccaccgggatgggggcatgggatcttacttgggtctacttgagaaaattcatggctctaaaacccaagctttctcctttgtgagggatagactccaaaagagacttaatacttggtcagccaaattcttgtccaaagaaggtaaagaggttcttataaaatctatagcacaagctcttccgacatatgttatgtaatgcattctattttctaaggctatttgctcaaagttgaatagtgtcattgcaaatttctggtagaaaactaatgaaaatagtaatggtatccactggattgcatgagataagctttgtaatccacactttgagggcgatcttgactttagaacgctagaagaatttaatctagctcttttagctaaataacggtagcgtcttatctgggtaccaaactctctcttgagtagggtcttgagggggagatactttcgatatagtgatccattacatataggagcctcaaatcgtccgtctgttggatggagaagcatcatggctgccaaacctcttcttgtctcgggacttcggaggaccataggttcgggaatgctgacccgtgtatgagaagatccatggattcccaccatccttgtgtggtccgcgacgagcattcttaacataagagatcccctactctatgtaaatgtttaatcgaccaaaacacaaatttgtggaaactagaccgtctccaagcattgatcgaccccgttgatatttcacctcatttcagagattcncccaaacnggtacctacttgagtgatggctttagctggtctcacactaaatccggtatttatactgtcaagtcaggatattgggtcgcgagagatctttctcgtcctacttgtgaccccccttttcagggaccaggtgtttcggcacttcaggcacaagtatgaaagcttaaaactacgcggaagcttattcatttcgcgtggcaatgtatctcgggttgtttagccacgtcttaacgactaacatatcgtcatatgggtacggataaaggatgtcctcgttgcggagaaacagaagaaacaatcaataatcttctatttcattgtccaccgtcgagacaagcattatcgcctattcctacctcagggaatattttccctagaaattccctcttctataattttgtctttctcttttggcgtgggtgagaatttgaaatcggagaggaggtattggaactctttccatggatactttggtatatctggaaaagtagaaaccgttttgtttttgagaacttcaggaacctcccccccccccccccccgaaactttggcgttggcacttaaagaggcagcggtgtggaaacatgcaactctaaaagaagatgcacacatccgcctaattttttttctaagctctcagagcccgcttacccgtctctctgaaagtcaacttgatgcttaatggcatgccgatgactctcttagcgagcatggatgggtccttgttcgacaagactcaatcctccatctcgggctcaagagtgctcgtcgaagcttatcaccgctccatgca

SEQ ID NO: 10974 - DNA, 845 bp, Arabidopsis thaliana landsberg
aaacctatatttaactatctctataaaaactttcatatattcctcttctttaaattaaaacacaaacactctcttctcttcataatcctcatctcatcatcactttgtcactaaatcagaatgaatccatccgagcagaatcacttgtccggtaaattcttcaattatctgtttaaatcaagatcgatatccaattagataagttaataatcttttcttgcctcagtggaaaaaccttcacagacttcttcggggccgtacacaagtccaccaccgattggttatccgaccagagatgcgatggttggtgatcctccagccgccgcagtggagacaaactccaagggcgatggtttttggaaaggatggtatgtttttctttcattcactctcttcatgtgattatagatcatgatggttctaattatccgttttgcaagacattcatacgacgctcttattttatttttaatgatctatcagtatagggtttcaatttcttgtgtgtttctctgttttcctgaattattatggagtatatctaattcgaatcaaactattggttttgaactgcaaatgttttggtaaaattttggtcaacattttctagtcaagatttgttttttttcccaacattttagttgataactagtgtttaatttcttgcaattttgttgtttgttttaaattcacccttgacttacattttatttccccttcaatgacaaaagataatataaaaattcaacttcagagttgtcagctaaaagtttgttttaccaactgaacaactaaaaagaaattaaaccatgggatattacgtacgttgctaaaatacttaatcg

SEQ ID NO: 10975 - DNA, 1105 bp, Arabidopsis thaliana landsberg
cccgttctctaaggcacggttgaggtttctaaataatcaataccctcttcttgatcaaagccttttgcaaccaatcgggccttaaccttatccaaggaaccatctgcatttaattttgttcgaaaaacccatttacttccaagcacattcatatcaggagtataaggaaccaagctccatgtttgtgcctccttgtagttgtcatactcttcattcatagcagcagtccaccccggatgttttaaagcctcagtaacagtctttggttctgcatttttgactttgtgtgtaagaagtccataccagggattaggctttgttatacctttcttggatcttgtcatcattggatgagtggattgagttgaagtagtcactggcattggatgaatgctcgctgaaactgaaacaacaggaagactcgttgaatctgcaagaatactcggtgaatctgaagcatcacggagagtcgttgaggaagctgcagagctttgagcaggagagttgtcagtgtgatccgtcctgttgtcaagtgaagaagtgcctataggtaagagatcaaagctcttcgtacactcagaactctcttcactggcaacagtagacgacactgatgagttcatcattggtggcagcgatggagaaacactagtggtgttagttctgatactgatcacaggagaaggctgcatacctgcagcattttgcatcgagactggattaagagaagcttcaaatcgtggcataaagcattgttgccaaactgaaaataatggtgtaacgccactaggctgcagatgaagataggtgtctgagaaaggaaggactgctcatcaaagataacatgacggctaatgaaaactctgtctgtagtgggaagaagacagctatagtctttatacttctcattgtaacccagaaaaacacacttcaaggattttggatcaaacttttgttgagcataatctctgagagtaggaaagcaagcacatccaaaggttctcaaggcttgataatctggtttattcttgtaaagtagctcatagggactcttagcattgtccaaagcagtatgaggaagcagattaggggatcctctagatca

SEQ ID NO: 10976 - DNA, 1124 bp, Arabidopsis thaliana landsberg
tgtttattgtaattacacaactactgaaaacatgtgagtaataaaaaaaaaaagtattctgtttcttttttttttttttttttttaattcataattttccattcaactaaaaacatataatggcaaaagcccaaataaaggccacaggcccaagacaggagaacaaacctgctcctgcaacaaacaaaagggaagacgaaacctgcaacactagaaaaccaaaacaaacatccctgaactagaaaagagaaaaccaagttcctagcaaggacagagcgttagggagatgcgccgtgctgcgagacaaaggatccagacgagcgcgaatggtgaggtggatgtccttcaagatagactcagtagagcgagagacgccggagtggagacgttggtttctttctctccaaattgcataaacacaagcctgaaaggaagcctgataatgagacaaatatttttatcccttgagggagataagagccagataagacagtccattaactgggcaggaggattaaggttggttgaggctgtaaaaaacctccaattgtgttctattctagaaataaacatacaattgtgttctatcctaggaattatttctaaaataaattatgcatcctgaaatcgttttctaactttgatagcatatcgtgcgtagcatgaaacgaccaaatactgaaacacacacatacactaacaatttgatggaaatttacaggtacccatttctccactatttttggagttatacatgtatgatacatctttattactttataatctttgatacatgaatgaagttcacctttttgaataaaaagattgtgacttattttataatcagtactgctgtgctggctggaccggcccaaagactaatcatgtctaaagcccaataaaatttgatgtccatttacaatcaataaacatagaaaatagttaatgttttcggttgccaaggatcgaaccatccaccgtctacctataagacgtttctgtaaatattgttctctttaaaattgatataaaatttgctgcctaaaacatttgcatgctgagctttaggtatggaccaaccctgagtattgaaaggcaaatgaaaaatacgaagaccaccgtcc

SEQ ID NO: 10977 - DNA, 1240 bp, Arabidopsis thaliana landsberg
atttatttattggaaatttcctgcataatcgcattagaaaacgtcaatatgcgtcatacctttcaaagcctaaaagtatgaaaatcgaccgaaactacactagacttgtcatatggatttttggggtgaggtgatgagcagaagagccattcatagttgctttgttcaagggcgaataagagacgtggaagagtcgaggacctggtcaagaacaactctgtgaaatcttgacagccaagtatggacctccgagatcaattgggatggaatatataattttttctctattcatgatcgttgcatttgttcatctgacggaaagacgtactccattatatagggttcttgtctctctcatgggagacatgacgagtgatcactatagtgctttacctcaatcaaaagtcaattacttaaagatatagaatgttactaattttccatgtctacaagtttctgtgtctcaagcattcaactttagctaagtcatcaagttacaaccagaagagacactaaagtaaaaatgttgaacagagtgtctctgtttaacctaaacgcaaataacaaaactgtctagatgcatctcactaccatgctaatgctcagaacggtgtctaatcctcagcttctgcaaccaggatagaaatagtcgataccattttccttgatcctgaattgaaaattctgcaacttgttcctcgagcttcctctacctgagttgcttatccctttgttcagaacagtcaactgtatatgcaataagccaccaaaagtcaattagacaccaagaaaataacaaaggttcaattaatgatttgaggaaaaagagtcttgtgataacttacttggccatgtacatcatttgctaaaccagaggctaaaggctctgcctttatcacaacatctgcaaggcataccatctgtagcaaaaatgcaggtctctccatgctcgcgtatatatctttatgattgaggatgaccaatgaacaattctgtcttcagagaaaaataaaccgttaaagactcacaaagaagaaaaacacaataatctagtttcagaaggggctatagcctctggcttacgcgtttagaacttaatgcgtggcattcatgcatgaaggccaatgcgtgaactgagctgctgtcggtagaagcaatttacagctgagacatgtgatccaccataacagatatgtaaccacttgttacactctgtagctttcgaacggtatgttgcatc

SEQ ID NO: 10978 - DNA, 1344 bp, Arabidopsis thaliana landsberg
atccctccagtgatgctactttgttctccagttctttacctgttttccctcgtggaaaacgtattaaccgaatcccttactcggttatatatggctttcttctctcttttgctgacaagttttacttcttttgcagtgcaattgagtgataacagagatggtttctcactgatagacgatacggctgtttctcgcacaaacaagtttaacgaaagtgctgatgactttgaatctcattccattggaaacctgctccctgatgaagaggatctcttgacagggatgatggatgatcttgacctgggggagtttccagatgctgatgattatgatctttttggtagtggaggaggaatggaacttgacgctgattttcgagacaacttgagtatgagtggtcctccaaggctatcactttcaagtcttggtggaaatgcaattccgcaattcaatattccaaatggtgcaggaacagttgctggtgagcatccttatggtgaacatccctcgagaacattgtttgtccggaatattaacagcaatgtagaagactctgaactcacagctctctttgaggtaacttcaacaaaacttgacctgacactgttggattttttataacaaacttactctacagacactgatgggttaacttttttgtgatatgtggcagcaatacggtgatattagaacgctctataccacttgtaagcataggggatttgtcatgatatcttattatgacattcgttctgctcgaatggctatgaggtctttacagaataagccattaagacgtagaaaattggacattcacttctcaattccaaaggtttgctgatagctctttgttaacaatgtcatcgattcttagttgcacccctagtttgtttatattgagcctgtttcctgtgtaatttgtaggataatccatctgagaaagatatgaatcaggggacattagtggtgtttaacctggatccttcaatttctaatgatgacttacatggaatttttggtgctcatggcgagatcaaagaggtgatagatatcattctgtttatttgatagctttgaactggtttggaagaaaaacatccatattaagttctgttttcctcatgaaaaacagataagagaaacaccacataagaggcatcacaaattcgtcgagttttatgatgtccgcggtgctgaagcagcattgaaggcattaaacaggtgtgagattgcaggaaaacgtataaaggttgaacctagtagccctgaaggagctcgtcgaaggtttctttctttcttagatctgctacatgaataatgaatgccattacatttcttacatct

SEQ ID NO: 10979 - DNA, 1907 bp, Arabidopsis thaliana landsberg
tttccttaaatgagtgtgccaaacattttttatttcattgtcggttcgtcccggcaattttgcagcaatttctttccatctaaattaataagaaacaaacaaaaaacaaatcactttttaaaaacgcgccccacgtataatagtattgtatagatttcatcaatttcttattttatattgctctttagttgctcaaaaacagatgaaaacaacaaatcaaaagcttatacatgccatatgttttgcattgatcaaagtgcatatcctttttaaatagtaatattgaagatcttgtttctgtttttttttttaaaagtatatttgaaaacaaattaatgaagtctttggtttggtttgagacagaggaaatcacggacaggaatctccttaccacccccacggtgttaaaatattttgcaaattgttacataaataatcatttagtaacttagactgggtaatactcacttctcagagagtcagtgtaatgcaaagtggaaaaaggaaaaaggaagttgacattacaaaaaaaaaaaaaaacgtcgaccctaaaactgtttgatttctcaatcactctttaggggaaaaaagaagacaaacctgttgcctaagctttcatgcagattgataatagtttgttcttcttgaggagtgaaattgccacgtttaatgtctggtctaagataattgatccaacgaagtctgcaacttttcccacatctaagtaaacctaaacaaattgcacaaaaacaccaaccaaaattgcttcattttcaagaatcattaatagataatcaatatacaaagtaaaatgtaaaaaggaaactcacctgcttgttttgggagagctcgccaattagaatgaccataaagatgaatataattgatcaagatttgatcttcttcaggagtccatggtcctctcttcacccccattttctcacaacatggtgctcttcccattcttttttccgttgccctctcaagaaaaaaaacactcagaaaaagaaaaagaaaatggtcttcaattgagtaaaatgattagaaggacaagtgttgaatgggtatgaagtttatgagagctaaagaagccaaatgcttgaaggaagtatgcgatgtcgacgtttagtgtgttattatatatacacacatattattattatataatcacaatgcaaccgtgggacaactccaagttgaaatttctcatactaattttgatctacacagtccaaagtttttaacctttttcctttgaactttttttttagattcattaaaaaaaaaaacttttttctaatgtattttaatctgttttgatgaggtcgacgaataccactggagcctcgatgtcctgtaactcctgttgtgtaaagattgcctataattcaggtgccattcagtagtaaaatatttaacggttaatcagttcgactcaggccaaaaggattctctttatatatcaccagatagggtccaaaactttctatttcgggatatttgcaatatttttgagatgcaacacgcaaccagggaaacgagtgtgtgatgagaagcaaaacgcaaacatcactctacttatgcaattattgccctgaattatcatgttctagggacgctagtttcactaagcatatgagtcacatgattcatatgaaagatcgacatatggtcgacctatgtacccacttcaaaagttaatgacccgatatctaaatctattattgaaaaccactgttatacaagctattattgaaaaccactggtatacaagccatgatccgttttcttgattggttatgacaaatcttaattactattaaatatatctatcatatatgtttcatattctttttggaacaactttattggataagttggttttgatatgtagtcttttttttttt

SEQ ID NO: 10980 - DNA, 1529 bp, Arabidopsis thaliana landsberg
gagggacgcgatctgtacacggttggaataattttccaagttttcaggcaattttgctttaaactttctgccggtaaaaatacttataagatatgaattatgaacaacactacacattttgcatggttttttatttaatccaaaatttttatttttacgtctcaagatgtgtttgagaagttcaaggacgaaaatgggaagttcaaaggacacttggtgacagatgcatacgggatgttaagtttgtacgaagctgcacaatggggcactcacggagaagacattattgacgaagctctcgctttctcacgttctcatttagaagaaatttcgtctcggtctagccctcatctcgcaattcgcatcaagaatgctctaaaacatccataccataaaggcatctctaggatagaaacaagacaatatatctcatactacgaggaggaagagtcgtgcgacccaacattacttgagttcgcaaagatagattttaatttgctgcaaatattacaccgcgaagagcttgcttgcgtcacaaggtaacaaataatatcatggccactcaacatatataaacatattgtcttgcataaattgttgaaattcttttcattacattccaggtggcaccatgaaatggagtttaaatctaaagtaacatacacaaggcataggataacagaggcatacttgtggtcacttggaacatatttcgagcctcaatattctcaagcacgagttataaccactatggcactaatcttattcacagcgcttgatgatatgtatgatgcatatggcacaatggaggaacttgagcttttcactgatgcaatggatgagtatagcatttgtaacatataatttagggagtattataaagggtaaggttgatttttttttggatggttttgacttctctctaacgtaggtggcttcccgttgttcctgatgagataccgatacccgatagcatgaagttcatttacaatgtgacggtagaattctatgataaactcgacgaggaacttgagaaagaaggaaggtcagggtgcggtttccatcttaagaaatcagttaagaccaaaagaatcaactttaagcatattatttctctatatatccaaaactaacttgtacgcttcacaatcagttgcaaaaaacagcaaatggatatatgcaagaagcaaaatggttgaaaaaggattacattgctacatttgatgagtataaagagaatgcaatcttgtcttcaggttattatgccttgatagcgatgacattcgtgagaatgacagatgtcgcaaaacttgatgcttttgaatggttaagctcacatcctaaaattagggtagcttctgagataataagtcgattcacagatgacatttcaagctacgaagtaagaacacgtcaagtttttggagtcctagtactatatatacgtatttctcaagttgaatacatttggtatttgtaattgcagcttgaacacaaacgggagcatgtagcgactggcattgattggt

SEQ ID NO: 10981 - DNA, 1147 bp, Arabidopsis thaliana landsberg
gactcctctgagcttgttcttggcaacatgaaactccgtttgcaccttggcaacaacctcctgtgaaccctttctgctccacaggttcgcgttcttccaccattgcactgtttccgtttgggattttatgctcatcctctttctcagcttcctcaccctcgggtcttagtctcatctggcctctgaaatagaaattattttcgttaaacaatgttggtcaattgaaaacacagcgttaaatgaagataagcaatcagacaaggtatgaacctgaaacttgttgactatggttctagaaataaagtgataacaatattttattagataaaatgggtgagtaaagggttatgagcttcctagttgggcaaacaaaaacctcagcgaaagtaccattacacgcagaaacttcttgactacattgcagtatcatactagttatacatatacggagttgcaacattcattagcaaacaatagtttttgtctgttgaaaaaccgtttcagttcaaacacgagggtatatgtctagtgtaaggtttactacaaccatggatatcgatataaaaagtacaatgtacacgaggaaatgtaaagctgttttaacagagacatatctgcaacaatctagaaacaagaagttggaaaacagacctggaaaggttttgaatgatttctccttttgcaatatgctgatcaagcattgcaggcacgtcatcaggagtcacatagccatacctgcataaaaccaagatcgttatgcataatatattacattcaattacttttctgaattatatatgcaagttgaatttgacattttcttaccaatggccagaaacatttccagctgaatcagggctgaagacaatcaaatttccagcatacttgtgcccaccgatatgagaacacggcaaaacaaagattttgtctgaaagtccacgtgaacttatctcctgctcgaacttctccataagaactggtccacaaacaccacatctcttgtctcggctaccatgagcgcacacaaacacaaaggaaccagtcaactcttcctgaatcccagaagtccatgtttttcctttcacaagcacatcttccacaaaagcatccacatctgtgtcctgaatcgccctttaacaataacaac

SEQ ID NO: 10982 - DNA, 642 bp, Arabidopsis thaliana landsberg
tttgttaagatcataaatctgtttcgataattgcgaaaagtgtactaaagtattaatgtcttaatttataatctgagtagaaaagtcttgtacgtaactccttacacattaatagatttggtatatatatatatatatatatgtttttcaaaacttaacatatagatttatttttttgtcatctgggatttatatattgatcttttgaagtaaccaaaacatcttacaaataccggaacgaagctataccaaaaagagcttccaactacactaagtcatttatagaaacatgacctatacaaaagaatgagactcccaaaaggagcccatgaaagcgatcagatagaggatagaactctctcattagcaaagagatcgttgagccacgaggggtgactagaggcgatataggagcgaattctatatcccttagaaacactttgcgcgatgagacgagctcctctattcgcttggtaacctaccttatcaaacttctaagactgaaacctttccaacaaccccaaaagttccagcgtttcccctttgaaggatggccaagcttttggccttagaacacatcccaccaaagaagcatcatcagtttctaaaattacctttgtgataccgagacttagcagactt

SEQ ID NO: 10983 - DNA, 1056 bp, Arabidopsis thaliana landsberg
  unsure (1)..(1056): unsure at all n locations
tattgtggtgtggtgaagaaaatattaaatctttgtggttatttagttatggaacagttgcataaagaagatatgagactgaccgttcaaagagctcctcaatggttttgaattgtctctcggacgaaagaagtgtttctcgaacattggtaaaagtactgacgtagcttttaagcgactcgaactctctcttcacacgacacaactcctcttcgttttccacagctttttccctctgcctcatcgtctcttcaactaattcctcaatcctttcccgcatttcgtttagaacactattagtcccataagcaaatcgttccatctcttctaacttcacggacaaattttcgatttggatagtcttcctactgatttcttcctctcccaaaagtgccctctccttttgaacagcagactcagattctgctactgtaaccctcctcacaagagagtccagcacatcagtaaccatctctatggactggatcatctcattagtataggctccatcctctacacccaaggaaccactgtaccttctagtttcaggattagtgttcctagccccgtcagaagaagatgaaccaccatctttctcaacaaggttcaatcctttcagttcttcaatctgttccacaccgcatgacacatttgctagatcatcaggattggccaagactctagcttttgatctcaaataacgcaacatagttgcagtcgatctgaccctacccgaaagaactcctaactcctttctggcatcttcttctgagccaaannnnnnnnnnnnnnnnncatccacaagttcagcttctaaactatctacctgaaaccggcgagattccaactcactcctccatatctcagtggcctccctggttaaagacccttgtgcagatacatcagtctcctctttaccagccattcccagcctcttcagcctacaacaagttagaaacaaaaaagtttaaaaccaaaaccaaagttaaaggcagatctagcttcaacatggcttagctcataaagatgattttaaactctctcaaattcagaata

SEQ ID NO: 10984 - DNA, 405 bp, Arabidopsis thaliana landsberg
  unsure (1)..(405): unsure at all n locations
gcttcattgaaactcattcaacgagtgccacgacgggtatgttggattttggcgtctctaaagagcgctctactggaactaaggactaccagacactgccaactacgacgtcatggtttctggcgatgatacaaggcgcggaagggtttgtcnagaaaaacactgacactgcttccaagacgcttatggagatgacactgcagatggagcagcttcttgatctcgctgctggagccaccgatgctgctgacgacgacgatgagaacttacatcgtcgcgcttgaaatttgaaactaagttgggttttttttcgggtttcggcttacttttgttaaaaaaaatatgaatggattcaaatgacatatatataaatttttatatgtcactgtcactgataattgaatc

SEQ ID NO: 10985 - DNA, 808 bp, Arabidopsis thaliana landsberg
ggtcgactctagaggatcccccctgaaatcattataaacttagcaaatgatagatctcaataagataaacaagttagcagaagaaactaaatccaaattctcaacacaacaaccagaaaatgcaaaagaaatctaaaaaaccctaatatccagcagacaaagctaagatcctttgggaaaaaacataagaggtctatttataggcaatactaggatgccttaactgggaaaaagacaaaatgggaaagtcggcgctgcaccactcgaaccttggccgagtaagaaagtcgagcagcctcctttggtcacatcactcaggtctaggctgagcagcttcccttctacctcatgtgcaccactcgagcttcagccgagtgtcttggccgagtgtagtccttgcttctcccttgtgtgctccactcgatctccagccgagtagaaaagtcgagtatactccaagtccttcctttgatcccacgaactcgagctagtccattccttgtgctagaaatgtccaagttgagtccaaaagtacttgattcacctggaacacactccaaatgcaagtatgctatgcaatgcaatgcaaaaatatacaaaggaaggaaaagagactaagaatacatgaaaagagacatgaaactatgctaaatgcatgaaaaacaagggtttaaaatggttaaaatctagtgttatcaaagcatagaatttcgagttcagaaatacaacaattccccctaagaatctggtttcttctaggactttgacgcagatctatattttaagaactaaatcaaattctagggat

SEQ ID NO: 10986 - DNA, 825 bp, Arabidopsis thaliana landsberg
ttttgatgcggggaagaacatcatctctaaagttagcatacgtattgaccattggttcctgcataacaagtacactgacattattcacgtgatatagagaaatatccagaaattgggatctatgttattatagtcaaacaaacatactgaacaaaccaacagtgtggcatattgatacgttataaagaagcttggtacacagatgttaaggaccaaaacataattatttaagacaaggagccagacacacaccgtgctactcatgccaacatgtgcttcataaatccttagcgacttaggtctctttggttgaggatgtttgaatacatacttctcctgaaaagaaatttggaaccgttgaaggggcaagcaaaagtatatgttgatgtttttatattaaattgtaagcatatattaaatggaattgactgagaaaacttatcgataaatctaaatcttcaaaaatttcagactagcactggcacaattgttttccacaaggtaattattcaaaagactgtagaaccttacctcttctggaggatcatagtatatgccattgaatgggatttcacctggagcttgcaccgagaacttgatccaagcaggaattgagtctttaatgccagatggagtatccatacgaatctggagttttgtgcataagaaattacttcatcgtcattacataatattctcagaagcttctaaccaaatatctgtgtaactcatagcaatattatccacatgtacataaatgataagcagaatatttgttaaggcagtgtagatacaatatgcatttttgggatttctaaccagatt

SEQ ID NO: 10987 - DNA, 927 bp, Arabidopsis thaliana landsberg
taaagattagggtatacctcaggtatagacttcaatatggaagagttcctatctgacataaatgttaagtcttgcccatcgttaacaatttcactcagctgctgcataaaccatctccacgactcatccgtctcactgtccactattgcaaaggcaatgggaaatatttgaaaattggcgtcttggcaacttgctgtaagtaagcatctcaaatatttcccaaataggtgtgttccatcaactactacaactcgcctaacatacggaagtcctctcacactagcccccaaagcaacaaacacatatttgaatcggtcatcaccattatcatctctaaccgtttctaacttatacacagttccagggtttgcaagttttaagacatgtaggtacaccggtaatagtgcgtaagaactctcgtctgtcccttgtgctgtcactacagccaattctttcaccttccacgccttccagtacaaaactctaacattgtgctcagtgagaatacattctggcaggtctcttgctcttggcccacaataagcgtttgcataatttgccctcaaaagagcagcaacaacctttgatgtagcgtgtttcgaaaacctgctacgcgtttccacattacagagatgatcaagcttagctttactcacctcatattcttctgaatcacctactttatgtgcaaagactctccaatcacatattcttttgtcatcacattctgatactagatagtctttctggtaccttgtaaatttgaatttgaatacgcagtttattgcataaattgacaatgccgttttgaaatcttctcttgtagcaaatgttctcccaacatacatattatcattctgctttgataaggccacatgagctgctttcttgttcatttcctcgtcagcaaacataggctcaaggtcc

SEQ ID NO: 10988 - DNA, 642 bp, Arabidopsis thaliana landsberg
ctacctatgcaataaaccgagtattcaaattcaaatttacaaggtactttaatttgtacttagtagcagaatgtgatgacaaaagaggttgtgattagagagtctttgcacataaaattggaggttcagaggaatatgaggtgaggaaagcaaaagttagatcatctcagtaatgtggagatggggagaaggttttcaaaacacacaacatcaaaagttgttgcagcccttttgagggcaaagtatgcaaacgcgtattatgggccaagagcaagagacctaccagaatgtatattggctgatcacaatgtcagagtttcatactggaaagcgtggaaggcgaaagaattggcagtagtgactgcgtaggggacagacgagagttcttacgcgttgttaccggtatatctacatgtcttaaaacttgccaactctgggactgtatacaagttagaaacggttagagatgatgttggtgatgaccgattcaaatatgtgtttgttgctttgggggctagtgtgagaggacttccctatgttaggcgggttgttgtagtggatggaacacacctgtttggaaaatatttaagatgcttacttatagcaagttgtcaggacgccaagttccaacgattactattg

SEQ ID NO: 10989 - DNA, 851 bp, Arabidopsis thaliana landsberg
  unsure (1)..(851): unsure at all n locations
gattccgcaacaaatctttcaaggctatgtcattatgcaaggacttacattaaatcgtcatcgtggtcaaccaggttatcccttcgctactattgatacaaaacttgttgtcacagtaactggagatgtccttaaggttgacagaatagtggagaaagagactagaatctgcagatttttttacgtctacaaggtttattcatcggggtcctataagaaatatgaaaaagttgaatctttgggggacgaggcaattcttttggatctaggtatcactatgctcgccaatgacactgtgggactcctaggaaattccatttatttcagtggtactcatacaaagtcgaaggtcattaacgatacatttatcttcagtctcgagacacagaagatggatccagtgcacaagtttgattgttcatcagctcaactctctagtgctcgatggttcttaccaagttcacacaaacttgattgatttcaactttcttcttcatatgttatttttctgattttctctaatgaataatgatgacgtgtttggtgttttagttattataaattaacaaaatgataattgtaaagattgatgaaatttttttgtcaaaagaacgactagttaattgggccgatgaagcccatagaaacgacctgatttcttatgaaataaaacccaatgggtcacattacaaatgcaatcctaggttttaggttaagaccttgactcttgtaatataaatacgtaacttctgtgctacgacaaaacatttcaagtaagcataaccctaattctcaaaagcgtttcagacgagattcatcccatccctggtcngagcttcctctagatctct

SEQ ID NO: 10990 - DNA, 489 bp, Arabidopsis thaliana landsberg
tctttatagtgcttgattgttttctccacctcgccactccgggagtcttgccttaactctatccttggctatgcttttcattattatcatctttacccttgtcacctctataacttactttgatgcttctcttatacatgccctttaaaatctccgctcttccatctcaatcttagagttgtattttaactatttttccatggtcgtacccccttctttgtcacttgcgagtttttaactccattctttgttatgcttttgtttgttatttcctttactttctcatctctcgattataccttggtgattacattatgtttgttatctaaaatctccattctcttatctcaatttgagagaggtgttttacttatctcacccttggccatattctcttctttaccgcgtgcaagccttgtcctagcttcattctttattgtactcgtacccttggtccttttgcaccttcaccacttctcttatgcccct

SEQ ID NO: 10991 - DNA, 1002 bp, Arabidopsis thaliana landsberg
  unsure (1)..(1002): unsure at all n locations
cccaactagtaagaggatgtcgaacttctgataattttgtgccggagctccatacggtcctttgatgaatatttttgggaacctggtaccgaaaaacgacccgatcaaatcaaatttaaccgttgatatgaacatattaatctttttgcaaaataatatgcatttagatggtagttattagtctagtattcacttacaagacttgtgattcttcaatgtgaggattcacacccgcagctcttgtttccatcctcataagactgtttggtttaggtttagcggctgcttgagtgggctcgcatgtctacatacaaacagaaaaaaaaaaaaaaaaaaaacttacgcttaaagtaataatgacgttctttaacctttgataaaacagctataatgaaatttagttataagaaaaaaagtgacaaggattacctttgcaaatctgcttctaagttcagtggtccaatctcctaaggctctaatgtgaacacttaaatagtcatctcctggtgcagaagtgatggagaatggatgcctaaacaataataaagtaaaatcgatatcacttcacttaaagaatggatgatgtaccttaatcaagtatgaagtattatttagtttaccattcaaattttgagagatccggacacttgacaaacatgtacatgccacttttgtatttgaatccgggaggttttgtaacataaagtgcaagaacgttccccgaatatacaatagcctacatcgtaaaacgaacagaaaacatgaaagacaacaaaaaacaaattaactaaaaattactatatataagcgaaaaaacactaattacagtatattagtttcgaaatgttatagtttactcaatgttcatatcgtagttataagtctataggagattaagggtatccagaatctaataaatattttgatcaattaattaccttctctagttaccttaatacngttgacacgatggctgtgatcttgaaggagacgtgagaatag

SEQ ID NO: 10992 - DNA, 705 bp, Arabidopsis thaliana landsberg
ctttgtcctcttgtctgtgtgattgctaatctcaaaactgatcgtgttttgtgaaatcgacatggcaggaaactcgatttggaagatggggatgcttaaaatctgcgcaaaatggtgtcgcaatacatcccttaagactggcataagtatttcattgggataaatgaagcgttgttatggatagttttgagttgctaaaaagccaaagatctaatctcaagtcatatagggattacatttccttgtagctcttgaagtttttgctcccttttttgtttgttccttgtaccattttttcttaatacgagagataagaacttatcattttgaggctctgaagaatcaaagaggataacagttcccaattttttcattctctcagtaaagctttttgtttcgttttcccaaatgttgaagataagtatatgaaaaggcaaattattaaaccaagatccatagtgaacacagacttgatcgtaatttatccggcgaaaagaagattgcttttccaaacaaaaaagacaagagcctactacttgaatgaattctcttaagtcaagcttagaatccctagagacaatttcttgatgtctcttggtctcgttgctgctccattctgactaatagcttcaactggataagaaaaaccagcagagaattgataagaaaagtccaaatatccaaaacatacatagaataccacaa

SEQ ID NO: 10993 - DNA, 861 bp, Arabidopsis thaliana landsberg
tatgccagtaaaggagtggtctttatcttacccagaactgggtcaacacattccttccctgaacatcttcagctctaagacggatcttcctgtaggcattatcctcatcattttgtagatcagcaagagaaacctcaaacaccctgtgtttcagtccctcagaggcaatctgtttaaattaagagatagcccagataacaaagtcagatttgtcgaaaaggaacacgctcttttctatcacaaatgcaattcctattacttcaataatgaaagccaccaagagcaaatgcccatctctacacctcacattcagcaaatgacctatgccatgagataactatagactcaaaacctagaaagctctaacctttctccagtatagtaatagacagacataagacattaccttggtaccctgagtcctggaaacaagagtcttcccaacattcctgttcgtgaaagaaccaggagccttcacgtcataccaatccttcttggagaagggatcaacactgcaccatccataacaattcaatcacgaacactatatacagattacaattagagatctgagaattttattcaggacataggttacttacgccttcttctttcctcctttcctaccctttgaaatcctgttgttcttcctatatgatcaaacaaaaaccttaaatcagaacatgatatactcgaagctatgatcaaatgagagattccaagtcagagtctggagaatcaagcaaggaatatagagatgcgaagagagatttacccgccagccatggttaagggtcttctagatggtgtagcgaaaacgagctgcagtgaggaagaagaagaagcggcttcaactagtga

SEQ ID NO: 10994 - DNA, 959 bp, Arabidopsis thaliana landsberg
aagtgaactgccaaacacatcaataagttcttatccacagtgggttatgaagactgtctttcttatgctgctgcaaaggcttgttgccaaggggctgaaatcttatccggaagcccatcaaaagagttttgttgtcgggaaacttgcgtgaaatgcatcaaaggtatgtcgccatgtcgattcttcaaatttcttatcatagttaaaagttttggtgttagatcaactgttaattttttgtttcctattaaggtcctgatgactctgaaggcacggtggtgactggagttgtggtgcgtgatgggaatgaacaaaaggttgatctgttagtgccatcgacgcaaactgagtgtgaatgtggtcctgaagcaacttatccagcaggaaacgatgtgttcactgcacttctattggctttacctccacagacatggtcagggatcaaagaccaagctcttatgcatgaaatgaagcagctcatttccatggcttccctcccaactttgcttcaagaagaggtaacgcttttaccaattctatttatcggtaatcatcacgagtcacggttctctctctagtggaaaatgggatctttgtacttgagatatataagtcttttggaaaagaaacaaataacttaatctaagttgagattgacaatgactattttcgagttcatccttagatatagctaaatcaaatgccgaatctaaatgagtacttggtgaaatgaatctgtgaagcagatgagtaacgtggtgaatttggtgtaaatgcaggtattgcatcttcgacggcaacttcagctgctaaaacgatgccaagaggaacaaggaagaggatgatctcgctgctcctgcctattagttcattgtcccaaatcctttctcttccccatttgaatcccacgttctctacacttaattgtttgaaagtctttttattctctgcacgattca

SEQ ID NO: 10995 - DNA, 1187 bp, Arabidopsis thaliana landsberg
atctacttcatttgaacttcaaacaaaaataaaaagatgaaaaaatggaacaataaaggtattttttaggtaggtcgcgattattagattttggtttacaagaaatcttgcttctgagccggctggaattgatcaatgccaagaaaaaaaattcaaatgaagattcacataaccagaaccgaaaagtgtatagatcaaagaatccacccatagtatacatgcaatttaacaactagtagtatccagcacatagaattctcgtaacaaaagaacgtttaggctacgcacacttgaagataataaggggctcaaactgtaaacttggaaagctaacacaaaagacttttcagcacaaggataattcgagatagatgcttgaaggacagatagatagaatatgaacataccattgggaatatctttgagatatgcacctcgcccctgtaatatccaaaggattattataaacatatctagcaataaagttctactcagctcaggaaagttttggcaaaccttttcaacacggaattctttcgaggagtctttatcaatcaatgcaacaagcctctcaacagatttccgctcacgcacagggcgatcagagaaaggagtcctaggctctgcatccttttttacttcctcggttttattcttctcgcgaacctttcctccagaactcgtgcctttcccacgctttttagaacccttgctctcttctttttcatcttctttatcatcatttgtctcctctttctcatcttcctttgcatctttgctctccactttttcattgtcgttctcatcctcactcccttctttttcatcttctacctttgactcatccacctcagcctttgccgcctcaacttcctttgttttattttcttccttatcttccttttcttttccttcaacattctccacttgtttatttccatccccattctccactttttcatccatatctgtccctttgtcttcatctaccagtgtcccttcctctttgatgtctcctgtattgccatcttttgttccatttgctttgtcagcttcatgttgtatgttctccttcccagcttttttgtggtctgcctcagtaatatctgtctctttggtctctttttcatcatctttggcatagttattgtctttagattccacgttttccttcattacagtatctt

SEQ ID NO: 10996 - DNA, 884 bp, Arabidopsis thaliana landsberg
  unsure (1)..(884): unsure at all n locations
gtacattcttcaccaaaaccaaatgacgtattgctgttacatgtgagattttccgtcgaatctgttgttggaaagatcaagaagttggatgttttttagaccacacaactggtgaggaatctggcctgtaaagttattcccccgtaaaagaagaatgctaatgttttgggtgttgatgaactccgaaatctttccagagaatctgttgtttctcagatcaagtatctcgacatttgcaagcaatgtgtctggaatagtacctgataacttattgtcttgtaggagtaagacaaccccgtttcttgaatcatggtgtggaggtatgcccccggataaactgtttgctgataggtctagcagctggagacttgatttgttgaacaacgacataggtatgtcacctttcaagaagttgtctgaaatcagaagtgcagttaaggatggaagttcgccaatccaacttggaataacacccgtgagattgttgtttgacatgtcaagcagttccaagtttatcaagctccgcaaaccttgtccaatctttcctgtaaagagattgttatccataaacaaccccaatatattagtaaagttggttgattctggaaaaatctctccacttagtttgttatgtgacagcttcaagatcgccatggaataacaaccattcacaaaacttcttggtagcttcccatggaaactgttgcgagataggtccatatattggataccattcatgttaccaagagaagatggcaggttcccctgaaaatcattcttggatatattcagataccgtaaatgagcaaagatccagccgatgttctcaggaaaaagattggtgagtcattagctgacacatcgangaaaagccagatatgagc

SEQ ID NO: 10997 - DNA, 917 bp, Arabidopsis thaliana landsberg
  unsure (1)..(917): unsure at all n locations
agattcgtcttcccatataatgagattcccttatattttacgtataactataagcggatccagaattaaatccacttatattcatatactatatcactttaaacagtacttatcactaaaaactatacaattaaatgttgatgttatagtcacgactctaaattcttattggctaaagtgtgtgaccagggtttgtttttatatatttaaacatatttattcatgcctccaacatttaggcatctgtagtttcgtttttaatagtaggaagaagaaaaaagaagggaatgaaaaggtgaggaacgactttaactactgctttagctcaaacgggacgttgacaacttcttcatatggtactatcaagagcctgaataatgtcagcctttaagtgctcaaagtcttcaacacaaaaagtccaaaactgaagccgaaatcgacgcgctcattgtgcgaatggtaagaaacttgaatttcgcagttcgacgacaaccacgcgtgttacgtttgggctgacttttatattgcccattgggctacaataagctcagtttttttcatattatccatagacccacataattcaaaaacgtaggtcgacaaatgaatatgtcgccactgaagtaatggtaatttacacattggtagttttgtttgaacttttaagccgtggtggaaagtgtaagagagatcccgaaatcaaattcaaactacatgattgcttggattgaatcagacaacaaaccagaaacgacaatagcaatttttctttgattaactcagatacacaagaagttggatcatgctttttaggaccaattnttttctccctttcttagattgtgtccaatgggaccaagtagagtaatataaggactcttgcaaaacgaagtatataacgcanaaaccggacactg

SEQ ID NO: 10998 - DNA, 722 bp, Arabidopsis thaliana landsberg
accaaatacgcaattaactattatttgatcaaaaaagttataagatgatatttgcagctcaagtttccttaatcaatttcttagctaccaccaccaaactattaatcgtctgtgcattaccaaccattatttttctcacccttagtttgtatgattgaaaacaattctatacattcttttaagatgtgatgtaaattaaacataaccaaatttaactaacaagtagttagatatatagaatatttggacaattttgtcaacgtattttcataaagcgaaaatgtcccaaggaaattattctattgggctctcttttgaaagatatgtaaaaacgttgtcatgtatttaatttcaacttttaacaaaaaggttaatatacttgcgattacattcgacaatttataaagtaaggaaaaaaaaaacacaaaaccgtagtcataatatactttcaacaaaaaaatctttaaaaatgaaaacttaagcaatcagtgatcgcgtaatttagagtatataattatcaaaataacttgtaaattaatgcaaaaaaggtttgaaagtggtgacgaccttcttgacttgatcgagaaacgacaaatacgacacggttccgtcgttccctgcgagaactctatacttatccttcctcgtaaagttagtacactcaaagcctaacgtagctgccaagattctctgtacatagttagccacgtcataagggctct

SEQ ID NO: 10999 - DNA, 794 bp, Arabidopsis thaliana landsberg
  unsure (1)..(794): unsure at all n locations
aacggaatcttatacatatatatctttcctcgctgagtggagaacaaaacttagcaagcttcaaacacttttttaaaaaccaaatttttacactaaagaatctgctttagtcgtggttcgagttaagaaaataaagaatctgtttagaacatggcccagtgatagttcctattacaatatgctttttgattattctccaagcaataataagcccaattatatttaggcccagatctgctttttgattattctccaagcaaagtaaacttatacggtcgagattttattatcattttattttttgtccttttgaaaaataccgtttaaaccctaaaagctagctgccaccgtgggtttatggtcggcaaaacccagaaaatcgaccatcattcaccgtcaatttcacaactttcatgaacctttagctctatttctccatctctgaataagggtcaaacttttctttttatcaaaatcgatggctgcttctagattgtgttccgcggcggcgatagctgctgccttcacttcaatgtcaatgtctcagaaccgtgcttacgccgattcttctcgattccggtttcctttcttttcttcttctccttctcctcctnnnnnnnnnnnnnnnnnnnnnnnntcttctacaaactctagtaagtctaaagcagagcctgatgagcctaaaggatcgggttttgatcctgaggctcttgagagagctgctaaagctcttagagatatcaatagctctccccattccaaacaggtgacctttcatatctatttagggaatg

SEQ ID NO: 11000 - DNA, 721 bp, Arabidopsis thaliana landsberg
aattgggtttttaaaaattggtttgaagtttgctaagttttgttctccactcagcgaggaaagatatatttttataagattccgtttgtgtagatcacgggtacgtaagataattgttcttcagataattaatatagttagaagaaattattccacaatccacattcaaattattaaaacgaccaaatactgattagtatattctcgcaggaatatcaaacaaaaacacaccatttgagctagtggattatggatataaggattattcgaacgtacgtacttgaaatttttataagtttaaaatatcggctatattctactatttttgtcatatttttaactacaaatctaatccacttaattatactacataattttaaactaaacatttttttttatataattgtaatttcatccatttagttgaaagatgaagttcgaagttgaaataaatggttatgcatgcaccgtataaaaaaatccacaactttaatcactttgactgtaaaattatcttttgtttaatgctttttttaaaaaaaaacgttagttcttgtctagttctacttgcaacgattttgaacgcagtattttctataaataactgagacatttacggttttttagttgtcaaattttcattgatctagttaaatacaatgatgttagtatgggtactatgggtcggtgttttgtgccagggactatatacgagacttgg

SEQ ID NO: 11001 - DNA, 774 bp, Arabidopsis thaliana landsberg
tttccagcttgggagactagagatttggtcatctgatgctgctctgtctgaggatcccatgttcatgttatatccaaggaggctacttatgagaggaacaaggcaacagaggaagaggaagagaagaaagggaaaggaatagcagatagcgttccaagctaaaagagagacgcagagaacgtgaagcttgggagcatggtggaaagaaccaaacctagaatcgaacacccaaacatttccaatcgcaaaccaaatcgcaaagaaaagctctagcgacgttctgcatttgttcatcaagtgagaggacctgcaaacatagagcaatatcaggatcttgtaaaggttttggattcataatcgacaaaagataaagatttttgagtgttacctagtttcttctctgcctctctgttgctgctcaacatcgccaaggacaaacccatttccttggttaatgtctagttgacgataccgaccatataacagcatgagattcaaaagacatcccacatcgtatcctgtgatccatagcctcactggccaaattggtctctcttctttggagatagctagagtgaatgttatcacagtgagctgaacaagtagagcaatgagctcagacatcatccaagtgctagaattgaaaggattagacccaaggtcagatcttgaaccgttctggtagtgaaacactcttctcaagaagatgaaccatctagctctagataccttcatagccagccttatataaaacgaagatggagacctctcttg

SEQ ID NO: 11002 - DNA, 870 bp, Arabidopsis thaliana landsberg
tactattcataacaaactgaaataatccaattgaattttgttgtctagaagaaccgatccaaaaatcatgaattttgagtacataaataattaaactgatacatagtataaaatatatataactagtaaattcatgtataatcgatgtttttgtataactaacaaactcaacttaaacatacatggacttgactaccaatatacattaagtgagtcaagttcatgggtagtcttcttggttatgagatctttatcctacaaaattcatttatattgaagacaagtaatatgagctagatagatacaaaataggttaatattaaaaggagcaaacaaaaataaataagaacatgggcagtcttcttggttgtgagatctttatcgtgcaacgcttcaatcacttcctttttcacacgttccatcttaattaactgttaaacaaaaagggtgataatagattcaactttggattattgaaggctaaaacgtgtatggccttaattacttagcttcctccatttcgtttcgttcatattaagagtacaatgaaagtttcactgttacctctccttcattaacacactaaggatcattaacataattttcttttaacaaacatctacattgaaaacataaaatatccatttattatgaaacaaaaaattaagtatctaaaaaaggacagagtataaacgaaaatattttcaatgaaactatcaccttctttattctttaaatgtccaaaagcaactttaaaacatcaaaacataatgatatcttatttaggtcgttcccgggtttcccagttagccaagtcacgatcattattccagcaaagaagagaccaaaatccaaaaagatctaatttcg

SEQ ID NO: 11003 - DNA, 702 bp, Arabidopsis thaliana landsberg
cagaaatccgttgcgcttgctttgattcctctcgtctctagaaacttgtggaacgacttgcgcatattctcatccaactccctgcaaagcacaagaaagaaacaacatatgagttttttcttggggttatcatatggttaaaacagaggggatatacagtatgttgcttactgaaaatctggcccatcataagtcaactgttcttcagaagaatcatctggacggttcacagacaaaccatcaatgacaatctcatcagggaaagcagtgcagctaaactctaggctaagtccactcttcttggtcacagtgacaacaagtggaatgcttgattcattcgatttctcatgacgaccatcaccatcttcatcgtcatccacatcatcttcattttcatccatggcaagaccaggcatgcttacttctactttaatctgctctccattgtattctctagtcaatgtcacagtcctgtgtccaggattatcttcgattttgaaaggaaagtcactagagtctatcgtctcttcatcctgaaatatataaccagaagaaccatgtagtctctcataagcttataaccaaaacaggttcatgcaatttgtgtgagctcagaatcaaaacaggttcatgatcaaattccgaaatgtatgaacttttactcaacaaattctgaaagaaatgcgatttaaggcatagaaa

SEQ ID NO: 11004 - DNA, 1050 bp, Arabidopsis thaliana landsberg
gatggtcaatattggtcaaccttttcggagtaactgaaactggctggacttcaggactgacctaaatgcaacggattggattggaaacagcttgaaggaaaggataatctttagcatttcgtattccaaatttaatccagaacaatctgtcatcactattggaggaaagctggaaacaaatatttaacaacaattctttacagatttcagaaaaagcgaaaaaattgtaacctaaatggtcagacttttccacaaaaagtggtcggagagaagcaatacaaagataaataatatagtaacaatgttatttttacctgagagatctttagcttaaaggatgagcgtccatttaatagtttgatcggtctatcatcagatgagaattgaactccttcatctcttatcaaaagaggagcctcagcttcacccatcttggcctccggaagtgtatcggcatacagtagtgatgcaacaaccttgcattttaaacccaaccatgtaatcaatgattttccaaactaaaaaagcaggcaacttagtgccaaaagtgatgagaaattgtaagagaaatgaacctccacatccttgtgcacaggctggccaatggcattggataaaagaacatccaaggaaaacatctccttgcaagatgcctatagagcaagaaaataagtgttgactgcggaaatgtaaatcgatgctaggaaaatttctaatgagctatagaaagtttgacctgccaaacaccacaatcatctaatttgatccccgatgaggatgatttattgacagataacattagaggtgggtcctggaaaaaatagaaaagaaaccttaagaataatggaaataaacaagcacagaacaagactgttttaaaggaaaataagggcaagagttaagcactaagcagaagaccttcatataatgatgctccacgtgatcactagcaggtaagacttctgcacattggatgaaaccttgtacgctataaccatctccgccaacactaaatagcgatatctttcgaggacactcgggataggcgtt

SEQ ID NO: 11005 - DNA, 433 bp, Arabidopsis thaliana landsberg
tttctgatttgctgaagaagggagtaaaatttgaggggggtgagaaatgtgaagaggctttccataccttaaggaaacacctgaccaccgcaccagtgttagcacaaccggacaatgctaagccattcaaggtgaccaccgcaccagtgtaagcctttcgctacaacctatcactcaaacctctcatgaagcaattttcttctttaagtctgtattgaattgttctatggcatattgagataggtggttgaacttagcaaggtattgcatcatagagtcaccgccttgcttcagacgaacaaattcttccagcttcatttgcagaataccatttggaatgtaatgctccatgaatgcttgcttaaactctgcccatgtaatgagatgaccttgaggctgaatggctatgaagtttgcccaccatgtactagtg

SEQ ID NO: 11006 - DNA, 1314 bp, Arabidopsis thaliana landsberg
  unsure (1)..(1314): unsure at all n locations
gtctcttttgaatctagcttcccgaggcagtgttaatgtcattcgttcttgtccctctcttcccgagtctccatcgtgtcttaggccatctctatttgggatatttactagggggcctccaaagaatattgattcacctgtatacatcagtctctctccttgctgctgctgcgtaggaggtggagcccttccagatgaagaatcttgaggcggatgaccaacgggtcttggattctgagtgttacccatgtgtgagctaggaattggctggctctgtgaggagaatctggttcttggctcaaatgttgttgcaggaactgatatatatctacctgcttcttggtcccaaacaactgatgttcttctcacatctctcagaagagaagcagcaggagcagggagaagcagtggatctacatggtttcctttctgcattatcttttcatcaaaggttgagtggatcatgtgattagttgcttgattaagaggtggccgggaagaattcgacgcggccgctgcagtgaagcggtggccagctgtatgatgctgagggagaggactaagtgtgacggtctcatgaacatgacttggactgctgagactgctcatactatgggtccctgtgtcgtactcgtcccgactaccttggcttggagcataagagtttctacaatgagacaacattggatcattgtttcttatctctctactcagcgtagctccatttgcttctgtgcttacactgcttacaacactgatggtgccacttctggaactaagttcatcatcatgtaaatgacgattttctattggtcttaggacagatgaggatgctctggctctggctgctgctcttgtagcttcatttgaattcagttttgcaagcttccaagcactaattttgacaggtctctttggaatcttgttgcccctctctgctgtttcagctgcatctggatctacggttgatggaaccatccgaggatccaaatgaggaatcacttcgtcctgtaacatagataacaagtatcaagcggacatatcaataactaaacagagacccagtggaaagcaaataatacctgataatcaacaaacactctaggaggagtgcaccatgctcctttgtatggtagaccgagggagcttccaccactaaagccggtcgtggcagatccagagggagaatacagcacgttaggaatttcctgatcaatcgaagctccagctggggcctcgctcattgctctcattgccacaacatattcataagttgtaatgccctaatagggttaaacaaganaaaaaaatgag

SEQ ID NO: 11007 - DNA, 599 bp, Arabidopsis thaliana landsberg
  unsure (1)..(599): unsure at all n locations
tacatatctcgtggtcaatacttatggctcttctggtgccaaggaccaaggatatattaatgcccaatttagcttcaagctctgtgggatttcatagctattttctactcttcttacttctagtagataagagatagattacagtaagcatgtcaaatggtggaattcaatgtagttctactacaaaacaccagttatatgtccattcaggactgatcgttaccatttgacttataatgtataccatactcgtcaagggactatctcgagtcaattcagcgactatgagtattcataattctgagagatgtatgcaacacaagcataaaggtcctagacaggacaggcaaagtggttcgacgggaacacacaatggttctcacaccaacatagtgaaaattttctcagaataacctctcggtatactcgcaacttcgtgttgctagagactacatgtccttttatctcatagtttgcttcatgtcattcagcaacanagaaagcaatgtgctaacatctggttgagcaatgtatgactgaagattctggtcatacattatntagtaaggtctttttgcttactaatagaatctttatat

SEQ ID NO: 11008 - DNA, 1050 bp, Arabidopsis thaliana landsberg
ggctttcaacagtaatctagcaacgatacaagtgtcaaaagcttagaaactacgtcagaactcaaagtatactctcagttgtgatgcaattaacgagataaaaattaaaaattcagacatgatatcagatgtttccttagtccttacatctaattccttcttgctgtataagttcctaacaacttttctgtgtaatgtatcacagcctattgaagaagctaaatcattttccaaataggacaaagcaaagaaaaagggaatatagttgaagagtgatgggaatgcgaacctcttttgatgaagctgttcaacatgatcagggcccaggtcataagtattgtcgaggatttcatttgatattgcaagcagcgtatccttcatttgttccacatgggtagaagcttcaggacaaagccctagctgcgtggatatcaaagcaaacaacatgagaaacccaattggtttatgaagtaactatggagaaaatgagagaattggtagcatacctttattccatgactacagttggaacataattcaggaggcaaaccttgctcttcttctcttctggaagtaaatatatccacaaacttagatactgatggttgcttggtacacgttgaagggcagtgttccatcgcaatctggtctacgtcaataatctgcgctccaaagttagcacatgttggagttaatctattctgttattcggcacaagtaattatgaaaagatttcattttagttcactgaaaaatggtgcaaactctgtaaagagtataccacaaactttttcataatatatgttatacattttactggtactacaaatccgaattgagaaaaagtttcttgttctcatggaaaaagtacttatgatttaaaaaattttccctagttgtaaaaagaatattacctccattatgtcatcataatcaatctcaccatgactaacttccctaggctccaccggtctggctaggtgtgcagaatttttgattggtggcatctccataccatttgtaacagttactgaatctcgaacctatagt

SEQ ID NO: 11009 - DNA, 1610 bp, Arabidopsis thaliana landsberg
  unsure (1)..(1610): unsure at all n locations
tgagaacaacttacaatgtctccaggcatgatacatgaagtttttgtccagattcaagcttcatatattccaaccaacaggcagaatttaaacacacgattagatattataacaatgaggtaaccttttaaaaaggctgatcagtttggtgccaatatagttgagatgtttacaacttttgctttctaaacctctttgtaaatccattatagggaaactttactagcgcaactttctctagtaatgcacgcacctagtgtaccgtttcaagacactccatcaagcagtcaagccactgaagcggtaaaatctttattcattcgttcattactactttatctttctcattactggatatgttttaatttgtccaatgaggttattaagattcgcatgacatatctttaggcggaagtggacatggagaagagaaatgatccacgcatttgagtgcaatccaagttatgaaccagactctaacaacgattagcattttcttggataaggcaaatggtaaagtagtgtcataggagaaggattcttcatattcaaatttcacctttttctgagtttgttcttagagcatgtacagaaaagaacgattgatgtataaaatcaacattgtagagatactacaataacattcaaatattatagaaagcaacagatttttgttgacaaaagtctccacaaattacatataaggcacattctgcaacaattcaatgtaagaaagagagaacaaatgcatggtaagttacaactaatgatatctatatctatatgcagcctgttcaactaggaaaaatcaacaattacacacatggaatttttcattgtgataagaaatcagattctttagtcccttagtcaataaaataatcacgaaccagcaaagtatatgactcaacaacaagagtcctgatattgcatatcccaagaccataaactcatcacataatatatgctaattattaccgaaaaatgagcttcttaatgcctaaaattctgatttgaacttggctcgtacgctcataatttaaagctcagccaagaacatcatgatagccaacagagatgcatacactttcttgaattaaaatcccagatcacaatgaagtaaagttatctaagtaaaatttaattattttcaaaaaaaaacaatattcatggcttttgttcatcattcctttcttgaatcaaaaggttatatatttgatgagagtaaagaacagaataatgatacaatatacattctcttatatagagatgagatttcctaatcaaagataaaacctaaatgtaaatcatatatatttgataaatgtaaatattactaaaactaagatatgataatattttagatccttctgcaatcttcatgatttccatattcttgggcgatcatctcaaccatcaatgattgatttccagttccccaataaaagtagctttaattcaaatcataataggataatcagttcttaaatactttggaaaaatatatggataaaatcagaaaaataaacctctttcaaataggaataagaanaaacataggaattaatcattttgatttcctagttgatgtattgatcatatagttgagt

SEQ ID NO: 11010 - DNA, 622 bp, Arabidopsis thaliana landsberg
  unsure (1)..(622): unsure at all n locations
ttttttcttagaaagaacagacagaagttataagatgttgttgatgttatgatatttggtgtcgtggagagtgtcttcttatataggtttttgtttagtgaaaatctaagaagagtatgttattgggttaaagaaagtgagattatgagcaaaatgtgtcaaacattgtttattaatcaaatctaaacatctattacacaccataaatctttggctaaacttagtcaaaaactaaggattttttattctaactcttgtttgtatatgagaaatggtgaatcaagatataattaaatggattagacatataaactgaaaaagatctaaagatattgatagtataatgataatttaaggtcaaacaagcatatattgcatatattaactatgatagatatattatatgtgacgcgtgtgctaacactctatttcataaatacatattatatgatttgctcatatatagaatagatacctagggttggaacaaaaaaacatttagtagtcaataatacataatatncagataataggaaatctaaccataatacatatgtttttaattgaaaataaacctattttcgaattcgacananacctaattaatcaaccttaaataggg

SEQ ID NO: 11011 - DNA, 1659 bp, Arabidopsis thaliana landsberg
aacatctctctgtgaaggctctgttagtatcgttcttcttcgtggccactgtggttaaacatttgcgttagagaaagaaaagctcaggacaaagccacgtgatcgaatacgtgtcaatgggaactatctttggtttgcgacacgtgtaataaaagtacggaagtttatgcggttgtttagcaagtgttcgatgaaattactgaaccaaaccacaaaagagagattttttctcaatacaacatgttttttaagattcggtcgtttcttcccgtttattacgacgaccagtcaccaataatctaaatttataactaacagagcattttagtaaattttccaaagaaatttggattcttacatgtacattacggacataagaaaacaacgttgttgattacattcattagctttagaatgttaggaaatagtcttttttggtatcaatgtttaagagaatgataatatgtttgttttgtttaatacatggtttattttttggtatgcatgtgagaggtacattctttattatgataacatgtacgacgccatttcatatatatggttgtgagaagaggagattgatcttatgatggagttcctcttggcttgtcccggttgtgttagagatgtgaatgtgaacggtgagaccgttctacacattgtgattatgaatgctatatgaagaactcgaagtactctacgtcatatagttgctgaatcgctagagagacaagtactgaacggacgttatcaaatggtaacaccgccttgcacatagaaacatatcagaacaaaatcacggcaataaagctgttgctaggatctccagaggttaaccaccaaaacatccatgaccaagatggtttattaatcgctctagatatatatcttgcaacatcagctggttgtcatggtcttttgctttttaccagctggagaatattatattatagaaatgtgggcgtttctatggatgatgttgcctctccagtctccatgtctctttcttattagtctcaatggctgtgatatgatatctccagataaaatgtggtatttattgatcagtgtagggttgattatgatcgttgttgttgttaacatggttgtgtttttcttgcggtgcgaagctgtctacgaagaaaaaacctgaattcagaagcgacttcatcttaattgaaggcattaagtagtgtagaacaaattaaagaagtgtagtgatgtgagatatgtgagtttggtaataatacgacaataagtagtgtaaaagtgttcattatgtgctaaatgttttgatgtaataaatcactgtaaaatatgaacaagaaaaaaaaaagattacctaacactataccttttcttgttccttattagtttgatcaaaaaatatattcaaacaaaagcctttgttacatagaatgcagattgatcaaaatcttagaaaaaaaatttgagaaaaaaacggcatgcttgaaccaggttaaacttaaaactcaacaagatttatctctcataacgttttcctttaatgataatgataaaataaagatttggaactatctaacagctgaccttttatgtaaaatgaaagatcccctagtagaaaacaattttttgtaagatcaattttcgattttaaacataagatcacttcttcgg

SEQ ID NO: 11012 - DNA, 1847 bp, Arabidopsis thaliana landsberg
  unsure (1)..(1847): unsure at all n locations
atagaatatactataagaaaaaaaatatgtgagaaagagaacaatcatgaaaaaagtaataatagaaaaccttttatattaatttttttttgtatttagatgagtgtttttactacttaatcgaagagaatagacaaatattactgtaagtgataaatgaatttgggctatatataatatttgatacgcaagtgtttctttcacttttgcaacactctcccttggagtttatttgtcatttatctctttgcgatgtccttcatgttgacttgttaaaaacaattctaggaaatcccattagtataaacccatagtaaggtaaccgagctacaatgatacaagctccccctcgaatgactaggaacgatactctaaagattctgttgatggcgtattccaatgttatggacatgttttctgaaagttgtagtatgtaatgactttatgaagagatctgtagcattgttacatgatcgaacatatttcacttaaatttctttattcttctcaagctcttgggtatatgaaaataattttggagggatatgttaggttctagcgtttttaatatatccttcttttgtctaagcaacgcatgcatcattatcctcatataagacggttggttctatattcacatgcattccactgcttgattgaatgtgctgacttatttatcttagccacaaaaagttccactcgcttcgtgaagtgcgatgatttcaatgtggtttgaagaggtggctactagtgtctgtttctgagaacgtcacgatatagaagtgcccccaatttcgtgaaaatatatccagtttgggatcgagctttatgtggatctgataaatatctcacatctacaaaaccaaaatttgaccttttgagtttttagggtaaaataaccctaaatcaatagtcccttgaaggttacgaaaaacatgttttatcccattccagtatctttgtgtaaggaacaaactaaatattgctaaaatattaatagcaaatgatatatcaggtctagtgcaatttgcaaggtacataaagcctccgattgcgcttagatacgggggtactttaggatcaagtatctcttcattttcttcatgtggtcggaaaggatcagttttaacattaagtgaactaacgaccattggtgtactaagaggatttgctttatccattttaaaacgttttaaaactcttttagctgtagattgatgtacaaaaaatccttatgagaatgtccaatttataaaccaaggcaaaactttgtttgcccgagatctttcatatcgaattctcctttcaaatagtttgttgctttatgtatttcctcttgagttccgatgatgtttatatcaccaacatatactacaataattacgaatctagatatagttgcttgatgataacacatgggaatatagggttatttacatatctttcttttattaaatgctcacttcgacgattataccacatacgtccagactgttataaaccatacaatgatctttgtaattttattgcacataactctatgggtttagagtttaactttttagtcattttaaatccatttggaattctcatgtacatgtcagcatctaatgatccatataaatatgttgttacgacgtccatgagtcgcatttctagaattttattagctgtaaagctcattaaaaacctaaatatgatggcatccataaaaggagaatatttttcctcgtaatcaattctctgagagaaancctgggccacaagacgagctttgtagctcgttattcattttgttcattacgttttcgacaaaaacctatttataactgaccggttttacagtc

SEQ ID NO: 11013 - DNA, 1856 bp, Arabidopsis thaliana landsberg
tgttggatgcaactattcgaacagtggacgctaaagcactgacccatgctggcagtaggccgcgaatagttgcggatttgaggtgttaggaacatataaagtaaatactactacgtacgtaaatgttgtgtatttgtagacacattagattatttatttttattttagttttttaaaaagattatataaaattttcaataagttaaataaaaaaatattatacgtacgaggagagtggcgaatgaggcgaaagcgatggtcttgaagcggccaacgtaagtgtctgagatatacgctccgacgagaggagtgagattggtgaaacctgaccaaatgttgatgacatttgcagcgtcgacttgttctaagtgaaacactttggttagataaaccatgaagtttgccaacaatcctatcgatcccagtctctccagcgtctcatttcctattcaacccattttattacaaaatattatcagcaaataaatcgacaaataatccctctattgaagaatatcaattatactccattttatctagtaattatcatcactaacaaaattaatcatattccattaaatagagagaaataaaatattataaaaatttaaaagtataaaataatttaaaatgaaagttaacattttggctaaaagagcacttatgatgacaaatttttattccatttcagttataaagtcgtcagctggacgagtgtgaaacatgttggaccgacggttacgagagtgaaatataatataatttttgatcgagctgaaaagattatgcgctcatttcttttgttctgtctattacagaacgtgatcttgcaacggcccgttgcatctcccaatgataatatattaactggtttctagaactatattatccaattaaggaaattaacaaaaaaatattagccaataactgaggaaaggtcaaggattaggtaaactaaattatgtacacgaagcctaaaaataaaattaaaatacctaaaatgaacgagacggctctccatcctccaggctttttctctaccttctcagcatccaatatagatcccggcgaacttatccgcttgtagggatcaacaacatccaactccgacggtgacgatttagagaaactaccggatcgtcccggcaaagaagaaccgtcctttctatcctccaaaaccatctctaagatattactacactcgtgatatactcacttcgatttcggggtggatttaatgttgtgagaatatattctcacttttttgcaatcaaggtaacacacatgaagtgattgataaatgtagagagtgggcacaacatacagacactttctctttgttagaagcttttttgggtgtagtgaattatttgtggaagtgtgtatatataagggagtgagtagataatatatggtgggtgtgggtaaatttgaatgacgttcgccactagtagcctccacgtgagaagtttgaagaggaaaattaagagaaaactattttagtgctatgtttttttttgttttttcttacaccgtacgtaacattattgttttgttccacgtattgtgaaccttccatgttccatacaattgtaacgttaaaatacgatgttaaattaatgaaccatcttttacagtacatttgcatcgtaaggggttgatggatgatattttttgttcacgcggttttttatgtgtgttgtcggtcatatatatatggtatgatgggtctcaaaaggacatctaatcttttttacctaaaaatgatatgatatctcataaataagcgagattttattttctctaaagcatattttatttttattttcttaaaggaagtgagattgttcgatttt

SEQ ID NO: 11014 - DNA, 863 bp, Arabidopsis thaliana landsberg
tcgcggctagtgctttcgcaatacctacagattcctggataagtcgaactagcatatcagaaaacacaaaaacatgcgcatactgcagctgaaactaatcaagaaactccacttctgcttctcaggaagtcaaattactccatgtctcagccatatccatccatttacagattctcatgattaggttcagctgcaactcacgtaagtccaggaaaaagttaatgacaatgatgtctcaccaagatggcaacaccagtaatgagagccgatgttggaagcagtaatttggcatgatcaaaactttttgggaaagaaaactttggaagtccctgaggtatatctcccacctgagaaatcctaaaaactttgcaatcaattacggaaaacactcacaaaaaatgtagcttcaatagggaaaaatataagaatttcattctttagcaatctgaccagtgtgatggaaggtggatggaacacttttgcaatgattgtaccaagagcaagacctgtgagcggtcctgctgctcgtatgaactgaagttccttctttgcttttccctgccgcagaaaatgatgccttagcataataaaagtaagggaacataagaagtatcctactgacacactgaagaacaaggctcataccacatgcttcattactaaaaggatcaccagaatggtacatcccaacaagaaaggtggccacttaaactacaaaacagaaattcagatgaagttatacaagtaaggcatagaaggtatgttgaaccaaaagccattgcaacaccattaagaatctgaagaccaaacctgatcagctccagctattatgctatcaattactggcataagtcttgcggctc

SEQ ID NO: 11015 - DNA, 562 bp, Arabidopsis thaliana landsberg
taggttcaactctgcagtacaaccagacactccataatgcactacatttgacatgtttctaatgtttttgatatctcaccaagatggcaacaccagtaatgagagctgatgttggaagcaacgtttttgcatgatcaaaacttcttgggaaagaaaatgttggaaggccctgaggtatatctcccacctgaaaacatactgaattttgctattacttaaacactttaccgttatgtagctcaacaaggcaactaccatgaatttaatttctgaccatagagatggaaggcggatgaaacacttttgcaatggttgtaccgagcacaatcccggagagtggcgctgctgctcgtaagaactgaagttcctttttggcttttccctgccatgaaaaaacatgaccttattatcacattaataaaggaaagtcctgtttccctggtaactctggaaaagaacaaggctcataccacatgtttcatcacttgaagaatcaccaaaatgagagaacccatcacgaaaggtggccactgaaactaaaaagcacataaagatccatcta

SEQ ID NO: 11016 - DNA, 1286 bp, Arabidopsis thaliana landsberg
catagaatttggaaggccaaattgaaataaattaaaagaacagacttgcaaccaaaccaagtagaaccattgatgcagcaatcttgttcgttgatcctccgctggcgcctcctcctttaccacacacaaaaccaaaatcaattaatcaccataataatacaataacttttgtttcaaattgcattaagaatctacaaaatctatggatttacaatctcatcttactttcatcgccgattctaatagttttttaattaacattcaacatatttcgtctatacatttttcaaatttggcacattcaacatatttatgaattaaatgcattatttaatacactaacatgcatttttatgaaactttttaaaaaattatgtcggaatcagtaacgtaatatatctctgatttttgcactattgaaaacataatgtagtttgaacaaaatactaaaggacaagccaagaaaatgtttaaaagatacctttacatgcgaatttggcggcaacaccacaggcgctgttgaccaggtcgtagcgagcttgcgagatattgccattggaaggatgtgccatgaaattgtcacagagacaattcacttgtatcgcgctcgacgatttgagatcattgcagcactcttcagatggcgtcaaatccaagttaaagtagcaaagttggacgatgtttgggagatccgccaacgcgcacacaggattaaactttggcattggtggcattgactgtgcatccacgatcgtaaccgctagaaacagcatcattgtcgcaaccgcggctgatatcgtaactttgtttgtgtaagccatgatcgccagcaaaaacagaggtttaatattttcttatatatttttgaacgaccagtggttcgctcttatttaattttgtatgtgacttctccaaaatacattatcatttatatagagtcttggtatgtaccgtgttggtataactaatcaaaataataacctagtcgcattgactttgcttcacaatgttgaccaaatgtgtacgactttctatatggcatttgatttgttcggagaatatatatctacaagaaaacaaacttaatttcgggggaggcatttgtgtatatgacgtgaggacctctttttgtaacaccgatgcaaaacaagcatcaaatggccattttattttattgtaacaatagaaattctgaattcttttttgcctatattttagtccattcgaatttaacatatgttcgttagttcgttagcatccactttgataacaatgacgtgcatagt

SEQ ID NO: 11017 - DNA, 645 bp, Arabidopsis thaliana landsberg
acctaccatatttgagaaacgaagttgcaaagatccactccattttctaagttatcatgagtacctgaaaattaaatctttagtttttggcatcccaccaaaatcgtataatatcgtctatcttgtaattgtttcgctggagaaccatactccatccatgaaattggaaatctccatttgcatcttcttgtacagtaagagttgttacaattttagtttcaaaatcaaaaaagtccaaataacctatgaaacgattcttaggcagtaaaggtaacattttggtttctactatctcttttgaaaacgttatcatattactcaaacccacatctgatggtgttaacgttatcaagatgttgaaagagctgtctgcattaaacggcctatctgaatacagctcggtgtctaccatgagttaaaacacaaagatatataaaaatataggttttaaagtgttctttacttcttagagatctaggtaaaatttgtgttaataaaattggtcatgtgctaagcatacatatataatgataataatttgtgtcgagtgggtaattgtaagaccttgtcactataagaagataagattctatttattattatcattggatcactataaatgaaactcattctcgtggtcttttt

SEQ ID NO: 11018 - DNA, 915 bp, Arabidopsis thaliana landsberg
ataacatagaacaagagaaagagaaacaaaaagatccatgttcttatagaaggatctagaagatccatatgatccaagaagatattatgaatatattctagagatatgtatatatcttatatgattctattagttagataattagattaattcattttttatataagtgtatcccttatgtttgttagagattaacttgcggtacatcgcgagcctatatgttaattaaataaaagattaatttttttaggatgatctatgtatacgctattattttgtttgatttaaatgtacggtccactgcaaaataatattttagaactaaaaaattataaaatgtaagttgtatttggttcgttactattgtctatatatatagtctggcgctattctaagcttatgaatgaaaccttgttcattttctcttgggttttagggttttgaatacaaatttaagtgatttgtttgttatttcttgctaattattcaactaagcggattaggtttcatttgatcggtatatatatgtgtgcatatgatttaagtttgacaaatgctcaatgaaaatatatctttgtgtcattatatatatgcttaacacattaacaaaatttctaacccaaaccttacctagatatctctaagaaaaagaacacttaaaactgatacccatatatctttgtgttctaactcatggtagataccgagctgtatccagatgagccgcgcgtttaatgtggacagcccttggatacccatagatctttgtgttctaacttaaggtagataccgagctgtatccagataagccgcgcgtttaatgtggacagcccttggaacatcttgataacattaaacaccatcaaacataggtttgagtaatatgataacgttctcaaaagagatagtagaaac

SEQ ID NO: 11019 - DNA, 1094 bp, Arabidopsis thaliana landsberg
  unsure (1)..(1094): unsure at all n locations
tgcaatgtactcataatgtctcggttcttgatcaccatctacatcattatatagaaacacgggtacattctccttcttgttagaaaggtcaaagctaacataaccagnnnnnnnnnnnnnnnnnnnnntatttctaagagtttgtgcaaacctcattaccgcactgcccatcatcggttgcccttcaattcttactaacctaaatttaaaaaccccaaaaccagacttccccacagcaaaccaccaatctactatcttatacaaaccatcatatacatacaccttcgagcttatactgttctcatacttaatacctctaatcacacgtacctcgataccgtagtgcatacttctctccattcccagattcccacctactagcctctggttatcacactgcttgtgttgatgatcctgaccaccgtgaccagtataaaccaaaacatctcctgtatcttcatcatcctcataaccacctgagacaacaatgctggtagctataggctctccagtggcgctccgttcagccgttaaacaatcaatcccggcttgtgtctggccgtgtaaacccagcacacacaattccatacggtagaagaatatatcccctacttcaacccctgtgactggaccaactatgtgcttatcatagttcaaccacagtccccgatccctcattatatacgcagccgccatatcgctcctccgtctacgcccttgaccaagtacatgattcttcatactctccgccattagatgaatccgaagagactcataagtcatcctagttcgtttcatgacttgtcggagttccttccgttgttcatgacctagaattgcaattctcgctagctctctcggtctctcgaatttcggcgagacaacgacggtggagactcgattatccttaaatcctggaggcggttcaatcaattcccggttttcttcctccggtacagcaacgatggcaccagaatccaatccgtatacggagactccgtctaatcctttgacctgcagtggcttgaatgccgagcggaagagctctgagatacgaataaaactcgcgatgagatcggtattgctgattgatc

SEQ ID NO: 11020 - DNA, 1252 bp, Arabidopsis thaliana landsberg
ctctcaggatgcaaataacttttggaacatagaaatttatgtttatgattttgatttttcgatttaacaaacttcaacaaaaagtgtccttaaaataagaaagaagaatcataaaggtttgtaaaaaaaaaaaaaacttcttaaagtttgtgaaattccgaaaatttgtattaaaggaataaataaaagaagggtttgacttttctgatgagagacaggtggtggtgggttttaaggagagagacaagagtgaagtcagatcacacaaaaataaaatgctaaagcaaacggtgggtgagagcatttatatgacagcccactctcgtctcgtcatgtcactttcactataccacacgtgtgacttgccacgtgtctctctcccaccgcctgcatgccccattccggcaatcattgggccgccgttacgtccccccgcacccgcacgagtgcttcttttctattttattttctcttttctatctctacaatatacagtctatttgaaatcggttttgaataataaaattcagtatattttattttataaaatttagcattaccttaaaacgaatacgttaaaaatatgtataggactgtaaagggtggttttcttgttcggaaaacaagaaattgtaccattatgtcagcatttttatgccaagttgattaatgaacattgtaaacaatatataaaattttaaaagtaaagaaaataatatataaaaattaacacaaaatattttcaacgtacaaaacaagttgaaaatttcataattactacacattatgtttaattggcatagtaactttcaaccgtttttatttataaacgaatcgtttatagattggtactaatagggaaaaaaattgacctactgctttttttttgtaactaagacatgtttttcatatatccgcaatattatcaagttaagagaaatgaaacaaaaagatagaaaaatgtatactttaaacagaatgttatgaaatacttggaaaataaggattgagatcagctaacagaggaaatatttttgacactcgttatcgcaaattttaacgaatttctatatgcaaaacacacatgtttttcgttttggtaattagcacatgttaagaagaaactcgtaaaactagtacagttggttgcatataaatccttgtaaaggaaaacggaatttaaaataaacatattatgggattgttttcttatttgcacaagaaccaaatataacgagaaaacggcatgtga

SEQ ID NO: 11021 - DNA, 675 bp, Arabidopsis thaliana landsberg
gggcagtaggtactgaattttctgatgtggagcttcaagatttgtcttccagtctttgctctaaagtgattgctactccgaaagtaagataattatttcttctctctagcttatttgtttgatgcagtaccatatatgttatgttgcctgagagttcttgctgattataaaccagcaatactaccaagtcgataacgatctcaatccagatgtctggttggagcccaccgaggtatgccttatagtaatatttgtagataacgtacgtccacgttctatcttatgggtccaagtgtattgatgcaaagctaaataatatgcttgcttgaaggtgtgggaagtgaaagcagctgacttgacagttagccctgtatatcgtgaagctattggaattgtggaccctgacaaggttcaacattagcatacgtattttttttatatttttcttcatgtgagctattgcatttacgattggactttttcatttttctgtttgttatggttaaaagggaatttctctacgatttcctcgtctagtccgtatacggaaagacaagaatccagaggaagcaacaacatctgaccaggtgaaagctcttctcaccctaaccacaatcatagacatgcactaggctggtttctgattttggtttaattataaattccgagcatatt

SEQ ID NO: 11022 - DNA, 953 bp, Arabidopsis thaliana landsberg
tctataaaatagctctagtttccagctatagtatccttgtctcaagaataccacaatgctcatttcccttttctaactagcccttttacttcatatgtgacagagaagacgagattgaagatatacagaaggtatctcttgaattgacgttagttttgttggtaagtagtagtgtgcaagattgtcgtgttcacattctgttatgaaccccaggaaatttcagtattgtcacaatgccgttgcccatatattaccgaatactatggttcttaccttcaccagaccaagttatggatcatcatggaatatatggctggtggctcagttgctgaccttgtatgttatttcacttctttgctgagttgagatataaaattgtttgtgtagtgatgcacacatctctgtggagttattatcctttaattctcgttggtgcaaataataatctgttaaaactatattgcgagtgtagcttcaaccgggtaatccattggatgaaatttcaattgcttgtattacgcgcgacctacttcatgctgttgaatatctccatgctgagggaaaaatccacagagatattaaaggttttctctacttatatattttaacatcttatggcttttcatgatactgtgtgttctgatcgcttattgcatgactatttttttttcctatttttgcagccgccaatattttgttgagtgagaacggtgatgttaaggtattttctacttcttaaacttatttgattaatttcttaaattttcttttatatccgagtggtttagttggaacttctttcacgcatattaggttgcagactttggtgtttctgcacaattaacccggactatatcaaggcgaaaggtacttatcttattatactaatgaatctcctgactctatatcgtgtttcgttcttcatcatttattgtgcttactgatccagtaat

SEQ ID NO: 11023 - DNA, 1296 bp, Arabidopsis thaliana landsberg
aatacatcccctttaagtgactttttctagctaaggcgtcaaacaattccaaggcaaattcttttgagttcatccctacaatatgtcatcaatattccaagttagatccaaaccatttatttagttaacaattcctcaaatttacaatgtttacctatgcattcaccgaatttcgaccgaagcagcaatccatcagtattggccgtgatcttcaagtaccgcttctccacgacggtccaggcagcgttaccgtcggtcttactgatgatcttgagccctttcaaggcctgaccggccgttgacttcgaccggtccaatcgaggtgccttactctctccagataccattgtcaagcacttcttgaaccacttcaccaaaccgttctgtttctgcatatcaagtttcggattgttcttcacgctcgatccatcatccaccgcgtttccaacgttttccatcgccggatttcggtaggtcgacggcaaagatccgctcagtatctcgctgctgctcttctccgcctctgtgtcctttacttcaaagctcactctctgcattggttcgtcccctttttaacggacaatctcaaagggaaacaaaacgggggagccaggaaaatgatgattaaacgaaataatttgtttcttgcatctcaagtcaatgctctggcggatttagaaactctttggcatgtaatacgagacgacctgaaattttcgcttagttattctttttaaataaacggttacgtccatcagaccatcacaatcaacaaccactatattagataacgcacaaaatatattccaacatgtatacagagagataaataagctaaacatattcaaagaaaataagacatgggccgactggcccacaatttttttttgccttttttggtcaactctcttcattggtagattaattaaagacccgaatacaaaacctcatcagacaattaacacctaagtattaaaaatgtaatatttcaaaattcttccaacatggttgtccatcttctaattcctttgttaatcattcatctatcaaaagctctaagtcaattacctaaccaacgtcaaaatatcaaaatagtaaacaccaacgtgcttaccctgttacagttaacatctttgttttttagttcaagtctaaagtcttgcaccttaacattgtaaactgatgtgtttatccaaaaatcaaaatgatctattatatcaatatttctcatttttttagcacagcaatgcgagatttgttacagctatggtgatgaattgtgattttttatgggac

SEQ ID NO: 11024 - DNA, 1247 bp, Arabidopsis thaliana landsberg
tcacattgtctgtcatgctagtaacttgatgttacaaaaaaaaaaaaagaactctttgtttaactctttacgtatagactgcatattacttctttacttgtgaaaaaaaaatgtatcttcgagatgatttttgttccttaaagtgtatcatttgtgtaatgattggtttaaaatgtgcagatcaatactttataaaataagttactcttttttatattgtgacaatgaaggttagatccggtgaactgaattaatcgatgatgctaattgtttttttatattattggtatatgaaaaatagggaatattgattaatgggcaatttccgggaccagacattcacagtgtgacaaacgacaatctcatcattaacgtacacaacagcttagacgagcctttcttaatctcatggtaacatctctttttttcgttatttggaactacttactttgtcctctttgccttctgtggttatatgttgttgacttgtcgaagttgaatagttttttttttttttaacttgaataagaaaatacctttattttttttgtttttatccattttttgtttaaattgtttttattttgaagaacctaaaccaaataaaagatcttcatttcctccattagatattattatctactatcatctccgattcactaagaccatgtgtactaatatgtcaactgtaggaatcagatatttactttgtaatctagattgttagatcacgaaaatcacggatagaaaatttatgtatgtaaaactgaaatggaaaaattaaaggctcatctagcaaagaaaagtctttaaaatgcctgaaaacagttttgtttttgcttttgctgacaaaaattaaaagataaaaaaaaacttttacggctgataacgtaaataaatattcgtggaaatgcgcactattacgaaagcaaagcatgtgaatgttataaatgtagacttggggcaacttgaaatggtccataatgacgtatgtggcatacgtctataaacaattaccgaaaatctagtaggagtattaaaacagtttcctaagaaagactaatcaaagataactaatagtgagactgggttttgccattaatcgggtggcaatcaattctttattttttcaatagtatgcattctactttaacaaaaaagatagtgacatcaagtaataatgatactaatacatattactatgttatatgtttttgatattactaatatagatatatatagattgg

SEQ ID NO: 11025 - DNA, 1381 bp, Arabidopsis thaliana landsberg
atataatacagtcatgcatgggaccatcgtcactgtagcttaaattcaactttccttttacattgacgacacgatccgcctctatcgctctctcactcgatccctctattcaaccttttctattgttttggttttgttaattaaattatttagtatttatttctatttttctagtagtataaagtataaaccttctatcgttggaaatcaaaaacgctcgaacatttgctttggtttttcaatattttggcctcacactctctgacttgaactcttctcttctaccgaatcaaaccaaatggaggatcatcaaaaccatccacagtacggtatagaacaaccatcttctcaattctcctctgatctcttcggcttcaacctcgtttcagcgccggaccagcaccatcgtcttcatttcaccgaccatgagataagtttattgccacgtggaatacaagggcttacggtggctggaaacaacagtaacactattacaacgatccagagtggtggctgtgttggtgggtttagtggctttacggacggcggaggaacagggaggtggccgaggcaagagacgttgatgttgttggaggtcagatctcgtcttgatcacaagttcaaagaagctaatcaaaagggtcctctctgggatgaagtttctaggtctcattttttaaccctaattttttccagctttattttcccaaaatcccctttccttgtcttttttgcccttattccggagaggaaaagttaagataaaaatcagaacttggaagagaaaaaagacaatcgattatgggttttatttttgatttggaatcataattgttttgttatagattagacctttcacgttaaaatattttttttattattaataaggagaatatgacatcatcaaccccttggttttcttaaattcaagttagttaaaaacaaaattactttaaagtataggcagatctgtggtactagttttgttttggtcgagagagtgaatgaccagacattaggagtttctgttaagatttcttcatgtgtttttaaagaacaaaaagagtatatataaccatcaaataagaaacatctattctttgacttagtttgactttttgtcgttgataatctctgctttattcataaattcaatattgtggtgcattattatgcaaattatgaattaatgatgaaatcatgaaagtgatgcatttttcattcctttgttggtatatacctcatatgtttaggattatgtcggaggaacatggatacactaggagtggcaagaagtctagagagcacgttcgagaatctctacaagtacaataaaaaaacaaaagaaggcaaatccggtcggcgacaagatgggaaatct

SEQ ID NO: 11026 - DNA, 1345 bp, Arabidopsis thaliana landsberg
  unsure (1)..(1345): unsure at all n locations
ataattatataatttatgagctaaaccaagaaagcagactccattccactatctgaaaaactgctgaagaatgtaacatccaatgcttgaaagaatatggtgctgcattatcaaacccatgtccatcattttgaatatatgacaaaatatatgagaacgtatgtaaaatgtattaaaaataacagcatatatatcaacatacctagtcttcatcaagctgatcatatctttcaatgaagaatacttcttttgaaagacttgtgttttgatgggtgtgtcgttcagaatcggctctgctaacattgtggtgttaatactatcatgatcctcttgatgatacgtaccatgatgatgatcatcatcttcatcagcctttaaattttcttttaggaaaactctcatgtacactaggccaacgaaaaatgatatagcagaaacctagttcatccgaaaaataaaatcattgattttggaatcacatgcataagaattattcaaatttaatgagctaagttttggtgatgaaaaatatacctgaaaagtcaaagctatgggaagaaaacgagcaacttaatgttccaaaaagtccagcaattgttttgataccagctaaaatcacaaaagctgaaattcttgtgctgccatgaatatttactgcctaaaaaaaacatatgaaatgtgattatcttttcatagcgacatttgttaatattataaaataaatcattgtggaaaaataaagtaattaccacatatgcataagctaggcagtcancggtgccttcacataccatagaggtcagaatcttgcttatataaaacacataaaagaattttgtatcccttctgtatcctaaaattactgccaaaattaaatcacagaatcaaccacatattatttttgaaaaagtttcttttcgtaataagaaaatatatagaaaaataaatatatgagacaatatttcaaaagtgattttataaagttaaaagagaaaaggaaacaaatgaaatatgcaaaatattttaaaaagtgagaatgcgtataaatgccatgtaatacttctacaactttctttggtaacacatgtcatttttatatggtcatattgttaatgagttagtttagaaagtcatctaacaatattccactaaccagtagtgttttatatatggctatagatacttcagtttcccttttaaccttttcttttaatctttaattcaagcatgggttatcattgtgcaacccggtcgtcggagcatcatgcatggccaaaaaataagacttctgttttaagtaaccaggatgtgatccacaatattatcattttattggtcacgtcat

SEQ ID NO: 11027 - DNA, 1265 bp, Arabidopsis thaliana landsberg
tttatattactattgtttacaaatttttagtatataaaaagggtattctcatacttttaatagcaaaatttatctatggtccgacataggccggctcaaaatagcaaaaataaactatggtccatgttcaaattttggggcctttaatacactaatttttgaggtaatttaacaaaatcccagtgcaaatgcattgtcgcacagcctatatacggccctgctcgtatgtcatatgagctcatatgcggtcgcgctaatctatggcgtttaacatcacaccttttcaatatctcaagacttggtcccacaaaggaccgtgaaagctaactccgctgcaaaacgactcaaacatagcctcaaaaacgtgtctctctacttctttttcagatagctgcacctgaaacaccaacgagacactaacgtgtcaatcacattcctatacaagtacacgatcttgcaaggatagtctttatgtgtttcttgtagaataagcaacggcatgtgtgaatgtttggctactaagatgatgacaacttggtcatcaagtccggtgtttggctagctaccaagatggaggttagcctaaagagactgaaccagcgcatggagattaattagcatcaaaacaagacgtcttgacaagaatttttattattggcatattctagtttataatttgttttttagtttcatgtattacgattgaatggtcaatttgttagatattataatttttcaacgagtgtaaacgtaattcattaaaaagaaaaaagaaaacaaatcattaaagaaacacatgtatatgtgccagtgctacatggaaacttaagattgttataatagtgtgtacttacgtacacgttgcaatcttttgtgtgtgaatgtctttctctaattacttaaatttcatttgtggataagaatcaacaaacatacaagttccatcttgttccttcttttgcatacactggaaagatgtcagagtagaaaaaaagaagaaaaagtaagtgatccaacaccagttcatgtacaccattaattctttgactgctctctttgaacttggtcacaattgatcaatcaattatggtcattttatgtctgttgttcgccttgttcgtgacgtaactgtcgaaacagttgaaatccacctagataaaaagaaccaattactcaaaaatttaaggaaatcataataataataagaaaaaaaataatgtcataaattaataaaaaatattaagcatatgaataatttgattatg

SEQ ID NO: 11028 - DNA, 327 bp, Arabidopsis thaliana landsberg
ttctgcttttgctccttctccgatagctcattatccggacaaggatgaccctgcagccgggaaacaagtttgatgacttctccaccggttgtttatgaggagtggagctagctttccagtaatccctgcctagaccatgacagaggtcgacaacactcatggtatctttaacatatctgcttatgatgatggatgaacgaactccaccaaccatgcagaagttgacaggtttcaatatcatcctagaagaatgcacttatgagacactgattgatttgctttggactatacatatttctaccaccttgaatcgccaggtatagattc

SEQ ID NO: 11029 - DNA, 498 bp, Arabidopsis thaliana landsberg
ttatttttttagtgagaaatttggatttgaagagggctatgtttgtataaccatttagataaattgttagaagtttttaaaaaaaaaactctatttatatagaactggaagaatataaagagaatctcggggttgctctaaaggtcctctaaatacatgacgctcatacatcctctacataatctcttctcttttttatctatgtttataccttatatattagattaagtaaaactatagtacgtactccctgtatcccaaattattattcactttagcacttactttttatgcctatattcaaatgaattatgatgaatctaagacacatatgtaaaacacatacattaattattgtatgaatctaataaaaatctaaaaataaattttattttgggaaagagggagtaaatgatatttaagggctagcttggcaacaccattcttccaagagattttcatttttcaagagaaatcagttcattttaccttgaaaaa

SEQ ID NO: 11030 - DNA, 1330 bp, Arabidopsis thaliana landsberg
cgattataaatctcaagaccattctacatcatttttttttattttcaccatatatttcaaacctcgttaaagtggaaagatttgatctattcttttacaaacacacatacaaattagtccttgtgatataatattcaaagtcaattttcgaactaatcataaactttttcagatagttaaattattattataataacaagaacacgtgtatatcatgaggatgatcggctcacacactttgatacgtgcaattacaaattcgagctatccaaaaaataatacaacttccaattacaatttcataataatagatcatatgtttagccttgtcgacattaatcaaacaaaaataaccattttcttggcatcaccaaaaaaaaacaaaaaaaacatttacaccaacttaaaactcaaaagcaaagggtaaaagagaggaaccggaatgaaagaaacatataactaattaaaagaaagaaagaaaataaattcaagacctttcaagctttttctcacggagaagatcgatgccaactaagtaaaccaatatcattgtgttttctggagggaccagaagctggaacagggaagtgacgtggcaagaaccccaagaactgtttagttgaagaagaaacggcgtcgttgtgcttcttgtgtggtttcgagttgaagacgttcgtgtttgttcttgctccattgcagaaaccaagaagaagaatgagaagaagaagaatggttctagtgaagaaggagacgaagaaactagaggtgattcttgatctttggtttcgagacgacattgttgaagaagagaggttttttgtggaagggtttttggtgaatttgttctaaatataattgttgtgaaaggactttattttttgtttgttgttgatggggaaaaaggagattgctgaatgaatttgttgacagcaagaaatatgggcagatggagattgagagggatagatagagagagaatctgactaagaagaggtttttgagttatgttttcgtgtgtatttaattacttctgatatatattttttcacgaactattcaactatgcaagtagttgtagacttgttgacaactggttttggtctacaagccgaagaaactgtttggggttagatttttttagacttataattgttgatattttaggtttattgaaaaaaagttgcacggcaaaaatatttacagttcttaaattattaaagcaaaatttatggtaactaagcacacaagatggttgtagacttaattgtcattaagtggtcaaggttaaaggggaagtgttttttacttgacccacatatgatcttgaaaa

SEQ ID NO: 11031 - DNA, 655 bp, Arabidopsis thaliana landsberg
aaaggccaaagatttgcttaattttccaatctcatagtacaattccccaattgtagctccggattgaacccaaccggtccggttatcaacatctaatgtaatagaccggagatttctcaaatcaatgacaacgaacggtctgcttttagccatgtaagataaaccttcgtagtcatgaccaccactcctagtcctgatgtgtataccgtgaagccgtgcgcatttaatcgtagattgaacatcggtggcttgaaccggagtgatgattgaaaccggtttaggtgtttcgagaacagagaatcttggattttgtatggaagaattcaagattgagaaatacgaaggatcttttgatgtgtgtatgattcttgagtcgtcctcgttgattcggtgagagagacacttgaggaagttttcatggttagtcctttgagctgaaatcgaaggaaaatgtgaaagagaaagattcaacaaaagaaaatatataaagagagaaagcaaaaatctcaaaatctccattttcttaatgcagagacggtgagaggacaataaagcatgggtctatagaacttttattttatttttgtttatatcaagtgggtatgtgttaagatactttttatgttgtgtccgtttcgtatggtgtgatgcgtct

SEQ ID NO: 11032 - DNA, 513 bp, Arabidopsis thaliana landsberg
tgcatctcgcgagtgatttcgcatcctcaagctgtggctcagacggaaggatcgctcaacaaactcactccaaaagcagcgattgaagcgtttcacgacacagccgcggcggcggaatacatcgcagctaacaacctccacgacacggcggcggtagctagcgcaagagcagctgagctctacggacttcagattctcgccgacgggatccaagacgacgcaggaaacgtcacgcgcttccttatgctagcgcgtgatccgatcatcccccgtacggatcgtccgtttaaaacgagtatcgttttcgcagctcaagaacataaaggaactagcgttttattcaaagtgctttccgcgtttgcgtttcgaaacattagtttgacgaaaatcgaatcgcggccgcatcaaaattgtcccgttagagtcgtaggcgacgaaaacgttggaacatcgaagcactttgagtacacattctacgtggatttcgaagcgtcgatggcggaggcgcgtgct

SEQ ID NO: 11033 - DNA, 1059 bp, Arabidopsis thaliana landsberg
tcaaatttatctttattatcctggcctttcttaacttgtatgcctgttctcccgattcaataactgtattttttaaagcatttattctttttgtaggtgaaatgatgcttcatcaactgggataagcttcacaccgcaagtaatcgtagtttccattggtgaagtatgtttcttctgtctcctcttgaataatctggttcttttttttcttggtaatcttgcctctaattcttgagataaccatactctcggtgttgctttcaggacattgcttcaaaggttatatcgttctcgcatcaaggtccacgagcgatatgtgtcttatccgcaagtggtgctgtctctactgcaactcttcttcagccagcaccttctcatggaactattatatacgaggttttattgaatcatcactcacattttattatcttttagaagagaaaaacattacttattttggtgtatactttgaaacttatagggtctattcgagctcatatctctctcaacttcttatctgaacacaactgacaatgactacccaaaccgcactggaagtctagcggtctcacttgctagccccgatggtcgtgtcattggtggtggaattggaggtcctctaatagcagcaagccaagtccaggtgagcttacgcttgttatcaaattccttggatgaatttagatttcttatgcttaactatgtgtgtttgcctccttaaaaggtcattgttggcagcttcatttgggcaattccgaaagggaagattaaaaaacgtgaagaaacttctgaagatgtccaagatactgatgctttggaaaacaacaacgataacacagcagcaacgtcacctcctgttcctcagcaaagtcagaacattgttcagactcctgtaggcatttggtcaactggttcaaggtcaatggatatgcatcacccccatatggacattgatctaatgcgtggatgattcatgtatatataagcattgaatctaggagaagaagaagaaacttgagctaacctccctgaaacaaagtagtctattggtattgttta

SEQ ID NO: 11034 - DNA, 1190 bp, Arabidopsis thaliana landsberg
gttacataaagagtttttaatgtcaacatgagagtttctttgtgacattgatagttaaaagacagagaatgagagaaagagagatcatacagtttgaacgtcgatccctcgtgcccatacatctgaggcgattaaaacacggcttttaaatgaccgaaactggttcataatatcatctctctccttttgacgtttgtctccatgcattgatgagactatgaaattgctactcctcatcttctcagtaagccaatcaacctttcatatatataaaaaacgcagatcaaaggtataatattatcgacaaaagtggagggaccagagcttaagaacaagagtcttttaccttttgtcttgtgttgcagaagataatagcttggttaatagtaagtcttccataaagatcgcaaagagtatcgaatttccactcttctttatcaacatcaacatagtattgtttgattccctataaaaccaaaggttgatgcatttcatgataaaactaatacttaaagcataaaaatggcagaaggaaaaacctacttcaagagtcaattcatcaggcttcacaagaatcctcacaggatctgtcataaacttttctgtcatctccaaaatctcttgaggaagagtagcagaaatcaagcaaacctataaaccaaccgtattagcttcatattaccatagaaactagaatctactaattattactactgtttgaacaattgagatcgaaacctgaatatcgtgtggaagagatctgtaaacgtcataaatctggtctttcaaacctttactcagcatttcatctgattcatccagaaccaaaagtttcacagctttagtttgtaaacttcctctctttatcatatcgtaaactcgaccaggtgtcccggacacagcatggacaccacgctctagcttcttgatatcttctccgatgctcttaccaccaatacaggcatgcgcctgaatattggtatgtgccccaatagcctgtatagtcttctctgtttgtgaagccagctctcttgatggagacaacaccaaaacttgaacccttgaaaccgaaaaagaaaaaatcaaagttcattactaaatcagaaaaagatactacacagccttaaagtaagccttcttcatcctaatgaatctaaaccattcaattagtaaagcggtaaaaaacagat

SEQ ID NO: 11035 - DNA, 592 bp, Arabidopsis thaliana landsberg
  unsure (1)..(592): unsure at all n locations
ggttgacattatatgatttgttgagaaaacaaattcggaccaggagtaatctcaaacctctttttgaatacacgtttcaagtatgtcttcttcatctattaagaacttaatcgtttacagataatcaaaaatctttaacaatctctctttattagaaagtaagtaattcaaaagtattatatcgttagagctgtgttttcgagtgctggcaaaatcagtttagagaagttgtaactttagatcaatgagtcacataacattatcacattggatgattcaaagggttaaaaaaaaagagttttatcaactcgactcctttcatgctttccttaacaattatgattttaatttcaatgatttttgtactgttgagaaatttatgttcaaaaatagggaatcaagtgtcaaacaaataaatcatagaaccatgacaatcgaatacaacattataataaaatnttgctttccacggtatttacgatatgttgtgttgatctgcaacaaaacgaaatcttttttcttttaaaataaccgattttctaaatagtttaaatgagttcatttattctacccttattatatatattctttt

SEQ ID NO: 11036 - DNA, 1104 bp, Arabidopsis thaliana landsberg
cgccacaacacaatatgctgaataagaaatttcaaagagccaccatatataagtgaaatgcaatccaaaccataacaaattatcttgaaacacatgtgtgtagtttcatctccaaaccataacaaatacaactacatacagaaagacagacacaaacatctccaatccgcatcacgtaaaggtatcaccaataataagacgcgtaatgtattcatcataaaaactaaactaccaaacactgaaagaattttgagatgtttagttactaattgaatctcccaagagaacaaactccacaaaaacatatcaagattcatgattagataacactttacttaatttgttgatggaaaaaattcttttttgattagatatatgtgcttaattggtatttacaaagtggaaaccaaacaaaatcagtaaaaaagttaaatcaatctaagctcaaatctcaatggaactaatacacaaaacactgttgtatcgccaagtaatgcgaatccaatctatgaagatcctgaaaatgccctaagtttcagatgatgcatatcagctaaccctgggctagatccatcaaaaccttaatggcttcaaactaaaaacattgttcgtttccagagaagaagatagagagagtgacaaaccgtagccatcttcgacaaggaaattgaaggtatggtgatcgcagttgtaagtgaacttgctgttgctggaggaaggaagcttctggagacactgagcagcaatagacgggaaattgcctgtgaattcggtatactcggcgaggatcatagttcctctggcgacgaagctatagataaacgattcttgacccattttgagtcgccaccgagtatggaaccgagttggctcagacagagagaaagagaaagagaaagagagtctttttattctttctttacctttgctgcaaagaaaccaagtactttgcccgtgactcaactcaactacatttcttagtttttatttttattttcctttttgtatactaaattaaataattttttctttttttggtaggaaaattaaatattttttttaggagtattaaatttgtgttattatttataaatctaatacaat

SEQ ID NO: 11037 - DNA, 690 bp, Arabidopsis thaliana landsberg
tgttgagttgggaactcgagatcgaacagtttcgccttgtgaagatgatggtgattcggctgccactgttacgaaggtgggtttatatgaatcaaacccgtaaatccttgagcaagtcgatcagctaagtcttgtccatgtcgttgaacctcttcccaagcttctaaagatctctccatagacatctttatctttcctagtcaattcaaatcctcatacgaatcaaaacaccgaaagctcggaaatttatcagtgaaatcgagctatgaaacctgagaaaagaaaaaggtttaagttttagctaggatcgaagctaaaaaaccactcaattggaacctgtgaaacaaacccagaagcttgaattaataaactgagagaaagagttagaaaagttacggatttgggattatccacccggaagtcaaaattagggtttgacgacgctcaatagaaactcgaagacgaaaagatcggaaatattggaattaaagtaatcgaagcgttaggggcatggccatggaaccaagggaaatgaagtagaaagagaagagctgagaagaaggcaggcacacagagattaaccttaccagttaccgccactttgaaagcaatacctttggctcttgataatgggcctctttctcacgccaccattttatctaattttaaccaataaattatgggtttctt

SEQ ID NO: 11038 - DNA, 556 bp, Arabidopsis thaliana landsberg
gatcgtaaacataagatggcacgtagaatacgattaacggaaaccgtaatatttaatatggatgagctttgcacttgaaatataaataaataatctaaagcccagcccatattattataaccagtttttttagaaacccatcaaaacaaactcacatttaaaattaaaaaaagtaaagcccagaaacttatattttcatgggcttgttattttagttgtaaaatatgttaaacaggcttgtaaattgttttgcgggcttgttttcaattttggttaaccgaaaaccccgaataaaccgagataaataaaattttgagtcgatttagaagtgatttaaagcatgtaaccgactcgaataaacagagtaccgaaccgaaccgaatcaaatgtttattcggtcaattcggcaggattttgaaataaccataaaatcaaaaaccgaataaatccgaataatcggaattaaccgatttcccagacctaaaagaaactatcgtcacttgtctaaagttcgggaaaacggcatattccacatggattgacagaaactaaaact

SEQ ID NO: 11039 - DNA, 562 bp, Arabidopsis thaliana landsberg
atctaaaaaaatttattatattttccctggacatatctagggggtatgagtctttttaacactaataataataaccgtatgttattttattgcaagttatattcttatacaagctgagggcaaacttacaaaaaatagtcagatctcttttgtataaaaaccaaaaaatacaactgttgagaatttattatcagcaatggattttcctcaattggttccaatgaacggtggtgatggtccgcacatccacatccacaattcctcaatcgtttccaactaactttcttttctatattgatatcacatttgctaaagctaataaatatataccttttggtacagaaagtagcgatagatggctcttattttgtgctctaatgcttaatcttctctaaaatgttaaataactaacgctgaacaattattggtgaaatttgtttgtttttgtaggaaataattaacaagaaaggacaagatcgaaaaataagaatccgcaagttttttcaccaaagatacgaaatccgtatcccacctaatgatgatgatggatgatggtgatggt

SEQ ID NO: 11040 - DNA, 525 bp, Arabidopsis thaliana landsberg
ttattcacactagacgttaatataaattacaaggtgggcccaattttttatctccacgcttccctctcttagtccttataaacttcttgtcttccaattcttcttacccacaacaataaccaattctcctaaagtaacatctttgtttatctctcgcctctaagaaacaatgttgagtgcctttttgggtcatgcgtcagctattgctatagcttcaccagtagtcagcattgtgggcatcaggttattttcttgatttatacttttgggattatgtgaatattgtactctccctctctctctctttctttttttttcaatgtcattttcagtttattgtttagcaggcatgcatattcatctttttctttacatgttaattttaattaaggcgacaaacatatgcacagatgaaacacgtgggggtcgttgaaaaacaaagagaaatgccaacataacctcaatcgtttcctatgaacggtggtgatggtccgcacagttacatccacaattcctcttatcaag

SEQ ID NO: 11041 - DNA, 1070 bp, Arabidopsis thaliana landsberg
gccgcctgtggtaacggcgttacggaagagtcttagtttgggaaaccttgatgctcttctcgctaacgatgattgtaacggtagcggtgatcctatcgccgccgttgatgataccggttatcattccgatggtcagattcattccaagaagggtaaaactgctcatgagaagaaaaagggtacgtaatcttctaatctcatcaatttgataatctaaattcaatgaaattaataagaataaatcaaattcagggaagccatggacggaagaagaacatcgtaatttcttaatcggtttaaacaaactcggaaaaggagattggagaggcattgcaaagagtttcgtgtcgacaagaacaccaacacaagtcgcaagtcatgctcagaaatattttattaggttaaacgttaacgacaagagaaaaagacgtgctattctctttgacatctatctcgaagatcaggttcttatttaccttgtttctcaagtaatccattgagtcaattgatttgtctagggctattttttaatttagggtttaattgttttttcattaaacagaaggagaaagagaggaactctcaagatgcttcaacaaagactccacctaaacaaccaataaccggaattcaacaaccggtagtacaaggtcatactcaaaccgagatttcgaacaggtttcagaatttatcaatggagtatatgccaatctaccaacccataccaccttactacaactttccacctattatgtaccatccaaattatccaatgtactatgccaaccctcaagtaccggttaggtttgttcatccttctggtatacctgttccaagacatataccgattggtttgcctctgtctcaaccgagtgaagcttctaatatgacaaataaagacggtttgggatcttcatatcggtttgcctccacaagctactggagcttctgacttgactggtcatggcgttattcatgtgaaatgaaatctcatttttgtgtgtttatttaagcatgatataggtatattgcttctttttttggtggtgagttttatttgaatatatagc

SEQ ID NO: 11042 - DNA, 1379 bp, Arabidopsis thaliana landsberg
  unsure (1)..(1379): unsure at all n locations
ttgctaatgaaactttatttttgactttacacgttaagaatctaacttacagaaaagaaagaaagaaacaaattgatattctaaattcatcgtccatttaattttgaatagttgttgacttattcaattcgttggcattgacgcgttatgtctacattttcacttacgtctatcaacaaagcattgaaatgggtcgtccatatatgaaagtatgccttgttaaaacaaaaagtactgatgctttgtttacaaaaaaaaaaaaaaaaagtgatgcttcgttgtatgaaaattgtaactatattttgtaaatgaatcatctttgcttagttgagatgcaagtgccagataatgtatacgcctacacgatttataatcataataatttaatatctttaataacaccgaaccaacatatataaacttcatacgttaaaaaataagttgaaagaatcgcaattgttttttcttcagaccattttataaaataactatattttttaattgatcgacacacatattttatcagctaaatttgtaatgaaatcaacatgtcagagaatctgttacaaatttaaggttaatagtcctgaaaaaaatatttagattgtgacagataatgaatcattgaaaactactattgaaaataaaaaataaaataattgaaacaaataaaataaattcaactcaaatagttaattaggattgattagataatagtcgaatgacatattcagtaatatcttacaaattaaatattagtaacaataatcaaatttgattaaacgaaataaatagaattgtagaaataaaacaatacatatatatatagaattatatatgaaaatattattttgatttgtattttggtatagtgacttataaatttatttaggcaaaataaagtagataaaatttcagtttaaagtacatgtcaaatgtaccaataagatagcagaatttttttttttggaattaaatgtttgtcataaagtattaaaataatgaattcaaataaatttaaagaaactaaatcactattaaggaggacaaatgtcacccaaagagagtgccaaatgtcgtaatggtaagaaaagttagaaaaaaactttgtcttattatataagatgtccacaatacctaattatttccaaaatcgtaactaaagattcaaattgagcctagaacacacaaaacgaaccatcaagtacatggtaattttttttattagtaaatgataaataaattatgtttaaccgtaattatagtactagggtggagaattatatgagatccaaaatccaacctaaaatataactttttctttttttaacacatgaaatctaacttactatgctctngataactggtcatgaacatat

SEQ ID NO: 11043 - DNA, 589 bp, Arabidopsis thaliana landsberg
  unsure (1)..(589): unsure at all n locations
atatcttatatcataagacaaggtttttttctaacttttactaccattgcgacatttggcactttctttgggtgacatttgtcctccttaataggatttagtttctttaaatttatttgaattcattattttaataccttatgacaaacatttaattccaaaaaaaaaaaaatctactatcttattggtacatttgacatgtactttaaactgaaattttatctactttattttgcctaaagtattatctacataatgtcaaataacttatttacaatttgctgattttaattattaatttcttaaaaactcttttctgatcatttagaataaaaataaagattaatttattttactataacctaatatatcccatactccagcaatataatttacaggaattattagatttaatatgatatgacatatatttttttataaggtgttggtaaatgagattctaacttctcttgcagtaaattaaattataattaagaaatagtaacgtgcactaattaagaaatagtaacgtgcanataatttttttcccttcgattaattacccaataaaacccacaaatgaattact

SEQ ID NO: 11044 - DNA, 674 bp, Arabidopsis thaliana landsberg
tacatgtattagtctctaaactaacctctaattaaaaaaaatttattagcaagataaaactatataaccatattattatattacgtctggctgataccttatataataagaggaagattttttctaacttttcctaccattgcgacattcggcactctatttaggtgacatttgccgtctttaatagagatttgattcctttaaatgcatttgaatacattatataaatagcttatgacaaacatttaattccaaaaaaattatgctatcctattggtacatttgacatgtactttaaactgaaattttaactattatctacataatgtcaaataacttatttacaatttgctgattttaattatttaatttcttaaagactctcgtctgatcatttagaataaaaataaagattaatttattttactataacctaatataacccatactccagcaatataaattacaggaattattagatttagtataataaagtgttggtaaatgagtttctaacttctctctctggcagcaaattaaattataattaagaaatagtatcatgcactaattaagaaatagtaacgtgcaaatgattgttttccctggaattaattacccaaattaaacccacaaatgaatttactactacaatatatgtaacgtcaaataat

SEQ ID NO: 11045 - DNA, 1115 bp, Arabidopsis thaliana landsberg
cgttcaacactataaaaatgtagcttcaatattcgtcactgacaatgctgattgatgtatagctcatttcataaacactagaaaaagctctgatttaagtgaatgctattttaggtatactctacaatacggttttattagtggtgtgctaattccttttctgtctcttctatattttgttgatttgtagtttactatactatggaccctgagagtatcatggctgctgatgggactgattctgctcctgcaaatggtggtttagcaatggaaaatgtatgtgttaaagaaaatggggctgtttctgtcgaaaccgtggacactacttcagaaagtcagaatgagaattcggcaaacagttccactttggatacaattgaacacgtcaaggaggcagctgaggtttgtaactatggatggtcaatctacttgcctgtcggataaaatagttgtgactaacatttgtgttttccccttttatggtagggcacacaagttgaacatgtagatgattcaaagtgtatgaaaggcgaaaaagctcaacggaagccaaggcatgagaaactatcaggtggtaagaataattcatcggttcacatcaaaaagagcaaagagggcaaaagtgcagatgctaaagtggcagcatcaaatggttctgttgctcctaatgtacagacaacaaatcctcttaagagcaaatcattcaatgggcgagaggcacaagtcacaaaggtaatcatccctcacaatttgcttctaggtttcttcgctttagcttatgcatatttggatgtgatcttctttctggctgatgattattgttgatctcttctttttccttcagcaagggaagcatgactctgcacctgctgaaagcgctgatgggtattgagtcctttttttagaaatcagagtttctttccatatggtcttcttacgggttcactgctagaacccaaaacatttgtcaataaatgtcatctagaccttggtgctaagtattgtcatttatctgttagttcctaatcaatcattgaaactggaagtttttattccttttttgatacaggggagaaaggtggaaaccaaaagttttcaaaaggaaaccaagcccc

SEQ ID NO: 11046 - DNA, 843 bp, Arabidopsis thaliana landsberg
tgtaagtctttggtcggatttagcagaggttagagactcaagaatgttctagtttcttttgtgtagaaccatgtccaatgatccggttccttaagatgttcttagactctgaaaaaaagcaccttgatgtgaaacggaactgttttaaccaagattttggcaatcacatcttacaactaaaactctttgtaccaaagagggaaatttaaaacttataatccaaattttataaataaagttgtcaaagtcaactaaagaagtggactcgatccagggaggtgttgtgttcctcacagtcaaaccaaagcatattccatatttgtctccaataagaaaaaatctccaaaaacacattcaaatgaaaaatacaaagacttctattgttctcattctccgtatcttgaaaaaattcttaaaaaatcgacgaaacgatgccggagttaagtttattatcggcgttagacgcagcgaggatacagtggtaccatttcaaagcgataatagtcgccggaatgggacttttcaccgacgcatacgatcttttctgtatagctccgatcatgaaaatgataagtcaaatatattaccacaaagactcaatcggaaccgctcttctctcaacttcttacgcaatcgctcttcttggcaccgcgttaggtcagctcatctttggttacttaggtgaccgagtcggacgtcgtaaagtctatggacttagtctcttgatcatggtgtttagctcctttgggtgtggcttctttgtttgcacgactcgacgttcttgtgttatggttagtcttttattctttagattcgctcttggacttggaatcgggggaaatt

SEQ ID NO: 11047 - DNA, 1175 bp, Arabidopsis thaliana landsberg
caaattataccattaatcttcaattcttcataatcagaaagacttttaaagaatttaagacgaagagtagaataccattggactaagtaatgattttttagagactaatataattgaaactatacgtaaggagaaaaacaagacaagaagaattttttgtttcttaagaagaaaattaattgtgccaaagtcaagcaaaccgttgaaacatgaaagcgtagagaaatttagtagccaccgttacgtggaaatatgtttcaactttcaattagcaaaaaagccacgtcataattcgagcttgtgatgtcagggtggtcacctccttccctacatcattttgtgtgtctcccctatatatacacttccccaccaaaaagcacttcacctctcaaagactctacttacacatttctcatcttcctccccataattcacagtttttgcgttggtatggagagtaaaagtgacgcttctgtcgccaccactccaatcatatcttcttcctcttctcctccaccatcactttcaccgcgggtagtgcttagtccatgtgctgcttgcaaaatcttgaggcgacgttgtgcagagagatgcgttttggcaccgtacttccctccaacggatccggccaagttcactattgcacaccgcgtctttggagccagcaacatcattaagttcttgcaggtacctaaattatctatatatctattggtgtaataactataagctctttagttcttagaaagaattacattaagaaagacccgattttatattaatgatatagatgggaatgattttcttgttcttattaggaagatacatatattgaaatggttgttcggaaaatggtttcataggtcatgtgaaaattggaccttacgtagttatttgtcataagactaatgtcaataatttcttctcacaaaagccgcaccacataaccaaaaaaaaagtgaaagtattgcatatagtgtcattgtcaacgttttccttatcatgcacctttcacaaagtcttgtagaaaaatggtatttactcgaattggtcaattaaatacaaaaaaatccttacctttatgaacgaacacatgattgattatttatctatattttcaggaacttccagaatcacaaagaactgatgcggtcaacagtatggtgtatgaagcc

SEQ ID NO: 11048 - DNA, 972 bp, Arabidopsis thaliana landsberg
agatttactgaaatctgaggcatagcaggaagagttccaaatgggtttgtcacagcaactggatgcaaaacatcagagttcagcggagcaggcctgtcaaaaaaataaaacgaggaaggtaaaatgacacaacttccataaaatgaaacccattgaataagactatcacaaaagagcggaagataaaagtcttggaagcagaaacgccatacgattgcccgaagttgccttgaccaaaaatccccagtccaccagcatttccagtagtattagctttagaccatgaatatagaagagttagcatctagaaataagatgataatgtcagtgacttggtcgagcgacgtacctgcttgattttgaccgaagttgttgaaaccaaaaccatttgatgcttgacctggctgagctgattgaaagggtgtcacaccagcaggctacagaaataatgcgagatttgaaggccaaaattagaaaagaaggaaactaggtgccggtgtcatttaagagatgcaaaagaactgcaaactatgaagagaacaggcatcaccaaaagaaatgaaaaaaaaaaaaaaaacgaagtgcttaggcttaatagcgaatgtgaaaatcaccattgtttgtccaaagggagagctgctagacgtggttaatgttgaagaactggaaaacatgtttccaaatccagtggaaggtttattaaaaatgctattttggccaaatgcaggagcactactctgtccgaactgtccaaaagcagaaccagtctgtccaaacgcagaaccagtctgcccggtcgaaggggttgaattgaacagagtagatggctgactgttgccaaatgctggagttgccccctgaccaggagctgaaccaaagattgatgaagaagagccaaatccaggagtgcttgatgaaccaaataacggtgatggtgtcgttgttccaaaagcggaggatgatccaaaaacg

SEQ ID NO: 11049 - DNA, 1620 bp, Arabidopsis thaliana landsberg
tattatgcactgcttgataaacagagtggaagaaactagcattctcttcttcttcaatccctctttctttttcttatgtggacaaagagaaatttacacacaccaaaaatacgattcatgaagaacattttatacctacacctttctgatatatagtattagatgatcctctactccttatcattttcttttctttttttatctatatctttggatttaagtttggattggtattaattgggaagcataagtgaatatcaaactcacatcagaacttgaaagtcatttaaacacattcaaatgttctcaaaagattatgcaaattgctaaaaacacatttgaatgctatcaactaacacaagaagagactttttttaacaatatccaaacttattacctttcatccatccacaaacttgttaacattcttcaaccatagcaagtactctctctttattttgctcaccatgtacttatgcaagagtttcgttatgtttgcgtcaagtctggtcgccagatacctgtggaacgccttcttcagattatcgtccaagtttctacaaaatgcgatggaaacacacaccaataaacgtctatgctcatgcccatctctaaaaaatattaattattgaattcaaagagcttacttgaaacgaggccagtcagtttctcccatttgatactgataatcatgcacagttaaatctgttaagtcaatataatcagcataagcctggcaggtaaactctatgctgactccgttcttcttgataacagtcacaactagtggaaaacttagttcatcattattaggaccaaacacatcaatgacatcatcaccaagataaggcattcctacatcaacatgaatacgttcgtcattgtaatatgctgtcaatgttacactctgatctccaggcttgtctctaattttcaaagggaagcttcctggagccatctcttcattctgcccccaaacaaaccccaatagaatgtcagaacaaaaaaaaaaaaacagtctcgtaagaatattatcagaaacttattcgcaaagtaaagctaaacgatactaatttatgttttgttaggaatgaaattttgagcaaagatgtgaaagttttaccaaattgggatcatcggtttgcaaagcagaattgagctcggagtcaatcacaaggtgaagggtttgctcagagctcagcttatcaacagccatcgtgtaaagaaagccacgagagacgaaaggactcagcggagacgggttgagagcaagagacggacggttcacaacggcggagatagaccgggcttgaccacatgcggaagccaacttagatgctgacctgcgtacgcaccaagcaaaagccatagctagtgacttaatttttttctaaaagaaataagttcgatatatatgcctctaactatatatatatttttcctgatacgatgtatattgtgtttactcttaagcttatcagaatctttttagtattacttatttaaattgtttggattatgatggaacttcgttaggtttagcctgaacatctcaaacgaaatttataaaatattttccgaaataaaaggatactcttttttattagtttcccgtattca

SEQ ID NO: 11050 - DNA, 531 bp, Arabidopsis thaliana landsberg
cattaatgccttatctttgtccttctcatgtgaggagaaatatcgagaacggaaagatttgagctttgaggagaaagtcattgcccttagttatactctacaagaatcatggaagtaaggaacgtaagtacaaaactaattaaccaactcacgtacgttcacacaaattttgtaacaatggaccacaaacgtagaactaaacaaaccattatgtaatcatgtaaccaacccatgtccataactttcttgtacaataagtcatagattcattggagcctaaaagtgtaggttatataagagataaacaataagaacttatgtctcccaaaaatctatatatttactcaaacgaaagattaagaacttacttctttttcctcttccactgctttgtttattcaacagaaatttgcgcagctagatcgtttcagatatggcgaaatcaactattgtgagtaagaaaatttgggatatgagagaatatgctctgctctctgttttgattactccctgtcttatgagggtcgatct

SEQ ID NO: 11051 - DNA, 748 bp, Arabidopsis thaliana landsberg
tgcagcagcgtttgatattgtaggatgtgagctcaaacccaaataatcattcccagagaacaaaagcagcttcttgaatctcccttttctacactcagctaatgcatctccactaaaaatctcttctcctgtcaacgtgaaactgatacaacataaaaacccagtcttttgcctaatcaattcagcttcttcactaaacccaaattataaccatcaattacactttgcataaagccataattcactgtctaaagtatgaaaacgaaatcgcatttgagttcaaaggaagaaaaaaacaccaaactttggaaactccgaaactctcggcaaaaaaaaatatcaggaaagaaatgaaacgtaccgttgctgggttcatcgtgaagccatttctgaaatgtaggaatcgagacagacacctcaactgaagtccgatcccattgacacaaaccgtcgaacacctcgtacccgtctcctccattggctctgcttttcactatttcttcttcgttttgcctagacatgcaaatgggcctcaaagatcgaagaatttgcctggattcaagcacattcactgcttcttccacagttttatcccacgaatgatccgccattctaagtgcaaacagaattgtgatttgggcgaattttaaaaagtggttcggtagctagagaaagaagaggacttaaagcctcttctcctactgctatgacgtaattaaaacacctgcttctacatgtttgtagactc

SEQ ID NO: 11052 - DNA, 561 bp, Arabidopsis thaliana landsberg
tgaatctcccttttctacactcagcgaatactccactaaaattctcttcttctatcaacgtgaaactgatacaacgggaaaaagaagtattttgcttaatcaattcagcttcttcactaaacccaaattataaccatcaattacactttgcataaagccataattcattgtctaaagtatgaaaacgaaatcgtatttgagttcaaaggaagaaaaaaacaccaaactttggattgtaaactagaggttagtgactagattgtaaacacctgcaaggttcaagagcaacaccacaaaaccaaaatcaacacaaaacaagtaagaaacaagccagctaataatgaggcaactcgtcaaacaccttgagtgcatgaaaaggttcatcagaacataaaccactccactctggtcaaaagcttctaagaaataaattcaactcaaatcaatcaaaacttaacagaatctcccaaaagcttttaagaataagaagaatctggggataagagcgaaagtgacaaaaagtgatagaaattgataaaatccaatagatctagcgatgta

SEQ ID NO: 11053 - DNA, 473 bp, Arabidopsis thaliana landsberg
tgtttcaagacacacgacggcacacgagaactaagcggaaaactgatgcgagtcgcggcacgatgaaacgcgcgacaacacgcacaacctaagctaaaaataaaatgagttgtcgcgcggtgaagcgcgcaacgcaacacttagactaaaccgaaattaaacgaatcatcgcgcgacgaagcgcgccacgaagcacttgaattaaatatgaaaataacgtcaagcgtcgcgcgacgaagcgcacgacagcatacgtcacttaaactgaatttaaaacaaaacgtcgtgcgactaaacgtgcaacgtcacacattaaataatctgaatttaaaatgaatcatcgcgcgacgaagcgcgcgacacatcacactaataaatctgaatttaaaataaatcgtcgcgtgacgaaacaggcgacgcagcttgttaattaaactaaacttaaaactaatcaaatgaacattaatcaccgc

SEQ ID NO: 11054 - DNA, 870 bp, Arabidopsis thaliana landsberg
caacccactgcttattataggagttgtagaaaatcgggcaacgatattcgatgttagttattattagggccttattattatatggtattactaaataaaataatcatataaatttcacattttaatatacactcgttggacacgcggaatattatatgttctaaatgttaaaaaaatcaaaagaaatacaacgatcgacggatctagagtctagaccatgcaaataaatcatcctatttaaatataataactgtgcatatagtttagtcaaataaaaaggtaaagaaacaatatacaacctataacgtcaatatccatgtacgtagtaataattaggatatgacagaaaacacgatatcttgatatatacaaaatgaaaacttaaaaattgattaatatggcctggctgggtatattattaaaaaaacataaagagagatcaataattgattcgaagatcactatataaagaacgtcttcgatatgtaaaagaaccatcctaaacattttttcttgaataaaatcagaattacaaacaaaaatggttttgcaaaagcttcctctcattgggctgcttttgctcctgaccatcgtcgcctctccagcaaatgcagatggacctgtttgcccgccgtcgaacaaactaagccgggcaagtttccctgaaggttttttatttggcacggctactgcggcataccaggtacaatataagttcctctgtgagcacctcttgacatatatatacacaaaaatctatgaactatttcacacaaataatatgttaccgtgcaagattgttcaagacagtatatatagttgaatccatatatatcttaaaactatatatattggagagtatagaattct

SEQ ID NO: 11055 - DNA, 882 bp, Arabidopsis thaliana landsberg
cacttgatccaatcaaacaagtctagtttctctatatcttacaaaagtaaagatccaacggtgattgatttttgactgcataatgttgtgtaggatatataattgataaagaaatggtaaagatggctaaggagatgacaaaacattgtaaaagactaccattggctgtcaaactgttaggcgggttattagatgccaaacacacattgcgtcagtggaaactgatatctgagaatattaaatctcacatagttgttggagggactagttccaatgaaaacgatagcagttcggttaaccatgttctgtctttgagctttgaaggattgcctggttatttgaagcactgcttactctacctagcctcttatcccgaagatcatgaaatcgaaatagagagattgtcttatgtctgggctgcagaaggaataacatatcctgggaattacgagggagctaccattcgagatgttgcggatctctacatagaagagttagtgaagagaaatatggttatttccgaaagagacgcgttgacttcgagatttgaaaaatgtcagttgcatgacttgatgagggagatttgtttgttaaaagccaaggaagagaactttttacagattgttactgatccaaccagcagctcaagcgtacactctctagcttctagcagatcacgtagactcgtagtgtacaacaccagtatttttagtggagagaacgatatgaagaattccaaacttagatctctcttgtttattccagttgggtatagtaggttttcgatgggatcaaacttcatagagttaccattgttgaaggttttagatctcgatggagctaaatttaaaggagggaagttaccctctagcattggaaagc

SEQ ID NO: 11056 - DNA, 544 bp, Arabidopsis thaliana landsberg
tgttataatgctctatggtagtctacctaggagaaagcggaaactacgccaaatcaccctcccttttagatcactgctactggccaccgcttcctagatacctgccagaatgctacccaaaaagccctccgccagctatgccaaagcagcagggaggcctctgagacaccccttcgctactttccacctagcaacaaaaatactcctatttggaggaaaagactccaggccttgtcagggagagatcctaatgaagatgaccctaccatagtatacatgaccggatatctccacacccttgacaaccactttgacaaccttttctcccactgcacccacctaaactcccgggtggaaagtctagagcagcaaatcaaggaattgaaggaagaaaaggcgacccttcagatagtctcgagatagcagaaggcgaagaagtcaacactcgtgaggcataccggaccctgaagatggactatgctaggaggctaaataagctcacccctgcaaagaagatccgaaagcatttcaagagccagggatg

SEQ ID NO: 11057 - DNA, 1049 bp, Arabidopsis thaliana landsberg
cgataaagatatggaagatatggctaaggaaatgataaaacattgtggaagactaccattggctgtcaaagtgttaggtgggttattagcagcacaacacacatcgcttcagtggaaaattctatctgagaatattaaagcatacatagttggagggactagttccaatgataacgatagcagttcggttaaccatgttctgtctttgagctttgaaggattgcctaattatttgaagaactgcttactccacctagcatcttatccagaagatcataaaatatatttagaggaagtatcttatgtcttggctgcagaaggaatagcaaagcataggcattacaggggagctaccattagagatgtagcagatctctacatagaagagttagtgaagagaaatatggttatttctgaaagagacatggtgacttcgagatttgaggtttgtcagttgcatgatttgatgagagagatttgtttgttaaaagccaatgaagagagctttatacagattgttactgatccagattgtggttcaagcgtacactctcaagcttctagcaaatcacgtagactcgtcgtgtactgcacaaaaacttttaatggagagagggagataaataattccaaacttagatctctcttgtttatttcagttgataagtatagttttccgatgggatcatatatcatggagttaccattgttgagggttttagatctcactagagctgaatttaagggagggtttttaccctctagcattggaaagctcatccacttgagatatttaagtttatatctggcaaacgtaattcatttaccttcatctttacggaacctgaagtcgctgcgctatttcaatctagatataggtttaggtctgactgacggggcttctgtgccttctgtgccaaatgtctttaaagagatgcatgaactgagatgcctctggttaccattgagaacaactggtaggacaaagttggaattgggtaatctactcaaattggagaagttaatgaatttctcaacaaatgatagca

SEQ ID NO: 11058 - DNA, 1264 bp, Arabidopsis thaliana landsberg
tctgcatgtaaaattgataaggaatgtggaagctgcgggactgataccagcttcctgcatttgttgagatctaatttcttgagattaatgagattcccaatagatgaaggaagctctactaggcttgagcattcactaagatccaattccttgagattaatgagattcccaatagatgaaggaagctcccctaagcttgagcatttactgagatccaatttcttgagattaatgagatttccaatagatgaaggaagctcccctaagcttgagcatccacttagatccaattccttgagattaatgagattcccaatagatgaaggaagctcccctaagcttgagcatttactgagatccaatttcttgagataaatgagatttccaatagatgagggaagctccaccaaacttgaacatccgtggcaacaaaaaaactggagattaatgagatttccaatagatgagggaagcttcaataggcttgagcaaccttgtagatctaagctctcgagattagtagcattcccaatagaggaaggaagctctatcaaacttgagcaatgagaaagagacattcccaagagattaatggctgttgagagattaggaagctctttcaaatgacttgaataacttaaatccatcaccttgagattgataagcggctgtaatgaccaaaagaaaaaaagacaacacaagagaacaatttaaatgccatttaaaggctaaaaccatgctttttcatctttattttcgaaactaacaattttatacaaaaatagaaattcaaataaaataaatttcataaaagaatggtaaatgcttacttgaattccttcccacagtctctcgagcttgctgaaatatatttttatcttgacaagaaacttcggattaaacttagaaggcaagcttgtcaacggataataatcccaatgtagaattctaagttttggaggtagatagtttagaccttgtgacaagtgcaatcttccataataattatcattgaatctcaaaaattgaagattaggcattccttcaaaaactctctcacttatatttagttcgtccatgctccgataaacttccaaatttatgcctataacactttcacttccctaataaaatacacaaatatataagtaaaggtggttagtaatcaaacgcattaaatttgtatatgagtaaaaaaactgaaggataaatgacaacttactgtatgactagtgagtacttcacaaatttcccttccatcaac

SEQ ID NO: 11059 - DNA, 596 bp, Arabidopsis thaliana landsberg
tagtcaaatctatctggtatccttcctcattcaactaagactatataaaggagttgcagcatagtgtaagaaatcaatcaagataaagaatatcaccttgttcatggtatcaatgtatgcagcacgaacatccataaacccttcttttccatgttccttgaggaaggagataatatacctatcattaaattgtaattggtgaatgaagtatgtatccacataaatcttgtagaagcaatataatatcaagttggatatcagtaacatgtaaaataaaacaactccgtcaacatcacaaagggaaaatccaaaccaagataactaaccaaaacgtttgtaaggtgatgaccacatacacatgccgaaaaagttaacagaaacatacatgcaagacaggagacgttgtacaatttgtagtttcactacgtcaaaaccaattaaaggggcttggagagcataactcacttgtactttaataacacactctgttgaagaatctgaatgtttgttttgggtttcctcagggctataagcttctggacaataaaatcatacacctgcacaacgaatttaaatctattgcatgagaacaaatt

SEQ ID NO: 11060 - DNA, 572 bp, Arabidopsis thaliana landsberg
gaaaacacacactctgttgaagaatctgaatgtttgttttgggtttcctcagggctataagcttttgaacaattaaatcataaacctgcaaaacggaaataaatgagaattgctccctcgacgtgcatgcccttggaagcattggaacagaacaaacaaagacataattgttacgaatcaagtaacagagaaagtagattaacaaccttggaaatagctttttgccggagcttttcaagctcaggctctacatcttttaatgctttggaacttttaactgcttgatctgtttctacaaatttcagcttcttgctcagaattccaagtgttttgatatactcttcattcacctgaatacagaaaatagcaagactatcagattagaaataaaaatcctaccaaagcaacaattacatagaaagagggaatttgaaaagatacctctccatcaacaattacatgaatcatctttggtggtactataaagtcttcgacaaattttgctagctttgattcagtcacctgttcatataggagagcttgttttgatgagtcacacacatatgaaaata

SEQ ID NO: 11061 - DNA, 1457 bp, Arabidopsis thaliana landsberg
cttcggacctccggaaggaaaaagaagaaactcgtaacgtttaaattcctctcgcaaattggctcaatagtcaacgaacccaatgcgaaaccgcttctctaaccctaaattcgaaaacgaaaaccaaattctcgtttccctcaacaggatagaattaagaaatcaaacgacggagaaatcgttaaactctaaaacgacggagaaacaacaaatcctcctcgtagattccgtggagaaaattatcagtcggtttcagtacggagaagataaaaccttaaaatcgacggcaagggaaaacaaaagaggaggagaaggatctttgtgttctgatgaaggagacacacaccgtccgtcgtcggtttatatatttctccttattattattttatggttaattctgaaattaattcgcctaaacaaataataaaaacgaaaataaaaaaaacgaatatgctgacgtggcggttgaatggaacagtgtttggctccagggattggggacgagggaagactgcgaattttcaggcgtacgagagcgccaagtcgaaatcttccttttcatcaaatctgacgtggcgcatcaataaataactctctcgtttttcttcttgtcacacaacttatttagaaaaatcgaagcttgttgggctacatattgggcctacgatgtttctcgtggaacattttgacaattaataaaagaaacaacttcgagttaggcccaatatggtgcgaacactgtatgtttctcatgcaacaacattttgacattaccagacaatggaggaagatgatccttttttcatttcaaataagactcaaaacttatcatccaattatacgttcatgatttatatgaaagatgagagattgcatttgcatacaaaaggaccatatttttgttaatcgctccataatgttagccttagggtctagggacgtctatgcacatttacaaactcataaggaattaaagaattacgtatatttcactttccaggaacaacaaccttcaaaactcaacttacatgacaacaaattgagatccaaaaagaaacaaaccttataaaaacaaatatcaccatgttgctttaaagtctaaaccaagaccgatttccacttgaaaatcatattgccgatgccagaaaaaaaaaaatcaaattacaacacatatggactataaaatcagtgaccaatgattatggggaaaacaaaaaagtacctttatgtacaagaaaaaaaaaacagaagatcttgaatcaaacactagtactagaacttggatgtgtctcaaaagagggagggctgtgagaagatggtgagccgatagtgccacgaatcctgaatatttcaagaacaacaaaagcaagtaacgtgactgacagaacaaatccagatccaattttaaatccatctcctccattatccgccattcgtattccaagaacaatgttcac

SEQ ID NO: 11062 - DNA, 721 bp, Arabidopsis thaliana landsberg
gaaataatcactgaaaacaactcatctataagaagttgggacaaattactacgtctcaggccatgctttcacttctttcgggcattcacttcaaaatttgatggctacaatgtttataaagctccttacgtctttgctaggagtggtagcagtcgcctttgatggcttgggtaatcaaggaggaggacttcaggaccattagctgtaacagagaaggctcttctcgataatgagtaccttatagcaatagataatccgacctgccacagtaaaaatcttaatcaactacattgattcctgaaacagtcaggttcatatcttacgtaagatttatgtacgagatcaaaataaaactactgaactctgtacctttgcagaataaattgcacttgatgcaattgtgactcggccagaagtcaaaggggccatgaatgctccaaatctctgaaaataaaattataaacattgacactgcaactcggcaagtatagtaaattctatccttaaattggttccaaggttggcatttacctgatcaggatctttaattgagctaacatacttcccatcagacgaaacatcagcaactgcattcaacaaattctctcttggaattcgaagattatcaaacctgcaatcaaagtgcaatcttccattgaagttaccttagtataagataaaataaaagtcaccggagttgtgtgttataccatatccggcc

SEQ ID NO: 11063 - DNA, 574 bp, Arabidopsis thaliana landsberg
  unsure (1)..(574): unsure at all n locations
gtatctttgcaggactggttgaagaagacatgtgggctaaagctatgtaataactcttggattcacaaatcatttgacatatctcggtgacaaatttgttttcccttctccttaaccattattggggatcgttttcgaatttacatgaatttgtgcaattgtcttactagaagatcataatcatacgatatttgctgattatcccccatacatataaagataaagagtcagttttgatgctttcttttgttttgcatattgagagacctttatctccataaactaaagtggctaaagcgacgggtggagaagtgactcacacgcatagcaaagttttcttgccctaaaaccaacaatgatagctttctcttcaagctatcaaaatttcatcaaagaataatatgaaacaataaataacacacattttccatggaatcgcacctacacacatatacttncaaatgtctntgatttgaggatgaagccaanaaaacaaaacacacgtatttcaaactatgtatatatatacctttctttcttcacccccaagcattatcanacgcagctgaagtaa

SEQ ID NO: 11064 - DNA, 1570 bp, Arabidopsis thaliana landsberg
ttacgttttagttttttacttgtttccaatacatatttttgtaatttcttattcttttcttgtaaatttttaacctaatcggtttatattattcaattttatgattgtaattgtcatcagaacaaagtcaatgcaatccattgaattttcataatagataattttgtatactaaggtaataagatataattgtaatcagatcttagtgaataatccctaaattaaatctaagtttaaaatgcatatatgagcaatgatatagttgtctttttagtgacttttcaatatgtaggtttctcatttttgtctattctatcttcttctgttttgggtcaaattatctatgtggttctattattcagtttccaaataaaacaaaatattttttttttctttcaaccatacattaattaaaaagaaactccataattggttacccaattaagaggaaaagtatttacaaaggtaacttcagaaaataaaaatctagaagagcgagttaagcagtccgctctaacattacatgagcgagagataaaggaaagcgagaaaagggggaaagaaacgcgtaagactccaagatcttctagcagattggagaaagcgggtcattttctagcagattggagaaagcgggtcattcttcaggtgactgtaccacataaattaaaataaaacaaaatctaaaaataataaatctgcatataataaatctgacttaaattatatatgatagcctaagaaatggtttgttgtcgtttaaacttttgggaaattgaataagaatccaagtgagaacgtacgtcgttttcatattctttgcatgtatgatgtatcatattatataacggtcccatgccaaaattattggactcttttaaattaaataaacagacgaattttattgttaaattgccaaagatttcgtgtaactgaccaactttgacgtcgatttccttcttctcttcaacaatttgaacaagtgtgattgtttgtgacacaggtttgtttctttctctctttcaatcaaatctcgtttacctaaaattttaagcaaagtttccatttttcagttttcattattggaagtcaaatctaattatccttcaaattttctcgttaaaaggttctttttcccacatttggatcggcgaatcttttgatataaaggtttgatttttttattttctgggttgctcttgatttgctattcctagattgaacttgttgacatttctctcatttgttatttcataaagctatcatctttctgcagattacttcatttctggttattctggaagagtagagttctcaaaagaaatggagtctaaggaaattagatcctcctctgtctttgagagatcgatgcgttttaatggactgtttcaagataagctgagagttgttgagaaacagaatcaaccaccaaaacggtttaaccaaaaggagtctatttctggtttcacagtgattccaacgaagcaactttgtcgagtttatctccagaaaccgaatctgttggcttgcaagggtataattgacgcactagctaagcctcctcatagga

SEQ ID NO: 11065 - DNA, 694 bp, Arabidopsis thaliana landsberg
atatgaacactgcttatggaggtttggcagctgctctgatcaatgatcctttgtgggtcatgaatgtcgtctcttcttatgctgcaaacacacttcctgttgtgtttgatcgtggattgatcggaacatatcatgactggtaaattcatcacgaccacctaatctttctaccttcaaacactttgagctcgcatacataatgtcgtctgttgtttcataggtgtgaagctttttcgacgtatccaaggacttatgatcttcttcacgtagatgggttgtttacatctgaaagccagaggtaatgatagaacaaagatctcacagctcagatctttgaaaatccattgatgatctgataattaatgatctggttttgggcaggtgtgatatgaaatatgtaatgctggaaatggataggatcttacgtcctagcgggtatgcgattatacgcgaatcgagctactttgcagattcaattgcatctgttgctaaagagctgagatggagttgccgtaaagaacaaacagagtctgcatcagccaatgagaagctcttgatttgccagaagaagctgtggtattcatctaacgcaagttcagaaacaaattaaataaacaaaaaagaaggacataataggacaaatcgaaagcttaagcttaaagcttttgttttgttcggaagtatcttgagaaca

SEQ ID NO: 11066 - DNA, 1387 bp, Arabidopsis thaliana landsberg
ttgcatttttcttctctcacgcattccatcgaacgtcttgtgaacaccttctccaatctccattaccaaactcaagtcctttgattataatacccaagacttacacaatcccacctccattgatcggttaaattcgtgatgaaagccacaaactttagagcagacgacggcattgaattgtggaatctggcaaagcattgtgagtgagagaagagtaaagtaaattttccggttcttacatttccactataccgagtcctggtttagacaaatttctttcaccgaaaaccaatcaaccaaaccgtaaccgaatcctgtgtgaattaaatttattgtcttataaaaattttaaagtggatagaaaagattaacgactgactgttacgtgttccgtgtttatagcttagatttgactaaactacttctattaatttagaaataaattacatttttttgctttttatcaaacaacttcataatacttgcatatttcgcggatttaattacgtttgaaattttaaatttaaatattaaaattatgatttaatagataataaaattattttagttgaacttaattttcagtaaaaatgaatttaacaagaatttcaatatattgaataatctgtttgtatattgttttctgtaataaaatatgcgcaagtaaattttatattagacttggtataattatttaattagtagattttaacttgattttataaacttatgagaagtaagagaaatatttgttttaatcgtatggattctcaataaatttagaagaaatatttttttcatttcttatttattttgaagcacacataacaaaagagaagaaaacaccggtccataaaacccaaaccaaaaacaccaaaggaaaaaaaaaacataatacttgcttaaaccataaaacaactacaccataactcttcttcttctttcattatctagttggaaggagagaagaaaatggcatcagaggtcctcttagatcggaaagccttctcaacctcgggatccaccttgaacgctgcctgcaaaacctccggcgacaaagccttccacaccgaagtcctcccggccaaatgagtgaatattggactgccaaaaacccataaaaatatgtaagtaaaaacaaccaaaatgttctttaatcaatcgaaaaagatgaataaaatcttactcaggagtggtcacaatggagaaccaagacaagccatcagaatcagcaatcttggagacaacaaagaacctaggaacaatgaacaaaacaccagctttcacatgagtctcaagaactctcttcccatcagcaccaacaatctgaacacgaccacttccaccaacaatgtaagtaacttgaagagccgagtcacaagagaat

SEQ ID NO: 11067 - DNA, 823 bp, Arabidopsis thaliana landsberg
acactggtgtttagattttttataattgtgggatagtcattgtttagattatgagtattatacatgtgaaagagacatctgcaatatctttgaaatctgctattgatgatttgtttgctaaatacagattgaacattaaaaaggggagaggacaagggtatgacggagaaagtaacatgaaaggcgagttcaatggattaaaatcattaattttgaaggaaagcacatcaccatattatgttcattgctttactcaccaatttcaattagttgttgtggcagttgtaaaaaaacatttgaatgttggagactttttttatttgatttctttgttgttaaatgtggttggagcttcatgcaagaggaaagatttgatccgagagaagcatagaaaaagattctagaaggaataattaatggtgaaatcagtactagaacatggttgaatcaagagatctctcttcaaagaccaggatatactcgttggaattctcactacataactctattgcggttgactaagttgtactcttctatcatcaaggttcttgaatgctttgagaattacggcgtagatgacttgaaaagacgtcaagcacatagtctcctgaattactttcatagctttgactgtttgttttagctacacatgatgatacaccttttagggctcacagagaacttgtctatggcgctccaaagaagagatcacaatattttaaatgctatgtcattggtgaaatcaactaagacacaacttcagtgttttagggatgatgggtgatttcttaagagtctctttatataattaagcctgtagatc

SEQ ID NO: 11068 - DNA, 423 bp, Arabidopsis thaliana landsberg
gggacatgtttaagttgtttatatgaatcaaaaggagatggaaaatcttggacataggttcttgatgagtatcgattctaactatttggggaggcttaaatcgttggcggtggccgtggatataatgaatacgaaagaacttgagatgttcaggcaaattttagttgcatggaatggaatcatgaaaaagttggatatatgttttaaggtacgaacattttagtcttcaatttaggtagataaatttaatgttttttttcgtttatcacttctgtttaattaatacgtatcaaatgcgaaacatttttatgtatgtacttgtatatatagcatgacaatgtgtataaggaagaaggtgaatcttccattggtggaacacaaatgaaaatgtgggaggagggaaaactcatttcccaaatgctg

SEQ ID NO: 11069 - DNA, 1064 bp, Arabidopsis thaliana landsberg
agacaatcgacagagtacaactgagcaaaacgggtattcgttcgtgcattgcaaggttactggagtcttaaccgggatctacttgggtagggcttggatgagccaccctaaggtcgtctactcctacactgaaatgtctagtgtcgtcaacccatctggatggcaagagaacagagtgcgtgcgcatgacaagtaagtgtatcaatttcacattatatgattatgtgataagaaaccaacactaatatataagcataatttagtcatttccaattgagttaaacagtcataatttctcacatagagatattgcaatagtttcagtttgccccaaaaagaaaagatattgcaatagtttttacaagtttaaaatgtgatttgtgacagtgcgaaccaaccattaataagtaatattttttatataatgaatgataggacggtgttctatggagaatacatgtgcacgggaccaggatcacacaaagcgaagagagtggcacacacacaagacattgacaacaaagaagctagccaattccttaccctcggctacatcaagggctccaaatggcttctacctcctcccgcttactaaacagacccaatcatcactaaaattctgtatatgttacaattgtacgttttgttttcgaagtgtcctctcttcctgtatataatggaggagtagagacttgtgtaattttggtttcatgataataaaatactcaatggttcacaaatgagaagcggataagaattcaaacatactgattattgtgcatggatagagtgacgcgactgattaatgttatgaatgacagtatatttgtatgcgaaattgcgaacacattaactataaatattttctagttaatgttaaaatgattggggacaatttctaaacaaaaaataatatggacattactttctatcattttttatgtttgatattagaactcgtattttggtagaaaattgttaacttgtgatttaaaaaaaaaaaaactgaagaatcacatttttagcagatggttgtgaaattacctttttggttaaaattgtag

SEQ ID NO: 11070 - DNA, 1406 bp, Arabidopsis thaliana landsberg
gtcgctaaatagtagttgtaatttgcgacttattagcgactaagttaatcaatctcaaattcaagactgattagcgactagtataatattgactacttagtcgctaatacgtcactatttagtcgccaaagttaacgattacttaatcagtcgcccaattaagtcgataataccgtgttttcttgtagtactgcatcttcaatgtctctcatggatgagctgaaagagttagatctactagacctgggcacaaggcaagtacttgctattttacaagtacttgtgacccgccttgactcgtacgagtaattgacatttgagcttgatacttgactcgtttgagcaagtacttgctagaacaagtactcgtttaaaattttgttacttgcaagtaacttgacccgacttgttggcttgttacttacaagctacttgttacttgaagtctcatacatattacaaaacatgagttctaaacatcacaaaacattaaagttctaaacatcttaaaatcacaacacattcaaagttctaaaagataagcatctttaaaacaacaacttggttcaaaatgaaatcgttcttatctaattatctttcttcttgagttcttgaatctcttttttgcctataaataaaaccaccataacaaatatatgtattagtgttacgctttaaaaccaaacttgaaaatcatgaagtactcccatgccttttattcttcctccaaactcaaacccactccttgcaccaaatttccataagaatttgaagttacaaattctgttaaaacaacataaaaattgtaagttcacatttaaatgaaaacaatcatatataacgtaaggataagtgtatagtgttagtgtctaccttgttccagaatttcaagttgttccattccatcctccaacaaactttgttcataatcgttacaaatccagtcttgagtgcatattagaacctcaacaagtcttggggttagagaactgcgaaaaggatctataacccgaccacttgtactaaacgctgactcagaagcaacaattgaaaccagtaaagccaatagatctctagccattagagacgaaatcttatattttgatcctctctttttccaccacaataatatatcaaactttggatctgatctcggaacacaagcatcagctaaataactttctagttctgattgaccatcaatattatcttcactttcttcatgtataacaatcaaggaatcaagttcatatatttctagagcctctacaacaacttctgaaggaccttcagcttggctagtttgcattgaagaaccagaaactttatcttcataaagttttaaacatcttcttcagaacccaagtttatttttataatcaaagcttcagctatgctggtaacat

SEQ ID NO: 11071 - DNA, 885 bp, Arabidopsis thaliana landsberg
atatgggtatgcaacataatcagaagaaacgaacaccatagtttatttcacgcagtttctcattcatcaccataagcaaacactttgatttttttcattccaaaccaaaaaatgatcattttcatgttgctgttcttttaaataatcagtggttgcctaatatttttttatgttccaccttgcactaaaagattagtttggacttcggagtacttcttatcatttgacttttgatttttgtttcaaatttcaagttttgttttacaaacgttttcatgtttcttcttcatcataatgtttggaaatggttttttttaagagtaacagatttattcattttcttcttctgtctttaagataagaaaaataataatttctttttataaataaaataagattctcattcgtaatttccattattctaatattattgtttttaaatcaattaagctttatcaataacagggttttatatgattaaattttgttagtaaatcacaccatatttttatatattttgaaatttatgtttaatgtttaatgttttctgattttgtttttatatatgttttggttttcactaattttatatctaaaatctgaattttcgttaatgtaacgagtctaaattctgatttcactaatgtctcaatggccaattttttactaaatttgtaaaattctgatttcactaatattccacaaatcaatctctaaatgtataattaaattactaaataacatatttttacggattatatcttaaaaaccaaaaagtataatcatattactttaatttaaacactcaacacaactttacaatataaatcagctgacaccaatttagtatttaggttctgaaaacgcatttttctaaataatttt

SEQ ID NO: 11072 - DNA, 870 bp, Arabidopsis thaliana landsberg
taaaattttccttttcgttttagatggcatgaatcatcatcatcgctttgctttcttgattctctatttcgtttgatgggatttgtttttctgggaatttattcattcacctgctgccatggctaaattatctttcaaggattctcttaaagctcttgaagccgatattcaacacgctaatacactgtaaattcctcccttctccacttttattgaaatttatcgacttttattgtaaagtctcgatttttagtttatctcagcgttcaagtttttttttttttttattctagttgttgcttaattttgtttccctttgattggtttgcatgtaagagaattgaattgaaggttccttcttgtttgcagtgaaaatagatgtgatttttctttttttaggttctgtagtttgattctctgaggtccactagttgagaaagtgatcactgagttaggcatttatgtagattggaactgtattttagtacaagcaatgaaagtttaagctcgtaattgattcttgtgattcttgttcttatctagttgacttgaagaagctgctttagctgaactagtattggtctctacacagatcaatgtataggctgctactgctagtgttgaagatgcaactttcttggaatctgagaatgtttctgtgattgtgtgttatggatcttttatattactgttaaagttgtggcagtatatttgctgtttgaatattttaatggttggagggtgcttatgatgatcttgttgtgttttcgttttggaaatgaataacagagctttagattatcctcggaagaagaaaagagcgcgcgttcagatgagattatcatacagcccgactgcgcaatttgtctt

SEQ ID NO: 11073 - DNA, 489 bp, Arabidopsis thaliana landsberg
aacgacaccatgcagtttaagtaagacttataaactgattaaaagattcattgctgcagaagtcgcataagcatttcactttaccgccctctccccagaggcattttccaccattagcccccttgtccttttggcaatttctataacaaatcgtcggaaatatcttaggcgcacagaagccaaacccaacatcacccccatattctttcagacactcgctatcatgtgcttctatctcaggtatttctgcacaaatatatgtacatacagatttaagcatataaaaaatcacatataatgaaacttattgctatcaccgaaagaaatactctttggatcctgtgaatcataaagttgaataaatatgtgagaaataaatttaccaaagataaccagaacgaggatgataaagatggcgaagatagaaagtgctgacatctttgccatggcgattctctatctctttctctctttgatcactttggagtt

SEQ ID NO: 11074 - DNA, 992 bp, Arabidopsis thaliana landsberg
tctgtctcggctacattttcatctacctacaccacaaacccagatcagaaacataaaactatggccgaaagcatcaccagtctaatcaaagcaatcaatagcatcaccgtctctaacaaaaaaactgaaactttagactaatttctaaacatctgaagtggaatgagaacataacagtgagctaaggtcacaattcacgtttaggctctagctagaggcgaaagaccaaatcgaataacaagagatcagaaatgggctcaagagtctcaatttccaaaagggtatacgatttacggacagaatcagctaaaaggcaagacatttgtaccttgacacgaacgacttggctcttgggtcgtctaagggggagatggcttccgagaccagaagatgggtggtaatgagaagacgagcaggaaggagaagatgagagaagacgcaatctcttgtcggaattcagattcgagtttggaggtaagcaaggttgcagaggattaagagcggtggcaaaggagctgaaggacgaggagacacgaatggcttgaaccgacatcgtcgttaatcgcacaactccagccatctaaatgcacccagagagagagatagagactgagattgttcttggttttgaatcttctccgagagatcctctaaggagaagaagatcagaaactgtctggttcagattccagtgatatttctctcatcatgtctctccaattatacatagacgcgatttttcaacattaaatagcgtttaaaccgccgtcatccacttggcgttttgtcgatatgatagttgaaaaagcgtaaacgcgtttttgtttctccgttagaatcgggttttaacaccgaacgcagataagtaaagcttttttctttacccccataacaaacttattaactaaatgccatctatgtttatttgtaatttggaatccaacttaattgatgtacaaacacagaaaaatctaagaaaaatatcaaatttg

SEQ ID NO: 11075 - DNA, 701 bp, Arabidopsis thaliana landsberg
  unsure (1)..(701): unsure at all n locations
tgtttaaaacaacggaagttaggtaagtgaccaatgaatttaccagagtatgaccccctgagagtgccacaatatccttatcagatagtcccatgcggtagaagatatctctgagatgttggaaacctacagagatataaacaatgtgaattcatagaaaaaatcttccaattccaaaacaagattatcagtagaaaacatgaaaagtttgttataattgatacaagaatttagtgtaccttgnnnnnnnnnnnnnnnnnnnnnnnccttggggcagacatttgaatcctatcaagaagaaacatacagtaattatgtttgctttagtgttaaactgataagctgttataatgtctcaagagatgagaaagtatacctttctcccgggaacgaacacgatgtcaggtccaccagtaacctcaactgctaccacaccagcaagctgaaacaaaacacttaaaagtaaataattcatatccaaaacttaattgccattaaactggtacacttctattgggaattataaataaagcctcgaccttgtaagaccaaatataaaatggtttatctgcaatacaaacagtcgtagagacaggttataggttcagacgacagacatgtgacttaggatggaaacagattgacattacattacagtttccttcttggtcgtttgaattcattgagtgtatattttactt

SEQ ID NO: 11076 - DNA, 983 bp, Arabidopsis thaliana landsberg
  unsure (1)..(983): unsure at all n locations
gcgatggtaaatgcagaaaccagtgggatattttgtctaatggtgcttcaatggaaaacacacttctcgtcccaaaaggacaacaggaaggaagctgcgtctctcttcttcgtgctgctgtgagtttataatctattctgaatctctctattcattaaactccaaaaagatctctgttcttggttactgattagatcgatttgcaggggaatgatcaaaatgagagtagtatgctcatcttgcaagagacatggaatgacgtttctggtgcactggtggtttacgcgcctgtcgatattccatctatgaatactgtactgagcggtggagattcagcttatgtggcgcttcttccatcggggttctcgatattgcctgacggatcatcatcatcgtctgatcagttcgataccgatggcggtttggtgaatcaagaaagcaaaggatgtctcctgactgtaggatttcagatcttagtgaacagcctaccgactgcaaaactcaacgtggaatctgttgaaactgttaacaacctcatcgcttgcaccattcacaagatcagagccgctcttcgtatacctgcttagctaaagttgtaggacctaatcttgtttctatgtctgaaacaatttgtgagagtgtagccaaatttgagactgagtagctagtagaacaaacaaataaacaaacaaatggaccaaagtttacaatttgcaaaactgatttgtttttttgtgtttatgccattttccactgatacataaaaaacgttgggaaaaagctacagacttctcaagaaacatacaagacacctcgacgatagaaaacaagactcgctgaagtaaaacccgaccaaacaaaaagaacccaccaagacatcaacaaaccaacttgtttaatgaaatcgctacaaggcaaagaaccacataccagttgagatacagcanaagagctcaagtcaatctgagacaagccgaggaaaa

SEQ ID NO: 11077 - DNA, 2054 bp, Arabidopsis thaliana landsberg
aaagatgtaaaatttgtacatgggaagcagtaaaagatggtatttatggatatagcgacaaacatcctcaaccagctttactgttttataagtggttaaaatagtaaacaatgaagaaattaagatgtaatgaaattttaaataaaagttcaagttacccattggtttatgctttatagtaagttggggtttttcagttgtctaagagctagaaaatcctacaaatgtctagttgcatgttgaagctctaatccctttcgtcggttaggttaattttgtagatggaggctgataaaaccctatcgtatatcatatatccactttaagagtagtaaaaatttgacgataaaccaaaaaaaaaaaaactctttcctttccacgtcattaccggcgataagtttacctcttactccctccatctcctttctccatggcttcttctatagtagagccccctcctctcggttcctctgtatccatcgctagattcctcgatctcgtctgcggtggttgatactcagccaaaaatagaaaggtgtgggaatagtttctaccaaatgttgtcttgggtggtctctgcctataattgtttttcttcagaggtaacatgagttagatctctagacttagaaatttagcaagtgtgatattgtgtgttcacattctccaaatggtcaccagctgctaatctctcttttccagagttaatatatgttccaatttggatcatcttaagatcgtggcatagtgtccatgcaatctctactaacttttcaaaaatcttagaaatatccctaacctccacttatgttcatagtagaggttgagatcattaaggtcactcaaaaggtcattaatcaacgctccaaatctccatagcctctagatttaagtttgatgtttgttaaagttcgtaaacatgaagcattgtcagcaactcttacttaatactcctaatacattagtggaggattttgggtgtttgtctgcttctaaaacaactcttttaggtgcaggaaaactgtcaaattcacgagtaatctccattctttcttttttgacttctcaaaaagtattcattcaataaggcttagagccttctcaatcaccatttttccccatgatgattttttgctggcatgtaagaggcaaaaatggacacaaaaaatacagaatattctctggttagattaccgctattcattagtcgtcttttgtaaacacatatcaaacatacaaaaaatctcagtcgtactatcatgcagtggagttatatggaatttaccgaacttcgctagcaatggtagaactttggttggttagaaaatcatctcctagtggtaacttacgagaagatagaccaacaaatgctttccggagttctaaacccggcattaagtcacactttcacgataccgttaatgtactcaaaatttaatcacactatggacatccatttggaaagttttttcaaaattaggtgtgaattatctaatgaatactcctaggtagtgttaactaggtttctatacgcaatagaacacttctatgttactcttgatttcttgtcaaccaaaggaattgcaaaaattccgaacttcctttcttcaaataaccttgcttattatcgtggagccttttataagtagtgatctaaccactcataagctaagcattgcttatagtaacgaagcttggtaagattcatttccagattcaatagtagtatttgaagtaatgttaggtcagattattctccgtgattagtctttaaatctgagttgataatcaaaagaataaaacattttgtgccgtgatatacattgttatatagacaagctagcagatctttacattaaacgacttctacattaaggaaaacaataatgactgagcagatcttctggagtgattgatgatatgtcgtgatttccttgttactctaacagcttcatgaccaagtctcctttaaccatgtcaaaccattggttaacccaaaccatccttcaataatttacaccatacaaacaatatattttcacttacccaaccat

SEQ ID NO: 11078 - DNA, 728 bp, Arabidopsis thaliana landsberg
tcccccaactggggaattcatgggcagctggcgaaattcttcacagcccactgttagtctccgcccttggatcttaacctgccaagttttttcagacgggtcggttcttagctccactgtccttccttcgtttcttccttgtatgcgttttgagaaaaacttcacaggaatgttctgcaacaacatgcaaaagagattattaaaacgaaaccatctctctcaacataagctgtatttactcgtataagagagtagtacaaggtaagagtcgaagccgggaagaagtggctggaagaaatgtgagtttttcggagattgaagaactggatccgccattgttcaaaagatttagataaagcgtttccaagaaaagaaagccctagaaaacaaaacaaaaaaatgattcagtctaagtttatgagtgtcttttactcttttggtaatcctcgcatggttcctcttattaatgagagctccagctacctgtttcattaatgaacactccttttattctcttttcattaaatgagtcactactttttgttcttttggtgaaggaaaattcattaccaaaaaaagattggtgctaacatctcgtttactgatttggtggcattgctcctttttctttattttctatttggagatataatctagttttgtggcttttgcattagctgaggcagagtatagatatctatatagtgtaagttagttttaagagaaat

SEQ ID NO: 11079 - DNA, 556 bp, Arabidopsis thaliana landsberg
cgaagagcagccatgagatgataacgaaaagacactgatctttaacttagacttgagtcatttttttgttgaacaatggcggatccagttcttcaatctacgacaaacccacatttctttcagcctcttcttccttgcttcgactcctacctcgtactctgtctctgtccctttctacgagcattagcttattgagaaaggtggtttcgttttaaaaactctttttcatatttttgcagaacactcctgtaaccttctaatttgtaaagattaagttatttggatctttatgcttgttggtttttttttatttttattttttttaactaaaatatatttatagaattgggcttcccagaaaatgggcctggccttgaacaaatacaattcagaaaacagccacaaaaagggttaaacggaaaagtcgaatgcttcaccggagagaagatccggacctgctgatggacggaggcaaagaatgagatagataacccagcaaacacaagacccacggtttagttaccacatttggatctttatgttggtgattcattta

SEQ ID NO: 11080 - DNA, 954 bp, Arabidopsis thaliana landsberg
gtgagtttcttctctgactcttctcacttccatttaaattttttttactatgtttgttgttatagatacatacacatagtgaagaagcacggccttgagatttcgcagcctggtttggacccatagactgggttttactggcagatcacaaaaagaagagaacatagtgaaatccacaagtatatacaacgtcctttatagattatttttgttacattacaaaatggttctgatatggcttgaaccttagcagggagacagatgagaaactcgagtggtgctctaatcctccccgacctccatgtatgcaactattataacctctatatttttgaaataattggcgcttccgtaaccaacctcggaaaaacgaccggaacccatttggtctttgtgtgtcgtccaaagctgtaagtgtccacgatttcacaatccaatcaactttcgttccataatcagctaaagtagtaaaaatttccgtttgccagtatcctataaatgaattgtcgggccctaaacttaaccaccaatttccactttgagatcatagcaatttaaaaataaaattactagcatttttgatgtttctttgttcttatattcctactattactacttttgtattttttcggataaagtcacttctatagttactttaaaaaaaaaaatctttttgatcaaaagttatatttactcttcgaacaaataaatacattttcaaaagattcgttttctacacaattttaatcataataaaatatttaaacttttacttgattatagtttagctgtttcttcaaacatgatttaaaatattttgcatgcccttgaaactgtgtatgagtgtatcgaaagatgaaatcttaattttataacccgaaagaaaatagatggatagatatatttgaaaagctaattttgatcacaattggacgatcacaaagacgaggttgg

SEQ ID NO: 11081 - DNA, 499 bp, Arabidopsis thaliana landsberg
tcatacacatagtgaagaagcacggccgggagatttcgcagcctggtttggacccacaaactgggtttaattggcagatcacaaaaagaagagaacatagtgaagtccacaagtatatataatgtcctctctagattatttttgttacattacaaaatggttctgaatatagcttgaaccttagcagggagacaagtgaaaaactcgactggtgctctaatcctccccggcctccatgtgctgcgtatgtttcaaaaaacctctctatcatactcaagtttcagacatatttaaaccattagttaactttgttatgtctttaataaaaaaacagattcgtggagataatggctcctgtattctcaagagatgcatggcgctgcgtgtggcatatgatccaggttacacttactttattatctattggctccttcatatcttcatataaatggctccttcttgcacctaattgtatctgacccaaaaacaagatgatttg

SEQ ID NO: 11082 - DNA, 896 bp, Arabidopsis thaliana landsberg
cagacaaaacgggagtctcggtttgtttatcccacccaacacgttaagtgttgaatttagaaacgaaatgtgtattaacatttaatgctaatagtgagctgtctcgtggttagtgatgattataggcacatctaagctctcctgaaacatagaccatgcaagtgttagagtctcactcgttcaatgaattatttagttagtttcgatacaaaattcaaaggcaacaagtcaataacgatggctgaatgatgctgacaaatcgtataaaaagaaagatatgaaaaacaggaacttaaccgaaccatatgcaagcccgtgctcggaataatatgtgttttattttatctattattaaagattcataaacaaagtgtacaggttcaggcctacaatccaaaaatgtaataaaaacagacacgtatgagagatgcgttaaacattccggttaatctttgtcgtcaacgattccgattctggtgaactcaatcgatgctgtaaatttcttaaacatcgatttactttgtttttcaccagattctgcatagacatagagaagtaaatcaataacagatcattcaaccctataagataaaaaggaaaaattctgattaattcacaaaattttgtttgatcgaagcaccaaaaacaactagagacggctatggcaatccaaatttgctggaaacaactcttcttctctttactttaggcgatttgcaagatcgagcttccagagatacaagtcgatagattgattttaagtgactaacacctaaaacgaatcatcaattaaaatctataaaacgaatcatcaattaaaatctataaaaaaaaactaaaaacaaatataaaagccgaccaaaactgcttatagaagctagatttgccagacagaa

SEQ ID NO: 11083 - DNA, 812 bp, Arabidopsis thaliana landsberg
tccttttactcacgttgcgttactttgtttcttttattttggtgtatttaaactccagccatctacttgaaaaattgacaaaacatagtttatttctttaggtacttggtcttgtgttacacataaacacatctcttagctatgaggagggaccacctatcacacaacttggtcagaccgacgatgagttaaacaagcgttctaaatagaccgaacagaagaaacaaaatatggaaaaatcactgaaggaatcaatttagatccatgcacttgtcgtaagaaaagtcacttaagtcgagtctttatggctctccatcatttgtcaaagtcaactaagtctcccctttctctatagctttaatcactctctctcttttttcggtttctaatcagagcagtagtattcacacacctcatggattctttatcatccatgggatttcaaacagctagtttttttctgatcttgttattcttgttttatcatcttccttgtgttccaagccagcaagaacgaagtaggttatgtaaaccttttcagtgtggcgacatcaccgtcggttttcccttctggggagagaatcgccaaagtgattgcggtcacttttctctgaaactaaactgcaacaaaccctcaaacacaacctctcttacaatctcaggccacaactacagtgtcctccatatagacaacaaatccaacattcttagcctatccagacaagatttctcaggtcctttctggtctgcttcattctcttccacacctttgcgttcagatcttttccagaatttgcaaccttacagaaacc

SEQ ID NO: 11084 - DNA, 1240 bp, Arabidopsis thaliana landsberg
ttcagataaagctataggtatgcgtgtgcaaatgatacaactatacgaaaacaatatttgagatacctcaagagtaaatatttacaaatacatataccagcttatgaccgatatccaataattttatgtacctatatttttttccttatttgcgactctaagaagtaggaagcaacggcaaatcaacctcatcacaccactctacacatctagtctcataaaacaaagtgttcaacttgtttggccaataagttagccaaattttgccacccattctccacttcaacacacttccttccatctctctcccaactctccacccaacttcatctccatactcatcccttccaaacaccatccctccactcttcgtaaacacattctttaaaccctcttggtttggcttcggcttaactgttgtcacttcttggccgctctctctatcgtacaacaccgcatcgaaaacagcagcgtttccttcgctttcctgctctattctccaatctttaaccttcctctttgttgccattcttgctcttgccttgactctcggagccactttaccttttccgaaatttccctttagcactctagtcacctcgatatctctctcctcgttcttcgttgaccttcctagacttagccccgatacgtggctggacccgagttctggcccgagccagacccgtacccgtgatgggaagtacctctcctcggagtaacaatccgctatctgattctccacgccaactcctcctttgtgaaaccctagcttcgagacgtggatgcgtatgttgtctacacgtgcgtttacttttatgtagttctcatagaacttaacggagtattcaaactgtactagtatttcagcttgttgatgcgacaaagcgtaacgtaggacagcttctttaggctctacgaatggaaacttgacgatcttgttgtgaacctcgttagagctattatttgtgacgttcattgacaagattgggaaataacctttcaagatccaaagaccatgagcttctgtggcatacgaaaaccccaatgaatgacgtggtatgaggctgctactgaactgtttcaaaccaagattcccaagtcctatctctttagagatcatccatttggataaggcatacgaagcagctcgtacaatacaaagcttggcgtctacaccgagagagacgagaaacggtccgaagaaggtgcatgttgacatgtaagcgcgttcacgtgt

SEQ ID NO: 11085 - DNA, 158 bp, Arabidopsis thaliana landsberg
acacacacaatatatttaaataattgacaaaaggttattggttatggactaggttaggtaagaccaaaatcttaagagacaagtgcaagtcattagcagaatatatttgaccaaactatttggcttccatattctcatatgtgtgaagagtttcaagg

SEQ ID NO: 11086 - DNA, 737 bp, Arabidopsis thaliana landsberg
  unsure (1)..(737): unsure at all n locations
tataatcgtatatattttaaattttaaaaattatttgtaacttagaaatttttttggtctgcgggattcaaattttatattttggatatgttaaaagtgtaataaaccattttaagtttgactgtctttttcaaaaaaaaaactcattttaagttgaatagctagactaacatttgattcgggtttaattcgaatttttctttctcggttcggtttagtaattcggtctccaagaggccctacgagattttgcgttttaaaaaaaaatgttgtcgtcaaattggtggaaggcataaaatgccaagttaacctctctgtttttttagttgtacctttcggatagaaatatgtgttacattctcaattatgatcttcaaaagaatgatttgaaaagaaattgtaattaattagaggaatcccggagcattggtttggtaatccatacttattcatttcaattatgatcttcaaaagaatgatttgaaaagaaattgtaattaattagaggaatcccggagcattggtttgttaatccatacttattcatttcaagcctacgtataagagtgaaatcatcatgcacttggtttggtaagcatacacggcnnnnnnnnnnnnnnnnnnnntcataatgaatctatattgcgtttttgtgtattaattgattcaggtaatggatacaactgaagagcttaaatcagtcattataagctatacacatgttntgattttttagt

SEQ ID NO: 11087 - DNA, 966 bp, Arabidopsis thaliana landsberg
atttgggtgctaagtaattattttccgactatgattatgtcctcccagagagtcgtctgcgttaacataccggggtcttatgcggtttaggtaaacacacacaaaattgtattgacatgacttcgtgtgtaaataaatcttggacaaagtacagttttgacttcgtctatagtcaatcttatcttatagattgacgtaacctctaacaagaacataaagacttgtgtttccaactttgaaatatgcaatttgaattgtcttctagagtccatacaatagtgatcgttagcacataacctaacgcatatgttgcataggaaatatttaggtaatgtactaatgtacatagattcttttattttgaagtttgaacacatggacattgtttcatcagacttggttagtgaatttaacatgagcttgcaatttgaaaaacaaatgtttgttattagtacgaaacatattctttatggatacattttcatcttcatcagtacaataatgaaatgcaattaaatttccttgaatagcaacattagagtagaaattattaatgatgtcgtcagaggaatattccgagaacaagctgtcttgattcgaaatccaatcttcaacttcttcaatcgtttgcgacgatgacgttgcttcaacgcaaatcacgtcttcgtcgccgtcgcgtttctcggtttctttatgtttctcgcctctcacttgaatccatccgccatcgtcttccgtatcccaatcaagtaagcttgaaaactcatctccggcgagtttctcgatccgatcagccggtgaatccaaagattccgagtattcagcaaaagggtcttcatgatcaatcgaaactaagtgacttttggagctttcgcatgaatcccaaaatcgttgatccaacacagtgcttggagaagaagtcttgttcttcaaacaatcacttgtctgagattcttcgtcggcatc

SEQ ID NO: 11088 - DNA, 887 bp, Arabidopsis thaliana landsberg
aaagctttactaaatttgctcgcacttgtcttttgatacagcttaggtttttcttatttgctccacattttaaaattatggatgcacaaatggtgttgaaccgattttttattatggtgtacacaagtttttaacttaatatatagaacatcttgtatcgtatctacatttaacatggtgcaaattggctcaaaaatcttgttgacaatttgataatgggtttcataatcagacaaatctatgtattggattgtacagtccacggccaaccaaaaaaataaaaaaagcccaaaagaataggttgagtcataattagggcttctatatgactagtgtcaactagtatatattgaagactcgcatcgaattgataagacaagtctatagttttgtgttccgcctcagttaggttttagggttttgtcatctgtgattttgtttgctctgtttttcgatttgtgcatagaaatttatttaaatagaagagctgtgaggaaaaaatcgtgtgccagagatggttaatccatcgctgacggtaatacacaaccctctaagaagttctgagcttttctagatcttaatctcttcctcaattcatgtttttttcggatttttgtaaaaactcttttaaggacttttatgagtcgaggtgacgatagaaattcacaggtctgtcaatccactgatatatgtgatgtaattgtgttctcgacaggttctgatcgactctacaataaaaatccttaaaatcttgttttcaattttaatatttcgtttttgtatctttaaaaaaatcgttttcttttgaatctgagtataggatgaatctcatatattgatgttatttactactcgaaatacattgatgtttattcaccttggagact

SEQ ID NO: 11089 - DNA, 474 bp, Arabidopsis thaliana landsberg
aaaatgaaaataaacaatatttataatgctggtcaaattaacttcctagaggcttactgggccttcctgctaacttcctagaggctacatggctacagtaagtcgtaggaagttagctagctgacggcgctacataacttaacgccgtgaacctactaacttccgagaggggtcactggctctagaaagttagctaacttcctagagggctctagaaatttaagataacttccgataaaaaaagtgcgagagccaaacttccgacgggatagttttactttcgaggtttttgttaacttcctagagtttaggctctaggaagttaactattttggtatcagtgcgggactctgggactgtggggctcattcggtcgtgcattgctatgtcgactttcttgccgtgaccgatcgataatgttgaccaacctatgatcgtatggtgcactgtggtttacatatgagagggtagaac

SEQ ID NO: 11090 - DNA, 1551 bp, Arabidopsis thaliana landsberg
ttgtcgaacttttctaaaagactctatacgtcgtacacttttaactgagttttgtatctttgtaaatcaattatgtgattttaaaaatacaagagatcacacacaaataagtacaatggctaaaagcctaaatgtagtagctcgtttgcaagaataaaccgaacccactcgatcttacattcgaacacatagcttttatatgaaaaccatcaaagagaaaccagaaacataagttacaaatagaagagaagccaactaaaccatcaaagtccttttgggatcttagatgcagcggcttggtcaagaaaccagatagcttctacgtcagctgtgagccaagcagcaggcaagtcgaagttatggttgaaaaccttagctaccgcatcggcttgagcctcatcacatacagccatgaggttgtatgaagcgcagttaataaccggtaaagtaaaggtgattctcttcggaggcggttttggggaatcagtgatataggttaccaaatttgccttctccttgatttgataatgtcccgggaacaaagacgccatgtgaccgtctggacccattcctaagagctggaggtcgaactgtgggaagccagacgatttgtatgtgcgaatgatgtttcggttcaccagtcttttgagacattcttcgtagagtaatgctgcacttttggcatcaccaagggctgcacagtctttgtcgattggatatatgtttgcaattggtattggaacctaaatagtgtgaaatatatgtatatatcaaaatcatctaacaagacggtttataactaaaataaaatcatattgggaaaatatgcatataaacctacacgaatatgaatgacatcgtcagtttaattaatgtcaaagcatgattttgagttagcaactcattaacttcacaaagttttttttttttgcaatatatgccgagatgattttgtaattctagttcttttatatatatgaaattgaatatatatgtacgtacgattccttcttaattttaaaacaatatatgtttatatcataaatatttgtttgatacaaaaatttgcatcaaggtatcttcaaatatatagttcgttttaccaacaaaaaaacaaaaatagtttgataaatgaggagcaagaaaaataccttggagagaaaaccatcaaaggcgagtttgtagttgctgtcctcatggtctaatggaacaaccctctcatcgacccaaaaaatgtgccactttgaccattcgatactttcttgatactttggttccaacaattcactgcaaaagttaattaacattggattttaatcatttttatataatataagactaaataaaagaaaaagaagaagatttaaagattttcttatatagtagacctgagccaggagatgaggtcgccaccggaaagaacgacggtgaaatagcctctctccttgcaaaacttggctgagagattggccgtgtacatggccaaagcctccgataattctttctttgtgggaaacacaatcttcttactcttcgttttctccaaagcag

SEQ ID NO: 11091 - DNA, 1297 bp, Arabidopsis thaliana landsberg
aagagtgatcacaagataaagacactacccaatcaagtaaaggagattgctttagaccatagtgtcactaaataatgcttatttaattaagaaaaccaacaattcgttaatgggtttaaggaataattataaaattgaattgaaatgatgaagaatcattggaaacagtagtgggagaaagacatgatctctgggtatggttggataaagagaaagcttctagtgaagattctttttttattttcacagtatctcattgtacacaaaattgtcagtgacgcagtagaatttagcaacatttacatagagagtaacaccaaaaactcagaaacccagaacttgctttagtatcaaaactaaatacagatttggtcaagaaattggaaccttaatgtcgtcggattcgggaggagacacaggaggactgtcggtcaaagaaccgttaagtggaccactactgtgagatagccgaccagatgttcttggtgatacttcttgctgcaaacaaaattattaaagaagatgagacaaaagtagaatcaagaagaagagatgatgacaaatccataaacttgttattatgtttttagggacccagaaagcgagtgtgtagctaaaaatcgtaactttttttcttgattaatagttataattattgcgcgtgaaaattttctcttcattaatcacacttaataaagagagattcatgaacataatttgctaaaaattaaaactttgattgaccatatttgggaaattctgatgaaagaaacaaaataaaatttgtcaacatcgaaagtaaaaaaaaaagaatgctttgttttgtccggaaatgctctgtttttatctgaagaaaagacttacagagtgagacaagatacgatccatgaccatttgagaagtttctgaacaagcgaaggagaatgggtttccggtgacaagtccggtgtcttccgtgtcgccgtcgccgtctacgacggaggagatgggttcttcttcttcttcttcctcggttttggagaggagaatctgagggttgggtggtgttagagccttggagacttcgagagcagagacgctccatgaacgagctaagaactccatcggctcgagtggtgtctccggtggacggtaaaccgggtcgggtctccatgtcggaaccatgagtttttccatattgagagagagagagagtgatgagagaggatagagatagggagatatagagagagagagtgtgtgttttgggagagtctttgcggacgttgaacggcttgtcatggggatgcgatttttt

SEQ ID NO: 11092 - DNA, 467 bp, Arabidopsis thaliana landsberg
cctttttcttattaactccgttcatcctgctttattccctggagaggatgagcagggagcactatcatcagccgacttcatttgcaaactgatagagtgagtacatacgaccattttaaaggtatgctcagttgattctatgagtatccacttcatcgtgcaacatagaattcattactaggagcttgaaaatttcaagagacatggggtcagctttacgggaacagatacctcctcgcacaatactatctcatatttatttagcgttgcatagatttatcatcgcatttaccaagctgctagcctccataataagcaggttatttaactgagggcacaagaaacagggagtgcgcgtttaagaacctacatcatgtcctaactacttggctagactctttatgacgaacgaactgagcagaactacgatgcgattgaatctaatgagcttaggtaatacacgacct

SEQ ID NO: 11093 - DNA, 1171 bp, Arabidopsis thaliana landsberg
ttttttgggacttttttggtcaaaactttttttatcttttgacatccggtcagcatcatcagtacttaatttcttcttggataaggacattgtttagtttaataagcttaattcatatagtagaataatttaatatgattaccaaatgtattgggagttgtaaaattcatccgcttgttcattttatgtttaggtaagttttcaaaccctaaattaatcatagtctacacaatttttgtttactaataattaatgctataatagcgaaatcgtagttttacgttgggcaactgcgtggtaactggtattcattttttttttttttaactggtattcatattgggggcttttataagaattgacatatattgagctgaaaattagaaaataaacacttttatgatgagtttatagggttggatacttttcaaaactggttcggtcggtttagaaattttgtttcgggtcataacggaggcctagacttaatttatcatatcttcacatgcatcgccatttctattttatatgtgttttctagtgtaggataaaaaaattttatattgggatgtatataaaaatatgagtgtcttttcgaattttttctagtatccaagacataattggaaaacatgattagggacaatgtttacataaagaaaagttttttcttagagggacaatatttgcataggtgagaaatctgcttagtggaaagacgacacttaagatatgtatttatcttttagacaaaaaaaaagatatgtatttattagtttacatgcaaaaggccaataagttctctcgtcaatggacaatgaatcagaagcattccttattttgttccttcttctgtattcttgaggtccctactgaattgtcaacgtctacaaaaaagctcccctatgatactcattttcgacggcattacggtaaacaacgttatatattttggatataaaaagaagaagataaagcatatatccaacgtttactatgctgccatcttgagattgtaaggatacgaattaggtaaatgttggtcacaacaatattccgttgagttatagcgtctcactaataaagactgtatcctaaatttctaataaagaaaaaaagagagttgcatttaccacattcatctagttagatatgaagtgctttgaatggt

SEQ ID NO: 11094 - DNA, 1790 bp, Arabidopsis thaliana landsberg
ctcaattaaattaggtttaccgatgaacacagccggcagatggataatcgtcgtgtgttttttttttctttgaaacaaataatagatatgaaaaaatttgatttttaaaaataatggatccaacgttcccaacatatctagtgtttgaccattacatggataaagttcattgatatctttatttttttaagattaaatgtgtgttgtacataatattataaatagattaaaaataaaataattttttggaaaagaggataaattcaagctctcgagagttcgttataaatccttgtgttaaaacgtaaattactctttactctaatattttaaaattttttactctttataacgttaactaaatgtccaaagttttcttaaaaagtgactacgtatatatattatgcacgtgttataaacataactataaaaagacttaagatccacttaaattaatgttcaatgattatctttagattataaaagattgctatttgatatcctattatttttatgacccaaaaaaaaaaaaggtttaaatttataacaagaaagaagacatttaaatgaaaaaactatatatataaataaatcaaatgagtttgagtataaaatgtcaaatttcttacacatgatcatcaatattacacatatcatcaacaagacacgattcacagcattttctcgacctattaatggtcaaaattaacatattcacaaaatacaaaaaacccttgaagatcttcaccaagccaattccaacacagatgtaatacatccaccagttcacaaaatcgagaccctccaaacgtatctgaaggttacgtttaacctctgcaaccaccaccaaactttctacctcatctcttagcctccaccaccacattagaccaaaagtcaccgccacgacagctctctccgaccatctctcctcctccacgtaaaccccaaacacagtgtcgtcaatcaccggcttaaccacgactctgaaccacattagcatcacttcgtgtaggcccaaaaagaacataaccctaaccaaaacccacctttcttgagcagcaagagaaaagcttttgtctgtatcgatagaaatggtcgtgctcatggttccttcgattccgaaggcgacacaagcttgaacgatgaagagaacgatccagcaaatgtatagatgggaatgcagaacagagcactctggtttcccggagagaatgtggattaaagtggagacgatgatgagggacaagattgtgtataagattccgacatcggcctgatgaagaagggagaatactccggagacggtgactggagctgaggaggaggaaacggagagacgtgaaaggaagaggaaagagagagggacaagaagactaagaaggctaatggagatcatttgaaatggtcgaaccagtgaccagctgattcctgtcttcttctgtgtttcttcatgttccatcttaattggcaaagaagaggtagagggagaagaagaagaaaaaatgggaagagactgttgcttgaatgagaagaaacagaggaagtaagaaagatgtatataaagctttaagaaagtgtgtttggcaaccacgtctatggtcgtctagctacaaaggttcctttcttattcctttattttcttaatctactatacatatatttaattaaaattgtccagattttttctaatgtaaaacccactaattttcatttatttgctcatcgatgaacacaagccgctgatggaccattctcgttttttaaaaaacaaaatattgatttttttt

SEQ ID NO: 11095 - DNA, 710 bp, Arabidopsis thaliana landsberg
acatgatgcagtagcggtgactgagagccgggttaaactccctagcacgtattggcaaactaggtttgggaattcttacagacattcacgagatgagcctgctatgggaaatatcttacacatgatcatcattacacatatcatcaaaaacacatgattcacagccttttctcgacctcttaatgctcaaagtcaacgtattcacaaaatccaaaaaccctttgaagatcttcattaaaccaattccaacacagatgtaatacatacaccagtgcacaaaattgagaccctccaaacgaatggggaggttaagtctatccgccgtaaccaccaccacaagactttctacctcatctcttagcctccaccaccacattataccaaaggtcactgccacaacggctctctcggaccacctctcctccacgtagaccccatatatagtgttgtcaaccacaggcttaaccacgactctaaaccacatcagcatcacttcgtgtagccccaaaaagaacaaaaccctaaccaacatccatctttcatgtgtcgcaagaaacaagtttttgtctggatttatagacatggtcgggctcatggttcttttgatcccaaaggcacaagcttgggccatgaaaagaacgatcccacagatgtagagatgggaatggagaacagaacattctggtttcctgagagactggtgattaaag

SEQ ID NO: 11096 - DNA, 1183 bp, Arabidopsis thaliana landsberg
agaaaatgcaaagcacaaacgattacgactatatccacttatttgacgatacgttagatgctttagttgatcatttaaacaaaaaaaaagaaagagatgcaatgtttttgttcccttcaaagattttaagattttttagttaccaatcaatcaaatacaattatctacttcgacgtaagttataatatttttcaacgattgacggcatttcacgaacattagattagtatcaagaaataattcaccacgtgtcaaagtaataatacacgtgttcacttatcacgacacgtgtctattcacggacccacctctcatcgttccattgatgttaataaaagagctaaagattctctcatttgagtaatgcaacaaacaatgtcgagatttaggatactaccactgtccattttcctctgttttgttagcttgttcttctgcacagagtcttttacgcaccaaaatggcgtcgttccgagctttgacccgtcgtattcgtctccacttctggtcaagaaggatcaacgcacgtcagtcgtcgcgacggagtttggaaatatatcagccgttcagatcggtgatggataccatattcagttcataacattggagccaaacgcacttttgcttccacttcttctccattccgacatggttttctttgttcacactggtacgtcaaaacactcatctacttttgtgttttctaaaaaattattgatcggaccaaagaatcttaagccgtaagtgaaccgaaattatttgacactgataggtcaaattattttggtgaacaaagtaaattgaagtttatcaaaacatgatattagaactttggtttatactttggttttctcgtctaaaacattgaattaagcttaatattttttttttcttttcattggagccttcagttcttataagagcatggttagggtttattacaaaaagtactattgtgattgcaattgggattgcgtatagggactgggatactgaataggatcgatgaagacagcgagaggaagtttgaataaagacggggagatgttgtcaggctactttccggtgcagtcgtctatgtacatagcagcgagacacatacggattacgcaatctgtaatgtggggaagagtctaaacgatccatgtctaggagactactggagtgttcaagaccatctatt

SEQ ID NO: 11097 - DNA, 1808 bp, Arabidopsis thaliana landsberg
  unsure (1)..(1808): unsure at all n locations
ggaaatttggtagtaaaaaacgtcatcaaatgaacaaaaaaaaacttggaaactatatgagcttatgaaagtcaataaagtcttaatttccaaaggctaatctcaaagtgagaaaaagtaagctttccaatgcctaaagtaaaacaaagaaggaggaaacttcaaacaaaagaaaaagaaaagaaaaaggaaagaaacaaaacccaaaaaataaaagagcttgagttgcagaaagcaagaagctcacctgaaaaaaactgaaatctcctgtctgagtaaaaggttgtccgaaatcggattgaaagaagaagaagcagcagagacacgatccgtaattacaatctctgagacgtcgatttgtctacaaacccaccatcccaaaaagaaacatcgacaaatttaacgggaatttgcaaactaaccccccatactattcttgttacccctaacgaactctatagtcttagctttacaaatattaccccatacaaatttattgaaccggttcaaactgtcaaccggtccggttttctaggcaatgctgaaatcattaaacaataatttgtcctatgtcatgtgcaataaaataacctgcaaagcattttacatgggactttgtcccttctggccttccacgtacattctcacgtcaagtgcccaagtgtttccagctcaaaccctcaatttcaattcgttaaccagttggcagttggtaattgaaggagaaaacaaactctaaacacctttacatccaaaggaaaactaaacagattaattggaactggttagagagactaacccgaattgtctcgggtatagatattgcaattgaccggtttatagaaccatactcaaccgaaaagattccatctttgttttgggtcaacgcctctgcttttgagttttgagtatatataaaaaatgttaaaactcaaaaactaaaacaagaatggcttcctggatattcaagttgctgctgctgctgcaatgtgtgcttgtgttgattcaacatgctgattcaagttctatcatcagatatcttcctggttttgaaggccctcttccattcgagctcgaaaccgggttcttttcctctgcattttcatttccatattacccctataatgtatgtatgacgctgtgttctgagttttagagttacataatgaaggtatattggtgttggtcaaaaagaggaagatcaactgttctactacttcatcaaatctgagaacaatccagaagaagaccctcttcttctctggttaactggaggacctggttgctcttctttctctggtcttatatatgagaacggtaaaataaaaatctcttaactcattcttaatattcctctgcagaatattcagtgacttgtttgaattgaaaaacaaaaatcagggccacttggtttcaaggttgaggcgtacaatggaagtatccccacgttggtctctactacatattcatggacaaaggttagagaaatttaattcatgataacaaactcaatgaaataaatcttaatgtttcagcttcaagttttaagaatcattgcttcttttcaggttgcgaacataatatatttggatcagcctgttgggactggcttctcctactcaagaaatccatttgctgatataccaagtgacacaggatcagttaagcgggtcaacgagtttgttcgtaaggtaaaggccaaaactcaaagcatctgtctttctgcattgacttttggagatatcgttaatattgttggtgatttgttgtgcagtggctagctaagcatcctgagtattacccnatcc

SEQ ID NO: 11098 - DNA, 960 bp, Arabidopsis thaliana landsberg
aattcttttttacgaaattgtggtagttttcttaattttccctactaattatgtgatttttaatatataaaaataaaaaagttttgttttgcagtttctggatttatttgtgatatcctatataatgatataattatgcaatgtcaccaaaaccaaaaccaaactctaaaagtgaatcatcaatgtgaatgcaatagctgtcacactctgtgtctgtgggtcacaaaagggtactttggtaattatataactcggggccgttcggttcccaccgaacgaaaatataaaaccgatcaatctgagacggttgattactctcacttcagacttctcttcaacgaaactagccagagagatgacgagcaagattctagttatcggagctacaggtctcatcggaaaagtcctcgtagaggaaagcgccaagtctggccacgccactttcgctctggttagagaagcctctctctccgatcccgttaaggcccaactcgttgagagattcaaagatctcggcgttaccatactctacgtacgtagtaatcctcttctcatgcttgtgcatgtcttattctaaccttaccttctcaaacactgtatccaatctttaagatcttaattaagttccgtttcatcttttaagcatttatggaaacttatttaattactagtagtagttaagttggcttgatttttgattatatgtgattttagatgaattttcaaaaaaatgttaggaaaatatattttaaattgttggaattatttacaaaaagtagttactaacttttaaagtttttttttaccaaatcatcacgtgaataatggtagattttactaattaatgacgacagggaagtttaagtgataaagagagcttagtgaaggcgattaaacaagtagatgtcgtgatatcagctgttggtcggtttcaaactgaaattcttaatcaaaccaata

SEQ ID NO: 11099 - DNA, 726 bp, Arabidopsis thaliana landsberg
cgctttgcacttaggttttgagatactaccaattctgaaaattacgttttctagttaccattatcctcttttttctttcaacaacagagttcattagtttggattgcgggttacccgcaaatgaactgtctccttatactgatctggaaagtggattacagttctcatcagactcaagtttcatccaaattaaagaggaaaaattggtagaatcgttgtaagtttagttaaagtacccaaaatcacagcagacgttaagatactttccagacggaatatgacactgttacaatctaagcgtggatcagggaacaagttatttgattaggggtataaataaccacggaaattttgatggtcttaacatttctcctagatttgatttgtacatcatatgaatgcttttctaatggatgattttattcaatagcaagatgagaatatatatacataggttgttagattgacagttgtgtgttcatatcacgtaatgtaacatgtttagtattacatactgaatcatgtgggcggagaaaggccatctttgctgaataaactcgtttactcatgcctcctctcatggatacaggttagtaaacatagaagtagctggacttgacactgtttatttataagatttgagaaaagggacacgtggcatgcctgtccgtctagtcagcggttgaatgtgcgcgttacacacctaatctggcatagggttggcat

SEQ ID NO: 11100 - DNA, 762 bp, Arabidopsis thaliana landsberg
taatcaaggattttactatctaatatgctttgcaatgtattaattgtggactcttcctcttctgaaacgcgagttttcacagacaaaacaagcagcacagcatgtattccttcttctgtcatatttaagcaatttgttatctccttacttaactcttcgagcaatatggccgagtcgcacaaacctgtatcatccgtagcaaagtcagactttaatggtttggaactggcaaggctctaatacctgcatgctctgttattccctctctacttttgtccaaaactgtattcatgcctatttttaagctctatctgctagtgatacttatcttttgtaaattgtatatattcaaggctgcctgtgtgattaggggactccctataaactaattatgaaaaacaaatttgcgttacaattatatatgtttatatagttcatataaccatataactatatgaacaatttaaataattgaacatgggaaaattagatcaatcaagagatttttaatctataaacattacgtcaagtaacgcttctccaaatgttggccctaaatatttgatatcttattaatttctacacccccaaccttgttgggcagaatatgtagtatagggctactataggctgtcatagagaacatgccttatttcataaagggaggcacacattttattggaaaatctttgagatagacaaaattttctggaacatatttctttgttgttagaaaaattaacaactatgaataagtgtata

SEQ ID NO: 11101 - DNA, 1551 bp, Arabidopsis thaliana landsberg
ctaaaccaaggcaacaaattaattttctttttctaacgcgttgacaaaattgatgcgaagaagaagagaagactctaaatgattcagaaggtgtacgatttattcatctttgaaaaagaaaagaaaaaacaactaaaacatcaatttttctttacttgaagcaaatttgatccaatcttagatttcatgggttggtaagaatcaatcaatttgggaggtggagtatagtacaagtacttcaatttgcattgaaccctcacattgaatcatctgatttgcagaaaaaggagatctctttatgtaaaagtctctgagaattttggtttaaagagaggattttacggagatgggtttgttggaatcggtgaaatcaatcaactgggaacatgaatcatctccggtttatcaggattttcgagttcttcctctcttcgctgtgttcttcccttcgattcgatttctcctcgatagattcgtcttcgaggtaatatgaagttttgtgatagtgtgtctcctaaagttgttagatttatatagtatcttgtgtgttgcttaagttacttaaaatgattgttttgtttcatcaatgccttagtttaattgtttgcttcagctaaaagtataaaaaggttcactaaggagaatgattgtagctgaaagtatctatttttgataaatgtgaagaatgatttataccttttcttatactttataacaaatgttaaagtttgtgtgaatcaatgtaggtcttgtgatgttgtttgacacttgattgtgttgcattcttttcaatgtagtgagtacttgacatttgtttagctctagttctctcttttgttcctcatcatttatgtgtgcctttggttactttcaagttgggtttgtagaaagcttctttttttggggtcaagttactaactttctaactttgacttgatgattgttttttttgtagaaattggcaaaatatttgatctatggaaaacatagacaggatatgggagatgacacaaccgagagaaagaagaagatcaggaaattcaaagaatcggcctggaagtgtgtttactatctatcagctgagattcttgctttatctgtgacttacaatgagccttggtttatgaacactaaatacttttgggtagggcctggagatcagacttggcctgatcaacaaacaaagtaagagtgttgctcaaggccttactttgtatataaagaattctcgattttgtgcttgctctacatgatatatatctactctcatgcaggttaaagttgaagcttttgtatatgtttgtggctggtttctatacatactccatctttgctctggttttctgggaaacgaggcgttctgattttggagtttcaatgggtcatcatattgccactcttattcttattgttctctcatacgtatgtaggtatgcttccatcgtcacatcctattttatactgaaaaacagaactgatttcttttgtccaccattgtttgaacttcttggttctttttttctttatcgctgtaacttcttcccggttggg

SEQ ID NO: 11102 - DNA, 1440 bp, Arabidopsis thaliana landsberg
  unsure (1)..(1440): unsure at all n locations
attaaccttgaacctagtgaatagatcatcccacatttccatagcatcctgataatacagtatactatcatatatctccttgttcacgacattaagaatccacgatttcaccatgctattgcatctactccacacacggaaacttaaatcatcagtaggcaacagaacaaccaagcacgccttgagaggaaactagcatgtgataaaagactcggtggtgagctttgtatctgatagagatggtggcttcacaagctggcggtcgcttttctcttgtgaaggaaagatggtcgatgatggagatctaacacgatggcgatcgcttctctcgtgtgggatctaatggaggggaagtgctggcggattgaagtacaccccagagatgtgatgagtctttgatacagtacacgaacttgaccttggtgaattgcacacacaagacaaagagcagctntattctcttaagaacacttaaagagaagaagtgagaaaatgcagttctttattgataatcaaaggtgaaaaatcgttcaactgctgcagggggactttataagagtctatcagctatccctaaggccaaaattaaatgtaaaaacgcaaaaggaaacaaatttaaatcaaaacacaaaaaccattgttttaagaaagaaaataagctaaaataaggaaactaattaagttctcttgaggagcacgattgagaacgattctagccgttgtctaggctgtgtggacctgcaaagataatataaactgaataaaccttacctagatgcgttttaggcccatgtcgcctgagtcacttcctgtagtacttcttgaggtacttctggagtcaagtcttgtgcttgtttgttggttggttccttgaagtaggggtctttctggagttcctcttgagtagcttaatcaacgtcttcgaactcttccatgtcctttatgtcttgttcttgatcttgactctctcgatcacttgtagatgtgacacttgaatcgttcgtctcttgaagctccaaagtcttctcttggtttctagaggtccttgaacctgtcaaacgatatttcatacttgggggagtaatttgttcaagactcatttgggtgaatgcttcaacaagctcttcttcggctattagatcatatccggtatggggtgctacggaccagtttactcctagctctagggagctcaaaatatcgtgcacagctaagttgaacattttcttcaattgtttagtctttgaacgtgtcatgatacccgccgggacttctgatacaggatgtagttcaacggtatgtgaagtaaggttgatgtccacatcattccctccgtcttcaaaaggttttgtcctcaaagctgagtctcctggatcaataagcaaacaagtcagcaaaattaagagtgtgagaaattaatccctcacatggtagctcttg

SEQ ID NO: 11103 - DNA, 1235 bp, Arabidopsis thaliana landsberg
accactacatatgttttggcagctgtcttggggcgtcttccttggacctctgtgtacagaaacatgaaacagtgtccaggggcatacacttacaacgggattgtgattgttcgaatcgatgctcccatttattttgccaacataagctacatcaaggacaggtgaaattgacatttggttcctgacttgctttctgttatgatccacataaagaatcaacacaacaacaccatgtttcgaaattgcaggctacgagaatatgaagttgctatcgacaaacacacaagcaagggcccagatatggagaggatctactttgttatcctggaaatgtctcgtaagtccaatgtttcttctattcacagttcgaaacttacagaggtgattaatctaatcgacaatgggtgggatgtaacgcagctgtcacatacatcgactcgagcgctgtagaagctttaaaagatttgtacgaggagtataaaacaaggggcattcaggtgcaaacctgatatcatcatcattatttagtacttgtttctaagttgtcaataccttgatgattagttggttttctatggatcagctagcgatttcgaacccaaacaaagaggttctcttgactctagcaagagcaggcattgtggaacttattggcaaagaatggttcttcgtgagagtacatgacgcagtccaagtttgtgttcattacgtcaatagacccacagatgtagaagaaagcagcaaaccaagcttatggagaagaagcggcctgaaaaactcatcgacctacactgaagttgaatcgaacatagttttagagggaaccattgttgtcaagagagaaatagagacattgaacacttcgattctttttacaataatgtaatgtatgtatcaaataaagcattcactttggttgagaaaaatatgattcccatttctctgtttcaaccttaaaaaactatttcttatgtaatgtatagaaaagcacaataaaaattggaagtcataagatttattgatgttaagaatagaataatagtttggcaaccaacagagataatccataagacgatcaaatcaaccaatcctgggacatctggggcaatatcatagaaatagaaatcaaaacgattaaactaaaagatagaacatgaaaatgcatgagagcgcctttaggttttggggtcaaaagctttgtcgttgtgaggatccttttatttccagaagctcag

SEQ ID NO: 11104 - DNA, 1018 bp, Arabidopsis thaliana landsberg
  unsure (1)..(1018): unsure at all n locations
tatataagtgatgtaaaattcatttgcatcattcatattaatgcaaatatataaaataaatgagggaaagggccccttttgttgtggtaattaattcaccattcaacatcgttgtagtgcattattgcagactaaaaatttcatactagtacacacttgagtacgaaattccataccattataaatttactattggtcggctttttttaattcactctttaaaagctccattcaaataaataacaatgttgaagtgcacactattatttgattcatattatatagcccgacgttttgcatactaaaatattggtacgtattgtccgattcgcaacttatgaaccaaccattcaaagcctgaatttaaaacctcaaaaatgtattcttccatttatctactactctatttaacaaaagaatatatatatatatatatacacatatataattataaatgtgatttcatgtttaggtgattttgtttttaattatacatatacatcagtaacatttagctgtttttgaaccctatatttctcaactacttaccgccattctagtattctcacaaatcatccaccaaaaaatatttcctctctagactcttccaaataggcatccaaatgcgacttttgttgctcacagtagtttcaatgctattttcaaccttaaatagatgatgtattataaagcttcagatcgtattagtaatatttaaactataatttgtgtaatactaacattgtatggaaactacttgcaatttctaaatatcatcatcaagtggaaatattcaaaaactagctcatgtagagttagtgttgctaaaacacctaaataatttgttgatgacttgacttcctattatattatttatatggcaattgcaaaaattaacttcttcaaattttgttttgacttaaagtaatggggtgttttagcatttgagtttcggcccaagttttcaaaccaaaggggtgatggttaactttaccaaantatattttttggatattat

SEQ ID NO: 11105 - DNA, 837 bp, Arabidopsis thaliana landsberg
ggcagtcgattgatctttatagtagtgtaccgtctcccgttatctgttttcttgggaataattcgatgacgagattcggaagctctttcttgtcttctggtttgataagaagacatactccggaatcattacctactgttacaaaacctttgttagaagaacaagcagatgaacaagcactaccaaaacatagacttagctctcagggcttactctctcctattccttcgaggaggggttcgatgcgaaaggatgagaaatcatccatggtgtctcatgagattccaatgtctcgtaatagctcatacggacaagctgtactaaatggtcagttcatcttaatgcttgagttaaaatatcgtgtcttctcttcgttaaaagtggttaaatagttttaagagattctctgatgcttggcttgatgagagtagtaacgatggtagagctaattgctgctttcctagaactatagagctgcaatattgattgcaattgtgttcattcaccgttaaatactaatgaaaatatgtcaacattttctctgttgtttgattttcattataggaatctagattgtgtgtgtaagagggtctaagaccgtcttcttcggggtttaaagatgtatgtctctttataaattaagtgaatcgtacaaaacaacaatcaactctattgtcctatagcacatggagcacatgttggaccaaacacgtctaggttcaaagaacatgattgagatcttttgctcttagtaaatttatgatcatcttgtatcacatgtgggtcatgtgcaggattgaacgttctaaaaggggttggaatactttcaacgcctta

SEQ ID NO: 11106 - DNA, 352 bp, Arabidopsis thaliana landsberg
ggaaaatggagaaatcattcttgaggtttgaggcatttcattgtgtgtgggtttctctgcaacatatgaattctcttggaatatatgcaaatcagtgttaagtgttacattttatttgcagtttccagagtagttatccttcttgggagtcagattctcttgggaagcagtttctgtcaaatctcaaaactttcctttttcgaaagggtgatgaaataaacacaagacactcatctactattagggcgtggcgagaaagcactaatacccttgctttatacagagacattccaagaaatccggttgccagcggcaatcacactgattcaatgtggctaattgatccaaatca

SEQ ID NO: 11107 - DNA, 933 bp, Arabidopsis thaliana landsberg
aggatggagcttatgtttcttgttgcagaaacaatgaatctcgagcccaagacgaagctggtaacactcgttcgtaaaatattctccctcgtcatctcaaaaattcaaagttgaagaaacttacttcagtttgccctcaagcacaagtaacttttaaagaaggaataatccatgtgattggagaagtcttgcggcccacgaataacaagtggaagtgtttttctttaaattggcagaaatttaggcaaccaggagaagaaggctatacacactttttctgcgaaggtggcagaaatttatgacggtgttatggactatcataaggatacatgttttgcttgtccttggttgtgtaaagactggtttcttctatgaatgtagtaaagaaggatgtcgtttctgctacacatgcaatgcgccaagatttctgagccactagttcatgagagtcatttgcatcctttatttctaacaaccagaccaggagagcggaaacattgtgacgtttgcaaaaagccaagagatacttctacaagtgaaacattcaactgcaatgagtgcgtcttttctttgtgtttcaagtgtgctgctataccttataaggtgaggtataagcatgatcagcatatgctcactctttcttatgggaatgagacaagtacgttgacgcattggtgtgaagtttgcgagggaaaaataaatcccaaatgccggttttataggtgtgatgagtattgttgtgtcaccctacacatggaatgtctgcttgggttggacttatacatgacgccaggtttatcgttgttccactccggtgctacagacatagatgttttgcccccccctcgtatgtctcgacctatttgcaagacctgtaacaagcgttgtccattcaaagtagtcttccagtgttctggatgtaagttttgttcc

SEQ ID NO: 11108 - DNA, 1307 bp, Arabidopsis thaliana landsberg
  unsure (1)..(1307): unsure at all n locations
tttaaggtaaatggatacatattaggtcattttgtatataaaaaatagtatttagattttgttaaaaaaaatgataatgaaaactgcaaaatataaatagtcacaaatagtcaaattaaatttaaatttaaacttgtaaaacatcttataatctgaaacaaaataaaatccctaaaacatctaatataatgaaacaaagggaatatttagaccaaactaataagtacaatttcagacttgtgaaaaccatgagattataaaatacatgttaagtggatgaaaacacctagcttagagtagatttacccgctaagtaaaacagaaactctcataaagacaacagttactacttttctaaacagagaatagactgcaaatcacctaattgctacatgattaattgatttagttaagccaatacaatttgtttctaaatcttttttcatataagtattgcttgttgtacgcatcatataccatgcattaaattagtttcccatgaataaattcactagttacggaaaagaaaagttgggaagtgagataataaatctgacaaaagtggcagtttcaactctgaagcgtcaatcacataaatagttgcagtttggcgttgggtttgatttgattgagtgaattgaccaaataaacacacttaattaataacaaaaggcaagttacgtaacacaaaaattataaatagggacgtctacatgtattattcctcaaaagatgcagcttaccataagatgacgtccatatctttaatggaaaccgtgccgtaaaattgactgccaaaatgtacaatgtagaaagcatgagtaaactaacagttgtcctgatgtacaaagaaaaaaacacactaacagttgtccgatgaaaagaaagagacatgtaatttaaagcattacgacaaaaagagtaaataaataacactgttgttaacttgttttagtaatctattgtaattattttcttgagtggttgtgattgaaacgaaacaatttagtggactactaagcaaaaatagttaggatatatagagcatgcaacaaaagacatgcaaaaacataatttggtttgatgttttgcatatgtgtttatagttttctaaaacttaaagtgcctcatataaacaaataaattaagttaaaagtgtattaaaattctgaaatttaaccacattcctaagttctatatgaaaaaacaattattaaccattaaactaccataaaataactaatactttatagacttatgattntattttattttattaaaagaattagttaaaattaattttaggg

SEQ ID NO: 11109 - DNA, 1338 bp, Arabidopsis thaliana landsberg
tattaggaaaactaaaagaaaaagagaagagtcattgctatttgtataggacaaattaaagatactatgataacagacatatgagagcgttacttgatacttacgacaagcgtcttgccggcaccgagaaccactttgctgacacactcacgggtcgccgtgttgtctgcaacaggtaacatccacggggctaagctcgtaattgaggccgtatccggaccagtgttaccagcagcgttcacagtgaggatccctttggacatagcgtgaaaagctccaattgcgatcgggtctttctcgaacgggtacacattaatatcacctatagagatggtaatgatgtcaacaccatcggcaatggcatcatcgaacgcagatagtattgcatcatctctacattccccggcgcagactctataagcagcgattctagaggctggaactgcacctctcaccgttccatttccgatcccaaagaagctggtattcgcgacggcgtttccagccgcaatggacgccgtgtgtgtaccgtggccagtagagtccctagcatctcctggtgagtagtgtcttgccccaatcagcttgctgtaaaaaagactaacatatatcaatctctacccccaaaaataaacaaagacttttcattcaacccttgaagtctaagcttttgactcatatatagtcttaccttagactatacgtaagcttgtgaaaaaagaaactaaaaatattttcatgttatcataggatatatatatgttttcctttcatttgcatttggcatctacgtttaaaataaaatttgcttaaaatgtttaaattgtgagctcattggaagcatgtcaactatatagaaaacttatgtaaacgcacacaatgaaggtttgatcaacttcacttctaacatctatagaaattttaaattaaagagaggaaaaacagatttacttattgcaggtgaagttcttgccgccggcacaaatgcccttccatttctttggaggaggaccaaagcctttgtcagaaaagctttcggattccggccagattccaccgtcaaagactccgataattgtatcactctccactaaaggattccgcttcgtaccttttccttcctttagtcccatgaagtcccaagacgccgacgtttggagttttaatttcttgtttggaaacacagaaacaactccctccatatctaacaatataacaggaagggttttaggcttcaccgatcgagtcaatttctttttgtttcatgtttacatgttaaaaaaatcaaagaggttctaaatcatttaaataaaaaagagtttcatgcacattttcatg

SEQ ID NO: 11110 - DNA, 1117 bp, Arabidopsis thaliana landsberg
  unsure (1)..(1117): unsure at all n locations
ctagttgtagtttgaatctgatcttatagattttaattactgatgattcaatcacaacaacttacgaagattttgaacgtccgtctaagctttgaatcgtttttagggttgccatgagaaatcttgagcagcaaggaacacaatctttgaactcgggaaaatacatccaaattgatctcctcatggatatattttctcgagttccgcgacgactatagcaaggtttccttgtgtatctaaattatggggatccatactttgccgtcaagattttactgagttgttcttgaatatgtctttgactcgtccacgcctgctcttattaaccttccaagctgaaaatgggaataaattcttcttctcttcacatctgcctcagaatccagatgagaacacatctctttgtacccacccacctgttatcatgtttaccataagaattctcctagagagttttcatctgaattggttctccctcttcgtggactcaattgttgccgagataagggaagtctagatactatcattatttataacccgatcacgggagagtctctatccttacccaaactggaattgaagagatttcatattgtgacaaagccttatttaggatatgatccgattgagaaacagttaaaagtattgtgcatcaagtttagtgaaatcccgagtactgttgatgatcatcaagtgttgacattgaagaatggaaaacatttatggagaacaattcaatacaaaccccattatcctaaatgtaatggaatatgcttagatggttttctgtattatacagctcggatcgataggtggatgtgggattccaaaatagtttgcttcaatgttaagtctgagaagtttaggtttattgacatagatggatgcatgttgatgactcattcttgtactttgatcaactacaagggtaaattagatgcacttcagtttacatttttgggtcgaagacaacttgagttttggattctagaagatgctgagaaatgtatatggtccaaagatatctatatattctagagtttacgaaagattaagaacatgcacgttcttcatatacctttcagccgaccaactatgtcatcaanagttgtggtgt

SEQ ID NO: 11111 - DNA, 1126 bp, Arabidopsis thaliana landsberg
ttgatttttccgacctgtttaagattctcgctttttacgtttctctgacgcattacaatccctttttctttctttgtatgttttgtccattggattctggtggcagtttcttcggtttgattatcctcagcttgtcttttacatcagcaaggaagcgtgatcatctcaggtcaaaggtgatcttaatgttttcccatgcttttttttttgtcatcatgttgcatagcacaaaacatcttaaggtgcttttattgatgatgtaggtgagctactttataacggaagaagaatcgtcattaacctggagatattccgaaaatggacttagcttctaagaagaacacagctaatgtcggttccaaggagatagacccaataaaacctaagtcgcctcgttcaagcctctctccattttcacttaaactaggagacaatgttccccgaaaccctcattttgatcccaagaagatggatcctctcgtcaaacatcaaccgccaaagtctcttgaacctccccccgcgactagagggaccaatagcgagggtgacttaaagcataacacctattctagcgatggtgatagcttagcaatgcggaagaatgctcctaaaaatcttcattatgatcccaaaaagattgttcctttgaccacatctgaaacatactcgccaagtgccagaaatcatcaccaccacaggacaaagtccccagacaagaagagagcccctagacataatggggactatgcctatggtgataacttggtaggtccatcagctcaacctttcaagcctcacacgggaggggacgtgaggtgggatgccattaactcaatcgcttctaaaggtcctcaaataggtctcgacaacttcaggcttctgaaacgtctagggtatggggatataggcagcgtttatcttgcagacctgcgggggacaaatgcggtttttgcaatgaaagtgatggataaggcctccttggccagcagaaacaagttgctgagagcacaaaccgaaagagaaatcctatccctgcttgatcatcctttcttgccgactctctattcttactttgagacagataaattctactgtctggtcatggagttctgcagcggcggaaatc

SEQ ID NO: 11112 - DNA, 1382 bp, Arabidopsis thaliana landsberg
taatttggttgatttattttattttacaagatacaaaacaaaaaatttatacgaattttttttgttattcgtattaggtcgcatgcaaccatttaaaatgcttggttacagaaaatgtgaaaacaaaaacttcatttttattggttgatgcaatttaacatttgtctttccttttttttttttttttaatttagtagtgggttttcatagaaactttactaggcaaaattaagagggaagtatagatgtatttcaaaaatgaaaccaccaaattagtttcgaaattcaaattgatgttgggagtagcagagcccaccaacatgcctttgtctctcatacaagtcctcataaataccgattttgaaagctctatggcattccttgttcctttatttcattttattctacaaatctctctacataaaaggtcacatgtacatatactacatctacatgcactattcatagacctatgtgtaatatacttggagataaaagctacctaattgagtaatacagtaaattttacgttcgtcttgaatatcgttatgagatatacgatattaaatgctgttttttcttatcaaatatcaactgactactttttcaacttctatgttaaaattttagagttaaaatagtaaatcaaagatatggacgtgtcatgtgtgacatagtgacatcaaacagatttaagaacaatgcgtagaccaagcaagcttatgcatgaacatcatgtagttattgttccgatttccccgtcgaggcgttacgtaggtcaggagagagatcaagagcatatatataattcataatacatgcaagatgcaagatgtaataatattatttataaatattgcctcacaagtttcatgaggatggaatccaattataaataaagttaaacaaatgaaaactaaaatcgcaaaaataacgtatttttaacacattctcacgttttccacctaacaaaaattgtgacgtattttttgtgttagaagtatgcgataaatttgtaatcatagactcaaagagaatatccatcacaaaatagtaactttttcatggcttataagaaaatcattatgatatattttgtcgtatattttgttttttttttaagagagaaacgtctataatggtttagctgtttcttatggactttttaataaacaagaactagcaagcaatcatcatgaaattcttaaaagtggttcaatgtttttttttttgtttttttttttgtaacggacgacctaaatattttgtttgatatttattatttcgaaaagtatttcactatttcttaaacaaacatatttttcaaatttaatacaaccaacttcctttttgttgtgggggttgttgatctaattccatgc

SEQ ID NO: 11113 - DNA, 1319 bp, Arabidopsis thaliana landsberg
cgtgggaggtcttaatgacaaggagatcaatcagacctatgtcaaggttaacgaaatcatcactcactgattcaaattgttgatgctgatgttttattttgttgtttcgaattacagtgatatgtattattgacattgtttcggattcactaggttttgagtcaaatgccgtatttccgaagatctggtggtcgtgatcatatatttgtttttccgaggtatgtggcacttaatcaatagtatataaagttttctcgatgaactgtattctttttatactaactttgacattacttttctttgttatgctattgtagtggtgctggagctcacttgtttagatcctggtcaacatttatcaaccgctctattatcctcactcccgaggtacttagcttgctctctgcttaggagtttcttgtattttgaagtatatttggtagtgaagcgctaatgtgaaagttctttggtccatatctgtctcttctggctttcagagttttcattggacatttttaggggtggtttcgaataaactgaatggtctatgtgcctacttgtagaatcatacaatggaatcattgagctaggttcttagagtttgttttacagaaacatgaatgcttcaatgattgtggatgcaggctgaccggactgacaagaaagacacaactgcctttaattcatggaaagatataatcataccaggaaacgtcgatgatgctatgactaaaaatggacaacctgatgttcagcctttgcctctgtcaaagaggaagtatttagcaaattatttaggtcgtgcacaagggaaggctggtcgacttaaattgattgacctatcaaagcaatttccagataaggttagtctcacattatttcttcaaagactacttatacacgtttttcattttccatcgaggatctgctaagctattacttgctatttcgatgtattctttcccttgcttgcttcttatgagtggttttgtgaacagctagaatgtccagatatgaagtttagcggaactgaaaagtttggaaggacaacatattttgaacatctgaggaatgccaagttctgcctcgctcctcgtggggaatcatcatggacacttcgcttatatgaatcattctttgtggtctgatctctattttctctttaccccaacttttgatttcactttctttattacttaccttacgttgtgtaatattgtgattgtgcttgctcaggaatgtgtcccggttcttttatctgaccacgccgagctgccttttcagaatgctatcgactatgcccaagtatcgatcaaatg

SEQ ID NO: 11114 - DNA, 1069 bp, Arabidopsis thaliana landsberg
  unsure (1)..(1069): unsure at all n locations
ttttttttaataatctcttacctgacgcttggcgatttgacggaggagagatggggaagcagttttttttccacaaggcacaacctttttggcatggctcagataattagagtaagccaataggaggaaagatagtgatgttacatgttgcatgttactccctccagtcttcactagtagccctcctgtgatatgtaagacaaaaagaaatcagattactactaattaattaaagataagcatagaaaaaagtttgaattttttagaaggaaaaagacaaaagtaaatcacgtgaatgtgggaaaagtactttgatattgagaaaaaaaatgatggggttttgtattattacctcgagagtattggacttgggggtgagaaattccaggcaatatagaacagataaacccatctgcgttctgcttgaaagactcaaaatactctgcttttcccattaacacttcctgtaatttcaaaacaagaagccaaaaaacactataaagacaaagactaaatataaataacaagaaagaacaagggccttgagacagagcgccatgtgaaaaactgagatggtgaaaggcccttgacaaatcaatctgatcagtatagcaaaaagagaccgttgagaaatgacaaaaacaaaaaaaaaccacttaggctattgcagcagaatgggaactggtaagggacacacgatactttatttattgttttctcagccttttgagttttgagccacatgctttgtaacagtaaccaaagacttctctacccctttccttcttttactgtccccacttgacccaataggcctgnnnnnnnnnnnnnnnnnnnnnnnnnnntaatgttgctatataccttagtttttacttactctatatccaaaaccacaaatatgatacaccacatgcaaactcacaaaatcatactgtatacatttcacctacctacattggattatcaagtttatatattatataatatagatatatgcgaaaaatgcacactcttttttatccattcactagtcaagtagtcatggatcatgggtccatgtgaggctctg

SEQ ID NO: 11115 - DNA, 1285 bp, Arabidopsis thaliana landsberg
ataattcaagtcaaccagacgaaaaaaatcattctataaagcgagacgatacatttaacttcaatcagaaacaagaaaatgaaactcgatgcaagaaaaaaaaacttttaatgttacagagaaaaagaggagtttaaagtctttaacaagctttacagctacgtctgcaattcccagggatctctggagttccaaccatatactctggattctttccacattctccaagcactgcccatctctcacagctctcgtttacgtcagtacagttaccatcatgtgtcaatatcttatcgaatgagtccacgtggatccacttagtagccgaccatttctctccttcgatcactggacaacctccgtgaaggctaaaggggtctgggattgcgtcttgttggaggttgaagaacaacagagcattccctttcttcggtttcactaataacattaccaaccaatatcaaacacaaacattcttagagataacatggaaagaacaagtcatgattccttttatatatagctcaccagcgattcctttctttgcacaatcagaaagatcgtctttattctcagaaagcgagcggcgagagaattcctgcgcagaaatattcatcatacagaaaaagagtaaagacctatttgtccacgtatatagagaaccaatacaagattagcaattgtggaaatgtaagcggaaattggtggtattgtctgaaaaacaacaaacctgtgcatcggggaaaacagtttctccaccctttgtgacattggacagatacaagagaaccgttgctatgcggtgtccaccacgggcaatgttgactttgtcgtggaagtagtcaaagtgagcatcatatttctgaccgtgctcatatctcaatacctgaaggtcttccccgttttctgtgaccacaaagtgaagaacttaggaaacaataatatcttctgaaaaaccctttcaagaaactcaacaacagttaaggttccttgtcaattgacattgtgaaacagagagaccactattgaaaaaccattcagattgttaaagttaccttttgggagaaatgtccatgttgagagcttgtcctcgataccggaaacaataggatcctgtcattaaacaaacgaagcttcacattaagattgtaatcacactgagatatctaaatttctcaaatctgttcctaataatcactaagtatcattcatcatccttcatccatacacagaagtaaattatgtctagctatcaccctaaacctttttagtagtaaacaacaat

SEQ ID NO: 11116 - DNA, 1317 bp, Arabidopsis thaliana landsberg
ttgcgtgtgttgattattgttagagttatttaatcttgtaaattaaagtattaaacgattaagaaaatgtgttgcacagcaccactaatttggttttattggaatcaaaacaaatttatagtgcacaatctatactgaaaatctagaggttttgaattttgaacacagcctttttgtcctccatgttttatgcatctaaagattgtgtatgctgattaatgattactgttagggtttatttgttattaacactataaaatagaaccataaaacataaaattgggtagaatctttacagaaaaacaaaaaaaacgcatgctccaagtactctactctatagtctatagtcatctatactacaccctctgttcctaattttttgtttactcttaagaatcttcatggttgtcagataacgttttatcttggataatgaaaagttctattaaaatccaaatctcgaaaatatagtggaaatttggtgtttaagagtaatgcaagaacactttcaattttggttcttaggttttccagattccaactaaatcaaaatgtaatgagtcttaatttttacaatatccaaacgactatactctataatttgtgtataggcttcagtctctctcattttattaattaagatttccatcaaacaagaatataattgacttaaaaacaaaataaaataaactttgtgtcgtggctctgattctcggttctcacaaactcctcgccaacatatcttggaatctcctgtaagattcacccttctccagcaagaacttctcatgacacctcgcgatgaatttatctgccagacgatcaatatcatcatcaccaacatctctctccccaacactctgatcatcattaatgttattattctcatcaactctctcttcgagccactggaggtattgagactcaagattatcctcatcttcaacatgaccatcaagggagaaagggaaaggtttagtgacgggaacaacgacatgggaggatccaaagaagatgttgtgttggttcatggatgactttgtcgtgtaaaacatcatcatgaataacctcttcttgttgtgtttcgaaatctctatcagaacggatctggctcttgagagagaccgtaaaagacggtaaagagagtgtgtgatgagatttatgaatagggttttgagattcgtggagtgggaagaagatgatgaccttttgagctgcatgactcaacgacaactctagagtctatctcacactcttcttttatgtgcattaatcgacaataaaaactatttataaggggactttcttgacgtttat

SEQ ID NO: 11117 - DNA, 740 bp, Arabidopsis thaliana landsberg
tccaattgataattttctttactcgctttggtttgatcaatttcataaaccagacactattgatttattttcttttggccactttttttttttttttttttaaaacgaactgcacttttattattcagaaccaatgtaatcaaaaaacagagcatgagaaatacaaatgggcacatagttatgaaagaggtaagatgacacagcacgtctttggctccttgctaaaatatcagctggttggttggttgatcgatacgaccatatgaactcaatggcttcaaacttaagaccccaagctttaatttcattaatccaattgatggcatcaaacttcagactcttcccagatagaacgttgactagcaatttgcagtctccttcaaatataactttcctgtatcctttgatccacaaatgctgcatagcaagaattagactttggcattctgcttcaaaagcagacgtgacctgcacaccagttgcttgagccgctcctttataaataccgttttcatcacgcagaatccaagcagctgttgagcctccgttgtgattcacaaagctgtcgtcgtagttgcacttgatccaccccgcttttggtttatgccattggctttgagtatgacagtttgttgcaggagtcaccgacacggtagagccgttttcatttaaaccatttgttagccattctttcgcatcatgagtagcatctgttatatctctccaccaatcattttggc

SEQ ID NO: 11118 - DNA, 1262 bp, Arabidopsis thaliana landsberg
gcatctgagcctcaagatcgatgatcactggagttgctggatccacctctttcacatctaatggcttgagatcaccatcagtcactgaagtttggttgttcccagacgacaagaagcataatgactttctagctgaatccggattcttgtttgagccatcatcatcatcgagattttcgtcaatttgattgtcctgaatcccatcagttatgagaaggagatgatctccttctgaagcttgactatctgcaggagcatcagtttcatcatcctcacttgtttctgactgttggttggttcgaatcagataatgtgcaacagacttatacccgagtttatgtatctgagaacaaaagaaattcaaagggaaagccattaacttttgaatctatccaaggactcaaaatcagaattttcaccatggatcatactaatcgaaatagctaccttcctgtaagctgcaccagttgggagccaccctttttttgtacgacagaaactgcagttgcagatatcgcgacagactggacaaatccagtccggattttccagagcttcaagaacatgttctccatatctgttcaatcaccaaaacataacctaaaacattcagttccaatcctcattttgctgagcaaagcaagctactcaattcccagttgattctcacaaaaggaattactcaaaaacacagaaacaaagaaggttggaggctaatgtacctcatgtataaacaatctccacagaattgacctcgaacagaatggttacactggctgcattgggtatgataacctagcgtcttctgcctgtaaaatccacagtaaccattaaacacattagcctcaatcctaaccgaatcaaactacatcttcagagataaagccaagtgtacaaacctgcactggtggcaacactttcctctaacagggtcataaatccgtttcccatttttgtcacaaccatcaacaaaaagctcccaagttcgttctgtgttacctaacagtttctcatgctcctcagtgtaaatctctggccttacgccttctcctacccacaaaacaatctcttctttagacactttacccttcttcagttcaggttcctctgcgtaggaaactggtgtagcgttcttcaatctaaagaccacaacagagaaggcaataaaaatcattactttctattaaaaatcctagcttcctgttaaacccttgattttgaacagaatccaaagaacgaaacgagaaccacagagattgaat

SEQ ID NO: 11119 - DNA, 808 bp, Arabidopsis thaliana landsberg
aaagcagaatgatatgacatgtcttaaggggatatgatacaacaacaatgaagtaacacacaagcatttgttagtttgagatcaaacaaatttttagctgtgtcggaatttaagccgcactgtgataactcctggccttgtctcgtcaaacctatacctgcaattccaacatcccattcctcagcttgttatttatactaatgattgacaaagatatgaaacagaagatcaaagagtgatcttcacctgttatcttcaaagaatgtcttcacggctagaggaagtgaagcctgtccgcgactgtgtttaccaatacctacaatggacatagaacatcaccgtcacagatttatgtgtgaacctcctattatacttaaaaccatggaaacatcagttcacttgatgcttcataaacagaaaatcgacatacctgttataacctgcaatgagtttctcagttctctagaagaagttctttgacagtgcatgccttcctcatctaatctaccaaaaggctcttgtgatgcagatcgcagagctgcattctttgacctacctctatttggtgatactgaacggttcacagtaaagtgaccttcaatcatttgcaaacgttcttgtaaggcttgaacagcttctgtggcatggagaccatgcaggtccaacttccatatgtcattatccttatttgttatacctatgatcttcttggccgcttcagcatttagcttctcagctgctaaccagtcctctcatgctttatctgaatgctgcttggcagaagcatgatcatatctctgaaaagcat

SEQ ID NO: 11120 - DNA, 1045 bp, Arabidopsis thaliana landsberg
gacaggtgtctccaagtcacgaaaatggacgtggagatcaagcactgtctcaaattgatatatacgccataaatttagctcagcatcactctgcttttattcacgtttcccctcttgttcttggttcccaggtaaacaaacttagcatcagaccaaactgagatatgttatgtttctttggtctttcctgtaaactgattccagtgccgaatcgagatatatgatttagtttttgatgatggctgctgatacagggtcaggacacagaatgggtaaatgttgttatctcaaatccggagccttcttcagacgattgggttggagtcttctcaccagcaaaattcgagtactttttttacatccattaaaccctctttatgaatcatgtgtttgcatattgattgatgtgtttaacaacttgtctttgtgtttctcttgttatagctcatcttcttgtgctccaacagatgacaaagagatagctccttttatttgctcagctccagtcaaggtttccattacattttgactgttgatttctcaactttgacattgcatttcatctcatttagttttcctaatatgacagtatatgtatgccaagtccagtcctgactatatgaagactgggaatgcggttttgaagttcatgcttataaaccagagagctgatttctcctttgccctcttcactgggggactctcaaatgttagttgattagattacacaacctctcaagtttgtgttttatctccaatggactctaattgatctcttttattgctctttacagccaacacttgtctcggtttcaaatcatgtatcgtttatcaatcctaaagctcctgtctatccacgtcttgctttagggaagaaatgggacgaggtaagttttccatagcctgatttatcaaagccttaacaagactctcaaatcgatatatgaactaaaacatgctttgcactatgattttgatagatgaccgttacatggacaagtggttacaacatatgtgaggctgttccgtttgggaatggagtctt

SEQ ID NO: 11121 - DNA, 965 bp, Arabidopsis thaliana landsberg
  unsure (1)..(965): unsure at all n locations
agaaagaccatcattcatgatagtaactatcaagactccctctggtgagaagtcaaacttccatatgagtgcgggatgcttaaatcccatcactatacggattgtgattgaaactgcatagattgtgtagttcttcattctctggaagatggctctgctcgttaggacagcactaactatgacactaagccctggctcggttagtacaatgtcagatgcacttcttgctgcnnnnnnnnnnnnnnnnnnnnnnattccaatgtcagctctcttgagagctggggcatcgttcactccatcaccagtcatgccacaaatatgcttcatctcttgaagcctcttcacaatctcatacttgtgttctaatcagacagatgaaacagagttaaatttatggagttgaaccacttgtgaaggtagaagatttgattgtttttaccagggaagacgccggcgaaaccatctgccttctctatgagttcatcaacaggaaggctagctatagattcatccttatcttgtccaagtagagcagaagatggatacatgtttgtgcccatcccaagcctacgaccagtttccttaccaatggcaagttggtcaccagtgatcatcttgacattaacaccaaggtcaagggcacgcctgattgtctctgcactgtcatgtcttggagggtcaaagagaggtaacagaccaagaaactgccatggttctccagggctgttcttgtctttctcagagacagtctgaaattcaaaaaataggaaaaagagcattgataaaagagaaagaaacacaaatgaatcccaaagttttgggactggcactaaatattatacctgtctgccaacagcaagagaacgaagtcctctgtcagcaaacatgtcaatgatgtcatgagctctcttgcttgcatcctcccgaaggttacagagctcaatgatctaagaattaccttagag

SEQ ID NO: 11122 - DNA, 1328 bp, Arabidopsis thaliana landsberg
agcagaaagatttttgttcttgtcttaggtgttctagttgaacgtaagcggcatctactttgatatcataacgagcaaagactgaatcttcatagatgcagctcgcgcaacgttttgaaaatactttttcgattaagattttaaaatactttaaaaccatgataggcatgaagaacatgtcacatatggatgaacagtacgttggatatatgaataaaaagtttctatggatctggtttgattaatcatcgaaaccagctggactatgaaactaagacctatctaacaaaaatatatataccagaaccactttattcaggggataaataggtaatcataagaagatcaaattcaagcacatattttttgttgaagagtcaacgtactcaaagttgttaaataggtaaaatttaaaattttgtgtattataacagatgatggtattaattcatgtattggtttaacaactcaaaaatccaaagagatttaagttttatccataacatttttgtggagcctatattgctaaaaaggtgagacaacaatcggtgaataaatatggcagagacggtggaggtgactacgatgcccaagtcttctcttttaggagagcttgaggtagaagttgagatcaaagctcccgcggcgatattctaccacatctatgcaggaagaccacaccatgttgctaaagccactcctggcaacgtgcaatcatgtgatctccatgatggggaatggggcaccgtatgcagcatcgtctattggaactacgttcatggtaatttatatgacttcgaaaatattttttgaatattgaagatttgattggtgaatgttttggttgtagaggggcaagcaaaggttgcaaaagagaggattgaattagtagagccagagaagaaactgatcaagtttagggtcattgaaggagatgttatggccgagtacaagagtttcttgatcacgattcaggtgaccccgaaggaaggagggattggaagtgttgtgaaatggcacattgagtatgagaagattgatgagaacgtggctcaccctgagaatcttctccctttcttcgccgagatgactaaagagattgacgaacacctcttatccgaggaatgaaaacatactcttggtaatagttatatcttgtgttgtcgctatataaaaagttttatcacttttatgtgtttattgcatgataatcatatgtatggggtttcatagttcatgtgagtacttttgaatgtatagtgtgaatcttaataatatatatttatttttgttcaatgttgtaactctctttgtaatgtcccgaccgc

SEQ ID NO: 11123 - DNA, 1299 bp, Arabidopsis thaliana landsberg
ctccttgacttctattcttgtgggagcaatacagtaaaaatatctaaactataaaaattgaacatcaaaaaataaccaaatcttgaggtttctaactaattgtgaaggccatttgatggaattaaaaggcgttaacaccgaaaccaaacttgtaatccttcttcacatgatccacctggttcatttaatatcaaaaatcagtcattatcaaaaactagtcattaacaaatgcactaaaaaatgtatagtagcggattaaatcattttctttacctctgcagatagaagaaatctgagtccaataggcaattgttcttcaaggtaagcagcgacaacaccgttagaatcaacctttcctcttaatcgagactacaccaaaccacaaccaaacccataattagaacagcgctttgttgctgtttcaaaactcgaatgggaccaaaaggaatgaggtatgtacctgtctagtaatgaggtcatacccgacactagctgtaacatctcgtgacaaataattgtagatgaaatccgttgcaaatgacaactgattattgaaaaaataagaattagcttatattactctataggattaaagatgaattaagataaggctggattgtttaccttctctgaaaccttatgaacatagttcatgacagccacaccagtggaagcaatttgcccagaggcaacctgttggataataaaacatttaaagaaattcaaaaaaatgaaaaggatcatactcaagttagcttgaagattgttggaatattgtaaaccaacatagaaaagaagaatcgattttctgattgagttgccttattctaactaagaagaaacatttaccgttttgtcagtctcatatcgagctgcataaccaacacccgacatcagttgctgaccaagccagaaagcctcaccacccaaagacaggtgtggtgtcacatgctggaagaaaaagatatgattcagtgaaaagaaacgaatatctatttagcaactaacaaaagattaactaatgctgacaaaataaacaaaagcttgtccagggataaacggaaaagctacctaactatagacttaaccacagaattttagtagaacagtttaaaatggtaaagcatagtcactttacctgaatatagttagctgcataaacggaattgtttccaagctgaagctgagttctgtagtcagacccctaaataggtgtaaaccgtgaattgtcaaaaccaaataaaagctaaaagggaaaacatactgaacagagaaaagtcctcaccttgtaatcaatga

SEQ ID NO: 11124 - DNA, 1510 bp, Arabidopsis thaliana landsberg
atggtaatggagagggaagattgaaggtcgaatcaatcgtcatagaggtgttgaactttgaccaaaggatttgttacccattttgctattcacgaattcaaaatcaaagacaaatagggactttttatgattagtgttggggtgtggtaaagacagaattaaagggaaatggggacagaatcaatatagttggtcgagttagatcaaccacaaacacaaaccttcaaagatttggtcttatcctaagagaaactcagcacatgtttggtatttattgtgaaacgaaaagtcatcgcaaatcactgttatattgtgtggcctttgatcccatcatcatagtttgttatagaattttagcaatgttttgcacgtctaaccattacgtaagttacttctcttgtgtttgtttttcttatttttcaagatctctttagattttttcccctgtgaattattcgttatgaataatttaacatcatggcaaaacactgtgtatatatagatacagtacacaattaattaccctatatacaatgtccatctttctttcctcagaactatatatccacttttgttttttatatatcacatctatataatctgccttaacagaaaattatacataattatttatcattctagttctgtttttaacggattcatgcgttatatttcctatatctatagtgattaatgagtaatgaatattaattagccatccataatatcctaacgtccaaaggatttttttttcttaaacgattcacatgttcttattcaaatacagatatgaatgtgaaattttcaaaagcttttgaacacacagatcctaatcaaggacatttaacgtttcgaccaggaccaccatagaagaaatgagccccccaagaagttccaccatttcctgtcttaacattgtaacagttatgtttatcagcaaagaagtaaagtccttgtggttctctaagagtattggttccatcaactatcttaagattcctgaaatagcttgctttcttaaaaccttcatctgcaaaatgcccacttcccatatctgtggtagtgtgtctcccaccgctctttgagttaatgatttcacctccccattcaactctcgtagcttttcttcctagagaattgaacaacgagcctggccagtacccaataacgtcttcttcattgactctaagccaccagtttcctgttttttggtcctgatgattgcaaattatccatttcaagatagatggagaggtaacttgagcgaaaaggtatggaacttgccactgaagttacgttgaatatttgaatctgatattgttgaggtgaaatataattacgttattaccttccatataagtacggagagatcatattgagttccacggtagcgtgacatggtggtgattgatccacctacggtgtatcgattactcgtttgaacaaaacctgagcagagaaggttgtagcagcccgtttttcggtacccatcacgctatttcccaaaaaa

SEQ ID NO: 11125 - DNA, 1431 bp, Arabidopsis thaliana landsberg
tgattgcaccggctaaagaggcatcaacactgaatctggcagtggctgagtcaccaaagttagagacatggccaggcccagactctcccctccctgagaatcggcctccattaccagaaccttgcatgtttctggaaacttgaggaatgggtggtcccatatttgtcatctgcgatacagcattgtatcctccgggaacataatgcaagaaatggcaattctctccgaaaggacagccagaagtactgcaatagaagcataatacatcagagatttaaacacaatgggaatagaatagcacaagaacaaaccaaatagagacagaagaaatagcatattgatacagcactgatcattgtgctataagagaataaaaatagtaatccggttctgcttatagatgcgcggcaattccactagtaatgcgacaactttacctgaccataaacaactatattataaacccaaaatcatctattccctaccaccaaatagaagaacaactatcacagctcaaacaaattacatgttttggttgattttgttatgttataacaaccagttgaactaaatgattctcaaactagatacgcttatctattcagattgaaacatgtttacatacctgtataacaactaaccacttcattagcatctagtattacttggtaatttcgggatcaaacttgcaggtagataacaattcgaatattaattcattaagtaaaaggattataacctgaaaaattttgtgcatggcttcgatttgcttcctaaaccagttgaatatgattccatctctgttccaaacattaagtgttttcctttagttaaaaacttatctgaagttcaatatattgcttttagaatccaacatatcattcatacattcatcttatcatctatatgaaactttcaaatcaaaagatgcataatgttttttaatgttttcaggataactaaccaactggacacaaaaacactttgcagaggaaaaaggcttattcaatcaacaaaactaaatccttggtatggttataaactgttattagctttatacttgagaagagggattaaagtaaagaaatactaaaactcaaggacagtggaagatataagcttgagaccaacaaaacccagtaattaacatttaacaatagtaacaacttagcaaaagctgatctatcatcactcaatttagatttacatcagataaaaaaggccagtactttttgcagtaatctagctaattaaccagataagtaagcaaacagaacacgaaatcaccaaaacaaagcaccgagaacgaaagaagaacattttgcctcctagtaaatctcataactagcaaaaaaaagtcctaatattacccacaacttaagatctggtattcataccttaatcagagacagtgaagcataaagaactaac

SEQ ID NO: 11126 - DNA, 1192 bp, Arabidopsis thaliana landsberg
gaataacataatcaacactgcatttgcaaaatattattgtgacatctttcatctaatacaatccaaattatttttttatgaaagcgactgaaagttacatgaacgtagcaaaaataaatttggcttagatattttggaatacatattgtgtcatcatccgaatcattttgacaaaaaataactcttctatatgttttatctatttatgatattttggtaatttccaggaaaaagatattctaaaaacacgagttagttttggaacataattttggaatattttctgtaacttcctcgaaatttcaaaatataactacaatacagatgacattaattgcaaattatagtaacagaacataaataacttataaactaaactgtagtgataattaaatataataagaatatcaaattcattcatctcttctatatgttttatctatttatgatattttggtaattttcagtacaaaattatttctaaaaacacgagttagttttcgtctttacgaaacataagtttggaatattttatgaaatttcgtcaaaatgtcaaagtacgactacaatacacatgacattaattgcatcgtcgttaactatagtaacagaaaataactaacttataaattaaactgtagtgataattaaaaataatgtatacaaaattccattaatctccaatttccgttttattttttatcaaatggtcaaatttatacaatcttagtgtattactattttctaggtaaacaaaagtacaatccaattcaatattactacattatcaaatgcggcaaaactgaatctgataaaaaatgatggtttttattcataactacaaagggtggttaattattcacaaaccttgtttatgttatatatcaattagtaagacttaagaatttaatattctaatacgagttgttaaatagaaagattacgtctctaattccaaaaactatagttattatattatttttctaagtaaacaaaaataaatatcaaaattataactgctatcatgtgagatcatatagaactgtttaaacatgaataacaaaaagaccaaagtgcaaagactatgttgtcaaaaaagactggactagatatagttgccaagactaaataattataggattattacttttcaacgtatacaaagatgcaatcacactacataattatattt

SEQ ID NO: 11127 - DNA, 1159 bp, Arabidopsis thaliana landsberg
aaccacatacggtaccaaaaattaaaaattgaggaaattttataaaaaccaaatgagtgttagttttttttgacacgatggaataaataatggattgttaaagtagctggattcaaatgtatgttgaaagtgaaaacagaagttaaagtttgagaataactgagaaaatcaagatcttaagttttcaactttcatctttcaaaccaaatccatgttttaccacaaaattaccgtttccacataacgataaagctgcctcaaaatctattctcttctttttatcattttatataatataaaaaattcctcccaaaacccttccatgatttcatcactacctagtatttatatcaccttatgtgtaaacccacatgctccaaaactttctcaacacagaattctataaatatacgctactatacactaatttcatttatttatgaggggtgagttgattcattaattcttggatctttgggtgtctaggtttacttagagaagtgacttgtgtctttaatgggtttgttgaaagatgtgtcagtgacatgaagaagacgaacaacaacaataagcttgcaataaatgttttgccttcatcttcatcacacatcaacaccacacaaaaagtgtttttcatactcttcagaaaagtcaataccgtgaaaaagaggagactcctgactcctcagtcattgcaatgtcttcttcttcttcttgcttgttcttcactttcattctcttactcagtctcttctcctcctctgcttctccatcgaattcgacatccgaaactgtgcctctccggcctcaaagagagattcagaagatgaaactcatcagaaaacaactccaaaagattaataaaccagccatcaagaccattcatgtaaatccaaaaactctatttcttaaactgtatatttcttctatacataaactaagttatgtaatgttcttgtgatgtctacacagagctcagatggagatacgatagattgtgttccatctcatcaccagcctgcttttgatcatcctttgttacagggacaacgaccaatggtattcacatttttttttttttgataagaaattcacatttctcttgttcttcttataactactacaatctcaaaagtctctaacttcgttgaaaaacatg

SEQ ID NO: 11128 - DNA, 567 bp, Arabidopsis thaliana landsberg
gaatttatgcttccgcgaagcttaagcaaatcaaagaaaagaaacagagtagaaaccctaatagatcaatttgggctcacaactgttaaaaacactgtgatcggagatgaaggccatcgtggtgtctccgggggagaaagaaggcgtgtatcaattgggaccgatattattcacgatcctatagtcttgttcctcgacgaaccaacctcaggactagactcaactagtgccttcatggtggtgcaagtattgaaaaagattgcacgtagcggcagcatcgtaattatgtcaatccatcagcctagtggtcggattatggagtttcttgatcgtgtaatcgtcttatcttctggccagattgtgtttagtgattctcctgctactctccctatgttcttctcggaatttggtagtcccataccggaaaaagagaacattgcggaattcacacttgacctaatcaaagatcttgaaggatctcccgaaggaacaagaggtttagtcgaattcaaccgaaattggcaacataggacgctaagagttagtcaagaacctcaccataactca

SEQ ID NO: 11129 - DNA, 1323 bp, Arabidopsis thaliana landsberg
tcattctcggaaccggtacttctcaatctgttgttaagatttgggacgttaaaagtcaggtaaaaactatgggcttccaaactatatgacctattaaaattattaattgtgtacagtgttcttcattatagttttcatttttttggttgataataggcaaatgtggctaagtttgatggacacactggggaagttacagctatatctttctctgaaaatggttacttcctcgcggtgagtactttgaacaaaatacgagaagagagaattcagcttaagttatgcttacatgaatgattttctttttgtcctggaattgacagacagctgcagaggatggtgttaggttgtggaatctgcgcaagttaaggaacttcaaatcatttttatctgcagatgcgaactctggtacacaactatcggatctgtttctactcattttgttgatagagaactttctatgtattataagctcgctttgattaaacctactttttttttgtgtgcagtggagtttgatcctagcggatcttatctcggtattgctgcatcagatatcaagtgagtacacatttgaaaatagtgatcaaaacatccaaagctcagctaaagaaaatatccaaagagaccaagctagcttgattactctgcacgttgggttaacacaatttatgtgttttggctgcagagtataccagacggcaagtgtgaaagctgaatggaaccttatcaagacactcccagatctctccggcactggtaaagtcccttacctaactccttcaatgatcacatagcgataatgttgctaatttcgaagcccttacacttgcaggtaaagctacgtgtgtgaagtttggttcagatgcacagtacgttgcagtcggttcgatggaccgtaacctacggatatttggtcttcctggtgatgaaaaagccaacgtcgatgatgactctgcgcaagactcgtgaacaatccgtaaaaaactcagacagaacattccaaatgtccatctccagtgttatctcgctcaaatttctcaagttctgttgtatcttacagtatttgcagcaatgggggagaatttcataggtgcgggtcatgagtgagtggtgattgtgatcatcctcgctacctcttggaattcaaacaatgacactcacaaaccctcgagttttcttataggctcttttaatcgctttgtaccttcaatatatgtaccaaaaaatgtgttctttctgttgccaaatgatctaagccaaatgaattcagacactaatgaagatcccaaaccgatcgtgctaaaccgcatttggtattat

SEQ ID NO: 11130 - DNA, 338 bp, Arabidopsis thaliana landsberg
  unsure (1)..(338): unsure at all n locations
aagacaccaanaaagtgggcgctaccattaaaaaatggcctcccccaaaccctccttttatatttcacatcaaacaccaatatctccctatgaaaccttacaaaaaatacattctcccaatgtacccagaatgcaaatcttaccaaaccataacagaaatgctcctcaatcaagctaataccaacaatacttgccattactaacctcctctctttccaacctcattatctcactgaaatcttactttatctgcatctactgaatcacaacatccctctcactatctccaaggaccttaaccgacaatataaatcctttaatgccaaccacacacaaat

SEQ ID NO: 11131 - DNA, 733 bp, Arabidopsis thaliana landsberg
aaggccaactccaactttaaaaggtgaaaactacatgcgataccatcgtgcaagaatgtttgctcaccgagaagctgtcacactcatgtaactgaaggtattttattgctggcagagaatgattgtttccattacgctcgttcccaggaccaggccaattacgcaccaattgagcttcctgttcgagaccaacatcagacggcttgattttctctgaaataaaaattacaagtatcacgtatgtctgcaagtaatagacacgataaacaacagttgtctaatgccacaagaaggtgcgataaccaatatagaactgcaattcagacataacgagcaacacagtgtgcctaaagaacataatggagcaagcaagattgcagaaatagaagggaagaaaatttgcaagacagtggatcaataatgtcgtcgtacccaagacattgcgaaccttgtctaaggcctcctcagacacaggaccattaggtgagagagatgacttgcaagtattgaaaagcctctgaataaaatatggcatgatacaaaaagaagacacagctccaagttcttgagcttctaactttggtaaccctctttcagcaaaacggctttgagttatcaaaacagcaccagcgatcaccttcttcaatgattctcaagcactgccctaaaagaagagaaaagaaaacaactttaacttcatatagagctccataatctaaacaaaaacatctga

SEQ ID NO: 11132 - DNA, 942 bp, Arabidopsis thaliana landsberg
ttctcctaatctccacatctttctccttatccactctttcttctcccacacactctttccaacatcttccactacacttgccgcttcttccctcaacctcttcaccgccgtcgatatcctccgcttcttcctcgtctcttcttcctctgattcctccatctctgactccgaatcctccgccatatcagactctacttcctcctccacctccaccctctccgcaattctcgccattttccctgcttccgccgcgtgaaaacagttctgctgctgactcggaatcggaatcgaaataggattctgttgcggtggttgttggtcatgaccaccaagatgaccacaactattatgataagcacacatctctctaaagaaaagatgcttagaattaagcaacttcttgacttcatctttcaacttcggagtcaaatgatccatactctctaacaatccttgattctcaacgacacgacaagcgattcctttaccaagaatatcgttaactctcttgtacctcttgttcaaatcattgaacttgtcttcacattgttgtggtgacacagagaaacctttctccaccatagctctcgacactgatttccacttccctttcttctgcaacatccctcctcctcctccgccgccaccgccaccgccggtctttttcttggcgtcgactggatcgtttaaaccagcttcgtcaccgatgtagaaaaccgccatgatcaaaagcctaaccattgtatccgtccatttcattctatgccattgtgacaatttcctcttcccgtcagttcccgcgctgtcttcagggttgcaaccggatccggaacccgacccgcgatcctcgtcgtcgcaaccgccaccgctaatgggtgacatttgtttgggttttgaggcgtatgggtataaggatttatcggcggctgaagttgtgggtcc

SEQ ID NO: 11133 - DNA, 1370 bp, Arabidopsis thaliana landsberg
ttaatctcttgaaaaatttctctcactcatgactatagcaattagcacaatataactagcctaagagaagaaccagattctctgcatttctaagaaaacagaggaaattttaagaatcatgcatgcatatgtagatctattcacatattgaattttttttttttttttttttacatattgaatttgttatgtctagaaattttggatttttcagagtttgtaatggtgacgaaatcttctgcagaggatggttctgtttttgaggttccttgtgattcaggttttcagcaaaaacctgcagcaccagtagcagatggtttcttaactgatcctactggtaagtctctctctctctatatccaactttttgaatatatttctctttcataaaaacagaacatgaatctttgtcttgcaagtagtactactgcagaatttattccatataagaatttggtactatgcatttctgaaaaaatagagtaacattgaactgttttagagatgtagtcaaagttctttagctaaataaataaaacaaatgttccttactttcttgaaaaattgagcctataaaaatggacacaaatagacagctagtgagaatcatgcatatgaaaatgtataaagatatactcaggtcatattttttctgaatgtaatgtttttgtgaaccaaagctgttgatttattgatccaccccacacagtgaagataccctaaatcagtttatctttcatagtttgacatgaataatagtgacagaatctttgtcagaggatggaccagttttggaacttggtttgacagagtttccaatgttttcagaatctctcccagaggataaagcggttttggaggttgctttgacagagctgccaatggtcgcagaatctttgccagaggatggttctggtttggaggttacttgtgatttacgtttggagcataaacctgcaagaactctacttttggttggacgttctggtaatgggaaaagcgcgacagggaatagcattcttggaagaaaagccttcaagtcaaaaggccgtgcatcaggggtgactacagtctgcgagctacagagttcaacgctacccaatggccagatcattaacgttattgatactcctggtaatgtgtatgaaacaaagaactatcaagccaatgagtcatcaatgatacttaaaatattaaaactttgcaggtctgtttagtctgtcgccatcaaccgagtttacgtgcagagagattctgaggtgcttctctctgaccaaagaagggattgatgcggtgcttcttgtgttctccttgaagaaccggctcacagaagaggagaaatctgcgctttttgcattaaagatcctttt

SEQ ID NO: 11134 - DNA, 568 bp, Arabidopsis thaliana landsberg
ttccccaacccgtactgaacgcttcaacccaggttgtccaagcgccttaccaacaaaaccttttgggttattaggagcataaggctcctcatcagttggtttaacaattgcaacactctctccacggctgttcttaaagtaataggcccctccaagcccactattaacagcaactggatcaatgcccttcttcactgcttttgtaatatccttcgccatttgcctcacgaaagagaaagaaacagagttcccaagaatttcaataggcctgctctcatctcttctctgctgaaggtcagccctcattggggaaagacacggagtcgatgagctcctatgaaagttgttccgagttagaagaagaggagaatcacttctaacagctgtaagatcatttttaagcaccaaatccccaaaggtcaacgagctttcctcaatggggaaattaagagcaacctgcaacttccttttcacagtgtgcgcgttatcactacgatccaactccaaccccagtacacaaccagtctctgtctgaacaaaagcccgcttatgaggcgacaggtgtctt

SEQ ID NO: 11135 - DNA, 392 bp, Arabidopsis thaliana landsberg
  unsure (1)..(392): unsure at all n locations
tcaacgatggagtgaagcaagccaagcctatgnagaagatgttggtgagcaagattgcttcctgcagcagttcatacctcatgattatgatgctagcgagcacggaacatcaaatttccctgtttcagctgtacaccgtatagggattcttgacatcagaatcttaaatacagataggcactcagggaaccttttggtcaagaaactggatggtgatggtatgtttggccaggtggagctagttccaatcgatcatggtctttgcttgcctgaaactctagaggacccttactttgagtggattcattggccacaggcatcgatcccattctctgaagatgagctgaagtacatagcaaatctggatcctttaggagattgtgagatgctgc

SEQ ID NO: 11136 - DNA, 1254 bp, Arabidopsis thaliana landsberg
aacttctattcttggaagtgtgacaattctagcaataagagtatttatttgttccggcatttaagcagtaacacagggtctagagacagggctatggcaaaagacgagatttcacgtggagaaaacagcacagagttccaccaaagtctgtcttcttccactactagtagtaagtaatcaaacggaaatttcaaaaaagagcaaaacaacaaaacttttttttatatataatgataaactaaaacccgcgattgtcgctgtgtggtcatcttcaatgtcaacaagttaacactactaagtgataagtacacaaaacccttcacacacaaagactcaaattctttcatagttttagggtttaaagcttaaaataaacaaagagtgggtcattatagtctctctctacgaccccaaaacggttagtcacgtcatgattaagaccagcactattaaaccacattttaaattaaagaaaaccataaactcggtgctgactcagtgaggtaataaacttaaacccttgagattgaagaagatgagagagcttaccgtgaatgagattgaataagctgccattaggatgataatcgtagatgataagtctatctccgttggactgaaaataagatctaatcggaacaagattggtatgtctaactccaccaacaatctccatatgattctcaaacgcttcttcactcgtcactgccgttttagcagcgtctagtctcttcaccgtcacaataagctgattatcaagaaccgctttatacgtaatccctactgatcctcttcctaataactccgctgaagctctcattagctgctccattgtgtacattccttgacttctagattctccacagaaaacaagattcccactatttggtattcgctgctctgtttcttgaaattgaacctctttttctcgcttttgagattcggtatctgagttcaaaaccggaactgctcttgttcttggagtttggttttgtgattgctgttgttgagataaggaagcttctccttttggatttggttcatatattccatcgacggttcgtttctttatcaccagagagaacacaacgaggcaaagaccaagaactataagcgaagcgagaccagcggtgaaaccaaggactaatccactttctttacctttcttcttcgtaactaccggagggataaccaccgcaccaccattctgcgcctgtgcgctttgtcctaacggagcttttgacgacgtccttt

SEQ ID NO: 11137 - DNA, 947 bp, Arabidopsis thaliana landsberg
ggggtgactctatacggccttgttacctctgaaaagaaaggaaatagagtaggttttttatttttaaaggtgtctccttccctccggtgttggaaattaaaagatgacacaatacaagttacaaaatagatttctttcctgctatttttgtgtgttggcgaagtgacgttcttagaattttcaaaaaagatacttggtcgaaagacactgagaacaagtgaactccgacaaaattgtgtacatagcctacgaacctgagatagctggacttgatggcttggtaaacgtctttgaatatggcctgactacagtactctttagctgattttttgaaaatttctggaccaatagattctcatgagtgctacgcttgatgctgagagattttctggatattttggaggttgcccggttggacgagtccctggattcacttatccagttaaggtcatgcttttctctctatatctcgaatatggtaattcgtttatgcccaaatataatctacttgctttgtgtctacaggtgagaaccttatatttggaggatgtgctctctattctgaaatcaggtggagataatcatctaagctctaccaacttgagtatatcagaccacaagcttgatttgacggatgaggataaacttgctttagatgaagcaatcatcttggcttggacaaatgacgagtttgatgccctcttagatctagtttcttctagaggaagtcatgagatctacaattatcagcaccaatcaacctggctaacaccactaatggtctttgctggaaagggcaggatcagtgatgtctgcatgctcctctcctttggtgcagattggagcttaaagtctaaagatggtatgaccccattagccctggctgaagcagagaatcaactaaaagctgctaaaataatcagggagcatgcagacaattcccagtc

SEQ ID NO: 11138 - DNA, 1577 bp, Arabidopsis thaliana landsberg
atataagtttgttgagtttgtgcgtcatggtgccaagtttgtgaaatcctacttatctatgccacttgcatttatctatacacaagaacgcatatatattaatataggctcagaacagaaaaattccaatattacgttaaatattaaagaaaatacaacatgaatattaatttggtttgtgggaggaggggaccagtgtgcttcttgttcctctattccatgtcttaagaagctagcatactaacacatactttctcataatacaatagttacatgtaattagtttattccaactagtttaaaaaatgaaaaattaatttagtccaactagttagtttctccaataaatgtatatatcaacaagaccagagatccatttgtttaaaatatagttttcttactattaattacatgatggctataaatttataattttggatcgtgttttgagtacaattatcaaatagataaacaaagtgaccattaaattatttgcctatatctagttcatatatattaagtactccccatagcactatttaaaaggatataattaagttgaacagaaaaagtttaaattattttgttctttcatacttatcatttcctctccttctatataaccttcaaatatcttcacttacaatcaaattcaccaactctctctagccctttctcttttctctctctctctatatattgctaaacaaaaccctacttattctaaaaatggaagccacgatcttcgagaaaagaagaagctcgttatcaagcatagcggtgcacaaacagtcatactcgataaccaaatcaaagccaaagatccgtataattcacatatttgctccggagatcatcaagaccgacgttgccaacttccgtgagctcgtccaaagcctcaccggcaaaccagacgaccagagaacttccaaggcaaaacctagaagagatatgcatcgtcttcatcgtcaagtccaagacatgatcaacacggagaaactaagagaacccgagcattgtgatcaagagttctgcttaaacgcagaagagctctcgatgacttggaacggtaataatggcgctggtgaaagctctggagggttcttgaatggtttgggagatttcgaagggtttattcaagaacttggtgaatttccttatttgcccttgtcctccattgatgcttctgcttcttctaactcctcttcttcctctcatttacatggtggatcagttttctcagatcaattcgcttaactcggtctctcaaaggatgtgtaacctttttcatcttttattttgtttactaggtttttgtggaaatgaatttttaatttattacttttttttttgtttgtttagtatgaggctaattgatttaatgaaattagctgagactccttttatttctcccttaaggtctttatgatttgtccattgtcttcaaaatgtaatgtacactgataaatgttgtgtctagcttttgctttcttggacgtcctctaagcatttacaatgttaaatgtttcatatatatcagagtgaaaacattcactaataaaatcaacagaggcgaa

SEQ ID NO: 11139 - DNA, 1057 bp, Arabidopsis thaliana landsberg
taacgcatagcttctttggatctatgacccttggcttgatttcggtgtcttgtgaggcaatagatacgatgctttgattcattttgcgggtcttaaagctgtgggtgagagtgttgaaaaccctcgccgatactttgacaataacttggttggaacaatcaatctatatgagaccatggcaaagtacacactgcaaaatggttagatataattcttaaacttcagaaatgttttacttttttttccttatatttccttgttcggttttacaatggtggggatacaaattgatgtgttgttggaatatacagatggtgttttcatcttctgccactgtttatggacaacctgaaaagattccatgcatggaagactttgaattaaaggctatgaatccttatggtcgtactaaggtaaattttactcaatatgcctttggaccgtaatgtctctctcgcttttcctcctttatccaagtctctcagactttagaaactcttggttgtagatttataatcgtgaaagttggctctattgtgattaataccttgtaatttttccaaatgttacctgagctaagaagcctttcttaagcctaacaaagataataacaatgctcaattgttgaaaagtcatgatggatttaccaaactttcctttgtgcagctctttcttgaagaaatagctagagatattcaaaaggcagaaccggaatggagaattattctgctgaggtacttcaatcctgtaggagcacatgagagtggcagtattggtgaggatccaaaaggcatccccaataacctcatgccttacatccaacaagtggccgttggacgtttaccggaactcaatgtctatggacatgactatcccaccgaggatggtagtgcggtaagagactacatccatgtgatggatttagcagatggccatatcgctgcgctcaggaagctatttgctgatccaaagattggtaactttcttagacatttaactgttagaagttttagtttgatttgatagaatattctcagacctgtgttatgttggaata

SEQ ID NO: 11140 - DNA, 744 bp, Arabidopsis thaliana landsberg
aagaaacggttttatcgatgttataccgcgctaccatccatggtaggatagtcatgtccaaatacattgagttcaggttatcttccaacagctacttgttggatataaggcatgagattatttggtatgccctttggatcttctccaattcttccactctcgtgagctccaaccggattgaagtacctcacaagaattatcttccattctggttccgcagcgtgaatgtctctagctatctcttcaagaaacagctacacaaatagctcaaatgtattcaagatcacagtcttaaataatataaccttcaagattatgaacacaaaacagaaaaaaagagattcgaggtgtgaaataccttagtacgaccataaggattcatagcctgtaactcaaagtcttccacacatgggactatttcaggttgaccataaactgttgcagacgacgaaaacaccatctgcatataaagtcaagagtcagaacagtttggtaactaaaatagaacaagttacacatattcaaaagtgaaggatgttgatcttaaaccattttgcagttgtattttgccatggtctcatatagattgattgttccaactaagttattatcaaagtaacgaccaaggttttcaacactttctcccacagctttaagaccagcaaagtgaatcacagcatcaaatctgtttctcctcacaaagaatcataatatcaaaacccactcacctgaataaaaaattgc

SEQ ID NO: 11141 - DNA, 1301 bp, Arabidopsis thaliana landsberg
agcaaaaaatggctttttggacaataattcaaaataaaatggtacctccaaatggttttaaagttttaatacgtaattcatgggtcaatttgaaaacttataattttctttaactaacaaagtaattttaggtgtaaatttacaatggtacctccataatactaatatttttaatatattttaaaggcaaataatatgttcttatgataatgatgtagtatgatgctattttatctaatctacaatgtgttgtatttataatcactcatagttgagatattttattttaaaacatgttatttaataaaataataacaaatatgtgcatgaacttttggtggaaccatgcaaaaagttgacttccatgcaacaattttgattttccaaacttgaaagatgattgccatttcttataattttctttaacttatatagtaaatttaggttgtgaataaatcgaatcggattgcaattcggtttactatactagatttttggtttggtattgaggatacaagactggaaacaagatctaaaatatgtgtagttgtggttctgtatgaaacttcgtgagacatatgttatttacccaaaaatgtataaaaaaagttcagagtaaagattttaataacagatgtacattgcttttgtaattagtgatcgtgaatggtacaataataccatattcaaaatagtctttacttgcctcatgtgtttggatacgagattactgaacgttgtggtgtattttatagtcatgggtttgttaattgttatcatgcttgcctacttaactagcgtaattatgtttttttgtactacctcggaagtagctattttgtcgcttattgacaacgagatactttaagatgttccacatccacgtcgtaatcggttgatcgaatggtgcctaatagatcaaagttatcctcaacaaatatcgatgtgtagtatatacgtgaatatatagtagtctcttgcatgcatatcatatacaacttaaatactctttttgtttcaaaataaataatgttttaggaaaaagattattgtgtcaaattaagtgttggtctattcatccaaacaagaaagaaaaaaaatacgaatttgttttatatatcattgacgaacaatgtttagctaataataaataattatttatttataagaattaaaagttagatagtttcttaatttaggtgcatataagttctttaacaaaaaaaacatttaagtgcataagtcttaaatatcaaatattttggaacagtaattttatgtataaccttttttcgtaccta

SEQ ID NO: 11142 - DNA, 1186 bp, Arabidopsis thaliana landsberg
  unsure (1)..(1186): unsure at all n locations
ctataaactaggagactaaaatgagacggcacaagtaaaatcaaacgactttaacaatgtgatatgattcgttcttaggaacaaaaacatttgataaccctgaaaacactagacttgacacaatgaatgcagatcttcgttctaaacaattcataatgctaaaacaaaaccagatctacatgaaacacaatatcaatacaaatgagaataggcttataatatacctgagcagcaacgagaccactgatgtgagccatgtcacaaagcaaaagagctccaaccttatcagcaatagctctaaatctagcgtaatcccaatccctaggatacgcactaccaccacagataagcaacttaggcctgaaatccaacgccttctcttcaagcttatcgtaatcaatgtaaccagtggtgaaattcaccttatacggaagactctcaaagtagatcgaagtcgcagagatcttcttaccaccagatgtatagtaaccatgagtcaaatgaccacctgaaggcaaatcaagccccatgatacgatcgtgaggctgaagcaaagccgtgtacgcagcgaaattcgccggagatccagagtaaggctgaacattaacgccccacgctgctggatcacaatggaaagcttcgagagctcttgaacggcaaagattctcgatctcatcgatgaattcgttacctccgtaataacgattaccaggaataccttcggagtatttgttggttaaggcacttccgagagcttcgatgacggcgaaggaagtgaaattctcggaagcgataagttcgattcctcgacattgccgacgtttctccttctcgattaggtcgtggatctctggatctacggagacgagagaggtgttaccccatgaagagactggttccatcttctttggatattgttgaatggatctgagatcggagaaagagggagggagaagatctgagatcagagagtgagaagtgggaagagaggcggttgggtttaaaagaggagtagaaaatggggtaaattacggatttgtcctcctttgctaatnttggtgttagttggttaggntgtgggtggtagggagaacaangcttagtgtgttttgactattttaccctcttaccaatattttgtttcccttaattaattatgattagatggatacttaagccccattgc

SEQ ID NO: 11143 - DNA, 1152 bp, Arabidopsis thaliana landsberg
  unsure (1)..(1152): unsure at all n locations
gcaggtcgactctagaggatccccataaaatatatttaaaacaagtgaaaatacgagagaaaaacaaatctttaatttagtagatattgttaccttgtatgtataaactccactggtaatgtatccttcaagatcatccaggatgctatatttgcttctacgcaaaacaacggtggagaatggtgttagcaacttcatcattttctgcaatcatgaccttgacatagcaaaaaaacagattttttcttcatatattgtcaatgaaagacaaaatatattaacttaaaggatagaaaatgacttctacttaatgtcacaccatcaattttcgttattgatatcgaatcaacatatccaagatgctcaggtcttggcacacaaagcttcaattatttgaaacatttaaaatattaaaagctaaggtataactgacggtcatagagagtattccataaaggattgttacaacggtcatataataattatgaaatatatatatatacattgctaatctattgactttctatatctatcaataaccacccttagatactcattcagatcacactttagaaacacttacatgggaggcaactgccccagctgtccggacaaaactcgccagctcaatatctaaattaatttgcaagatcatgatcctgccataacagtggataaaaactccaccataaatttattaaccctttttgttttttttccaaaaagtatttgttatatataacaagcaactgcaacatccaaaatttggagaaaccaaggtggagaggcagacaagttacatagtacagagagacaagtagtatggttgcatcttgttcaccaccttcagtcattttcatcttagaagtaaaagtatccaaaaatgcattgagcataagcaaacagtgaatctagtccactgtgttgtaacgatctactagaaagcttcattgtggcaccaaaaagaatcccctccagccacaaagaaaaactgtaaaaggagcaggtattcctaagaaactgaaagcattacttaccccaaaaagaaaccatctcaagagttgaagggtaagttaaactcttgagttctttgntaaactaagatagatctatgggggttggtctgacacaagataaaacctaatcccctga

SEQ ID NO: 11144 - DNA, 1492 bp, Arabidopsis thaliana landsberg
tgcaggtcgactctagaggatccccagcagaataataatctctatgacacatgataaacactttaagtactatacacgattaacaaccataaaacgctgaatatatggtttgataatttagtgatgtgtatttttacctttttatctttttaacaaaataataacacatatatgattaatgaataatgtattgaatttgtttctgctatattttactattaataacatcataacgttttcatgtttgtttgacaaaaaagttttcatgctttcaaaatttgatgatgttatatgctataactgtattagaaatataattagataaaaacgaaacattattaatatataaaaacaaatcttatattgtttagctcgacatttagattattgttttctgaagttatttttgtaaactttttatcttcaaattgaataactaatcataaaattagttattaattaatgtatggctgataaaaaaagaaaacaagtcttatactagctttttataataacttgtggatactctattataaagagtttttacttcttgataattgagttgttacatactcctattattcatacgacatacaagtcgtatttatagggttaggataagttaccaaaatgtggaatcacttgcaataaatgtgaaaacttgtggactgttgtcacaactatttattatatttagatctcacacaaaatttgttctgtcaagtgaatgtatccaacatgaaattggcaaaagccagctataaacaaaacccaaaaaaaaaaaccacctctctcaatagtaaacaaaaaataggataatagggtcatctaaacacaagcaaatatggacttatgctgttgtcatgatagataaaaatatgtacgggtcttttaagagcatcaaatcaatttagcccgtgggtccttttttcttttacttacttaaagacttagtgcaatatttgtcccatatctccctttacccctaccacaccccacctccaccctcaaacaattgttgcatataaataaggaagtgattgataaatgtagagacaaatacccatcaaactctgtctctcactttccttcattatttactcattgcccaaaataattcatttatcatatcctcaaacttttttttttctatacctcgaaatccaaaaaaataaatacattggtttagtgtggcattgatgtttttggtataaagctcttcaccaatgatagcttcagagagtaccaagagctgggaactagcgcagtcagacaagagaatgaagaagagaagaagaaaccggttaaagattccggtaagcatccggtttatcggggtgtccgaaagaggaactggggaaaatgggtgtccgagatacgtgaacctaggaaaaaatcccgaatatggctaggaacgtttccttccccggagatggcggcgcgtgcacacgacgtagccgctcttagcatcaaaggacctccgctatactca

SEQ ID NO: 11145 - DNA, 347 bp, Arabidopsis thaliana landsberg
tttgattttttttatcactctgattgaaccacggggttcaggggctcttcttcgagaacatcaacatgtcccacctctaaagcttcagcttctgctatgacatcaaagattaaccatgttgcaccgtacttgacatcacgagatatcactgcctccgaaccataaaccataacaactggggtatctccatgcagagctccgctccattcaatactcacacttgacactacatcatcgcccggatctaacccactaaactagccttgtcaccaacaacatgaagacttacctctccgtgcgcttacagtagcatccaaataactctaaaaacttgcccgttggacctt

SEQ ID NO: 11146 - DNA, 836 bp, Arabidopsis thaliana landsberg
  unsure (1)..(836): unsure at all n locations
aaattttgcttatatatattaaccctaataagacacaaaagataaaaattgcttgctttgcacggaactaaaagaaaaaaaaagatttatttagtttaccttgttccggcataagtggaagagaggagttagatacctagcacactggttaaaagtggctagcatctgtttccctatagcagttctcctctcagtgttttccatagcctcaagttcctgcttccattcaagcaacagcttcttgcagaacacaaggatcttgtcctcgtcgcataaatcctcgaaattagcttcttccaaaagcttcaaatcctccttctcagcaccaatgagctcatcatcattactcgtcttcctcttcctatcattcatgagaccactactcctctcccgcttcttgagctcagtgatgtcacgcaagaaatcgtttgtctctccttgagtcatgtcgttatcgacctcctcgaataatccttccttcaacacgtacttgagtcgatccagccgcacctgatcacaagatttcaatgcctttgtgagttatggtgacaagtattcgaatctgatagagtgttttgcttagaccaagtcaagctaactattgataaaagccacggtggtgtaggtgatacgtcttatttcacatcatggattgatatatactctagtaaagcgtagcatcacacatctagatgttaagtgtctgatcttctagattntgagtatcatgagatgcccctaacctttatatctgcaagacactcgtatccctaaaactggctcgggtgagctntgatgatgtcgagtttggttctttacctcttctcaagactatg

SEQ ID NO: 11147 - DNA, 1868 bp, Arabidopsis thaliana landsberg
gctgaggaaccaggtgggaaattagcatgtgcgcataaccgtgtgttttcattaggcaacacatgcaaaattaattaaacacacgcgttgttactaaatatcgagggttgtggatacaaagggggaattgaaactttatctacacaaaacgtttgaaaacgacaaaacccaccgcaacttggaacattatctacttgagtgcattaaatccatatctttaggcgtcacccttccagataggtttgtatgctactatatacaaaagatcaagtaggcttccattcggctttaactccatccttgatggacttctccttgattaaccaccacaacctataacccatttttacaatgcgagacacccatcaccgctgaccaaacaataaaagaatattaagaacccataacttgcatcgaatattcatataaaaattgaagtaggggtatctaccttcatacgggcatgttgctacttggcctacccggtggcctgcaagttgacggtgggtttagctgtagagaagcaattggttcaagcaaaagaaacacatctcctacatcaggcataggttttattgtccctacgtacgacattcgccaactctccacagagtactctagcgccattaaccctaggataggtacaccttcagaaactactgcagttaaagcgtgcgggcaaggataatgtagcaaattaaattctctacaagagcacgtgcattccagaacattaacatgaaatacacccgatccctctccttgaacgtcatagtcaaaccggtcaatgcgtttaacagaaaaaactcccagacttttcgaagttcttatgcataacttctctcatattcggtggcattgctgaagtttcatttctcgttgctttgcgcctctccgcaaaccaggtcattaggattgtacgaatgaactctagaagggaaatgatcgggagttcacacgcttcctttaacaccgtgttcaatgactccgctacattggttatcataacgttgtagcgatccccttcaaagtatgcccttttccattgacaaaagccaactaagtccaggtagcgtgcacaagtcggatcaagcattatagcctcatttggagtgcgaattaaaatctgtaagcctttatgctgtagcggctctggaaacgtgcaaccccagtatttttttcgtgaatgttgaaacaatttccttcagatacacctttcactaaacgaaactttagtttggcacatcctttattaccacataacatgtcgttaatccttactgcatgtcaggtaattcaaatttacttatattagtaaagtactctaacctaacgagtttaaagcttacccttcataggcctttgtatatcgaggaatgacggtctgagacaaacgaaagatttgttgtgtccggtacggctctgcttagctcccaaaaaaaccactcccaagcatcatcgttttcactatcgactaccggaaaagctagcgggaaaacttgaaaatttgcatcttcacagcttccgatgagcaggcagcctccgtatttcccttttagttgggtcctgtcgattacaatgactcgcctgatgcttgcaaatccttccaaggatgctgcaaatgctacgaataggtatttaaacatagagacaccctttccattgaccaccgttttaatttcaataagggatccagggttcgactctcctaggccctgcaggtatgctggtaatagagaaaagggattatctgttgctccgttagctccctcggtagcaagttccgtgataggtaactcgatcccaacaaggtctataggaaaaaaaggttaagtgtctttaaacaattacttgcaacttttagatac

SEQ ID NO: 11148 - DNA, 697 bp, Arabidopsis thaliana landsberg
ggttaaaggttctaagattttgcaatatggcattgtcaggattggagtgtgatctgcttcagaggctcaaagatgggtatgcttctgatgctgtggttcagaaacagattgaagctcttcagagaagtgcagattcgataaagaagatgagttggtcacaagggttgttgcaccgtaagaacaagctggttgtaccaaatgttgtagctttgaaagattctattttgggatggttacattgttcaggtgtggggggccactcaggtcgtgatgctacccatcagcgtgtgaagagtctgttttattggaaggggatgtctaaagatattcaagcttacatccggagctgttctgtgggccagcagtgtaagtatgatacgacagtatctacgggtttgctacagccatttcctattcgtaatgcttccccaactaactccttatgctcttcttctgcatccaagaacacttcctcagcatcttccatttccaaaacaaacaattgtgttttcttgtgaatcttataatgttcaggtgtgtattgttcatcacaaaaataacacaatcctttagctctcctagcactcatctcttcagtagataagaaccgccttggctgattttgttgtgtgtctcttggtttttcctgaaacgctggtttattgccctgctgctccatgtctttcttaaaggagaa

SEQ ID NO: 11149 - DNA, 1098 bp, Arabidopsis thaliana landsberg
aacgataacctttttaatttaacttaattttaatcgataattattattaatatataatcataaaacatatacacaaaagaaaataaaagtaaaagtggtaaacaagccaactaggatgttgatgattactatgtaataaaatggtaaagtatgatacatgttgatatttactaaacaaaattattgattacatattgaattaatagatagataaaagaaaagattaggtgaagtgttaaaaaaataaaatcgtagtacatagtctaaaacaactggcacattattaaaaaaactacgtacaaaccaatcaaaacaaaaagttaataatacacatcatgttcccacggtgacgttccaacagaaacacatgagcccaacgcataaacaaaacaaaaaaaaaagacaaaccaatgaaaccaattttaactatttaaatttcaaaaagaaaagaaaaaacacttgagggtcaatgatgtaaggagaaaatgggttagcaattatccattggatctatgcttgcttgtacctcacaaaccgcaaaatctttcttgaagtcgtcttaggttgaccaactaaaaaaagcgagggatactttggtttcgtccatttttcacaatatggtgaatttaagaaagaagtttgagatgaaacaggcgaatcagccgggtcgcgtcccaaattatttcaggaatcaatatcatggatatgatgacgatatgccgaatttgctacctacgttcatcaaattgttggatactgagaaggacgaagacggtgccggcttgaacgctgcagagcaaatcgatagggagttaaaaagccgaaaatgtgatatttttaagttccgcaacttgacgattctcgagcttcctcacttgaacgagtttctgttttctacggagctcaatcccccgatcagtgaccaggtgatatttctttctttttgttttgttccaaaattaaccaaagaaataggttggtcgttacttctggtttgtttttggaaataagaacacattttgtaagagttaggtttctgttcttcaggttcgtcatcgtgacatgaatgctccactatcgcattacttcattcacact

SEQ ID NO: 11150 - DNA, 1176 bp, Arabidopsis thaliana landsberg
tacacttgctaagaacattttttcaagctcacattaactgatcatcaacctggggcacatgagaatccaaccatatcaacttatgatttaccttgatcacggccgttgtgttaccgacaacaaaatcgacgtatgtcttgtgaggattggattggaaaacggaagagtttgtagagaatggatattgataatcgttgactccgatatgaaacagataaaccgctcttgaaataaccctcttaccttgtgcttctcctaacgtagatcttaacaatttttcaaccttcttaaaattgtttaattgagatttcaaatctatcaccttgagtggtaaaaatgagagaaaaaatgagtgtagaaagtcaaaacagttatcattgattcaactaataaaaataaacaagtttgataattattaccattccgggaaaggttccgactaaagctccggcaccggcggaagcaaaactaactccgtagggaaattgatttttaccgttacttggttgtagatacgctgggatcaacggtaaccatgcatactccgctgccacgtcggcaattagtttttataaagccgttaaaatttaccgggaaacaaaacagagtaattttgttaccaataaaatcaggaattgtacgaccgtcggagactcttccagtagggaatttgaaagtggtttggccgtatggccagtaattagaccggaaactgggaagagtatcgatgtaattgttgtttccggcatcgaacacagaatcgccaaacacgaacaaagcggattggtttgttaccagattgttgttgttgttgtctctacagttgatagaaccgataaatatgattgttgtgtaagcaaagaagatgatcaaagttgatcgagagttttccatgtttaatgttgtgttcttggtattactgtttagtgtttatataaaacaaatgttctgttttggtcttcatataatagcaagtgctctgtttttgtttttatatatattttgaattttttcaatagtttatttcaataaaattggttgattgatgagaattgttttttttttcttgtggtcaagttgttctaagaaatagtgttgtaaaatagatcttctaacagcccatttgttttgaattttatgttgttgtcgtttgttcttattttaacctatactgtc

SEQ ID NO: 11151 - DNA, 930 bp, Arabidopsis thaliana landsberg
cctcaacataatacactgagtgaagtacattactctcgacttctctctcaaacacgattaccaaggcaccttatccaaacagcctttccgacgccggtgaagtctttgctcgtaggcgccgggattccagttgctttttcatttcgacatcgcatcctctctttagttatcttctgtacttttcccctttgatgtttttccccaatttgttttctctgtttaatccttctcaaacccctttgaacactttctaccaccttgcaattgcattgcatccaggctgctatttaatcacaagcgacgaaggaaggatttgggatctgacaaatcacgcttccctcttttacctcgcagctctctccacagatcttttcctctgggctatggtatttcatgccggaaaggatccaaactcctggagctatgcttttgactcgggccaaggccatcgcctgttaccgcagatccgtcatgcatcggtgttgatctctgcgttgcaaatctcatcgtaattcacggatggccgccacaacctcctctcgatctggcaatccacagtgaaactagggttttccccagtggaccttgtttccaaatttggcccatcccatccaagaaggcccaaacccatcaaatatgcaaaaaattcaaagcctaatactctcaggtctgttttcataagccctatgctaagcccaaaactttacttgcgtcgatcttctttactctgtggttgtgactccatcgaagagaggtatcaccattaacgctttggtctttcctttactctttgcaaaccctggtattagttgctcttagggacttgtggtatgtttacgaaagcttgaagatctataatctatctatctcgaatcgaccttgttggtggtttaattgttgtcttgttctaacctttcgttgatgactaat

SEQ ID NO: 11152 - DNA, 1397 bp, Arabidopsis thaliana landsberg
ctataacagcagaccattagaataagcttctaaacatatattgatgattcgacttcgacatacctggaaagctcaagaatcgaggaatatgttagacagagagggaagacatcaaaggagattcaaaaaaagacaagacagagaaactttgagaaaagaagaatggtgggaaagacttgtattgctgagatggcataatctcattggctggaaattaatagcaaaatttgtttttggttgctgttaagggtaaatggtaaaaataaaaacatgatttatagttaaccgcgtaaatttttccacctatgattctaacttctaacagtttcaacaataatggtgttataaaaagttaaaaactaattaacctctatgacacgttagcatgtttagttagtttggatgataaatagtttgacctttatttggttgataaaacgtaattagattttctaaattaatactacgtatattagtgtattcttaattggcgttctctgtcaaaatgttcactcaaatacttttgaatttgtgaactaaaacgttttcatccactgacgtgggtttatccagcggtaaatcggtgctagcttcgacggtcgttgggaaaggataaatttaattttgtgtgagttctgcctctagaaaatgtaagacttttgaatgtccattgacataatctattaaaggaaatgacaatttacttgtatatattaggtaccatttatatcaaatttatcactaaacatttataaatacgattacattttgatactagtaaaatgaaacaaaacaatgtaaaagcatgaatacattttttttaaactatgttaagtatataaaatgtttttatgctaattcgatttcaggaccaatatggcggttaatttttggtccgcaccactacggacatgatttgtgaatggtaaataaaaattgattcagtccatattttgggtacccgaaaatatctgaaatatgattatatattcaaaaatattagttattttttagatcgaataactaaatttccaaaattataaaaaatattcaaaaaatcaaaaattacccaaaatatccaaaaatattcgaaaatatagaaaaatgccccaaaaaactaaattatcaaaaaatatttgaaaagaatatccgaacggatcctaaacttaaaagccgaaagattcggcgaaccagactgaaaatgaaatcgaatctatacttgaacgtccatgcctagtcaagatgaaactgcttttattattgtcttttgtttacttaatgttaatggtcatgtgtttagtcaatttatctctgaattttactttaatttttagttttgaagtccaattagaatacttatatatattaggtagattagatataccattcatatcaaa

SEQ ID NO: 11153 - DNA, 1177 bp, Arabidopsis thaliana landsberg
caatttctcactagacgcgagaaacccaccagtgactgtcatcattcattgtcccgtgaatcaactcgtcgccgcaagctcacggcctccgagcactgagaagcttaacgtcgtcgatcaccggtccacataagctcgagaaatcgtcgtttctcatcgcgtaaaacgtactgtagaacataactctagtccgactcgagacagcgacgaatctcagtgacgatcgcttgaatcctcctttccctttcgattcatacgggaccttgatcgtgtcttttccggcgaaagcttcgacgatcattgatccggcgcaagcgttgctagcatctccgacagagaaggataggacgtaggtttttccagggatagtgcggacaacttgtgcgacggcgctttctttcccggcgacgagttcgacggcgcgacggccttgaggaacggagaaatgatcggaatctatgtatttgacagctttaagagactcgaccatccaaccaggtaacggagagtgatcgtcgatggagtttggtggaatcaaaacaccagatgatatgtttggtaaaacccaaggaccttcttcgaatcctccgttctttagaatgttctctgcaaaacaaaaataaacccaacatgttttagatatttccgtatttgccccattaagaatatttttattcaaacgagaccccaaattaagtataagaaaagagcactcactattggtgggacgaggagggaaaagggctcgcatagcaacaccatcaatgagaggtccacaagcaggatcttcctcaacacctggattatgtatcactatatctgcatagtcactttgggccttaaaagcccacgaatacaaatcccaacctgagctactatacactgtttgtatcggcatcactgcatggtgaggagccacggaaacgtttaaccgctcgtcttgtgcgcatgttcgagcagcactgaacgttatcgaatagtacgaccctttcttaacgctgattttttgtttgattgaggcttcgttgcctagacgtactgcgaatgcgcctttaggcacgacaaggatcatgtcgccttgtttgtgtcctgagggaatgtactcgacaaagcctgagagttcccagtttgggattgctgttatgttgataacttgtgttcctttcatgtccgaatg

SEQ ID NO: 11154 - DNA, 849 bp, Arabidopsis thaliana landsberg
tcatgagttcccatatatatataacataaatcaaatatgcttagtgtaaaaatggataatccatattgttttttttcctcctttgattccagatatgcatcgagagtgagaacgatcgtgaatgatcccagcaaacatatatcatccaaagagatggtgcgattgaagaagttggtagcatactggaaagagcaagccggtaaaaaaggtgaggaagaagacttggtggatattgaggaagatcgtacacgaaaagatgaggcagatagttgaagaaagctgacatgaaattcgtctaggtgaaattgagactatagtatcactggttttcaccattctttttgtaggaagttcctgctttatagtagagtttctatcgaagagtagtcctatatgtctcaaactttctctcttttgatgagatcttcattacaagaaatgaaaaaaaaaaaaaaaaaaccgtagatattatatgaagctggtgagaaccatacaaacatataaagataaccccataatgtcaaaagttatggtatacggagactaaaaattcaaacttttaatttaagggaaaactagactataaattccattttgtggattggagaaataacaaaaattcaccagtaaaatttaaggatttacacgcaagacaaatgtaatccatacgttgacattgggtgatgtaaagttgaaggactactctaatgcctagaagaaggaaaaaaaaaaaaaaaatctctttttgtttgacctttttttttttgaataaaactttttttcattccatgatttctcaaaaatgtcgaaattgacacaatgaaggactactttcactatgtctgcaat

SEQ ID NO: 11155 - DNA, 337 bp, Arabidopsis thaliana landsberg
gatcaaatttaataataactgcaaacaaattgtggggcattgacccacctataaatatataaatataatgatatatatagtagtacttaatttaaaatcatgtgattacataaatatgatatctaacacctactattaataaaattatggcggcagatataagttaaaattgtatctttgaacaaaattatatgggaaaagaaacaattgtgaatatgaagatgatttacaacatttttcaactaaaacccgagttaccaaaccaacaaaccaattatacatagaacctttaataaaattcaccaatgaattcaagccataaaattagtaaaagatc

SEQ ID NO: 11156 - DNA, 1301 bp, Arabidopsis thaliana landsberg
tgaggaggaggacgagcaggcccatgaggaggatgacgaggaggaggtgcaacaccatgaggaggaggacgagcaggcccatgaggcatagatgctgaggcggatgacgataccaccgaggctcctgtcgttcgacgaaggggcactcggaagggccactttgtcctacctccgtcagcgcctgcacaatctgaagctcgagtactgatcatcccggttggtgataggtactcacgtttggccactttgttcttacttatttgtttattttacactatatatatgacatgactttcttgtttttttgtcatgcagccaatgggaagacacgtcatttgacggtcgaggtcaccatagacaggttaatcaagtcttaggtaacctctgtcgtctacataacccaggaattgtcaccgacccgaaaggtgtggtggttccttgcactagctggtcgcacttcgcactagctccacatgcgacatatggaacagctcaaggcgccgtcaagcgtgacttttgggtaattttttcgaactaacatttattagctgtttcaaactaacatttattagttgttttcaaactaattttattttcgatgttggacagagacgctatcgtgtggaacctgaggctcaagagcatgcagaccgagtattagagaaaaatgcgaagaaggtgtgcagggatgcatttttcaatgctcgtctacaggttgtgaacacgtacatgaagcaccgaggtcattctatcaacaactttcgacaatattcggatgtctacttgactgtagaccagtacatggaggtaaaaatctaatttagcagctcattcagatgtgaatgtaattttgagctaacgctttatatgcaggtaactcttccatggatggaacactggcctcaagcttacaaggctttgtatgagatatgggcttcaccagagtgtattgagaagtctaacaggaatcgacataggcaacaccatcagcaggacgaggacgatgatgaggtcatagtcaaccatacctatggggctgatggacacattcggttggcgaacgaactggtgagtatgtagtattctgttttactcagaaatgaaaccggtttaaactcatcatatttgcacgaggctcaaactggagttgtcccgagcccaatcgatgttcataggagagggcatagagcaaaaaacagtgacatctccgatgagctgtgtagtcaagcggccgttgagcgtatggttaattaatggtaggaataatggtttcaaggcaaaaaaccattaattacatgggg

SEQ ID NO: 11157 - DNA, 955 bp, Arabidopsis thaliana landsberg
tgctaaaaagtatagagatcttcagacactcaagcatattccttacaggttagaaatacttccctggtgggttattttgtctgtgcttcattagaaactaatgtaggcaagtattgatgtatccaggtctttatgcttggtaatttactatatgccgcttcttcatgaaacttttttttatagggaaaataagaatctgactggaactgctaggtatgcaagtgtcaacacacaccttggcattggtgagaaatgtttccatgtcacacattagaatagctttcattctatatttgtgcagtaaccgttaagctactattttccttcttttgaaacatttcttatatcttcttgcagagcaaagtagacgagatgatctggagtctcttggttatgttctgatgtattttatacgaggaaggtaggaaactatcttggttgtgtattaatagtgaaatctttaagaaacatgagatccttaaacttgagacggaatacaacttcttgtctcagtttaccatggcaaggtctaaaagctggtactaagaaacagaaatacgagaagataagtgaaaagaagatgcttactcccgtagaggtacgtcatatatctacaatagtgtttttgtattgcgaaaagacgatgtttagcttttcttaaacttttcgataaatatgattttgctgtttgcaggttctttgcaagtcatatccatccgagttcacatcatatttccattactgccgttcattgaggtttgaggataaaccagattattcatatctgaaaagacttttcagggacctttttattcgggaaggttagaaacctctactgtattctgtctgactgtctccttcacctctctattaaaccgctcatgaattacatcaattgttaatgccttcaggttatcagtttgactatgtgtttgattggacaatcttgaaatat

SEQ ID NO: 11158 - DNA, 623 bp, Arabidopsis thaliana landsberg
gtgtcctttctgtggagccgtgtggcggttcttcacgggtagggctaatctatttcctcctgcgcagctcatgtattgtctaatctggcttctcaatccctcgagggataagaacactactctcattatcaggctagcttttcaggcttctgtttatgctatttggcgtgaaaggaatctgtgtcttcacaccggagtcgctcgcgtctttgattcggtcctgaaggacatccagcttactattcgtgctcgcctggatcctatctctcgcattacggaacttcatccttctgcgccttctgttctgaggacttggttctctctattccaatcctaggacgttttctgtggttttttgtgttgtaggtttccttccttggttgtttcttgggccgttccctgtttagcctgtttttcttctccttggtttctgctgggcttttgggcatgttctactttctttgcttttgttttagttgttgggcctgcgtgcctttcagggcctgcaagcctgatgtaaggccttttggcaatgtaatccttcttttttaatggaaatttatgaaaaaaaaaaaaaacatctttggttggacccaatgacaatatctaaaaactacatcttc

SEQ ID NO: 11159 - DNA, 1224 bp, Arabidopsis thaliana landsberg
tccatgggtaaaatatctcgatctgattgatctagcttgagttttttattccgatctctgttcattagtagtaactgttttgtgattatgatggtttcagcgtcagagcatcggtttaaagggatcttcactacacttcctaagcctggtggtggtgaattcggaaagttctatagcttacctgctcttaacgatccacgagttggtatggattttttgaatctctctttgaatgagtttatgaaggacctgagaatctgaagaggagtgttgtatttgcagataaacttccttactctattaggattctgcttgaatctgcgattcgtaattgtgataactttcaagttactaaggaagatgttgagaagattattgactgggaaaagacatctcctaaacaagtagagattccttttaaaccagctcgtgttcttcttcaggactttacgggagtcccagctgttgttgaccttgcttgtatgcgtgatgcgatgaataagctgggaagtgattccaacaaaatcaatcccttggtatgtttttgtttgccacagattgatgctttttgtttaggttagggttcttttagatttcttatgttatactgtgtctctcaggttccggtggatcttgtgattgatcactcggttcaagtagatgtagctcgatcagagaatgcagtgcaagcaaacatggagcttgagttccagaggaacaaggagaggtttgctttccttaaatggggttctactgcgttccagaacatgcttgttgtgcctcctggctctggtattgtgcatcaggtaattctcttttttaaagtgtgcgagtccataagttgtttctaaacttgttctgacattgatatatatccttttcaacctcatgtttccagtgtattgaaatgtttcttttcatttattatcttcttttatctgtcttgaagtttgtctcaaactaacctcatcttgaaaattcaggtcaatttggaatatcttggaagagttgtgttcaataccaaaggccttctctacccagacagcgtggttggaactgattcacatacaactatgattgatggtttgggagttgctggatggggtgttgggggtattgaagctgaggcaacattgcatagccagggaaattacatcgattactctcatgacgcacaccagatgtgggataatctggagtcagctatactgaatttcagaatag

SEQ ID NO: 11160 - DNA, 974 bp, Arabidopsis thaliana landsberg
gaaaagtccctgttgccgaaccgcatgcttcttaggcccggaagaacagaaaaagaaccccaaggacaccctcctatgtgaagagtgttggaccgagcatatacccctgggaaagagcagggacgctttaactgccaacccatatcaccattgatgcgggaaaaacacagatcgctccaagtgagtttctatagttactgttatttggaatcctcctgcttaaccctagtctgacattaatagaaaaacttaatatgcctacttgttctcttcttttccagattcaaggacagtaatggctattcttggtaagttattatcatctatgagaagagatgagttatatcacaaattgtagatacaagtgcaattgtttaataagtctattacttgtgcaggacctgttgataatgttgatgaagtaacaggtggactaaagcttatgtaataactcttggattcgacattaccaacactctggcagaaaggagagcatgctaattggctcccaagttttcgacatttctcggtgacaaatctgttttcccttcttctgagtagataactccattttacatggatttgtacaattgtcttactagaagataatcatatgacaacatttgctgattatcccacaacattttaaagatgaagttttgatgctctcctttgttttgtctattgtatctataaactgaagcgtttaagctacgaattgattttgactgattttgtcctaaggagagtctaattcctgcgcaacagctaatcaaaatatacagcataagtgtttcacttcttgctatagttagtggtcgtttgctaaaatagtattgatgtcactgtatatcgtgctaccaattactatatatttccgggaatactgcttgtaatatccatttcaaatgttttgtctattctgagttctagcatttagcatagtcaatgaatgcgtataccctcaaagattg

SEQ ID NO: 11161 - DNA, 482 bp, Arabidopsis thaliana landsberg
gaataaaaacgttgcacctaacataattgaggctttgatgaataacaaaagtagtttgtgcgaacagagcaaaaaatataatgatatataaccagtatgagggacataatgaagaagagatcaaattgtgtgcatagaagttttaagttaccttgtctcagatggtctcagcaaatttttcttgcagatcgtgcttatctctgtacaagttttcattctcttgctccaacaactgacatcttttcgccatcttctggtatgcgatatgtacttcttccagtttctcagtaaatttcgcctgcataagttcacatttttgcctacattgaccaacaattctgttcatcttgtactgcatctccagttccttttgtccaatgtagaacatcacgcttctgtatgcactcttcataaatgattttcatcatatataaggaaaagcatgatgtctaccgaactgcttaagcattaaaatttgacac

SEQ ID NO: 11162 - DNA, 1440 bp, Arabidopsis thaliana landsberg
atatctctgtacaccaaagaaccctaaataacttctcatttctttaagaaacctaatcttccagatggatatgtcattcccattagataactccatccatgtcctgcatcacccccacgaaagacaacattggaggatctgttcattaggtttcttctagtgaattgccattattctcatgtaatagctgaagacattcatatggattagcatagaagtagtcttcttctttcggtttatttggaatcactagccgtctctttggccctcccattcgtgtagcgtgaaaggccttaaccgtggttgaaaacacttcccagctcaacaatccttcataatattcatctatcagcttaaccaacaacttccggtttagctcaattgtcttcttgaaccccaagaacctgtatgtgatttaaatgccattagctttgatgatataaacaattagattagaaaagttagaatgaatgattcacctgcgatgaccttccacgactttcgccatgttcccgtaatatgtaggaacgaatatatcactttcaagagagataaggtaatcaagagcagccatttgagaagaatggtttttacaaaaactcaaatcagaggaatcgagtagagtttctttcctcacctggtttgatcacaataaaatattattggtcactgacttttgagtgaaatattaaggaataattttagacaccaagtactaaccacatttggaaaaacatctgttaaagcctttaaccgccttttaccaccgtatatttctcctgcagctatgtaaatctgaacattacggtcaatacccaatgcagatagcgtaagagctgtttcttcaggagtcaatggacaaagaccttctttcctcttcaactcggagtctattactttctctttccaccacggataagcatatctaagcaatgaaacgaaatgataacatcaatatcaggaaaccaatgtcggaacttttcatataattatgaagagatagttgtattaacctcattcttgttagttcttcctcttcgtagcggttgcaaccatgtgagcaaccagaaaatgccaacatatccatttcgtatctgagatgcagaactagaaagggacctttctccctcagaatcttgactactcttctacccaattcctcaatctttggagtaaacctaagcccgttgaaatttgctcggcatcgcagcttctgaatctcaacaggtaattcgttattagcaagtcgagtatcagtcttgttcagatgtaccaccttatacttcttcaccagcggaagaatctgtttacaagtatgaagtacaaagaagctgtgagaaaccaataaagtaaattgaagactcatctcataaaagactaatgctgaattcttcttggtgtaaccgagaaaataacctggtcttggtagtaggacatgtt

SEQ ID NO: 11163 - DNA, 775 bp, Arabidopsis thaliana landsberg
ataacacacacatcacgtgaatgtcgtttcttttttcgtatccaaaaagctcataatttggttattgtattgaaattgattgctcaaacaatttctgctttggttctcttttgattggtcgcagtcaacttcagggtcaggttctttctcgaatttgagttgcttgctggaatcggagagggtcatcgtcgaggtagagttggtcaaagtgtctcttttatttgaatttttgttaccatatccggctattgaatttgagacttggtatgcaatttgcatttgtccatgatactagtgtgaagaatatgttgttgaagtaatatgattttggactttatttgcagggttatggagttgtgcttattaacaccgatgaggcaggaacccttttggtgactaatttccgtattctttttttggtatgatattatctttcctctgtttcttatatgcatttgatctattttttctggccaatgtaattatacagatcttgaacttacttatatttcactatttcaggattaggcctttagtttttaagtactgttgatcaatatattctttgtttctcttttgtgaagagtgaaggaaccagaaaagtcattccacttggtacaattccattggcaactattgagaagtttaacaaaatggtcagttgctatacacccctggggacagagctatttgattaatactatttaagttaggctctagggttttatattgttaagtctgtgcattttctgattgatgggtgatgtgttcatag

SEQ ID NO: 11164 - DNA, 1829 bp, Arabidopsis thaliana landsberg
  unsure (1)..(1829): unsure at all n locations
cactagtctattttccgataacttttgaacgttcaattcaataattttgactacaaaaccaaatccatcattaagtcatttcagttaacacattcatcaacacagatcatcaccattgttccaacttccaatcatccattgagaactctataattgcattggcataacgtaatttcccgaagttgcaggctctggtttcatcacagattcgtttggtgctcttcgtccatttatcctataggctatagaaacccaacagaacaacataaaagatcaaataacaaagatttcttcgcacattttctatgtaacaaccgaacaacataaatgtctttaaaagattaaaataaaatgtcttccaaaaataatcgaccaaaatagtgaaacactcagaaaacgacgtcgcactaatagtccaaagaaaaccgaggagcatgttttgaaacagagcctttcaagtttcattaaaacataaaagagaactttagctccatcttctccgatcttcctcttcgttaaccggagtataccaatctggtcgtctcttagagttgctcagcctgtaattcagtaatagttcctcattacacaacgacctcgttgccactaacaccagtgtcttcagaaccggggcttctaacccgtctttactccctgtcttgaaccagaagcttccaaatctcttcatctttatttctccagaatccccaaaagatatattcggaatgtaaggccgcagatctttcgccatcaaggggaagtcataaggacatatcataacgtttggagtcatttctttcgccgggtggttagctaagtgaccaaaagccaacggatttctcctctcaagaacctcttttcctttacccgaaccttcgagaggcttgctcaacgctttccataacctgtctgaaccgttttctgcggttttagtgtttgttttgaccgcaggagtgtaggacccgttccaggcttcccttgattctcccccaagaccccaaggttgagcatttatcacagtcccatcatacctggtgatgagatacgagttctgtgaatcaaccttcgggtacccgggaatgtacctgtagaaagcaggagaataaataactccagggtaaaaggctaagacagttccaacatctgcttcgcctttgataaaacaaccttgaccagcgtctttgtgaggtattacagacggtttgatctcgagggtgtagcccatttgatccattaatctctgtgagacgtcagcgagtttcaaaggctttgtctcgggaacaactgtgctgaagaagaatcagtgagaatactaattaagttgaaagaaaaatattgagtaagaagttcacaaatcgattcaagtaaagtaaaacacttacggggctgatctgcatgtggaaaagcattattactaccaatggcgaaagtaagaccacttctacgaggaggacgagggtttgttgattgtgaccccgactcgttcctcctaacatcaggaagaaggattccatccatcaaagagcagaatttttcaacttggtagtgaatgttctcttgaacttgcttctgctgctcagataaagtggctttaccagccatctcaatgatctcctctgcatcagtctcctcagcttctcgtcccaaccggttatagctaaacacaacaagttttcatgagcacaaatagtggatgtatatacaagaattaataacttagaaggaaaaaaactagagctaaactaaaccctatcgtgtgtgatggttcacaaatccataatagaaatcagactttgattcttctgagacaaaaaaaaccanccgtgtat

SEQ ID NO: 11165 - DNA, 812 bp, Arabidopsis thaliana landsberg
gagccatggcatggcattgcatcagtgcagataatgtcagactagcacacacaataacataacatatcaataataaagcagaaaacccatcctacatgtgcagtgtgtcaatttattgttattccacttgctaggacctacagcctattcctctgataccaactgtaacaccccaactgatcccacacgatggatgttaccaaatacccttcccactaaacttatgcaacacaataaatgaaataaagagagaaaatattgcaaaatccggtagtacctcccttgaaagaagcataacaagggggggacatagagttcatacaagatataaaagacagataattcacgtagtataatcaaaatgcaaaagtagtaaagcacattcatgaccaattaaaaaaatgggtaacttagcccaccccaaaaaaatcagctcaactaccatgaaaggctagaacataataattccctagacttgaccctccctgattaacaacattattaagcagtggttcctttattaaaggtgtagtggtcgtgctgctacatccctcttttcccaaagcagaaatcaggtgcctgcattaaacaatgcaagagtgagatgacacatctcagcaagtaaacagagcaaaccacaattggacaatgtaaaccaattgtgcttaaacaaccacgtagttcaaaacttccttcttgaataataatttgcagcaagtaagcaagtaactaattacttaacgccaagaagaattacaatgtaaaaatccacactatccacatccagggatcctctagagtcgacctgcagg

SEQ ID NO: 11166 - DNA, 372 bp, Arabidopsis thaliana landsberg
gatccctgtgaattatatgtctttatatcatgtatgaacttcatgttttcccctccttgttatgttagtttcaaaggagatgctgccggattttgctatatttactttctttataacgcctctagtgttgagtaagtaaggtgggtggggttataggtaatatccattgtgtgtgaccagtggggtgttacagttggtatcagaggataggctgtaggtcctagcaagtggagtaataataaattgacacactgcacatgtaggatgtgatttctggcttgctattgatatgttatgttattgtatgtgctagtttgacattatctgaagagatgttatgccaatcttatttacttattattctcatccctg

SEQ ID NO: 11167 - DNA, 444 bp, Arabidopsis thaliana landsberg
tccgagaattcctcttcgcagatggcgcatatccaccataaggttctagattctcgttgttgcaaccatagctgttccttcgagattcgttcctctccgccggtgccggagagttatgattagggccatagctatgtctccgatcagatctgggttggtggttataattatccttgtggcgtaacgaatctggttctggagaaagagcagattcgggaagaaagatccttacggtgagtgacgtcattggatcaatgtgtatatctttggtggcaacaccgtcggtgaaagacggattcgcggcggcgacggattcatcggatcgggtcgaaacaccaaaggaatcagataagccatcagcagctgaaattgaaatcagattctgaagacgatgtttcaatagtaacttaaaagagacgctatagagcttcacagctacccctg

SEQ ID NO: 11168 - DNA, 957 bp, Arabidopsis thaliana landsberg
taactgataattacgttaagaccaaaacatatgtactgtttaatttctgactttgttagaaaacaatcaatatagaaagacaaattgataaataaaaccatatgaaaaaaaaacaagacccatacaacaaatctaacgcaatggtcattaatgattaaccaagacaaaaaatatctctaatataaatattatccactacttcattcttcactctacgacacacaaaaacaacaatggagctactcacaagcttgaccaactggttaactccgacgactctcttcctcctcctcaatttcacgatcgccaccattttcatcaccaaccggttcagttccggttcaagaaaacacaaccaacatcaagatggttacgggtcgtcgggtcatgaccaaaatcaggcacggtttggcagacctccttcgctcatagacagagtaaagtccatcaacttccatctgtacaattctccttcaccagaatccgagatccactactccgggtcggatcctaacccgaacccacctccttctctcttgcaacgggtcaaatccatcaacatgccttacttcaagttcccacaacacaattctgaaggagattacgctgcttacgagctcatgacccaacccgacgagactaaccgggtcgacccgatcgacaagatcccggaggatgacgtcacgaccgaacctagattcggagctccatcactcttgcagcgggtgaaatccataaagcttccttctttatacagatccgacccagatccaacaccagaagtgcaaacacatacgaggacgaagtcggagtcgagtaaaccggcgacgaagaggaagaagaaagctacaaagaagatgatgaaatctgctagcgagagacacatcggccgggaagaggaggagacagttgaggccgtggagaagagaggccggagacgatgagagttgagagaac

SEQ ID NO: 11169 - DNA, 1415 bp, Arabidopsis thaliana landsberg
gttctctataggagaaagagaaatcagtttggcctaagaagattaagcaatgtacaactattcttcttgctttgatttgaaccgtaacaaaagtattataattttcatacaaaaagagaaaagtcattcaacaatgcatggacccaatcaagatttctttgcggcagaaaaacatggaagctgaatgaataatttgatacctcttttcaaaagcaaacacctccttgcacatgtactttgttgagtacccaaaaacagataaattataaaacgccatttatcaggttttatggaaaccatcatgccaagtttttggacacaaaaccacaaatttcaggaagaaagattgagaaaggtcattggtaaactaatatgacaaaatcaatacataaacacacaacagtttcagaaacttttgttttccccaacacctatagatgacatcatatcccaaaattgcagcttcactaaaacttggcacatatagagatggagaaaaggagagaaacaaaaacaagaagaaaaacctaatgtagtcctcagagtcattattgtgcttcaacatagcaacttcaaactgctttagcaattggaacgatgagtgtaaaatctcattgcaactcatcattggactactaaacaaaactctatctatatctgaaccaatctacctacaaagcaaacttgttatctttgtatccaaaatgaagccagatcatgtgttaaacatcagtacatcaccaacaaccacaagagaccaatgattatgaaagatacagaagcaaacttctctaaagatgaatcacacacaagatattcccagaatcacattcatcaacgcagttgaatctttcaacagactaactatgtaaaaatcaaaatcccaaaatcaagcatatatatataaataaacttcacaaatcacaaaccatatcgaatcaaacgcaggtaataatagtcaggtttacacataaacatttgaagaaacaccaaatctggcatgtacaatcaaaagttgatacaatttctagaccaccaaaaataaaaagaaggcgaaaccgaagaaggatttaccggacgaaggaatctaaacgatgtcgtctgggtgaggagcggcggagagagcaaggggacggttgtgagattcttcgccgtcatcgtcatcatcggaggtagataggttaacgcatgagcaacgctcgagggaggcgaagaaggcggaaataacggtggtgctgacccagctcgccgcttgatctagcttttccagagaagccgtgctcagatttgaggccgtggaagcggtggaattgatgctgctgctgttatccatggcttctcgatttcgattggaaatctcacaagaacaaagatcgtatttgggggatttttgcggagggattttgaaatcgaaa

SEQ ID NO: 11170 - DNA, 384 bp, Arabidopsis thaliana landsberg
tttgattgcacacccgccattgtagtgactgggggtgggtctcagtcaatctgctgattctggatgaacgtcaactggtgagaaattggctgtacctgccgggtctgggattgtattgatcgcgccgttcatgcctgtcctggctgtcaaatcagggaatccatctccgtctaagccgtgattgcttgaatactggaatccattgactaccctggtaaaagcttaatctttcatcaaaagtaggaaacgaacaagtcacgcatgacacctttaatgcgcttgtgaaaaccgattcagaactgatttgtgataagttctacacgaggcgatattggattgactccttgttctgtataagtggatcgctcaactctgtaccggttt

SEQ ID NO: 11171 - DNA, 498 bp, Arabidopsis thaliana landsberg
  unsure (1)..(498): unsure at all n locations
tttgatttcattaattatcacacgtatgagagcgggtcggtcaattaaaaccgctattgaatggatatatcgtacacgtgtgataaagtttggcaaaagagtcaaaacttgatactaataactcatttcgatttagaatttgttaaccccaaaaaagtatgtgaaagtaacattaatgaaatctgtcctaaccattatccattatcatatactagtactattttctcttaaaaatgtgattaatgtttttaacaatgcttacgcggcatagtacggggagggaatgaggaaaacgtcgccgggatccgcagggcagaacatgattgtttcattggctccggtggctcctccgctcataaccaccctctacggatcaaaagtcactcttccacctctagcnnnnnnnnnnnnnnnnnnnnnnnnnnnnnnntccaaaatttatattagggataagtttataaaataagttactaattaaatgcaacacgaatctttaac

SEQ ID NO: 11172 - DNA, 1577 bp, Arabidopsis thaliana landsberg
  unsure (1)..(1577): unsure at all n locations
aagtaatgaggctagtacaaagttaatgcctagagatcttatctcgctaacagatcaaagaccaaaccatgttgatggcttcaatatttccagtgaaccttatatagttgctttagtgtgtaaggtagatccagataggcctaatgatgtaactatcttggcttcaaaacctcttttcgttgaggatggaaggaggaagaagaatgagaagaaagaacgccttttcggtattcatctcgtcaatttaactactaatattcgtatctggaatgcattgcatcctggtgatgaaggtgtgaacttgaatcttatctcaagagtccttcgaagaaacagtgaggtaaaagatattgataaactctgtaatagctttcgatgtttgtagtcatatcatttttggcttctgcttgtgtaggatgaaggattttgcattcagtgtttacaagaaggaagtgatggtcttgctcctcgtcgttttctcaagctgaatccttcacaagaagatgcaatactgaattgtttggatgttagaagatgctaccacgcgaataccgtcagacttatttggggaccaccagggacagggaagacaaagacaacaagtgtgttgttgttcacattactgaatgcaaaatgtagaaccttgacatgtggtccaacgaatgtttctgttcttgaagtggcgtcgagagttttgaaactagtctctggatcattgaagattggtaactatggtcttggagatgtagttttgtttgggaatgatgagaggatgaagattaaagataggaaagatcttgttaacatcttcattgatgaacgtgttgataagctttacccatgttttatgcctttttacgggtggaaagctactatcgatggcatgatacgtttacttgaggacccgaaaggacagtataatctatacttggaaaatctggcacgggctaacaatgtgaaaaggaaagacactggttcagtcttcaaacgcaaaggaaatgagcaaaatgaaaacatagtggaacaagtttctgatacacgtcctcaatcatttcaggattatctaccagagaaattcagtgaacttaggaaagatcttgaccttcatttctcaagtttatgcacacatttgccaactgctttactgtcatctcaagctgcaacacgtatgtatgaagctattgaccttgttagagatgttacaattttagctatactagatggtgtgactggtgaaggagtaaagtcagtccttatccctaatggagaaggaagtgacagattcagcagccaacatgtgacagtagaggatgactatctaaagctgttaagatcaatccctgagattttcccacttccagctgtaagtgataggcatcttattaaagaactttgcttagggcatgcttgcctgcttttctctacagcatcatgctctgctaggttatatactggaacaccgatacagcttcttgtgatcgacgaagctgctcagttaaaagaatgtgaatcatccattcctatgcaacttccaggactccggcatttaattntggttggggatgagaggcaacttc

SEQ ID NO: 11173 - DNA, 1014 bp, Arabidopsis thaliana landsberg
aaaaatgcctgttgttattaattaaaactgatgatccgtactatggtctattaaaacttttatctataactatgagaaccacttatgtagtttctcttattataaaaatgccatgaaataaaagaccatctttacatcgcatattttcttaatctaaaccataattccgatttgattatattggcatacacatttttatatccttgtatacttattaagtcaatatcgtaagaagagttatagtttggaagattggtcatggcttctaagccaaatgttatgaaatccaaactcgagttttttatttaacgtcattaaacactccaaactctagttttatcatatatcataaagaaataagtttatcctaatgtccaaacactatagacacagggcgttatatcccggtccgccgtagtagaaatgactcccccactcctcgctgtatccctttatggcggtataacatgtggggttcttcgtttgcaggatgaactcttggactggttgcatgtacgagaggtagtcaataattttcaggtttcggaagaaacctgctttgctgaagccttcctctgcaaaatgtcccgagcccatctgtgtggtagtgtgctggccatagctacgagagtttacaatctcgcctccccactgtaccaacgtcgccggcccgtgagctaaatgagtgaaaagcctcgccggccaatacccaatcactgaggagtcaatgctcagccaccagttgccatctttagtatcctacaatgaaaacaaaatattacaaaaaatcacaaaaaagcaagtgaccactaactttcaggggccgagcataccttccatatgtacatcgtgatgtcgtactggctgccgccgtaagaagatgtaggagagaatgcactgccaatggcaaactcgctagtgatttgaacaaaaccagggcactcgaggttgagacaccctgtcttctgatatgtgtccctctacaagattacacattattttcataatcagaga

SEQ ID NO: 11174 - DNA, 1229 bp, Arabidopsis thaliana landsberg
  unsure (1)..(1229): unsure at all n locations
tctcagtcccaagagttatgaccaatactcaatgttgaatgggataaatagcccataagcgaggacttgcacaccggacgctatagcagagggtgcgcttggagtagaagaagttgtacacatgctgcttgaatatactttgtcgtgtttgtttgtacacactgagtgaaaaccagagcgattcatgtagttgtgacttgtgacataacaaaaagagaagaaaagataatccttcattagaaaataaagatccaatcagagtcaaagagatgagtttaagaaacattctacagtaagaagtccgacacccttaaaagactaaaccagatagaaacctaaaactgactccaataacaacttcaacaccataagaagctgggaagcgctatgtagctcaatcaattgtaactttccttgatggcttgggggtcctgtcagataatatcccactaggaaccgtctcttccatcacctttgggactgtgaaattgaaatctccaagcagtgcatacttgtaatcctgattggcatcgatgaaggctgcgatttcattacgagacttgagcttcttcccagtaggagttatgtagtacgcatccattttcgagtaatcctttctcagaattaagctccttttgaaccctcttggtgtcctcggcaagccaggcttgtcgatgacccatgttctggaggaatcatagtttagatctccaacatcttcacaggacacaccttctttcgtcttgcaaaaaaacgggtcctcttgtactctacttctgatatcttcatactcatcttgagtatcaatcttcctccacttcatgcacttctcacactgcacagcaaagacatctatcgacctccctggagtaccggcttttttctgcacctgcacaatacaaatatggaatctcggtgaaaagaagaacagtcactcacaagctacttggatcaacagaatcatactacaaatcgtttaatatatagcaagatgagaaaacatgcgtagagaaacacaaaagtcaaaacagggacaccaccaaaagagtgatactgagaacatgcagaatcaaaaaccaaatttgaagaaaagggtcactgcgaaaccttaaatagcatanatattgattaaaatttatacataactgatcagcccaagacacaacgagaaaaataagtatacctttatgtcttgcatcagtcgtcaaataacactagtaactaagtct

SEQ ID NO: 11175 - DNA, 1282 bp, Arabidopsis thaliana landsberg
atttatgaatcttggtctcagtcaggtggttttacgaatcttgggttctcaaacttcataaaaccacctgactattactaagattcgtaaaattgtgaaacaagattgtatatatacacgtaaataccatgggttaaattttaaccgcagttagatctctattaacaaagttaacagtctttaatccagaggtacaattttaccaatttttttaaaaacgacggtttgaaaagacaaccaaattttgattcttatttgtccgataaaaataaattaatttcattgttcatgccccttaaaaatagagtagggcatatgagaagtagtacatggattacgaaacgtaataataagagaagactcaagataaaattacttaattaattagaggttagagcagctaaactacaagaacaaataaaatttttagccattatcaattaatgaccatatataaatatacctgatacattttcatgatgttgaagtttttttttctttttgaatatcttgaagtttaatcccaaaagcccaatatatcccaaaggcggaacccacaccagattaaaatcatcttttttggagaaaagatccctctcaacgtgcttcgaacccatcactcccaaacatgattttgaagttttgatgatcctgtaataatcatttataaaacttgaaataattaacttgaaataataattaatattctcagagaaggaactcgggcgaacattttcaaacagtttagtaacagcaaatcattattaaggtactactactatacgatcgtgaaattttaacattgtgattcattaagcttattagctagataggatcatttagaacacattttttcttgtaaattaaaatttataatatatatatataccttgatttgtggaaaaattgcatccgactacataaatcagccatatttatgaagtaacgcatgcatgttaggtttgttgtgcttaatacagggctgattaaaaaaagaaaaaaatgctgacgtggcaggaggctattctgaaggcaatcgagggtttcgatatcgtggttctcaatcatgcagctacgacagatccaccgccgttttctcacattatgtcgcaaacggtgatggcagaaaacactccgtctaacaatgatccttcacctggcgtgttgcaaaaaccatcgtatgtatcaatttacaaatacatttttgcagttattttagcaaataaatcctagagtcgtatttacaaagaatgccattagttgggtcgggtcaatttaattc

SEQ ID NO: 11176 - DNA, 1407 bp, Arabidopsis thaliana landsberg
  unsure (1)..(1407): unsure at all n locations
aacaccaaagaaaattgaacctccaatacctatccacaatacctttggttctcattccctgtaatacagtgtctcaactctgggaacaacttcgcacaaacatgagaaactgtgtattcctaaaagagaattgtaagaggagaaatttgattcaccttccacaaagctgatgaaccttcttctcttattatcgtcttaatgcaatccgaaactcctttatactgagttcctgagccctgccaaatttcaaaatgaaaagtcggtaatatattactggagcttctattctcctatgaaatgaatccaagaataacaattctctttcagtattttgtgtatttatcgttttgacatacctgaaccattaatctggttttgataacatcaagaggagtggtcaaaactccagtgacagcaccagcaaaagcaccaatcatcgcattctctggatcatttagatctcttcttgcctgttctaaacaaatggatatcacactgtcatttgcctgcaaaatcggatgttctgttacttatcattgtagcaacaaaaacttacagccaacttgtatccaattcgtaattgctcataaacacaaaactggagcgcgtcaaaaggcaaatctcgcaataagaaggatccataaccctgcatgtttaggaacatatgaggaaacattacatggagcttttgttgtctgttcatcttaaactcaagatgtgcctgctccaaagaaaatactaaaatactagaaccataatcaagaagtaacagatataccgcatacatgcctccaaagccctccttggctataataaggcgaacagcgtcaggggccaaaacaaattgaccagtctgcatccgctgtttcacaacctgttgaagtttccattaacctacacaagtttatagccaacacacaagaataaacaaagaaacaagaaggaagagacttacttcggttggtacccgaacaatagatgaaacagcacctcctaacgcacctgcagcctaattgagcttatataactcgctaagacatatatacttttcaacagagcataactagattctaagggcctctgtctcaaatgagtaagtcttaaaactaatatatacaggtcaagcaggtcaaaaagacattcattcttctccagcagataaactaacacttaaattagattcaggattcaggatagttttaagataatacataccaaatgtgcaaccgcactaagattttctggtaaaccctttagcagcttctgtttggttggttcatatacaccaaaaaatagagccgaagcactacacatgtagaaaaacaatgttcatttgaagcaaagagtcacaggttntcaagttggttgcatatcttttccttctttcattctgactacatacttacg

SEQ ID NO: 11177 - DNA, 1397 bp, Arabidopsis thaliana landsberg
taaatcacttaatcaatcatatattaatttcttatgtaaatttgattaagcgtgccaccaaacgcgtgacacaaaatatgcattaatatatcaaattagaccatataacaccatataatgatattagttagaaaaattatataagtgatagtaggattgcgtaatcaggctttaccaactagagcatgtgtcgtgctcttgtaccagtcggtcattctctatacatttatttttttaagaaaataacatatatagagtttatgaaaatattggtcgatttagaattaattatataagaagaaaaaaatcacgaagaaaaataaaattttgtagcgattgatatgaaattggttgtttgatcaattcaatcattagaacggttcattaaaagtttgatagaaaattaattagtttggttagagaaaaaatattgagtgaaaacgttacctcttcaagcatagatagtagcttgacttttcttctttgatgttcaatccgatcagccggagacaaaggaggactatcattagctgttccggccgatgacgaggaccctccgcctcctcctccaccggtagtattagggtttgagttgttcctactaagtttgttcttcttgaaatgtcctcttccaacactacaaaactcttccaacaactcttgagccggtttcgtatatttcgaattcctcaacgtgtagatccctccaatggatgaagaagccgccatgggagatgatgatgatgaaccaaaatgtccaacaacttgatggtgatgatgttgagaagaagaattctcaagaagaagattcttgaactgattgaattgatgatgatgagcggatgcgttagaagaagaagaagttccatcaacggctgcacaataaatgcttctatattcctcggctttagctgcggctaatgaagatgagagagataaagacaaaccctttcctccttccacgtggacggttccgatcatatctcggttttgatgatgatcggaggaggaagatggccatgtaaagtgttgttgttgctgcggctgcatagtgttttcgtcggtgaaagcaaaaccttgatgatgatttggtaataacatatgaagagttgagttattgttgttgttgtgacggttttgttgctctagcaactgtttagtagactgatcaagaatctctccaccggaaccgccgccacctccgccagggtaagcaaacatttcagacaacattccggcggtttcataaaccggaatttgagcaccggagacgacggcggattcatctactgcctcttgatgagtggttgatgatgatcggtggaatccattagagaaggaaaagattccttggtgatgatgataatcttgtgacatagaagaagttgtagtagcta

SEQ ID NO: 11178 - DNA, 1010 bp, Arabidopsis thaliana landsberg
tgtttgagtggtacagaacaaacaaaataaatattgaacgagtctatataggataatactgtaatatactaattctcaaattttaacatatgaataaataaattttgtataactatttgatgcaataaaattaatccacatgattttaaatgcagctgataataataacttaaaatccataatatgagatttttggatacactacactttttaattaaaaaaaatacactacactttttggattattggtgtgcgattttaaatgcagctaataataattttgcaccgcattagaaccacattgtattaaaatcacaccacatataaactatatatcttttgaatgattggtaagaaaaagcaaccgtaaaattgtaacttaaatccataatatgagatttttggtctttctcaactcatatgattagtaaaccaagtacaataagttttcccacgttgcaaaacgcaatttgcattaggcacaacaatacttctccgataataactacatatttacaaacttaaccctacaataataactaaatcaccaaactacccttcattcttctatcttactcaacttcgccgcatacttcctcctcccgctaccaccaccaccgcgtcttttcccattccttgtctctccattactcccaccgccgccactcttcgagcagaaaagatcaccggagacacacatttccgacgacaccgacatttatctcggccacatgaaccaccacttctcataagagcagagctagctttaacagccaatgcagccatttcctcggctttaagagaatgatgaagcgaacttaaaggaagagcgaagtacagttgaccaagctgaaactcctcgtcggcgctaatggcggatacaacgttgtcaaagtccatatcatcggagttacatatgaaacacatcggattcttttgtaacacgtaaccaactttgaccggacttgtgaactccatcatccttccgtcgtgtaagatcaggtttgccg

SEQ ID NO: 11179 - DNA, 716 bp, Arabidopsis thaliana landsberg
agcatattgttaaaagatataccaggttatgttctgtgctcaatagaactaagatgaatgatttagacttaaataacttacataatacttgatgtgcggttagtcttcgcttggggtctcgaacaagcattttccttaccaagtctttcgcgctttcagagatgcttggccatggatcagatgaaaagtcaagatctccatgaaggacctgctcgaaaataccttgttcggtttctgtatatttcatggaaaacaaatttacttcagagcctaataagaacaatcatattcatttatctacattgtaacctctcttaccggcccagaaaggaggaactccgcttaacaaaatgtaaacaatcacaccagcactccacacatctgattcaggaccataacgctttctaagaacttctggagctacataatacggactaccaacaacatctgtaaaaacctcatctgccaaaagtggaagaatagtaagtattccaaaatcaaacatagatagtgtaaattgaatgatcaaagacaagttaccataaatacaaacctggcttaaagaacattgagagtccaaagtcgatcgttttcaacagggaatcttcctctctactaacaaatagaaaattctctggcttgaggtcccgatgcataacaccaagagagtgacaagcctctaaaaccccaacaatggttctcgcaagctcagcagc

SEQ ID NO: 11180 - DNA, 1279 bp, Arabidopsis thaliana landsberg
gtgcctacccaaaccgagatccgaaaataaaccaaaatgcctacaactattttttttacaagaaagtgtgtcaacccattttcgcatgaagaaagaaagacgaagaggcatgtgacgtgacgtagagctcaacattcactcgcatcgtttcgcatggggtaagcaggtgccgtgcacgtagaccacaccactctctcttcattaaaatccactcttctaattcatgaaattccacaatcatccgatatcaaacaagctatggcgccctttccactctctttgatttttggaaaaaaaaaacgtcgtcgcgacgacgagatacgaagacaaaagccgacgctcaagggtgttatgacggctttttttgccactgaagctgcaatatgcctcttgttgctggccggtatatctctaaccggcacagccgtggcactattcgcgtccatgccgctattcctcgtttttagccccgttcttgtacccgcgggtattgccaccactattcttgcttcaggtttaatggccggaggcacctctggtgtgtcgggtctcaccatcttaatgtggctctacaagtaattaacccccaaaaacattcataatttctttttttaatatgtatgcatgcgcacacaagccggtaaattaaaccacaattttttttataaccacacttttttttgtgtttaggaaatatacgggtagagactttccaattaaaattccaggtgctgccgcagcaggtggagctgccccagccgctcccgctgcccctgcccctgctgcacctgccgctaaaccagcagctaaaccagcagctaaaccgggcgcgtgaaaattagtcaaggacatagacaaggatgcatgacgatatggaaaaatttgctctataaccattgaaattccataaattaaagatatttatccacttcttttttttgctaagtactaattattacgtactgatgaaactaaatttctcaatcgtcattctattgatgtatgccgtgctacagaaacaataacatatatatgcatgtttattgtttaatattttaaaaacgaggttatatatataacccgattttaaccttaaacatttggatttgacgcgagtgcatcatataacccgactgaataagtgagtcttgcacactggaattcttgtttcgaccatcgtaactggttccaattagaaaccaaacctaatttgttgtcgcaaagtacgtcaaatttatctgaacaaattaacataaatccgtgatataatataatacag

SEQ ID NO: 11181 - DNA, 620 bp, Arabidopsis thaliana landsberg
cagcagtgtttccaccagctgccgtaatggcggtgacgtagacctacaagaattccgacgggtttgatgtaccgtcgtacttctctggcaggtgtggccggaacttgggtggccaagtcgccgcgcggagatgatccgctagtgcggcacagcccacgccgaacaatgggacgcccgactggatttgggcgccccttggagtttgtggcgcaactagagcgaagtcttgatcgaggttgcgaccctcgaagttttgccagcactcacgcgccctctccagagagactcgtgtgtcctcgcccgtacacctacggttgagttctgcccacaggtcatcaggcctctccaaagagattggagcatcttcgcacgcacgcctgcggttgagctccgcccgcaggttgtcagtccgtgcgcccttcactgagggtgagtgcacatacgtcgatgccttgtgttgatgccggaatgaccgaggcttgggcctgggcatggccgagccagaatgcgccatgctgaggagacggtcgacatctttgcgccactgtctcatggacttcggcgagcccgtggaacttgaagggtggcgtagaactccctggctgtagacaatgcccaag

SEQ ID NO: 11182 - DNA, 413 bp, Arabidopsis thaliana landsberg
  unsure (1)..(413): unsure at all n locations
ggaaaggttcatgagccaagtccgggctggcccagacaaggcaacatggaagtatgtcgccattacggtggtgtctccactggctgcgtaatggcggtgacgtaaacctgcaagaattccgacggatttgtcgtaccgtcgtacttctccggcaggtgtggccggaacttggatggccaggtcgccgcacggaggtgatatgccagcgcggcgtagccacgccggccaatggnnnnnnnnnnnnnnnnnnnnnnnnnnnnnnnnnnnnnnnnnnnnnnnnnnngaagtcttgaccgaggttgcgaccctcgatgttttgtcggcgctaatgcgcctttctagagcacactcgagcgtcttcgtgaccctcgaagttttgtcggcactcccacgccctctccaggaggacccgg

SEQ ID NO: 11183 - DNA, 881 bp, Arabidopsis thaliana landsberg
  unsure (1)..(881): unsure at all n locations
aacacaagaaacagacgatatatgaagaataagaagaacacatgcgtctttcgttagctaggtttttttgtgaagttctttccgtttgcttttcgatatagtttccgaagaaaacaaaacatatgcaaatttaaagtgaatttatgttaatatacacaacggcttcttttcacacataaatttctttttaaaaaatcttgacttaggctttccgttaattcgctaccaactcacacggtgatggttttaatctctgaaacttccgacgacggctctactggcggcgatcatcaaatcaagaaacctaaaaaagaagaggatcgaaacaagaaattgaaagaaaaggttcaggtgtcgctaccaattccagaagaactcatcttacgttgcttcctactcgttcggagatgtcaccacccgtcgctttccctcgtctgcagatccttccatagtctcatgtcgaagctctacgatgatcgcttgcgtctcggctacaccgaaaacgttctttacgcctacgttggattccctcctgttgaaaaccctagctggtacattctccatcgtaaaccctatcgaaacttgcctaacacgatttcgttgaaattgtgcaaaatcgattccctccctcccatgccttggggatctactgtcgtcactatcggatcggatatctatgtcattggtggacgcgtcggcgagaaacttttagaagatgtangcgtaggctataataaacccataagcggtggacgccgcggcgagacatccataagaggtggacacgcaggcgaacgacgcatctcggatgtgactctcattaactgcagatttcacgagtatcgctccctcccgagtatgaagatggctcgctgtcgtgc

SEQ ID NO: 11184 - DNA, 484 bp, Arabidopsis thaliana landsberg
atattttattacatataatgcaccaattttggcatattgacgtatatcaacaacccaattatatgtgtctctcacccatttcttaatagcaaaaaagtctagcacgtgaattatgtctataaataaaggtttccaaagccctcttcataattcactcataatctacttactcatttctactatacagtataatggcaaaccaaatctacataatctccttgatcttcttgtctgtgttactttatcaatccactaccgtcttatctttccgacaaccattcaacctagcgaaaccatgcaagcgtttcgtcttctacctccataatgttgcctacgacggtgataacacggataatgctacatcagcagcaattgttaaccctttaggtctaggagacttcagttttgggaagtttgtgatcatggacaaccctgtgacaatggaccagaacatgctctcggaacaggtggctcgtgttcaagg

SEQ ID NO: 11185 - DNA, 1204 bp, Arabidopsis thaliana landsberg
aagtccgtgactcaattcttcaatctatccatgaaccggagctcatttctgcgttcgactccggtggtgcagagcttctatacgaaatccggctccttagcaccacgcagcgtgttgcagccgccacattcatcattgatcgtaatattgattcgaaaggagcacaggatttggcgcgagccatcaaggattatcctaaccgtcgtggagacgttggatggttggattttgattacaacttaccaggagattgtctttcattcttgtattacaggcagagcagagagaataagaatccatcggatcagagaacctcgatgcttctacaagcattgggggttgcagaatcagaaaaggctaagaacaggttgaacacagagctatacggggacaaggaagcagagaaggagaaggagaagaagaagaaggaagaggaagtcaaagctattcggattccagtggtgaggcttaagtttggagaagtagcagaagcgacctcggtggtagttttaccggtttgtaaagcagaggaaggggaaaagaagattcttgaagctccaatggagatcatagccggaggggattttaaggtggttgaggcggagaaaggatggaagagatgggtagtgcttccgtcgtggaacccagtggcagccattgggaaaggcggtgtggcggtttctttcagggatgatagaaaagtgctgccttgggatggaaaggaggagcctttactggtagtggccgatagggtgaggaatgttgtggaggctgatgacgggtattatctcgtggtggctgagaacggacttaagctagagaaaggatcagatttgaaggcgagagaggtgaaggagagtttagggatggttgttttggtggtgaggccgccaagagaagatgatgatgattggcagacaagtcatcagaactgggactgaattaatagaatcaatactcatatgctgtaactgattacggagtcatcatggtcatgtaaaatttttggatataggtggtaactttttgttgtaagatacagtcagaaacagagcaatattgttctctatttgctgttctagatcatgtcttagcgaacaaatcctaccaatcagacctttttggaaacttgtttatttaccgagccattgctgtgcacggcgttcaccgctggctccaactgagcttcggatgctcattttct

SEQ ID NO: 11186 - DNA, 1844 bp, Arabidopsis thaliana landsberg
agctatgttttcaacggtggctgggctaaagcgtttgttgggaggagagaattgaaggaaggagacaagattggactcttttggggtaatgttgactctagaatccactttagtgtgcttgagagaaaaatccctaactagctagagagatcgtgtttgcagactctcgatagataatgaaggtgctttttttttttttttttacctagataaaatacagactctccattttaccttagttattattgagaaggggtttttcttttctttgttaatgattgacattgaaaagttttttcttaaaattttgtgaatgaatctattaaatgtgttttttaagatgttttcaggtgactaatatgtttattaaaaacagagaattacggctggtgtccctcccccctgaccaaattacatttaagtttactatatagtataaaaggaagaaaaaaaaatcattaaatacgtctacatatacgtaatacgtgtccctcccatcaatatcgatcaaagtttctctctaaaattgtctcaacgataactctccgaagttactgtgattctccgacgaagaagcgcaagagatggtctttctttcttagcatccaaggaaacagtgagttcctccttctccggcgaagaagagtcggaagaatataagccaagaatcgcagaagtcatctttcttgataaccaaggaacatagatctctatctccgtgaaagaagaatcgagccaagaaccacgaaaagaccactcaagatcctttctcttgccataaaataatacgaaaatgcctctcttcgtcctctctaaatcctcagcaaagaagagtcagacgtttatgagccaagagcagcaggggacgtctccgttgaacacagacgaagccttaaagagtcatcatagcttctcgcagaacccaaattacatcgaaagtaataacatcgcagctagcaaatcaaagatatgcttcacatataattcataacatcacttcttctttgttagcaggtaatctgtctagaagataccagactaacttttcgcttggctcacaaagaatctctgggcagtttttgatgatccctaatcctggatttgtcgacacaagttcgatgacaaatactcacgataccagtctagcaaattttcagactgtgcctacaactacaaatccaaagattatctcgaaagaggaaaaagaaaatgaggaggagcaacagtactggaccatcaagaaggaactgaccaagagcgatgcttgccaacggcttactctgtcaaaaagctctgttgaggagcacattctcaagcatctccttccagaagattcccaaaagatagacaaaggcaagcccggaatcacggttaaggtatacgacaacgatacagacactgagcacgagctttgtctagcattccagtgtagctatgttctaaagaatggttgggtgaaaacatttgtcaaaaggagagggttggaggaaggagacatgattggtctcttctgggaatgctctacttctaagcttcattttagtgtgctttttcgtgtaaatgcaaaagctcctgcagcagaagaaaaagaagcttattaatacagtaatcaatctccattgtattaagaatatctgcattttgtgatctcattcagaaacgcgtatgtgtagaggaagtttttttcatgtaatcaaacattgattgttgttaatgacttgaaatgcataataaaaacttcaaagagagactgattgtaaactcaagttgaattcacaattagtccctacaagctatatatcttgagtcgtgatagattgatcagatagaaagaggaatttgga

SEQ ID NO: 11187 - DNA, 755 bp, Arabidopsis thaliana landsberg
acttgtcttccctcacagtgagttcaatggtgaagcgctgcttatatactctgcttacaacgcaatcaatccaacttctccagagctatatcttcttttgaacgctcttataccgctcattgtctctttcactgctatcatcccgattcttcgtcaaccgccttttgagcctcttccaccagatggagttcgtcgtgactctctcatgtttctattgctcaacatactcgctgctttaaacggtgtttatctccttctctttggatcaaactcctctgatttaacctctgctcgtctactctttggtggagcaatcctcctcttggtattccctttatgtattcccggtttggtcatcgcccggaattggtataaccgcacaatccacaccagtttccgtcttgaaggttccggtttcattcttgttgatcctgatgagcttgagttgcataaagggatgcttgcacatgaagcaaaccgtgaaggttaccaattgctgagtgacgatgtggtgcaaaacccggttaagtccgtagctgttgaggaagaggatagtgatgagtcatgttgcaagaaacttattacaagagatcagcttgaaggtttggggattgaacattctttgtcgctgctcttaaccagatcagatttctggttatactatatcacgtatttctgcggtggaaccattggacttgtgtacagcaacaaccttggacagattgctcagtctttaggacaaagctcaaatacca

SEQ ID NO: 11188 - DNA, 853 bp, Arabidopsis thaliana landsberg
  unsure (1)..(853): unsure at all n locations
tcttgcaacactaactcttagaaatgtgactaaccacatttttataaaattttaacattgttaaaatgacgtctatatatgcttgtaatcatttttgtgaatttttactacacaattctaaccattgacctatataccataatgggatcgattttttatcaaccaatatattttgctattgacagtatgctcaacaaatgaatttgattagagaatgtggttaattaccctcgagaaatttgctgatacgggtgatgaattggacacggcatgtgtcgcagtagacggagcccttgatgtggaatttgtcaaagtcgtcggcatcagctgcggtgaagtgaacgagggtggtgaaacatagggcagaggcaaggaagacaatgaagaatttggccattatgcctcaatcctttttttttcttgtgtttttacttcggtcttctcctctcttggatttgagagtttatttgtaaaatttagtttttaagggagaacaaattgtaagctttggttgagaggagacgctatgatagatccaaccaaatatctccttttatagagatctattgcccgtgcatcacaaccatgtgattctatatctatttttgnncgtttttttgtttatttttggtgtttttgttcatgagttttgtacggctgtgttttccttgaacccgatcttttctcattgccatctgtttttcttttctgttaataattcttcatagattccgtttaagtcttttttgtatgaggatggtttcccaaatgtccacctatagaatcttctgtatgtttagacctccactaaaaagattcaatgggggtggagaattatctactacacccgaaa

SEQ ID NO: 11189 - DNA, 792 bp, Arabidopsis thaliana landsberg
taacatttctgtaataaacgaatgaatgaaacttgccggtgaaatagtaaattataaaaaagagatatgaaaatgaccattttagatgaaataaaagatacttttcatacatacatatacagagtttaggaccatttcaacaacttcttcgaagtcatcgaactattttgatttgtatgacttttcacttccatctccaattggaaacttctgaccgtccacgtggcattcaataagtaacacatttgcttatgacatatcccctaacttcctcgcttcttctccacgactttttcaaacttttcaaaacctccctataaacttcagatccttattcctcacaatattaaaccaaaaaaaaaaactaactttttgggactccagaactaataatggatcccataaaacacatctctttaccagttcttgtcttgtttctactattatccgtgtcggcgggtcaacccggaaccccggaccagagacatgacccgtatgcttacagcggcagtctaagtccagccatggctgttgtcgttgtagttgtcatcgcagctctcttcttcatgggcttcttcaccgtctatatacgtcactgtactggcgcagtagacggtagcgttactcctgcaggaggagctaggaggagagtgacgaacgcaacggttgcgcgtgggttagacgcggagacgatcgagacgtttccgacttttgtttactcagaagtgaagacacagaagattggtaaaggagcgttggagtgtgcgatttgtttgaatgagtttgaagacg

SEQ ID NO: 11190 - DNA, 726 bp, Arabidopsis thaliana landsberg
ctcgttgttccccaaggcatttacgtagcacgaggatttttccggatttcgcatcccttaggctacgaaaggggcgagaaattgtttgaagggcgagtgctgtgtatggcttagctgctccataaccagctatcacatcgaacgaggatacaactatctgcatctgctggtaatattgcttatatcttctatccacctttaccaaaatcaagaaatatctcattttcttaaatattcaacatatcctatatataccaaatgtaacaacattatggctgcaatttatttaaatgtatgcttttttgcatttaaaatattataacaaaaggcctataaaaggtaaccatcacatgatcaaattaagaagattaggtctcaagttattacctcatccaacattgacaagagttttgtcaacttgctctgcatttcttgtctctccgactgagagatgtccgcaggaggattcgtgctcgagtcttgagtgctctgattcggttcttgagggttctcattgtttttatctccctctgcctgaaactgctttagagctttctttacattaacagcctcatctagaagctgttgagccgccttaagatactttgagttgggaattgttctcacaacatccaagttctgattcccgcccggaaaactctgtgttgcatactcattgcctctcggcgccatattttgatggcttatctgatgaattcctggaag

SEQ ID NO: 11191 - DNA, 1441 bp, Arabidopsis thaliana landsberg
  unsure (1)..(1441): unsure at all n locations
aaggctttggcgaggcaatgatgcatactattggttacatttacacaatataaagctgctaaagaaatcgggaaagacaagcgatatatgaaagtaccattcttagctgaatgggtgcgtgacaaaggccaccatatgaaatctcaagtgatggctgcttctggtatgaaacaaagctaaatataaaccaaaatgttttggttttctaacttaaacaaaatccttactaattgctttggatgattttgttttggatctgtaggtgcggtttcgttacttcagttgcaggatgaagtaaacaagttgaatgaacaccaaggagagaacaaagaggaacatattcagaaagctattgaagctaaaatggatgctttgcttcaatctctttggcaaatcaatgttctcgacatcgaatccacgctatctcgtgtttgccaatctgtaagatactatgcttcatcatacattatatgaccatttcttttgtagcaacaatcgacgaattaatcttgttgttaattatatatgtatctttctctcacaggtgcttaaagatccaagtgtttcgaaggatgttcttcgagctcgtgccataggactgaagaaacttggaacgatcttccaggtgagcaagaagaacaaaagggttcgtatcataacataaaagaaacactcattgtgtttagatttaagatgtcgagagccaaaaaaaaaactttttgaaaaatacatgtaactcaaaaccttagtgaatttctctgttctttttctttgaagggtgctaagaagccgtacacgagaggaagcagcttgcgtcgggaagccaccaccgtgaaaatggacaccggaggttcttcaaaggcgacgtcttgaaactccggaacttaaaatgctgtttcttttattggtggaagttggatttgtccttcgttttttactttccccagttttgtagagattgctttctatgttaacttttttctcgtgtagatgttacatttaaggtggtgcattactgcattctcattaaaatcttttcgtcacattattcaaatttcttatacattcagagctagtgatgaaatgatctaaggaacaaaatttacaatttactttcggtaaagaaaaaataatagtgaatagtaatattgtatgtatttgggcgtgtttgaatcgcgtttttattccctttccatctttccgcgttgtgatcgttttaacatgacgtgccatcgttagcctaattccgctaaaactaacgacaacagaccaaaacaagttaaaatgcagtgtttggttctattaaaccgaatactaatcaaaccggtctgctgacactacattatcattatggatacagagatattatagggtcctcccaacctnaaaccacacgccaatcggaacggtttatgggtcttaaccggtacaagccaatgga

SEQ ID NO: 11192 - DNA, 940 bp, Arabidopsis thaliana landsberg
gtacttttcttgctctgtttcaatggaggaacaaaactggataagaggaccaatcataggtcgaggctcaacagctactgtctcacttggaatcacaaattccggtgacttcttcgccgtcaaatccgccgagttttcttcatcggcgtttttgcagagagaacaatcgattttgtcgaagttgagctctccttacatagtcaagtacattggttctaatgtaacgaaggagaacgacaagttgatgtataatctcttaatggagtatgtttccggtgggagtcttcacgatttgatcaagaattccggcgggaagttaccggagccgttgattagatcctacacacgtcagatattgaaaggtttgatgtatcttcatgatcaaggaatcgttcattgcgatgtgaagagccagaatgtgatgatcggaggagagattgcgaagatcgtcgatttgggttgtgctaaaacggtggaagagaatgagaacttggaattttccggtacaccggcgtttatgtcaccggaggtagcacgtggtgaagaacagagttttccagctgatgtttgggctttggggtgtacggtgatagagatggctacagggtcaagtccttggccggagctaaacgacgtcgttgctgctatttataagattggtttcaccggcgagtcgccggtgattccggtttggttatcggagaaaggtcaaggctttttgaggaagtgtttgagaaaagatccgaaacagagatggactgttgaagaattgcttcaacatccgtttctcgacgaagaagacaacgacagtgaccaaactggtaactgtctgaattcttcatctcctagtactgtgttggatcaacggttttgggatttatgtgaaacttcgagaagtagattcattaaagaggatcacgaagacccatttgcaaattct

SEQ ID NO: 11193 - DNA, 566 bp, Arabidopsis thaliana landsberg
agagtatcccatcttatacattgcagcaacgacgtcgtttaactccggccaagggcttgatccagtcatcatctcgatcatcgtacatcccaaagcccacacatcagccggaaacctctgttcttcaccacgagcaacttctggggccataaacgccggtgtaccggaaaattccgacttgtcaaccgatttagcacaacccatgtcggcgattttcaaaacgccattttcctcaaccagaacgttatggctcttcaagtcgcagtgaacaatccctctctcgtgaagatacaccaaaccgttaagaatctgacgagtgtatgatcttatctccggctccggcaacttaccgccggaatttttgattaaatcgtgaagatttccaccagaaacgtattccatcagtatattgtacaccaatccgttgctctcgcgcgttaaaccagtgcctatgtatttgactatgtgaggagagctcaatgtagacaagattgattgctctttctgcaacaaggacgaagaagataagtcggcagatttgacggcgaagagctcaccggagcttg

SEQ ID NO: 11194 - DNA, 452 bp, Arabidopsis thaliana landsberg
taaattgttagcaagagaggacaacacattgaagtatctaaacgaactaatcacttgaggtttatattttatcttagaaattgagctaataaaaaaaaaacaagaactcatctatgtatagttcatttatttaaaatttaatttgtaggtggaccgacggtacaaccactactgcgaacaaatgcaaatggtagtgaactcattcgaccaagtaatgggttacggcgcggcggttccgtacacgacattagctcaaaaggcaatgtctaggcatttccggtgtttgaaagacgcggtagcggttcagcttaaacgcagctgtgagcttctaggggataaagaggcggcaggggctgcatcctcggggttaaccaaaggggaaacgccgcgattgcgtttgctagagcagagtttgcgtcagcaacgagcggttcatcatatgggtatgatgg

SEQ ID NO: 11195 - DNA, 390 bp, Arabidopsis thaliana landsberg
agagtttcgataataggtggtgggaattcataaagatggcaccatttgaagctttgtgtggacgacggtgcctaactccattgaattggtctaaaccaggaaaagatggtttttcaggcctgtatggttaagaaatggaaaaaaatgtcacaaatcatacataacttaaaaatagccaagctcgacaaaagagttattcaacaaacgacgccaacccttgtactttcaagtcaagattatgtgtcctgaaagtatcacctatgaagggtgtaacccgtttcggtgtaaaggaaagcttgcaccccgatacattggtccgttttctattcttgaaagatgggaccagtggataccgactccactacccgaacattgtctgtagacacaatg

SEQ ID NO: 11196 - DNA, 1402 bp, Arabidopsis thaliana landsberg
aaccttttccataagtcaccgtcaaagcaacaaactttaatgaagatgacggtttttttttttttttttttctggtaatggcgaatctaattaattaattttgtgtgcctgaatgttgatgacttgatgttatgaaatcttctttacatagtagggacataaacagcaataaatcccaaaaacaaagaagaacaatgtaccaatgtggtcactaattttagaaagattgtgttcctcctgaaatagtgaaacatgtaggactccccttatatatataactcatgtaaaaaaaaggactttgtggctgctgagtacacacgcatttggttactaactaagtaaagggtttggacaggtaaagttgtttcttagtgatgattgtcccgttaaagttgcatcgaatcttccacctggttttgaagctgctgattatgcaacgaagcgaatcatctcacacattcctcggatcaaatggaaacgcccaccattggtataattcttttcttgaattgcaaacaatgtgacccttcttgtttttatataactctcactgtctttctttattcgccgccaaaatagtttgtcctcgatgatgctttgcttgttgggagtggtggaaaaagcatcgagactcgttctgagaatcttaggatttctaaagtcttggaagctttctatccacatcgctctgtcatcccttctcggtaattttatcatttgaggatttgcttttgtgccatgtcatgtttttccacttatcaaattctctctgatttcttctagtttttcgctcacactagctgttgaagaagaacactatgacgacggcaaaactcctaatatccctctcactcacgttgaagatgaacgtgacgctgctgctgaatcttcccacagtttcgaagctcctgcagctgtttctggacttggaccagagttaagtcttcttgcttctgcagctttgtctgccttaactaaggaacagggctctcaggtcgatcctgatttacttgtcaagttactcagtggccccaaaatcgttgagaacttgatcaatggcatgaaaggtaaaccacttgaaactgcaaataacagtctaaacactgacatcaccgaacctagacttgctcctcaacatgtcacctccacaaccatggacagaaacccacctcccatgcctggaaatgttgcgccacataatgtacctgtttcggttcagtccagtgctatagatcctccactccccaaacccaatcagcccatgtccagtgctctctcaatgaaccttaccctccagaaacccaccccggttgttcacaactatccattgtcttctgggatcaaagttgaagattcttacacagctgctcccttgaaaccaagcacaagggatgatgttgta

SEQ ID NO: 11197 - DNA, 1446 bp, Arabidopsis thaliana landsberg
catgaacatggtcctgttcttgagaaagtgattgggtaactaatcatcctcattttacctggttttagtttttctctgatctgtaactcaagtcttttattgtgatgtttagaacggacatagaatggtttccaggtaaatgtttgactcataaggttgttgtgaagaagaaaacaaagaaagggccaaagaaggtcaacaacatccccatgaccaaaacagaaaactgcgagagtttcttcaatttcttcaagccacctgagattcctgagattgatgaagttgacgattacgatgattttgataccattatggttagactaccttctctcttttcttttaccaatggtttcttcagcagctaatatcgctttaaaatatcgaaaatattgcagacggaagaactacaaaacctgatggaccaagactatgacattgcgtaagcttacagtttcacattctctgacattgtgagattcaagaaattaattcttaactattgtttttttttttggttttacagtgtgacaatccgagataaactgatccctcatgcagtttcatggtttacgggagaggctcttgttgatgaagacgattctgatgataatgatgatgatgataatgatgagaagagtgactaacgagaagaaaaagtttgtttcaacagtttttaaagtgaaagaggagcttctttatattctcttatttatttattacagaaacaccaagtttctagaatctctctcaatacatagatctgaagaaccgattttaaagagaagacttcatgctccaagcacttaggcttaaaacattaacattttgagatcccttgttaaaagcaaagagatgtgttctttctcctattgccaattttggataaactctcgaggtaatacatgttttccctttcccaccaaagctctccactattgatttatcaatctacaaacacaagaatcaaaaactcattagtaacaaaaaagcacaaattagtcttcaagttcttgtgattatgagaagttgagacgactcaccaaagtcctgagagagattggttgataaggagagatatctaaaaaagcaccataagttgttttatcattccctttctctaaacttgatgtgctttggtcactgcacatgaccactacgtgctccttactattctcaccagctctgaagattctgatattgaccgatgtatactcttccatgttcttggaagctagaaccattaaaccgaatggacctaaacctgatgaagcattcctctgactgcagatcaattgcggatcggtccagcccggttcaatcacatctgctttctctaagtcaaaaccactcactttgaagaaaacttccacatctgcttgtgaagctgtgactccatgaacctccattaccgaccctcctttcaatagtttgtttccccacttgact

SEQ ID NO: 11198 - DNA, 366 bp, Arabidopsis thaliana landsberg
  unsure (1)..(366): unsure at all n locations
cgccgaccttcttcaccgcacaatcgtcgcccttcagcgggagttcgcgatgacggacctggggcccctacaccacttcctcggcatcaccgccgagcgccgtcctcagggtctcttcctccactagcgcnnnnnnnnnnnnnnnnnnnnnnnnnnnnnnnnnnnnnnnnnnnnnnngccctgctccacgcctgtcgacactcaggcgaacgtctctgaggacaacgggcctccggtcgccgacgcgacgtcataccggagcctcaccggcgcgctccagtagctcacgttctgcaggcccgacgatcacatacgccgtcgagcaggtgctgctgcatatggacactccgtgggagcccatctcag

SEQ ID NO: 11199 - DNA, 735 bp, Arabidopsis thaliana landsberg
ataacaaacaaaattataaggatgtagataactataacaaaatatctttctatttgctaaatatctcctgaaacaaatggtggactcacttcgttgtccgtacatatgtcatctacaattatgtgaccaccgaacatatatccacagtacataaacatatacataaacatatataaatacacaacaccacgtatacaattcgtggatatagatagacacatattcgtgtttcgtttctttaggttggtcccctgattcttacaggcacgattaagatacgcaatttattattgacaaaaataataatcaaaatgatgattatgagtttgacccacaactattgaggccccagccctaagtacccaaaggaggtaagaaaaaaacaaagagaatgattttaatttttcttcacaacctttttaaagcccaggcataaccacaatagtactaatccaaaatttccccccaacgataagagacaaaaaaataaatcaacaaagtgaaaccatatgcaccacacacacagtcattactcactttaatctcatgattaccccaaaagcaaacaaagtaatgatgagaagttgaaaatgtacgtaccctgacgctgatggagtagagaatggagttgtggagagtggtgacattgagatgaagaagagtgagccttaggctttgtatagaagttatgagcttaagaagctgcctcggtttcttcttcgtcattatcttgat

SEQ ID NO: 11200 - DNA, 946 bp, Arabidopsis thaliana landsberg
tttgaagacagatcaattttttagtgaaacaaaaccgttctgccacatgtaaattataactagttcgttccaatacataatacttgattcttctatcaatccgactacaacatgatttatttagaggtaatataaattgtcaatcaaaatcaaatcgactttccgattttatctggacgaatcaaaactttagacggattgccagattacgaaatcgttaaaacatatgacaacgatactctcaaagagacgtgcttcattagaattgtaatagaaggtgttaatatcagaataccaatttaggtaggtgaagacttgttaattggtttcatatgtcaaaaaaaaaaaaaaaaaacctatttggtgatacatttaactattcttcattcaccaaactacaaatccaatcttcaagttcttagattacatttgttaagtcatcttcttaaacatgatcatggtttatcgtaatcaaaatgttatggccttgtcaattacataatcataataaaattgcattatagatgaagaaactgaagctacaaattacataagacaaaagaaaaaaaggattccttaaaatgaaaactgtggcatggtcgagcctgacaaaaaaccgcaagctggaccgacacagagagactaatacaaaccataatacaaatattaacatacgaaatttaacactaatccatatttaattaattactcttgggccagtcatgcaatttcacaaaaactccattgcaagcggctgaatttcctattttgcccctaagctagaatcgaatcccaatcgatctcgtacgacggatacttctccaacgagaacgtctcgttccactgcggcggctcctccgggtcagcgaacgtcaagtccgacaacggcgaagatccagcggtggactcttcaaactccgtcaccggtggagatcaccgatcgaga

SEQ ID NO: 11201 - DNA, 771 bp, Arabidopsis thaliana landsberg
cagtttgagatggttggtattctgaaatgttgtaaatgacaaaagaaattgcatttgctacttataccttctacagagaaatgcggacgatctcttaaatataactcgtctaattgaattgacgatttcttaagagttttaattccgaaaaataatgagctgttcatctcatatcgtatatccttgtttacaggtggagtcggaaatattctgccttcacggtggattatcaccatccatcgagacccttgacaacattaggaactttgatcgggttcaagaagttccacatgaagggcctatgtgtgacttattatggtctgatcctgatgacagatgtggctggggaatctctcctcgtggtgctggatatacatttggtcaggtatttgaattatgaagcctcagtttcagaagctttcctgaatctcctttttcctttgttctagtaagtttgtaattgactttcttttttcatttttgtttccataggatatttcggaacaattcaatcacactaacaacttaaagctgatcgcccgagcgcatcagctcgttatggatggattcaattgggcacacgtaatacaatcaaactcctcttccctgcatagattagccaaaccttagattcttagctcacatgtatatattctcgttgacaggagcaaaaagtggttactatattcagtgcaccaaactattgctatcgctgtggaaacatggcctcaattcttgaggtcgatgactgcaggaaccacacgttcattc

SEQ ID NO: 11202 - DNA, 948 bp, Arabidopsis thaliana landsberg
catagatctccttaattttcactttttaagttgaggggcttttagagaaacacaaacacgtgaggcatcatcaagacagtgttcgggggtcactttcgtgtaacacagacattaaatcaaataaacaaaacgagagatcctttaccttagtgtatacacacagaacacacgtacacactcatatttacatttgccacgtaagaatacgtatactcctgacgtgtcctgtatatatatacacacgcacacttcaatttttcattcactaaaccagatttaatttgagactctcaaagaaacaccatggaagaagagcaacctccggccaagaaacgaaacatggggagatctagaaaaggttgcatgaaaggtaaaggcggtccagagaatgccacgtgtactttccgtggagttaggcaacggacttggggtaaatgggtggctgagatccgtgagcctaaccgtgggactcgtctctggctcggcacgtttaatacctcggtcgaggccgccatggcttacgatgaagccgctaagaaactctatggacacgaggctaaactcaacttggtgcacccacaacaacaacaacaagtagtagtgaacagaaacttgtctttttctggccacgggtcgggttcttgggcttataataagaagctcgatatggttcatgggttggaccttggtctcggccaggcaagttgttcacgaggttcttgctcagagagatcgagttttctacaagaagatgatgatcatagtcataatcgatgttcgtcttcaagtggttcgaatctttgttggttattacctaaacaaagtgattcacaagatcaagagaccgttaatgctacgactagttatggcggtgaaggcggtggtggctctacgttaacgttttcgaccaatttgaaccaaagaatttggtgagcagaattatggagg

SEQ ID NO: 11203 - DNA, 820 bp, Arabidopsis thaliana landsberg
  unsure (1)..(820): unsure at all n locations
gtgagttgtgtcctattctaccgttcgcgtatgcaaagagactaaaatcttgttttttttttcttataaactattaaaaaaaaagtattatagaaagttatatgaatgcattgtctgcaaaacatgctaataaaatgttattttgaatctgtaaataacttcactcaccacttcaacgaaacataagttcatgaagaaacttgaaagtaaaggcaactatcacatcgtggcattacaatgaacggtaactcatggtccttatttaaacaaatgcatggatgaaataaaatagcaacacactatttcgtatttcatgatcagaattttggcttgtagatccatgagcatggccaccctagggtccaactggaatgccttagcaagaacattcagattagttggtgggttagacccaaagacggtgttgacaatagagatgacaccggggttttggctgctcaaagcagcgaatnnnnnnnnnnnnnnnnnnnncacattgaattggaagtgaatgaatccctctggaaacacaaaaacatctcccatgtttagcgttttggtgaatagacggtttccgacttggtttgacgtgacaaaccctacaaaaagtgttccttgatggacaaccaagatctcggtccaaaaaattctaaaatgtatcaataacaagtctgaaataattaagattttttttaaaaaaaaccgtgttccctcaacgcaccatgtttatagtggtcatacttcaatcccactaaatacaataagaaactataagtgaaaaaagatccagttgatgtatgaaatggcaagtgttgacaag

SEQ ID NO: 11204 - DNA, 1184 bp, Arabidopsis thaliana landsberg
ccagaaaatcagaggataattttccgatctctgttttttttttctcggtgaccagaatcggttggttctggattttttttttttttccttctttgttattgttatcttattaatgaatcttttttgttgttataatttacagattttttttaaacgagcttgatcaataaattctctcaagatctatggcggaagagcatcgatgtcagacaccagaaagcaaccgtctctgtgttaacaactgtggcttcctcggcagctccgccaccatgaatctctgttctaattgttacggcgatctttgtctcaaacaacaacaacaatcctcctccatcaaatccaccgttgaatcttccctctctgtatctcctccgtcgtcatcatcatcggagatctcttctccgatcatccctcctctccttaaaaatccatcagtcaagctagaggtaccggagaaaaaggcggtgatttcgctgccgacgacggagcagaatcagcaacagaggccgaatcggtgcacgacgtgtaggaaacgggtcgggttaccggattcaagtgccggtgcggtacgatgttttgcggggttcataggtacccggagatccatggatgcagctacgatttcaaatcggccggacgtgaagagatcgcgaaagcgaatccgttggtgaaagcagcgaagcttcagaagatatgatcagagccgttcgatgcgttgacttttcctctcgtaagtcttcatttctacgcgtatgtgtgtcctccgtcccccgagaaatacggatggtgtcgatttgattgatctcagccgttggatcaaaaatggtttattattgtaaaagattgattatgtatttatcaaagggacacgtgtcacgtggttttaggatggagacgctttcgctttctctccttcattttattttctttttcctttcagaaagaaataagattattcgcgttggctttttctttttattaaattccggcttattattattattattgtgtggcttttgcgtgtacaaagtctattcagaaaaataaaaaaaatgatattaatttccctcaattggatatggacttctatacactctttaatagtataattttatatggatgtggaatgtgttgaagaaggctgataatcacgtctttaaactcaaaaatgatgaattagcaac

SEQ ID NO: 11205 - DNA, 845 bp, Arabidopsis thaliana landsberg
ctcgaagttccttcaggaaacgacgtcgtcgaagccatcaaccgtttctgccgccgtaaatccatcggagtctgcgtccttagtggctctggctctgtagctaacgtcactttacgtcagccatcaccggcagctcttggctctaccataactttccatggaaagtttgatctcctctccgtctccgcaacgtttctccctcctccgcctcgtacttccttgtctcctcccgtttctaacttcttcaccgtctctctcgctggacctcaaggacaaatcatcggagggttcgtcgctggtccacttatttcggcaggaacagtttacgtcatcgccgcaagtttcaacaacccttcttatcaccggttaccggcggaagaagagcaaaaacactcggcggggacaggggaaagagagggacaatctccgccggtctctggtggcggtgaagagtcaggacagatggcgggaagtggaggagagtcgtgtggggtatcaatgtacagttgccacatgggtggctctgatgttatttgggcccctacagccagagctccaccgccatactaaccaatccttctttcacaaatctctttctttctttttttgtttttttttgttttgtgttaggatgaatcaagaaactagggttttttttttttgcttttgatcatgaagaatcgtttgcttttttatctacttagattttatttttgtatcagaattgacatatctttccacggtgtaatctctctcaaaccttgggtttatggttttctttagcttgttgcggaattaatttgatttgactcatataaatatgcttccaagtgtcttcaatcata

SEQ ID NO: 11206 - DNA, 1427 bp, Arabidopsis thaliana landsberg
tccattactaaaaaattattctaatatatttattaaaatataaaatctcgcacgtatgtgcgggtcagaatctaataaatatatacaatgggtgtaaaactaaaaatacattcctatgtactattgtagaattctttaaagtaaccatgttatctcaaatccgcttatatgtttgtatattcttaaaacgtgttatgtaagcatttttgtagttagagaattactcttgcttctttgttatttcaccaattaatacataatattttgcttcatatatagaatgttgtttcttgctttggattctgcctaagttgattaattactaaccatttgtgcatatacattgaaacgtctacagttctacccatctctatacttttttgaggatttgatatgtgaagctcaaatatattgaaaaatggttattgctatagtaatagaaacactaatgcatattgtattcacactagaattcaacataaacgctaatgcatttgaaggtttataattatacatttgatggtattccttagtggctattgtgcatggctgctctcagcttcaagatttgtaggtaatattttcttccagaaccaatgttccctgactgtcatctcttcgattggcactcctttagtctcaggcaaaagcaagtaaacaaagatggtcatcaccgaaaccgaaccagcaaagagaaggaaaattccaaactttagagcacataggaaatataagaaagtttgggaaatgatgaaggacatgaggagattgacagcaacggtgatactctgccccgcggaacgggtttccaagggaaatatttcgctcggtatggtgtagccaagcggaccccatgaccatccatagccgagaataaagaggcaaacaaagatgaccaagagtatggagtactcttttgatagctctttgttgtctccaaatttcaatcccaagatcactgagactatgacctgttttacaaataacaatgagaccatgaaatacattatgtgttatagttaagaaactaattcaaaaaccaaaaccctttagacttgcactaaaagttttttatctatagtatccatatggtggtaacatttttacctgacaaatgatcatttgtaatccgccactaatgagcaaagctcgtcgtcctagtcggtccactaatgcaatggaaatcaaagttgagagaacaagtacagctcctacaaggacagatgagtagagtaaagcatttcctccaaatcccattgtaatgaacaaaataggcgcgtagaagagaacgcagtttacgccagtgaggatctgaaacgttggcaagagaatcgccataacaagctgaggaatatggcgtatatttagaatttccttgaaaggatgcttgatagaatttgatgaaacacatgcatgaaccatgtcgt

SEQ ID NO: 11207 - DNA, 503 bp, Arabidopsis thaliana landsberg
tgaccttgacccggaccaggacccggtaattcccgatgtagataaggacaaggagaacgattacaacgcccagctcgccagtggaaacaaaccttttgtcttgtatccgttggtgccatcggacgagttgacccgccgccgacgccgccgccgccaccgagtctgttgaagactcgtttgtttcctccgttcaaatcgaaatccatagctttttttattgccctcactctctttctctagattacaataacaacagacacaaattaacacaagaccgaactttaaagtaaggattttttcgatcggtagatgttcaaaatccgatcatggatagataaatcaagctgcaaaatttggagaaaaccctaattaccaaaagaatctctgagaagtagtaatcaaaatatgaagtatgagaaagaaaaatttgggattgttgtgaatgtggtgaagtgataataatgcagagaaaaaagagaaaaaactttgaagtggatttattt

SEQ ID NO: 11208 - DNA, 1394 bp, Arabidopsis thaliana landsberg
gtgataatatctatagaaagtatatagaacctctctaaaaaagcaagagagtttaaaacgattattcgttttttctataactaaaattttaacttttattcgtaaagcttattatattagtttttgttagtcatataaatactatgatatttaattcatgtggatcatcatattacaaaaattatttttggttataattgattaagtgtgaaagtcaaaattaagcatggacatgtaaatctaaccgacctttccaaactaaaccagagttgtaggattatcagatgttcaatgcaggtacaaattacccaaccagtggcggacctactaaaaaggtagggggtttagttgacccaggttaaatttacatattagttttaatgcaaaggaatcctaacggagaaagtagcacagttgataaactcctcttcaatgatccacctttatctctagtttgatcctcccttcttagacttttggtgtaatttttgttctattacatggtcaaaaaaaatctatgaagcaggtaaaaattaatcctggtccgccactgtacccaaaaagtattattagtcgttgacaacaaaaaattttaagaaagcatatatattattgatcgaaaataattcatgaaattatttatatagtttgatgctactttattagctagtttaaatttttttctacttttgtaaaaatcaaatttttaatttttagtcagaaattctagcttataagatcgaacttattgaattaaatagatatattaacaactaacagtcttcgtagagctatgatgtcaaaagggggtcatttgaccccatcaatatttgaaatttttgtttacaaggtttaactatttggtagttgatcagactatcgttcaaatgttaatgttaacccccttgccccgttatggagtataattctagcactcgtagagtattttatttttccatttatgcagtctttaactctttccacttttgtacatatcaaatttatacatttaaaaaaaaattgaggaacaaaaagaatatatcatatcatttcttcaccactaatatagaagaattttgtaataaaaattggtctaaacggtgcgtaggcgtttgactaggcgctcatgagggtataggcgccttgatttttttctagacggggaagcaaatcggtggaccggtctaaacggtcaaaatcggtttagacggtcaaatcgtttagtttataatttggtaattttattgaattttgtattttcaaagcccaccccatgatcaggcctgttgagttttgttatatatattattttccaataataatgagtttgatgaaatcaaagtggaaacgtccaattttaatgagttttatgcccatttgggctttcattgtaa

SEQ ID NO: 11209 - DNA, 1402 bp, Arabidopsis thaliana landsberg
  unsure (1)..(1402): unsure at all n locations
taatttttcttataacttcaaaaatccactgacacaaaagggaatgcgcttcatgcgggtcatcctcttaatctcaaactctctaggactacactaaatctaactttttgcagagagcaaaagattcaataattgagattgatctcaaaaccaaagctctcgtgctcttgtcgttgatgttggttgtgtagactttgtatacaatgatgaaaagtttggcgaatgctgttggagcgaagacggcgagggcttgcgacagtgacgtgaagagacgtgcacggtggtactgcgcggccgacgatgcttttctttgccaatcttgcgacagtttggtccattcagcaaaccctcttgctcgccgccacgagagagtccgtttgaagacggccagcccggcggtcgtaaagcatagcaaccactcatcagcttctcctccacatgaggtcgccacgtggcatcacgggtttactcgtaaagctcgaacgccacgtggctctggtaagaaaaacaattcgtcgatatttcatgacttggttcctgatattagtgttgaggatcagacagacaactatgagcttgaagagcagctgatctgtcaagtgccggttctagatccgttggtgtctgagcagttcttgaacgatgtcgttgagcccaagatcgagtttcctatgatcagaagtggtttgatgatcgaggaggaggaagacaacgctgaaagttgtcttaatggatttttcccgaccgacatggagcttgaggagtttgctgctgacgtggagactctgctcggtcgcgggttagacacggagtcgtatgccatggaggagctagggttatctaattcagagatgttcaaaatcgaaaaagatgagattgaagaagtagaagagataaaagccatgagcatggatatatttgatgatgatcgaaaagacgtggatggaacagtaccgtttgagctaagctttgattacgagtcgtcacacaagacgtccgaagaagaggtaatgaagaacgttgaaagtagtggtgaatgtgttgttaaggtgaaagaggaagaacataagaatgttctgatgctaagattaaactatgactcggtgatatccacttggggaggtcaaggtccaccgtggagttcaggagagccaccggaacgagacatggacatcagcggttggccagccgtttccatggtacgttatttaaaatcctcattcttatagaattcaaataaaagtgagtttactgttctcaaatttctaaaagttgaaataatatgttttaggtggagaatggaggagnaagtctcatcagaagcaatacgttggtggatgttacgacaagctgggttggagatggaggtgagaactagagttcgagatacaggagaagagag

SEQ ID NO: 11210 - DNA, 1119 bp, Arabidopsis thaliana landsberg
  unsure (1)..(1119): unsure at all n locations
ggctgtatcatatacacgtcctcatctaggtttccattaaggaaagctgttttgacatccatctgccaaatctcataatcgaaatatgcggcaatagctagaatgatccgaatagatttaagcatcgctactggcgagaatgtctcgtcatagtcaactccttgaacttgtcgaaaaccctttgcaacaagtcgagccttatagatgtgaacatttccatccatgtctttcttcttcttatagatccatttgcattctataggtctaacaccatcaggcgggtcaaccaagttccaaacttgattttctcccatggaatctatctcggatctcatggcgacatgccatttctcggaatctgggtccatcatcgcttctgaatatgttgcaggttcgtcgttgtctaacaacaacacttccccattgcccaacaatagcacttctcctcgtgcctcgcgaagccttgctgaccttcgtggttgtggtggtgattctcttgccatagacgtctcaacttgttctgctacattagcatcacttgttgaatcttgtcccactggctcatcctgaacttcttcaagatacaccttttgtttacttttctctcttttgagaaactctttctctaagaacacaccgttccgggcgacaaacactttgccctctgaccggtggtaaaagtaatatcctaaagtttcctttggatatcccacgaacatgcacttgtccgattttggagtgagtttatccgactgtagtcgcttgacgtaaacctcacaaccccaaatcttcagaaaagacaaactgggagtcttcccagtccacatctcatatggtgtcttaactacggacttagatggtaccctatttagtgtgaaagctgctgtttctagagtgtatcccaaaacgacaaaggtaggtccgactggctcatcattgatcgaaccatatccaataaagtccgattacgtcgctcaaacacgccattcatatgaggcgttccaggcggcgtaagtgntggaacaattccacaactctttagatgattgctaaactcatgactcaaatattcaccaccacgatctgatcgcagtgctttaattttcttgccacgttgat

SEQ ID NO: 11211 - DNA, 1443 bp, Arabidopsis thaliana landsberg
ttttctactagatgaatgaccgctcttgggctggggtatattagccggctgcttccaagaagcctgccttgatacagatgttcccatcccttcagcagaaggttcttcatccctgttgagcctcctaggtttaccaagtaaacctgaatatgattccccattactttcggtcttctgttcagcagattctgaatgtataccgccagtagaaggaaaatcaactgattttagattttgatggctttggctttggctttctcctccatgctcagcaggtggattaactgcactggagcgtgtagggacagcctgtgcaaagttctgtctcctaggtgtagatgtattaacagtacctgcttgcttaacatcttccaaattaagaaacctagtctgcctatttcgtttctttcccaacattgcctctttatgttgatccatctttctcttcactgtagtattagcacatttaactgcataacttgcttcaactcctttaacttctctctgcttcaccatcaaacctggttcttgtagctcatctctaacactgccttcaccaccagtttctatcattcccttgtagtcagaaagatcttgtgtattctccttggcactagcatcagaatccatcacttcaccttcttatctgtcataatctccacaagtattagcgtttgcagatacaataacattctttggttgattcaaattaacatttatcatttccatcagcatctatagaaacttcactaagatcaagtaacaataaaagaatcaaatgacgtatctcctctgaactacagaagtttctgcagagaaagcttaaacctcaaaatcgaaactaagcatagtgatcaaaacattgattcagcgaccatgaatatagaacagatgattataaatggcgcaaacacgcatttgttattcaagcaaagttcaagatcgagcaaacgaaccggtaacagagtcggcgaacggcggcggcgagttttagttagggtctaaaaagaatgtgttacgtgagcacaatcgtaatctcactctactccggcaaagtttgtactgtgccgagtacgaaattacagttctaagatacgaattcgtcttccgatgacgccggcgacggggaccggagattttattaaaacttaaaactattcttcgatatcggaggggagaggaatctggtggcttagagactatgcgactttgtaagagattgaacttggaccgttggattaaggcttacgttagataatctgacggtatttaaaagatgtttacttgtttagcttatgatccgatgtgtaagagcaaatttgtttagcttatgataaaccctttgatgcttatatagggggagaaagagagagaaagagcaaaaaaaatcgtatttgttttaaagttctttttgtaatacttctttttaaaaattgtatgtga

SEQ ID NO: 11212 - DNA, 1074 bp, Arabidopsis thaliana landsberg
aaaacttcaagattgtgaattcatcacaaaagcaaatgaacgtattatgaatttataatcgctgaaaattccactcggttcttatttttattttctttaaaaaggtataacagaagaaatagagaaatggaagaaagatgccttcggcttcttatctcattgatgaaaatatggtttatacaaacaaacaacaaggacaaaagtgtaacggtggatcatttgttagaagaactagtataatgttcttccttttctttgtgtctataccctaattaaaatctatagtctagtaacaacctgccaattcattggagttgtcttttgtagtctcacatggaaaagcataggttatatatattaagccccattcattatctgttccttcctcctttacagattatatcctttggacttttctgtaaccaaaaacacaataaacaacattatcattacaaatattctcaagttggttacctccactatatatgactcacactcttcgaaaatgatagtaattaaagcaactttagtatttaataatcaagttattaaaatatgcaagttggttaaaaaaaaatgatgaggtggattttttacctcgaacatgaaaggagaccaaaacccagtagatgttgcatagatacgtatatttatatacatgtagcttgtactgtaagtatatatgtacatgtgacgattgacttcgaatatagctagctatttgagtctctcttgttggaggattttttgatatctgggaaacacatttttacaagctgaaacctgcaaattggaatatatatatttattagtcacacttcaactaaaatcatgagccatgttttaggtgttagtgacgttgtcatgtctattaatatcttataaaaatttaattgaaagtaacattaaataccaagattatataaagcagtcctccatcattattcatcccacacggttcccactgcgaaacatccgtggcactctttcttttatttgagggaaaatgccgaatcattcttattcctattatatataagtaattaatactatttattcctcactatctaatta

SEQ ID NO: 11213 - DNA, 1158 bp, Arabidopsis thaliana landsberg
gtagcatgcaattcaatgtttcattagccatagtttcaaagggaagatgaagaatctgtgtccatatatgtgtgttacggttatggtcatgtatatgttgctgcagcaacaacaacaacaacagttatggtcaatcccgaagccaacacgggtccaaaggaaaggtccatccggtcagcagcatcgagaaatgggaagaaaagatcacagaagctaacaaccatggcaagatcgtaagctttcttctttaaataaatttcgcttttctatgattcttcctattttccatttaagtaactactagcttgataaattcaatcaaaacagctggtggtgaatttcagcgcgccatggtgtgtaccttgtaaaaagatagaaccagtattcagggaccttgcttctagatacccttcaatgatatttgtaacggttgatgtcgaagagctcgctgtaagtaaactgaaaacttgcgtgttgttgagaagatagataagactgcagttttatgatatgagattgaattggtgaaaaaacaaaacgcaggagtttagtaatgaatggaatgtggaagctacaccaactgtagtgttccttaaagatgggagacaaatggataaacttgttggtgctgaaacctcagagcttcagaagaagacagctgcagctgctgatctctttctcagaaaaccttaaactctaaaacacataacagaacagagttaggtttttccattgtctgtcaaaaccagaagttacttgcggataaagtaagtatcatgagctctttctttgaataaagatctgatctggtaagactgatgactctctttaacgttttgttctcagacaaaatcttgtcttttggctgacaaaaacacaaaacatgaagatgaagatgaagaggagtttagtgatgatgaaggtttatttgcagtcatggctctcttctttagagctcatttgtgcagatgcatcttttcaaatggttctgatattttcaacactaaacgaagtgcttcttgtgcatatttgttttattaatccttttacattttaatgttattttctatattactgggtgttcttcaatttgaaaacctgaacaaacctgtcaaacacggtatagaagaaagtttaacgtatttttcaaactcgaaa

SEQ ID NO: 11214 - DNA, 1231 bp, Arabidopsis thaliana landsberg
catggtttcatgttacttgcaatagcgacaatagtgttacacgtgtgtaagtttctttctatatctagccaagatgattcggattttcgcatctactgagaatttacttgaacttcatttttgctcagtgaccttgggaatgcaaatctatctggacagctcgtaatgcaacttggtcagcttccaaacttgcagtacttgtaagtcatcttttctttaaaaggccgtcttttaacttttggtgtatgtgtactcctgtcgttgattcatctcgagctatgtgggatgttaaaaatgttacaatgttccaaataactgcataattttgcattatcatagattattagttatatatctttccgatcttatggtgaaattaatattaaagaatggtaatgacagggagctttatagcaataacattactgggacaatcccagaacagcttggaaatctgacggaattggtgagcttggatctttacttgaacaatttaagcgggcctattccatcaactctcggccgacttaagaaactccgtttcttgtatgcaccatattctactctcttcttttaatacgtttttaataagcagcctaattattgtctttagtttccttgatcgtgtttgtcttcctgtaaaagctattcgtgcaacgtgttacatttgtaggagtcagaaagtagtgtcgccaaatagatgctacgttattttactagatgaaaaggtgttctcttggagactaggatgttgtataatatggtctattttaattatgagctttcgtaaaaggaatcagaactctatccttgtgttcgcttaattttactggaacaacacaaagttccgaattcaggtgactgtctttttggttgttctcgtgtgtcacctttgtgatcttcaatggtagttattgactcgcttattttgtatgaaatcgatttggttctggaagaatgaaattctatcaaagataacaatattcttctgccttagaatttaagcgctaaaccctattgttacttattaatttgtgagtgctctgtaaatctagagggtgaacgcatctaaagtagtaagtcgcgctaattaggaaaatatacttgatttttcaatcagcttcatatctgttggatgagattttagaacaacccctacttttgaaagtcttttaaagtttgtatttttgctctcactataaactcattactggttaatgtatttccagag

SEQ ID NO: 11215 - DNA, 1126 bp, Arabidopsis thaliana landsberg
gcaaaactcatgatcttgtgatcgagtgtgacactagtctcagtgatccttgtctcattgttcgtgtcgatggaaagatcttgatgcaagtgcagcggcttcattggaagttccgtggcaacgataccataattgtcaatagaatctctgtggaagttctctgggatgtccacagttggttctttgggttgccatcatcaccaggaaatgcagtgtttatgttcaggacttgtcaatctgttgaaaagacctggtctttcacacaggtccccacgagctcaaaatctcaaagttttgggttttcattgattctgtatgcttggaagaacgagtagagaagaagagttttgagagttcttttgtttctcttgagtgctaactaaaggttaaaaaggaactgttgattcttgtcaatttattttatcatatgatcaattggtttcaattatagttttctcgtaaaatgttcgaaccggatcattgaagtatatatcagtttcatatgtcaaaagtttttacttgagacttgtaaagacttttgttcaaagccgattactttagccctgtatcaagaaaccaactgtctagatactctgttttgttctccatgtgcataatgttcctcaatacacttgatagttctaactacattaagggtttctttggtgtatggtctttcttctattggctgttcaattgtggacaaatcagattataacgatctgagctaaagctagtagttacaagaagattatcaaacatgtgctttgcatccatctagatattcttgctgaatcattttatcaagtatatgtatcttccttttagagatatatcatgtatttggttttgtttagcgccataccttttgagacattgtatatagcactttgttattatccagctctttgcagtttctgcaggtttaaagagtattttatcaaggattctagagagacgtgggtttgtacttgaagattcttaaattgtgaatcagtaagtcatgtttcaagttttcacatttcaattatttccttgctgcggtctcttctctagccctcctagactgctaaaaaaattaaagattataatagcatgatagatactcttgctgaatcatatggtt

SEQ ID NO: 11216 - DNA, 941 bp, Arabidopsis thaliana landsberg
gaggaaaagttcagatcgtctatttaccttttggaaaattattactatggtagaattcaagtgagaggaagaaagagagaggtaatatatttcgagagagataaaagaagaaagagagagaaaacagaaaataaaataagaaatgatatcttatataataaagaaaggatcctattaaaacacgctaccaaaaattgatacgtgtcatttgagaacttaatacttatccaaaattattcaactataaacaataaatgaagatcaaatagtggaagtcttatcataaaatcattaaaaataattaagaaaaaacatttcatcgaaattataaagggaaaaatgccttataaatcctcaattttttcattccgttgaatttaatccccaactctaacataacgttttaaatactgaactttagtttgactttcaaattaaataatatactttaattgacgaagttgttttatacatgacgtttaatcgtgtaacagagcaattaaactctgttaataattctgttaaaacttaaattaagtcgtcctcttaacatcaaacgacgtcatccgctacaattacaaaacccccaaatttgatttcactatccccaaattcgattttactaatcctagaaattgaaagcttattccgatccccctcatttttctgggttttattttttgattctctcgtattgttcttcttccttttctaattgagttcaagttttgtagcattgaaattcgtcggagaacgtgtgtcgtcgaaatgtatgtgaatgatcctacaattaaactgatttcatcaacatgtgcaaagctatcgtcattctactatccaaagagaatggaatcactagatgaaatcgaaactgtatgtaatgtttatgagagaaacccaaaattcacattcaaataatggcctatttggatagacagccg

SEQ ID NO: 11217 - DNA, 732 bp, Arabidopsis thaliana landsberg
acacaaacagtatttatttttataaacgtattgacttgtcgactgcaaacgtgattacgtgaaccttactgttaataatacaaaaatcacagctctaatttgccaacccaatccagatctctctagttctcaacttctcatataattattcattaatatatttcttttgagattttggttgattttttgatatataaatattggacttgccattttctattacaaccatcaaatctcaataaagcaaaacgaacaagaaaatggcgagcacggaagctctcttacccgtcacgtccctacaagatccattatctgagtcaagatccgaccagatcccggagacccgtcggagacgacccatcaaagttcatcttgcagtctattccggtttgctcttgatcgctttgtacgtcactctcatcgtcacacacgacggctccaaggctgaaatagctacggagtcacgtcctcgtatggccggcgtgtcggagaagagcaacgacggggtttggatatcatccgatgatcggaaagttgaagcgttcccgtggaacaatactattttgtcatggcaacgcacggcgttccatttccagcctgagaaaaattggatgaacggtacgaacaaaaagaacttctttctaaaagactattttattagctattaataattgattaaataaatccgttattgattttttctattgcttaaaatagcctaaaacaaaaagt

SEQ ID NO: 11218 - DNA, 921 bp, Arabidopsis thaliana landsberg
tatccgttgaagatatgcccactaacacgaaacatggactccctaccggtaaaataaaaggtaatttagaatgtcagagaatattaatccgtcacacatgcatgcattataatatcttggtttcccggatctttccaaaaaaaaccttgatggaatcaaatacacattaaatctttccaaacttgatggtggcccggatctttccaattatattcaaggtttaactatattgacatattcgttctaaaatgttatttcgaaacatatatatgtaggaaccaccatattggaagccatccagaaagcagtagatcccactactgaggttgtctacgtggaggaaccaaaccaagatacagcgaagcttcacgccgacgcagcatacacaattgtggtcgtcggagaaaccccttacgcagagacatttggggacagccccacgctgggtataaccaagccaggtccagacacgctcagccacacgtgtggtagtgggatgaagtgtctagtgatcctagtcactggacgtccgctcgtgatcgaaccttacattgatatgctcgatgctcttgcagtcgcatggcttcccggaaccgaaggacaaggagttgctgatgtcttgtttggtgatcatcccttcaccggcacgttgcctcgcacgtggatgaagcatgttacccagcttccgatgaacgttggcgacaagaactacgaccctctctaccccttcggatacggaatcaaaacctaaatcaataacgtacgataaccatgtatttatatgaacaatgtaactgtaacactttcccgatcaatattaattaaatttctgttacatatatgcaatcctatgttagaaattccatatcaaaattgaaagaaacctacaacaatatacataatgtggactatggccatgaa

SEQ ID NO: 11219 - DNA, 1083 bp, Arabidopsis thaliana landsberg
catgtaaaataaactcaaggcagataataaatactattcaacttccaattactcattagtcaatacaacaaaatgaatcatatttatacatagctctgctccacgatctcgattactttcctgttatattctcttttattctcactgaacaaccttgcagcctctgcgttcgcaggtgagtcagggtttgggtcacagagcaaagactgtaaaacaaaaggtcttggtttagttcatgcataacccccacaatgcaaaagatacaaatgaagaattcagaagtcaaaacctgaattgatgtgagaactgcagcaacgtcgtagatggggctccactggttttgcaagatatccaagcaaatgcttccatcagcataaactgcaccaaagttcaaaatatcaaagtcgaatttcctaattggtctattactatgttgttcactgaatgcttgggcttactgtttggatgaaacatccgtgaaacaaaccgaacaatcgggggtttgttcggataatcctcggtgaagtgaagagtcaacttgaaagtacctgatgaacacaacagactgattattttagctataagtttaactcatgacaatatctcggtctgcagcaatagccaataagtactgaaagataattacctccatcccatggagtgtcctcaggtctgcaaacaaagacaatgaagaaataagtttacaaagccatgttttgaagagaaaacaaaacaaaaagttatacccaaagatgagagcattccaatgcatgatattgttatcttgtggagctccacttattcccacaggaggatctttctgcagtctcttgaaatcccacatcagtctcttttttgctggagttgtcattgctgttggaaattcacagactgcatccaaatatgaaagatttcaactttactcttacaaactcatttcataagtcacaaagtaagagcaattgcatgaactaggctttaaatttctgattaaagtttcaattttttttcagacccaaaaaaagtagaagcagagaccaagatctacatttctataacctatcatcatagtttaacaaagac

SEQ ID NO: 11220 - DNA, 706 bp, Arabidopsis thaliana landsberg
  unsure (1)..(706): unsure at all n locations
attgggtagtgaagtttttcttcactttggctagagccttgcatgtatgagaggtaatcgtgtagactcgtgttttgcaaaactctaattgtgtgcccccctaggcatttcaaaatgaatttcgcttgatgttttctcctatttttgagtgcatatgtgatgctttaacgttagtgctcataagttgcatttagcatagttctcaattcaagagccaagcaatagtagttatgcttagcccccgaatctgagtagtccgtgctttggaaaaactctattcttcccttattcaaaacatttgatttgtttgtgcttatcattgctgagcttgtgtgttttctttctttttaagaaaggttttctctaaaaacatagttcacaaattagagctaatccttaccttatgcttccattctcatcttaacccatctcaagagaaaagtgccttacccaagaagatactaggaagcttacccttgaagcatggaataagctacagaaggaaccagtccagccactcagtcaaaaggaccgaccgtgagaatcaaagcactgcccctaagtcaaagtaaacagaaaaagaggacaaaaggagttattaccatatagagaggcaaagattcttggaaccagagaccacaaacatcagagtcttaaccccaccacttaccgtgccccccgacacgtgcccgctncatgcgcacta

SEQ ID NO: 11221 - DNA, 513 bp, Arabidopsis thaliana landsberg
tatgtgatgctttaacgttagtgctcataagtcctggttagcatagtcctcaattcaggagctgagcagtagtagttatgcttagcccccgaatctgagtagtccgtgctttggaaaaactctgttcttcccttattcaaaacatttgatttgtttgtgcttatcattgctgagcttgtgtgttttcttttcgttttttcttaaaaaggttttctctaaaaacatagatcacaaattagagctaatccttaccttatgcttccattctcatcctaacccatctgaagagaaaagtgccttacccaagaagataccgggaagcttacccttgaagcctggaacaagctatagatgaagccagtccagccgctcagtcaaaaggaccaaccgtgagaatcaaagcactaccccgagtcaaagtaaacaggaaaagaggacacaaggagttattaccatacagagaggcaaaagattcttggaaccagagaccacaaacatcagggtcatcgaccc

SEQ ID NO: 11222 - DNA, 1823 bp, Arabidopsis thaliana landsberg
  unsure (1)..(1823): unsure at all n locations
gcagaagcagaggaagaagatattgaggaaactgattccgaagatgattaccgcatcgctatgccaagcaagccgagccacttggacttcgggaaatctactgtttcgaaggctgatttgtccaagatggnnnnnnnnnnnnnnnnnnctgaaaatcagaagaagttgttgcacttcggtggagaagagactaccccgaagccagagaaggatgagattgttatttttaaaagttttctaaaggctggattaaggttccccctacatgggattattggagaggtactgaagaggttcggtatctattttcatcagctgacccctaacgctatcgttaggcttattgtttatatgtgggcactccgaagccaagcagtggaactatttgcagacaacttctgccgggttcacgagctacattatcaaacaaaggctagaaaagatgtattacacgataattttggttgctataactttgcctatcggaaaaccgcaaagtttcctgtaatcagctaccgaagcaaatggccggcaggctggaaatcagaatggttctatgtcaaggttgatgagaacaaggagaagcttgtgcaaagtccactcgagctaactttcggagaaacccgaccccactgcaacatgacaccagagggtcaaactcaacgggcaatggatgaattcagaatcattgcagagcatattggtaccagggatctggttcaagaattcttagcattcaaagtcttccctactctgaaaaaatgggaaatgccaaagttaaagggggagaagaaggaaggggatcttgtccggcttccttaccacttcaaattcaagaaatattttaagaagccctgccaagagtggctggacacagttgaggtgatgtgtaatgaaattcttggaaattattcgaaaaaagaagatcaactgatgacagcagccttcggtacccgtccgaagcgaagggtaaaccgagtgatggatgctataggttttgaatatcctgactacgagcgactagacaagggtgccgaacgcaaaaaaggaagagagtagctagtgctctgaataaagacgacgaagatcaaccgaagaagaaaaaacaagagtctgaggcgaaaacagttgctccgaagaaaagaaaggcttcgactccgaagcaaaaaccaattgatgaagaagaagggacttctgcgacaccctctactaccgaaatagaggaaatcttaaaggtaatgactgaaactttgcctgtcaaactaagtccactggggctacatctgacgaagctttttcagaaggaaaaggagcccgcaaaaatgaaggcatctaggccaaaaaggcaaagaatcgttactatgacagaagtcattgaagcaacaccaccaggagcttcagctccgaaggtgccggctattgaaagcatgacagctactgaagctataccttcggaggctgctgcagaagaggccagagccgaagatgccaaatccgaagatattaatttagagagcatagctgctgatatagataaaatgctactaaacatggccacagaagaagctgctgcagccaccgaagagactacggccgcaaaacccgagaaagaagagatgaccgaagatacttcggaagatgaaacctttgactttcaaaacttagttggccaagagctgacaaaagctgaaaaagaggaactaaaagaatatgctatatcctgcgggtatcggccgggagcgcttctcttcggtggtattgatgacgaaagattaggctgcatacgagatcaaacgggcacgaaggttatcgatactctatca

SEQ ID NO: 11223 - DNA, 558 bp, Arabidopsis thaliana landsberg
ctgtttactttgactctagggcagtgctttgattctcatggtcggtccttttgactgagcgactggactggtttcttctgtagcttattcgaggcttcaagggtaagcttcccggtatcttcttgggtaagatacttttttcttgagatgggttaagatgagaatggaagcataaggtgaggattagatctaatttgtgatctatgtttttagagaaaacctttcttaaaaaaataaaacacacaagctcagcaatgataagcacaaacaaatcaaatgttttgaataagggaagaatagagtttttccaaagcacgaactactcagattcgaggctaagcataactactattgcttggctcctgaattgagaactatgctaaatgcaacttatgagcactaacgttaaagcatcacatatgcactcaaaagaggagaaaacatcaagcgaaattcattttgaaatgccctaggggcgcacacaattagagttttgcaaaacacgagtcttcacgattacctctcatacatgcagggctctagccaaagtgaagaaaa

SEQ ID NO: 11224 - DNA, 705 bp, Arabidopsis thaliana landsberg
attattgtttcttatgcatatactatatttcatagatccaacattaaaataaactaaatgttattttagaccattgttttctttaaaataattgttgctttttgcccacagaaattaataatgtgttgttttaggattttagtgtaaattctgataaataatgtctaaactttctctatataaattaatgaaaatatgaaataatttttttcttcttaattcgcttgaaaataaaaaaaatgacatgaatatggaaaacatcattgtgaatttttttgttagttagtcagttaaagtaaagattatggaagttttgttttggtaaacttacaaaaacaaatattaattgtaacaaaaattgatttcaaactctctctctttgtcatttatataactttatttttcacaaatcccaatgcacaactcaaaaattttagagtgtttaaagtagataatgcaaacaaaaaactctcaaatcgatttgatattaattaaatgaatctcttgatcttcaaattgagttacaatctaaccttttctatttaggtaaaatatgaaagtttattttagaacttatactgaacacagagacgtaacgaagagaaacagaaaactaaaaaatatgttgtaaatacgacaaaagactataaaagttaatgacattcacgaaatttacacgttctgatggtcgatgatacaaggaaa

SEQ ID NO: 11225 - DNA, 684 bp, Arabidopsis thaliana landsberg
ctagagagccttagttaaaataaagttgatatatctaaaaaaagcaaaacacttttataaaccaaacaatcttctattcaatcgcggtagttacactctaacttagttataataaacgaaaacgaaacagcatatgagttttaagagcatttatgctctgttttgggctgtaataactttattttccctttttatcagtatttttacacttggttttttcataatgaaatattagactgcaaaaaaaaaaaattaaaataaatttttcttcttaattcgcgagttaaagatcaaaaataacatgaatatggaaaacatcatattcattgattgtgaatttttttgttagctagttagttaaactaggaactatgaaagttttgttttcgtaaatttacaaaaacaaatattaattatgacaaaaattgatttcaaattctctctttgtcatctatcgcctgccattatctttcactaatcacaatgcacaactcaaattttttggagtgtttaaaatagataatgcaaacaaagaatctacccaaatcgatttgatattaattgaatgaatctcttgatcttcgaattgaattacactctaacttgtttttttttggttaaatgtgaaagtttatttttaaactttcaccgaacacagagaaacagaaaaccaaaaactatacc

SEQ ID NO: 11226 - DNA, 433 bp, Arabidopsis thaliana landsberg
attaattctatgctcttttgtcgcatttgcggtattgttttttttttttttttctctgtgttggggaaaaattttaaaattttctttcacatttaaccaataaaaaaaagctagagagtaattcaatttgaagatcaagatattcattcaattaatatcaaatcgatttgggtgaattttttgtttgcattatctattttaaaaaatccaaaaattttgagttgtgcattgtgattagtgaaagattatagtaggtaatagatgagaaagagagagaacttgaaatcaatttttgtcatatttaatatttgtttttgtaagtttacgaaaacaaaacttctatagttcctaatttttaaaaccttaacccttttaaagctaaacaaaaaaaaattcacaatcaatgaaaatatgactttttttttcatattca

SEQ ID NO: 11227 - DNA, 481 bp, Arabidopsis thaliana landsberg
tattattttatactaaaaccaacaattaatcgtggggtgagggttttcttgtaatttgttaacggattttgtcctaaacgaacaacttgcatgggccaacaaacaacttaattattatctttgtaaactataaaatataccttcgacttttactacttctggctaaacacatcgatcaaaagtccaaagcagaataaaccaacaaatgaagattcagcttgtgttcataccatcgcctggaataggtcatctcaggtcaaccgtcgagttagcaaagcgacttgtccgcagcgatgactgtctttcgatcaccgtaatcatcatcccttaccctttcattagccacgacgacgttgaaaccacctatatagcatctctcacgaccgcatttcaagatcgtcttaactacaaagccatctccgttggaaattaaccaaccgacaatcaagagccaactcaagtttacttcgagaaacaaaac

SEQ ID NO: 11228 - DNA, 1426 bp, Arabidopsis thaliana landsberg
tggaagagttaacttttcccacgagacccaactattcttcctcttatcgggcttgtcatctcaccaaaaccgggttagaatagactgaattcgtttgcagagcaagagaggtatcttaaaccaggacattgcatataagggcatagctgctaacaccactttgagtaaaacttgtttacccgcagccgataaaaaacgagtagtccaactatgagacctttgacgaatcctatcaacgattgacgtgaaaatgtctttcttcctttggccaaaatgttcgggaagacccaaatactttcccactccaccttcttgtgcaattcctaaagtgagtttagcagccatcttgctcgctaaagaagctttgttagagaaagtaatggcgaacttgttgaagttgataacttggcccgatgcttctccgtaccgagagatgatttccataagtctattacagcttttttgattagagcggcaaaagaacattgtatcatccgcaaagagtaagtggttaataggggggctacccttggccactttaatcccgggaagctgcccactatcttgagctctttgacacaaaccttaaagctcctcggtacataagataaagaggtaaggagagagagggtccccttgacgtaatccctgagaaggcaaaacctgacccttaggcgaacctttaacaagaaaggagtatgagaccgaactgacacatgccatgatccacgatgtccatttgtcatggaaacctaaccggcgaagaacagcttcaaggaaggtccactctatcctatcgtaagctttactcatgtcggtcttcacggccattgagactctcacacgcgcatccgaagttcggagatagtgcaaaatctcgtgggtgatcaagacattgtccgagattgcccggttaggtacaaaggccgactgattaggtgagataagctttgcaaggagaggttgaaggcgtttggtaagcaccttagcaattatcttgtaatgcaccgtacacaaagcgattggtctataatcagcgactcgtcgtggacttgtgatcttaggtatcagacagatgtgtgtttcattaagctgacgaggaagaaaacttgactcaaagaaacgcttactatccagcgaaacatccaaaccaatgatatcccaaaaagattggtagaaacccgctgaaaacccatcgggacccggagctttatcggggttaatagaaaacacggcctccaaaaaagtttctctgcagaatacagcttttccagcttggccgtacactcatcaataaagctcttattaggagaagactctgagaggcccacctctaacgcatcttggacttctttgataagccttttgctattagagttctgggctttagtccaccgaataattaaagcccgacaacaattgatct

SEQ ID NO: 11229 - DNA, 1028 bp, Arabidopsis thaliana landsberg
ggctctatagaggaagagcccttgagaagctatgagccttgagcttcagttaacacccaacctatacccgccttgctattggcattcacccatgaggcaaatatatctacaaaatttagataggcaaatattagttcagaacctcaagccatttaatctaaccaaaggcccaatacatgtacaagttaaggttggcaaactttagttcattacttgagagaatatatagtagagaggagtcgtaaatttttatgaatcacattttggcaagcacatgtttcgtgacttgtaagaaaatcttgttcacaagcttttttgatatgttaaggaaatatgttttctaggaagattaattatatctgcagtttatggatttcccatttttactttcatggtcatttcaggctagcaatgctctcatacaacttagcaacaatttcatgtttagagaaagaacaatcttttgaagcttgcacattttgcaatttcatgcttggatatatgagccacacactacactattgatattgtttaggctacttttactaaattcctgttctaatgttcatatatattccttttccacactggattaacaacattagtcttcattttatgaaactattagtaatcctttagcaactaggttcacattttgtcgtttatggtttggaataatttccctgcagtttttttttcttcttaaagaacaaaaaaaaaacgggaacttgtaatgattggagctcgcgtcttttgtatcaccacgacagcactacgaagatcaccaatcttcttcttccccaagatcccgacccgacccgttttcagattatcaccagctactagacccatcgtcgccatgagcaccaccagcaaaaaccaagaggaactcgattccattttcaagcagaagcgggtcgtgcgctccactgtccgcaaatccctaaaagccatggccccttctctccgaacccaacaaggttcaataaattttatgtcctttcttttttttgttctgttttcaataa

SEQ ID NO: 11230 - DNA, 1607 bp, Arabidopsis thaliana landsberg
tgcttgatctcctcaccacttgaaattcttgccaaattccaaaagttacgaccaaattctcccttctgatgtctcacatcaccaactttcaccttgtagaatatgggaataacttttaatttgttttcttctgctagtttcttcaccgttgctagttcattcaagcaccatttgggttgtgcatatttcccagaaaagattgctagtacgatcttcgactcctcgatccttttgaagaggtacgtaaggtcatttcccctttgttcgtatttgtcaatgaagaaatatattccgtgtacttcaaaggcagcaacgaggtggctgatgaagccatagcgaatgtcctctcctcggaaattgatgaacactcgaggttgcaactgcatcagcgaaggctggagtgatatgagaaatggccaccatggaaattgtcatgttgtaagactgatttgtttatactatagagatggcaagaaaaaacttgaaaccctaattgttgtccgtgggaggaaagaagttgtttatttggttcgactcgaaattaggtttttctagtcagaaataacgattagaatgttcaagattactagaggattctaatcaagattaataaaggcttgagagtctatttataagttataagtaaggttgtatgtcgttgtgttctccgctaatttttttttctattaattaaatcacaaaacattataagaaatgtttggaagaccacgttcgcatgaactacatgaaatgtgtcgcgcactcttacatatatcatccgctcagtttaatagttgaaaacgatgttaataatatacatagcaagtacaaagtgtgtaccataaactttaacgaccttcggaagatgcaagaaacaagaagctagcttgagaacacatagtattggtatttaatgaataaataataagaatatgacctaaatgatgatatgtcagttatttttatgatgatttgtaattaactaatgaggcgaaatcagttgtactcaaaacttcttcatactaaaactctaatgttgaaaattctacattgcaaatcaatttgaaattttaaactaacctagaagagttgtgtaagttcttttacaatatatataggttggggttcgatttctagagatagtgaattattgaaaattaatgaatataagtataattaaaagttagcgtggtggttttgtttttttgttatacattgatcagtaggaataaagtgagcgtttggttatatattttggtcgactttgatgacgtttctcgttcactttcaggtattatgctcactattcaccacgtctcataaagaggggacaaacaaaaatcacataattagtggtagacataaattgccaacacaaattaaactcgtgtggagataaatatttgacttacaaagatgttgattatttcttcagctccaagggatattctaaggaatttcttacaaatcgagtactggtatactgattttaaaagctactcatagcacgatctagtaaaaatttgattcaaaaataaggtataagaataaattaagtgccggggttattggtcataaatttggctttctgttattaaataaaatat

SEQ ID NO: 11231 - DNA, 266 bp, Arabidopsis thaliana landsberg
tcaaaacagtataccgtatagataatctttttgggggatgtgttagtatatgatgaacttcctacaaatgttgaatttgtttttatattgagatatatgcaaacccattccatgcattatgatatactaaaaaccttacattacttgtgttaaaattatttgtgctctacaagcatacctagaaatcatagttaaaacagatgataaggctttgctttttttggaaacaatgtgagtcccttagatcacactaattaggtacgtag

SEQ ID NO: 11232 - DNA, 239 bp, Arabidopsis thaliana landsberg
  unsure (1)..(239): unsure at all n locations
ttttttgggacaaataccactacattcatatctgnnnnnnnnnnnnnnnnnnnnnnnnnnnngttaattggggacaaatttcataaacaaaaaatacatcactgtatttctctctctcgggcaacatcgtaaatactagaataatagctccacaactatagctctgtcaaacgatcaattgaggcttactacttccacggtcaattacggaggaacaagcttccttataaacaacggtg

SEQ ID NO: 11233 - DNA, 1153 bp, Arabidopsis thaliana landsberg
tatgaatatgcaaaagttatttctactactattaatgtaaatgttgctttgaatttaagttgttagtttgggttttacttttggacacacaacttgtgtcatccaactattattaattctcttttaccattttttgatcatctattaatatttaggcaatatatttgtggtaaaaaagacatctactaaataagtagtgtatctttggtgttatttaaaatgaattaaattctcttacaatgtcattcgtgtttttgcaaatactaaggttgaatttgactatctggattctggtgcatacatttttttttttttttagttagcaaatctagtgtgacttgtgtggtaaacaatttgtgagaaaagaaacaactaaatgataagcgaggcctagttgcctacatgttattaaaatattaaaccatgtcgtaaagaacaaaagactttcgatcgtggaatgcaccaaaacgcattaactcatatgaaacacaaaacaaataaaaataaataaatagattgatagataaattgagatcttaggaagaaacaatttcttccaaaacaaacatcgaaatttaatgattctttcttatctttcaagaatcagagtctttcttcttcttatggacaagattcttcatccacttgaaacttacgaaatcaacaatcttggctgatttggtttggccagagttcttaccgccggcatctttcttgcttttggtgttgtcttcctccggcatctccccgatccctccggttccccattgatctgcccaactcggtgcttcacttgccatatcaagatatcttttcgcagactaaatagccaaaaattataggtagatatcaaaatgaatccttcaaccaatcaaagaaagataataaaacatctagagatacaaattattcgtttttcatattggatcaaagtttgaattatgttcataactaagaaaatagaagagaacagaaaaattccctgtaatgtcttgagaggtcttctttggagaagaaagacgattttgatttagcaaaatgagtgccaacgcggagaatggagacaaatagtccatgtgttgttcttttctttattacacaacgtgtaaaatattgtagtttatgatgcctttttcttaaaaaaaaaaatctt

SEQ ID NO: 11234 - DNA, 905 bp, Arabidopsis thaliana landsberg
cataaactacaataaaaaggacaaagaagtgtttcaacaacacttcaacaagaaagccttttgttcaatctgaagaagaaaagagagtcaacaaaaaaagaaaaccaatggaagaagaagatcctacagcaagcaatgtgataacgaattcgaattcttcatctatgagaaacctatcgccggcgatgaatactccggtgtttcacttgagtcacgaatcaatcgattaatcaatgctaatcaatctcaatcaccatcaccatcatcactatcaaggtctatatactctgatagatttatccccagtagatccggatccaatttcgctcttttcgatctatctccttctcctagtaaagatggtaaggaagatggagctggctcttacgctactctgttgcgtgcggcgatgtttggtcctgagacgccggagaagagagatattactgggttttcttcttccaggaatatttttaggtttaagacggagactcatcggtctttgaattcgttttctccttttggtgttgatgatgattctcctggtgtttctcatagtggtcctgttaaagctcccaggaaagtgccgcgatcgccgtataaggtgacgatttttgattctggggttgatacattgtttagattttggtgttttgatcattgaatctggatcatgtcttgtgttttttaagtgggttgtgtgcattgtgtggaattgattgtttttttcttcgatgggtttttgtgtaatgtctgtagatttgggggttggggagcttagattcttgatctcgttgactttagatctttggtttcgataatgcatgaaacaatttgtgatctttgtgatgttttggtctctgagggtctagaatttgagtctgaggttatgtgatcttagatga

SEQ ID NO: 11235 - DNA, 1148 bp, Arabidopsis thaliana landsberg
gtcactgtgttttgttttgttttgtgtagtggtgatcatactgtgaagattattgattgtgaaactggaaactgcttaaaagttttgactggccataggaggactccttgggtagtaagttagtgaatgctagccccctttccttaacgttaatatgtatccttttctgcgtttgatatgtagtgcatttacaacacattactacgtatagataattcaatctcggatagtgaaatgaattttgctcatacttttggcatctgctctgttggttggttggttgagggctgttaacttatgtctgtgtctgtgtgctgccttatatctaatgttctttgagtttctacaggtcagattccacccgcatcattcagaaatagttgcgagtggaagtttagatctcgaggtccgcttatggaataccacaacttctgaatgcattagatctcatctattctgtaagttctaggaatcagaacactctgtttctttttcgtagttatgcctatcatcttaccagttttaatttcttcttgttaatctctcttgccagatcggcctattgcttctatcgctttccatgctgagggtgaactacttgctggtgcttctggtcataaggtgatttttcccttttaagtatcccacgaaacgctagctagttgcaggtggcacctccttacagaaagatctcataagtttaattcatgatattttgcagctgcacatgtggcactacaataggagaggagagggatcatcaccaactgttgtattgaagacgaggcgatctttgagagctgtacactttcaccctcatggggctccattacttttgaccgcagaggtgagctacctaattggaattcattttcttattttccattctgtctgcttacactctaaccttaagtggcaggtgaatgagattgattcattagattcttcaatgtctagagcaacatctatgggctacttgaggtatccgccccctgctattttgttcacaagcacggaaagcaatcaaactagtttggcagcagaaaatgagaacagaacatcgtctcctcctcttcccttggctacatccagtggtccttctggtccaaatagtgttccaagaaattcttccagcaacatatttctta

SEQ ID NO: 11236 - DNA, 587 bp, Arabidopsis thaliana landsberg
cacatccaacatgtttaggactgcaacacagcagttgattgttttagttatagctcacaagatatttaaccaaaattagtgaacatatactttttggaaagcttaagaaacgctctacaactttgatattgtcatctcaaggtgattagacacttaacaaggctaaatagtgataaacgatagctctgtccagatttggacagattcagacttgtgacttcaaaaattaataactaaagactcatgcatccaaatcaattgatcctagactttctggaaagctaatgaaattgtatacaaattatttataaatatttcaggttggtttaatatgtaccaagggtagaatacactatgaaggccttgttgtctagaactagacagattcagtcttcatacttaaaaaatctatatcttgagctttaaggcatgtttgatgtgctgcttcacacaccaaaccgcaccacacttttcaagccacaggtgtggcggtcgatttggccgccgcgggataggcgcggtgtggcggcataggcgcacaccaaacagacctttatacaccaaaaaggatggtttagactttttgg

SEQ ID NO: 11237 - DNA, 454 bp, Arabidopsis thaliana landsberg
gtttataaattaaatgtagacaattttattagctttccagaaagtctaggatcaatttgtttggatgtctgaacctgtagttgtgaatttttgaagtcgcaagtctgaatctgtccaaatctggacagagctgctgtgttagcacaattcgaccttgctaagagtctaatcatattgagatgataataccaaagttgtagaccgtttcccaagctttccaaaaagtatttgttcactatttttggataaatatttgaagagttatgcctgaaacaagtaactgttgtgttactgtccaaaaatctgcaagtgtttaattgattgttgaagtgacccttttgctaaaatggttgggtagcccctaattaatatagaccttgcatggctaaagtgagatacatatgggtctggtttaaaaggtccttccttaagtggattgtgaagtcgtattgtg

SEQ ID NO: 11238 - DNA, 609 bp, Arabidopsis thaliana landsberg
  unsure (1)..(609): unsure at all n locations
tttaattagctttccataaagtctaggatcactttgttcggatgtctgaatcttttgttgtgaatttttgaagctgcaagtctgaatctgtccaaatctggacagcgctgttgtattagcacgttttgaccttgctaagtgctgaatcatgttgtaatgacaataccaaagttgtagagcactttttaagctttccagaaaatcctagtttgctatttttggattaatatttgaagagatatgattaaaactagtaactgttgtgttgctgtccaaaaattctgctggtgcgcttttgattgttagttcacccttctcgctaaaaatgttcggtttgctcttaagtaatatagacttgccatggttaggctagagatgacatgtgtgtcttgttttgtatgtttcttgctctagttgattgtgatagaggagtccacgacattgatgcatcggtcctctattaaacttgtgtttgtgatgcttttgtgtgattgatagaagaactaaggagaagctgtagcaagttaaataaatgtttatacttgtgatgtcctgttgtgttggttaattaaagcagcaatcgtngtccttcgagtggtgttgatgttg

SEQ ID NO: 11239 - DNA, 455 bp, Arabidopsis thaliana landsberg
  unsure (1)..(455): unsure at all n locations
ggtgatctgaagattgggttaatgatgtttaaactctgaagactgaatctgtccaattctggacagcaaagccttctagtgtattttatccttagttaaatattgaatcaccttaagatgcttataaatgatatgtagacaattttattacctttccagaaagtctaggatcaccttgtttggatgcctgaagcttcagttgtgaatttttgaagttgcaagtcagaatctgtccaagtctggacagtgctgctgtaattgcactttttgaccttgctaacaactgaatcctgtggaggtaaaaataccaaagttgtagttcactttttaagctttccagacagtcttagttggctatttttggattaatatttgaagagttatgattaaaactagcaactgcggtattgctgtccaaaaattctgctagtgcgctttngattggttagttcacc

SEQ ID NO: 11240 - DNA, 492 bp, Arabidopsis thaliana landsberg
tttattgtgtttgaagcgtgaagactgaatctggggagtttgtgacagtacagactgcatagtgtatttcacccttgatacatgctaaaccagccagagatgtttataaataaattgtagaacatttaattagctttccagaaagtctaggatcactttgtttggatgtctgaatcttttgttgtgaatttttgaagctgcaagtctgaatctgtctaaatctggacagagctgctgtgtttgcacaattcgaccttgctaagtgtttaatcaggttgtgatgacaataccaaggttgtagagcactttttaagctttccagatagtcctagtttgatattttttggacttacccattgaagaattatgattaaaacaagcaactgctgtattgctgtccaaaaattctgctagtgctcatttgattgttagtcacccgtttggctaaaaatgtttggatagcacttaaaataatgtagacttgccatgact

SEQ ID NO: 11241 - DNA, 1382 bp, Arabidopsis thaliana landsberg
aaaaaaaaaactcatgttattcgctcgttcgtcttcgtcgcccattgaagatgtcagaccagaagtcgcacgcgagccttataattgtgtaatccttagggttttgctcgcgatttctggtactattaggtttccgtcgatttcttcgtcggataaaaaccctcttcttcgccggagggagaacacggcgagaattacacagctatccttcgaattccgtcgctggttagcttaggactttctgattctgtcgctttaatcttcttctctccatgacacaacgggtattccaagtctggaaaggaagcaatgtaagtccttttttcatcgaatgattgagcctggaattttattggttttttgtgtgttttctctttgttgggagatgaatattctctgaattctgttctctggtatgaatatgatttggaattcgttttttctcgagtttcacctgtgtagcataatcttagttacgcaattggtttactttggtacgtgtaaactaatgttgttgagctgaatcgttgaagtatctcttgattcactctcaaagcatgaccatgcatttttgcataaccttgtatcaagttgaatgttccttgtaatttattaacaattggaagtatcttcaatgcttgactcttcacatgttttaaattcagtatggtgataccaataaatggtccctctctcttttgcagaaattcatcctgggtgggagattgatatttggaccagatgctaggtcactgcctcttaccttgctattgatcatagttccggttgttttgttctgtgtatttgtagcaaggcaccttcgccatgagttctctccctacaatgcgggatatgctatcatggtggtagcaattcttttcactatttatgtaagtcttctccgatacccaatctgatagtcctatatatctcattgttgtaaatatttgatttctgattttatgtttgtttcctgtttgcttactgcctaatcgggtaatcaacaacatttatcagctatttcattgtttgtttcttacccggcttagaagcttaaaccctgtcctcctgttctgtcacttgttgtgtggcattcaggcgttgttattttttgcttttctgaatcacgaatttgggtttgataggtattgatcctcctcttcttcacatctgcacgagatcctggtattgttcctcgaaattcgcatccaccagaggaagacctacgttatgagacaactgtatcagctgatggaagacaaacaccgagtgttcaaattcccaggacgaaagaagtcattgttaatggcgtttctgttagagtgaaatactgtgatacatgcatgctttacaggcctcctcgctgctctcattgctccata

SEQ ID NO: 11242 - DNA, 1251 bp, Arabidopsis thaliana landsberg
cagccctaacatctcgaattagccacttaaaattaagccggttactaatccgtgtgagcatatatggtctacgagaaaaagaaagcaattgcctgttgcgcaagaaacaagaagaataaatcctgattgaagcaatgatgaaatttcatctttaccaaaattaatttaattattgtggatttagtatatatatcattttacagatttgagctgaaaaaaagaaaagagagaaaaaaagtaagagacttttgaaattcgaacacacaaagcaaattaaatcattataaaagtctacggatcacgtaacacagtcaaacaaccctaatgacaacaccatgttgaggctctacaaggagtttatggcttggagagtgctgataagtcggggaaagagtaaaactgaactttgagacaataagtgaaacaagcactttcacttccatcataccaaagtttttgcctacgcatgttcttggtccaaggccaaatgggatgtatgactgagggtatttgcaagccttagagattccctcactaaacctctctggcttgaagtcgtttgcgtctggtccccagatctcggggtctcggtgtaaggcaggaatgagtgtccaaatgcacactccttttggcaccacaaggtctccaagtcttatgtctttggatgcttctcttcccacgattggtgctggtgggtatagtctcattgtttcttgtattaccattgtcacctattttataacatttatatatattaacaataaaatgttgttagatttttaaaataagctacatttatacactgattttgtgtataaattcattcaatgtaaaattctctaacgttttctttatgattataaattaaagattaccgttttgagattaggaattgattctgcgtcgggaatgccattcttgcaagaactcaagatttcatcgcgaattttaacctgccaactaggattgagagcgaggagcataaggcaccaagacactgagactgcggttgaatcatgtccggcgaaatagatgctcttgcaattgtccaccacaaaccgtctataggctgacttgtcccacaagttaccatcgcagcttcgcatcgctccctcgagtatcaactgcattagatccttcttgtgagtatccttacattcaatttccctctccttaaccgtttcccatatagaagattctaattccatctcaagcgcatcaatatccacatcaccatgcttcttacttcca

SEQ ID NO: 11243 - DNA, 1806 bp, Arabidopsis thaliana landsberg
atatcaaacatgcgacatattactattttggtactccatgcttactcctaatagacggtgtcaactcactcactttcacagaacttggtcctttaacttcggcctttagagtccaattctaactttcaaactgaaccgaatccaatcttaatcttcctaaggactaagtgaaccgaactgaatcttaatttttgttcaatttggtaggccatggacacttcaatcctaatacaatagtactgttttcattttttcttcccttccaatctcgagagtattcaggatctctagatctcaatttttattgaattacatgtgttatttactctacttcgtatttttattttagcaagtactttttggataatcaagaccaattcaagatatatagtctggggtctaatttatattgctcagttgaagttttattcggttatcttgtacgtgacattatcagcgtacgtgtagccaaaactgtctgtaactgtgtgtgaaaactacataataaaacataattgtacatgacatatatcttttggtgtatcattgagtgtctgggtcattcgttttataattccaagaatgaaaaattcatatgataaggactttcctttaaacttcccaagaataaagcatattcgttgggggtatggattcatccggtaaggtaatcaatcttcacattcaaccaattagaataatgagttgtgctgagttattacactcaatgaaaacttttgtttatttgcgtcgaacaaattagccatgtttgtgaaaaaatcatatgaaggtaaaattttattgaaaaccaaatgataagatttaactgatacaagaaaaagttagaaaactattatacacataaattaaattttgtatacacacttaccattttctttactattttggtaaattttgaattaacttcaaaatgtatatgtcataattgtcatattgtaaatatatactactatttaattaattaaataagtacgacaacgtggaaaaagagacttcatagttataagtcataaacaaaataatatttcgtggaaaaaaataaaataaaataaaaagtttaaattaatatgaggaaaaaattgacttgttcttccccgctctgctcgctgcgttagcactcttgctctctcatattcattctcatcacaaaccaaatcttgctttcgcattcctcaggtttgtatcaatctcaaagcccctttacttctagatcttatcgtcaaagtttcctccttttacgaatccaaatctgctgtgatctttaggtcaaaggaacccattttttgaatcgttttcttcgatttgatattaaaaaaaaacttatctttatgagtccgatgatctaaagtttcatgctttctctaatcttagattgtaacgatggagcggttaacatctcctcctcgtctaatgatagtctccgatcttgacgaaacaatggtaaaaacgcaaatcttgattcttcctctgttaagaacagaacaacgattttgagttttttcttttgcttttgatttttcaggttgatcatcataaagatcctgagaatctagctctattgaggtttaattcattgtgggaagacgcttatcgacacgactctcttcttgttttctcaacaggaagagctcaaacaatgtacaagaaactgagaaaagagaaacctttgttaactcctgatgttatcattacatctgtaggaactgagattgcttatggtaactcaatggttcctgatgataattgggttgaaatcttgaataacaaatgggaccgaggaatcgt

SEQ ID NO: 11244 - DNA, 1560 bp, Arabidopsis thaliana landsberg
atggtcggctgttgcaattgttttcgtaagatctggttatgttttcatataaaagaaccaagaatttgggcatgggaagtttaaaatgtttccatttttggttcttgattggttctgagacaaaccaaaacagagtcaatcaaccagagtccagagaacaatacaagttttcacaatttactattcatgtccatgtgtaagacttgtgatataaagttggagacttttatggaaaccgatgtatcaagaaacaaattgtgtctccggacgagtctagcattattctatattctgagcatcttccttctggcagtaatattcaaatttgagctctttaggttatctcatggtcctttgcttaatcatgaaaagataaatcctttggctatattttgatgttactcatagacttttagttaactctgacttcatcactggttctatttcttagtaagtaatagctataagctataagaataacctgttccttttgtggctctatttactgactttacctttggtcagaaaggcaggagtactggcttcacggataagaaacaacaagaagtttggtttttcaaagtcaaaaacagcatggtttcttgacctttgagaagtaggtaggattctttagggggatgtgtaagccagtcatatattgcaggtctcataattgatgattcttccatttgaaacttaaacatagataaatgaaaaaagtttctctaatcacaatggttatgaatcatggtggaagatgatctaagcattattatctataaaatttattagttgtagatttgtagatctaagcttaaaagaggaatgtcatgtttgattacatcaattatttgtagattgtaaatattttagtccttgtcgcaattgttttggcagcgtatcttttcatactattgattttcaatacaaaaaaaaaggtaaataaaattcattttcttaataaaacaaggtttgtgtttaagaccaaaagtaagatacaacccgtaagcttaaagccatatttgcaaaaataatttcactttaattatagcttaagcaaactaaatcatataaaataaaatttgttaaaattcagacttaatcttatatcaatcagctaaaaatgttcaaccatatgctttatgatttatctaatcaaattgactagacttggcaaaatacccgaaaccaggaatcaagccaaatccaatatggatccgaattcgaaattttaaaatacccgaacagattctaaacatcaaaatccaaaatccggaaatcagaacccgattcaaacctgaatccgattaagtacccgaatatatccaaaatatatatacataaaaataatttaatagtaataaccatatatacaacaatttaagtgtctaaaatatttagattttaagatattttgtatatttttaggtattttacttacttttatatagattcggatagaaaatacttaagtttttctaaaattttttgtataatttaaaataatttgaatatacttttgtacaaaatttgaaatttttgatacttcgaataaatctg

SEQ ID NO: 11245 - DNA, 835 bp, Arabidopsis thaliana landsberg
ccaaaactcgtcgctatcgatctccaggatggccaaatcacactcatgtgcaatcttttgaacttttgctttgtatttgacttgagagccatgtcttttgacgtgcacgaatatgtgatcattcatcccctccaccacatgagcgttcgtaagaattttctttcccgcgattgcaaatcctaaaaacatcaatttaaagccaaagtaacgcatacaaaaaaacaaccttgatgtgagctttgagataagcagtcacataccagagcccccatatgattcttggttaagagtctgccaaggtttgactttgctatacttggtagagtcagtgaagacctctaccaccgactccaacatcaattcatcaacgggaggactttttcttattttcttccaccattcctcatccttcgacatggtatggatctttcttccgcgagttaatgcaaacggaagaacaatagtagcgatccggctagagattgttatcgtcgggagtagagctctcgagtaccgggacaccataccaacacacgaccggaaaagcatattgataattcatcttagtgaaaactcgaacctgtgtgcgtttataataaattgccctttttccttttaattattttccatttttgcatgaaaacttgccttcatctatcattagagtaaataactagagaaaattgatttcctttttctttccaaggaactttctttgaactgaaagaaaatttatacatgttctatcaagtttatagctaacaaaaatgttgggagtacctgctaagatgttaaataccatgcgtatggttttacaatggtctttttttaaaaa

SEQ ID NO: 11246 - DNA, 732 bp, Arabidopsis thaliana landsberg
tgactcacttcatagtgaagtctcgatagactctctcttcatgaaatcatagtgaagtctcattactctctcttcatcttatttcttcttctcaaccaacaaatctctctcaccaagaagatgaacaatattgaagcaactctattcctctgcttcttctgcatcttctcatcttctaatgtacgaaatattcaatcttttagtttcattaacattttgatagatacataaccatttgcgtttttttgaaggtgcatttcgccggagctaaacaaaccgccggcaacatcacgtcatcggagaatccattcacaccaaaagcttctttgattcgttattggaacaatcatatcaatggcgattcaccaaaaccttcttttttcctctcaaaggcctctcctctaaccgccgtggactccacgcgtttcgcctcactcgcttctaatcacgcgcttaacacgcatcactctgatttctgctccgccgcgaaactcttctgcttccctgagctcgccgctcattccctggaaaaacacggcgatgacgtcaacttcgccgcttacagcggcaagaacttcacaaactacggctccgaccgtctctccggagcagactcattcaaaaactattccggcggtgataacatcgccgtagactcattccgacgttacagccgaaactccgccggacacgacgatggatttacaaattacgccggagaagtaacgtagc

SEQ ID NO: 11247 - DNA, 1104 bp, Arabidopsis thaliana landsberg
tgtattaatcttctcattccgaacaaaaaccctaaaagccaaaaccgcatcaccctctaatccgatatcgtacccactcatcggctctattctctccttcaacaaaaaccgccaccgtcttctccaatggtacacagatctcctccgtctctctccgtctcaaaccatcaccgtcgatctcctcttcggtcgtcggactatcatcactgcaaaccctgaaaacgttgagcacattctcaaaacaaatttttataacttccctaaaggcaaacctttcaccgacctcctaggagatctactcggcggcggaatctttaattctgacggcgagttatggagctcacagcgtaaactcgcgagccacgagtttacaatgcgttctcttagggaattaactttcgaaatcctccgtgaagaagtccaaaaccgccctcattccggtgctttcctccgccgtggactgtggagagacggttgattttcaggaggttttgaagcgctttgctttcgatgttgtatgcaaagtgtcgttgggttgggatccggattgtttggatttgacccgacccgttccagaacttgttaaggcttttgatgtagcggcggagatcagcgctcgccgcgccacggagccggtttacgccgtgtggaaagtaaagcgtttcttgaacgtagggagcgagaagaggttgagagaagccatcaagaccgtacacttgtctgtctctgagatcatccgggccaaaaagaaaagcctcgatatcggtggtgacgtgtcggacaagcaggacctgctgtcgaggtttctcgccgctggccacggggaagaagccgtgagggatagtgtaatcagctttattatggcgggaagggatacaacgtcggcagcgatgacgtggctgttttggttgctgagtcagaatgatgacgtggagacgaagatactcgacgaattgagaaacaaagggtccttagggttagggtttgaggatttgagagagatgagttacacaaaagcttgtctgtgtgaagcaatgaggctttacccaccagtggcttgggactcaaagcatgcagcaaacgacgacattttgccagaggccc

SEQ ID NO: 11248 - DNA, 739 bp, Arabidopsis thaliana landsberg
agagcccgttgaagccaggacaacgtcgtcgtcaatgactttgcgagtagcatgatgagacgggcataagctaattgtgatcgtcgagctgtaaaagacaataagctctagaagcctttcacaggaggtttgagaccgagctgtcaacggcgaggaactccaaacccttgctcacattctctccccttaaaaagtgagagtggtccttagaccacatccatgagcttaccttgaacgaacctcacaagctcaataatgctgatagtgtgtgctccctctaccaagttcacctgaagtcagctagcacagagcaagatcaaaacaaaaacaccaccacaccaaaagcccttagctttactagctcctctaaagcacaatctaaagacaagcaagtggcgagaaacgcagagcgaagctatcttcaacctttacacaacaccaataagcaaaccacaacaaaaccaggccttaaaccaaaacaaagacttgatatacatgtaatgctctcaattgttgacgacaactagataccaccgataactaaatcgtccataaatcaaacatcaccgcagctacacgaaagagtaaaagagtatctgattaggcgatagagcttgacttacaaaggggagaaacactctcctaaaaaatctgccactgtccacgagcagaagatgccaacagagaagcgcttctcccaaaaaccaagggttgtcgcctcagaaaattcaaaattgaa

SEQ ID NO: 11249 - DNA, 735 bp, Arabidopsis thaliana landsberg
tttagaagtaggattgttttggtattgtttttactgaatttggttgtttttaatatgcagaggtggggggtacggagaggaggatgcaaagaccgttatgatacaaatattgaatgtggttgctttttgtcatctgcaaggcgttgtacacagagatcttaaaccagaggtactaaaagctctttattggtacttatacatttgatgttcattgcaatctttatgaagttcacttaaactgtttggatcagaattttctttttacctcaaaagaagacacctctcaattgaaggcaatagatttcggtttgtcagattacgtgagaccaggtaaagcccttagattatatgctatatgtaaacttagattccagaacctagagaccagcatttgcttatatgcgttgacaattgcgcagatgagaggctcaatgacattgttggtagtgcatactatgtagcacctgaagttctgcatagatcttacagtacagaagctgatatttggagtgttggtgtgattgtatatattctattgtgtggaagccgaccgttttgggctaggacagaatcaggaatctttcgtgctgttctaaaagctgatccaagttttgatgaccctccttggcctttgttatcttcagaggcaagagattttgtaaagcggttgctaaacaaagatccgcgtaaaagattaacagctgctcaagccttaagtaagtgtagaatgcatct

SEQ ID NO: 11250 - DNA, 1149 bp, Arabidopsis thaliana landsberg
tggtatattgtgaactaatatatggaataaacaaaatgttgactgtcacacatgaatttaaattgttatggatttatatctacgaaaccaaaagggtgaatatcacatatggattaagtttgtcttagatatctatacaatgaagtttaatatattttagctcttcttgtcttcgtgtgtttttcttttactttcttataaatttttttgggtacatacaacgatatatgtgttttgttgatcaataaaaagttcaccttatctcgtagagaactaatcgagtgatggacggcgtttgttatttaatttgtggttgaaatttatcatctacatgactacatcatctacaataaaatgcaaaaatggctatattcttcataaaattccaaattctagtcacaaaatatcaaaattcaaagaaacgcaaattaaatacacacaaacgaaatgttctttccaagtaaaataaaaagtgatcatagttgttcgaagggtttctcgtcatcagaggggttcttgaaagcagtgcttccgaagagcatgaaacccacggcgaatccggcgatacgacaatgaaaactccaccgttaaaggacataacggcgagcatcacgagataagcaaagcctgtcttgagtgtgtagactgcggtctgaacgagccccttggcgcggctagtggagccacgtccacgaaggatcgaagaatgggcaagccactcgacgataacagcaaggaggaagacgacgatgagacatagaacgtacatgccgagacttgtcccgggccagccggagaagagtatctccgtgttctttccccagaagaaagtcatatgcatcatgatcatgttggaattggtatgatttaccattgatgatggtgatggtggtggcatgttaccatgatccattatatgataagtttctgaatttttttgtttgggacaaaacttagagaaaatggtttcgtatttattgaaatgttcttgttatcatgtggtctcttaaatgtgtttgtggttgtactcacgttttgacttgtcaaactttgtgtagcacaaataaaagtcaatattttagaaaacctcttaattacatattcatttatttaccttattttcatgatataaatggtaacacacaattt

SEQ ID NO: 11251 - DNA, 500 bp, Arabidopsis thaliana landsberg
  unsure (1)..(500): unsure at all n locations
tcctgacctgacgatggggaatgagagagagaagctaagcacaagaagataacagtcgatagaatgacaaaagagcgaagagctacctggaaatctcacacgagagggatataatccaggcaggacaggagatggctcacgggcagacaagggcactgaaatgacacaagaggtgagcatgtattagtcacatagtcataagtatatgaaatgtgagtaaatacatacacagagtgttatggcacagaaatcgagagttatggcgatcgagaggtcaaacgacgcgaaaacagcgtttggacgagaaatagtgacataggaggtttggaatttgaattaaggtatgaaatgatgaggaattgaaccgatacttcacgaataggtttatatgggtaaatatgagtgaagtgtttgcttggtatgaatttaggcaaagaaaatgaaatttagggactcggctcggaattgatcgcttgaaacagggaatngagtgaaattga

SEQ ID NO: 11252 - DNA, 508 bp, Arabidopsis thaliana landsberg
cgtttgatcaacctatctgggagggcaggttcgaacagggggcgcccaccgttcgtgcgatgaaaaaacaactcgcgatggcccctaagagagcaacctccaaggttgccatgtccattgacgacgaggcgaaggtagcactcctggcgacaaaaaggcaaagccctcgcggacaccacccccaagaggccttcaaagatgacgatgtgaacaacaagagacagcccaggataaccccacccccgacagcactgtgcgcacttgtagttccgagggcgcaccacaagcaccaccaccaagtttcgctccgccagagggtgaagacaccatataggatggagaagtcataggtatctcagccaaagaccagcttaagctacaagctttgcgcatcaaaaacaaccacctgcagaagcagaaagaagttctcgaagcccagcgccaacgagtcactatgctagccaaagtgcgtcagatgatacaagatgaggagcaaagagctcgggag

SEQ ID NO: 11253 - DNA, 1366 bp, Arabidopsis thaliana landsberg
  unsure (1)..(1366): unsure at all n locations
gactcgctcgctgctcaggccatgactcgatctttaaacatagagtcacttatggctgtctacggataccttcttgaactaaatcaagatacagaaagagtcatcattgaaagcaaagaagatgttttgaagaacaatgatctcaaggctttggttgatgtctatttcaaaagtacctgtaagaccttggacttctgcaataccgtcgagaaatgcgtcaagaaagcagaaataagccagcttatcattcgattcgcggtgaaacagtttgagacagacacggcggatacggatcttggagagagtaagaagaagaagtatgtgaaaaccttggaggagctgaacaagtttaaaggcctgggagaccctttcgatggcgagttcgtgacgcagtacgagtccgtatacgagcagcaggctatgcttctggatgagttgcgaacgctgaaagtaaagctcggaaagaaacagagaaatttaaagacatggaggatattgtcaaatgtggttttcgccactgcgtttgtgactgtatttgtcttatcggtggttgcggcagcaatgatggcacctccggtattgagtgcggttgcgtctggattgaccacaccgattgaggttgtgggaatgtggtgtaacaagatgtggaaagagtatgagaaagctgtgaagagacagagaggtttggttttaacaatggagcttggggtgcaagcaaacaatgtaacgatggtaaatataaaattcgaagttgaaaacctgagcataaggatctcatcgattctgaagaccgtgaactttgctgtggacagagaagaaaatgaaatggcgacgagatttgcgatgcaagaaataaagaagaaagtagaagggtttactgaaaaaatcgaggaagttggtgaaagagcggctaattgtagcaaactcatcgcgttggggagactcgtagttctgggacacatccttggtttacacatcgtagaaggaggagctgcaaatatcaccagtagcggttaaaagacattgacgttattggagtttgatcactcaagacttgggggtcaagcagtttctatcattggttatgggcttttaagttgggcttttcagtcccactatagttttattctgtgatgttgtctcgcccatttaacttaaatgattgtttaaaaaatgatatatgtgttttgcttctctgcttttttttttctcttgatcaagttaattgaggatcacacaatcattttgatttttgcacaaactctcttttgagtacatcgcanatctgtatgtgtatgcaactaatcattttccattgtaaatgaaattcaaactccatatagagtaatgttcttcagtctgcata

SEQ ID NO: 11254 - DNA, 536 bp, Arabidopsis thaliana landsberg
agattctctgataggtaaatttttcaatactaaagctccacatgtgggaaagatccatatgattgttaacaaaatctggaggataggagataaatcggctttgatagacgtctatgaggttaacgcgaccaccgtgaaatttcgaatccgaaatgaagttatgagaaacagagtccttaacagaggaatgtggaacattatggacatccctatgatcatgtctaaatggaccccatttacagaggatatgcagccagccctgaagtcaattcctttgtggattaccctctctaacattccacccactttgttcacagataagggtctagaatttctctcaagtgcagtggggaaacctatacatttacatcctaaaacagaagcttgtgttagctttgatgaagcgcaaattttagttgaagcggatttgacaaaagatttacctactgaatatagcttcatgggtgaagaggagggagaattagaggtggttatacaatatgcttacccttggttgcctcctagatgtggctgtt

SEQ ID NO: 11255 - DNA, 312 bp, Arabidopsis thaliana landsberg
cattataccggaacaaacacactttccgaggggattggtaagaaaaaaagcaaagaaaagaaaaaacgtaggattccgctcagtctttggatctctccgtgaataattgtaaagaatgtgtgcaagaatcaacgtcctcagttgttgaagactctgcagtttctcctgatctctccagaacgtccggtaagaaccttaatggtacccattttcaccaatgcttcggcaaatctctttctgaagagtgtattgcttgatgcataaccagacacaatcccactggttgatctatcaagacccaagttttgatca

SEQ ID NO: 11256 - DNA, 1352 bp, Arabidopsis thaliana landsberg
ctgacccatttagcttgcatgccattggttcatcaaatgtaaacacagttcttccttaccatcactttatatatagtccattattcatgatcattataatcactaatggtatattgaaaatttatttacttttacttaaataattaaatacagaatgatgatggagactgcatagatgctgaagcagtgaaacaggcagtggcagaagcaataaggacctggagtgatagccatgcatgattcaaaaaggctagacatatatgatcaagtattcattagattttctatatatataatttacatttgttttacctaaaaagagatctttagatagacatatgatcaaggaaaataaatcaattgtatgtctctctgattatcaaatctgtcaattaatttctttagcagcaagttagttaattcatcactaatatgcgaaaacgtgtatagcttgatcatattggagattcaaaaggacactattcctattctctagtgaatttgaccagctcaaaagcaaagaagatcctctctatccatttcgcttcttcaactctgttcccttttctgtcgattcgattttaaaaccgcccaagggaacgataatcttttgccacttaaacccttcgctaggttatgaacggttaatacttaataggtcccaatcgttggtttgatgggctttatatatgttactgttagtgggccggaatatgggccatgcgtaaaacatattttccttttatcaaacaaagaaaaggtctagcttggaagattaaagatcaatcaagtaacagctatagaagaaacattcattgataatctcactaacttaattagtcacgtctcttgcttctcgtttccatcaagaacgcccttgtgatctccacacatagatgttggtttttctgagagaaaggttcgtacttatccgagaaaacgacgtcgtccatgttccgcaccacgaaccctacacaagcctgcttcagcgtcttgctcgaaccaagatccgagacatcaagaacgttaagaacgctagagatgtccaaggaacttaacatatattgctcgcacaactcttgcaagtaatgaatcatgtacttatctgctgcaataaacaacgcgtagacatgtttctccaacttatctgaagccaatgtaccggtgtatagaaactccaagagagcttgaagttgctcggaatttagttcttggagcgttatggcgtattctggagcggttttgcatccatctgagtctagaatgttcttaaagatctcagattttgaagcctacatatatataagcacccaactcgtttttagaaaacaaaatttaatggttgcgtcatg

SEQ ID NO: 11257 - DNA, 826 bp, Arabidopsis thaliana landsberg
gattaatctcatagaaaatgggtatcacagtgtgcaaactcagcttctcaagtttcagaatctcgctgagggcttcgagacaccaggacgaggcagggtaagttacagagaccacgaccacggcgattctcgaccctttgattgcttggcgaagctccggcggaatcggacggcctctctccaattcctcgtcgtctttgaaagttcgaatcccttttgatactagcgccttgtagagaaaactgacgaagttcttgcgagtatctttgcctctgaagcttagaaaaacgtcgaacttttgaggagtgaatgaggaagaagacgaagaagagagtgacctggattcgaatattcgtaaagatttaacctttttcttaaaacaggataattttttaaagatcgtgttcatgatttttaatatttttattgttttgtttttctctctttattgggctaatttgagcttgagagcatttggcaagtgtaccaaaaaggagaagtttgctttttagtttttatagagaaagaaaagaagtttaacaaaaaaaaaaaaaaaaaacgtgaagaagaaagaaaaactatttacggtaatgaaattaccattaaatttccaagaaactttctaaggttataattgttttataactataattaggataacactaaaagaatatctccaatttattcgtttagatactcaaatttttattattagataagtccagccgccccttaagcctgcttagctaagaagaagctgagtttgttttcggtggtgtatatgtattgcttaatcatttcatggaaatttaaaacaacaatattc

SEQ ID NO: 11258 - DNA, 505 bp, Arabidopsis thaliana landsberg
aacagagacacaaagaccctaacctagagaaacagagacaatgatcctaactttgagaacaagagacacaaagaccctaaccttgagaaacagagacaaagaccctaactttgagaaacagagaaaatgatccaaactttgagaaacagagataaaaatcgaaactttgagaaacgattcgacagatcttccctaaaacagaaacagagacaaagaccttaaatttgagagacagagataaaaaccgaaacttagagaaacgattcaacagatcttaatctgaaattgtcgacccgactcatcaatatttaagaaagtttcagagatttataccaattctttgaacactcgccggagagactagccaacttggtcaacgcttccctccacgatttgactctttctctgctatgtctcttctcatgcttcttgaactgtttcgagactactccgctctgtctcctcacgtctgaaggattaatctcatagaaaatgggtatcacag

SEQ ID NO: 11259 - DNA, 1395 bp, Arabidopsis thaliana landsberg
agtctcaaaaattgagtaggatatataggtttagttaacgcatcagccaaatgatgttcagtctgcacatgaagagtgttgatctgcccatttagaaccctttccctgacaagatgacaagcaaggtccaaatacttagttttttcatgaaagactgaattgttagctatatgtatagcagccgtgttgtcacagtaaagtacagaagcttctgaagcatcaatccacaaatcattcatgaactttcgaagccacaacatttccttgactgcagttgacatagctttgtactcggattctccagatgacatggagactgtttcctgcttattggacttccatgaaaccaaagatggaccaaggaacatacagaagccagtaaccgagattcttgaatcagtacaagtcccccagtctgcatctgaaaaacccttcaacttaagatcagaattggcagaatagaacataccctgaccaatggtgcctttcaagtagtgtaacactttgtagacaattgtgaggtgtggttgtctcggcgcagaggtgaactgacacagcttataaactgcaaaggtgatgtctggccgagtaaaagtcagatacataagcttcccaacgagccgtctatacatctccacatctgtcaaaagatctccagtttctagattcagtttctgacttggatccatgggtatagaagatggtttacatcctagaagacctgtctcatccaaaagatctaacacatacttgcgttgacaaatagaaatgccagcagaagtccttgcaacctcaagacctaggaagtatttgagaggtcctaaatctctcagtttaaaggattctttcaaagcggctgtaaaagacgcagtggctgtagaacagctgcttgcaataattatatcgtcaacataaaccaatatagccatgtaagcatcatctgttctcctgaggaataaagaatcatctcctgttccatttctaaaacccatagacatcaagcagtgagagagcttcaaaaaccactgtcgtgaagcttgtttcaacccgtacagagacttttgaagcttgcaaactgaattcggtggaaatggcttcccatccttatcaacataaccaggaggcaaggccatgaaaatcttttcatgaagatctccattgagaaaagcattggatatatccagttggtctaaaaaccattttctaggagctgcaacagagagtaagaacttgacagttgccatccttgccactggtgagaacgttttcacataatcaaatccttttttctgagtgtaaccccttttgcccacttagaacgacgctttataacgtttcaagacctgcccattcttgcattcaaactttggatagttataaaaatcccatttttac

SEQ ID NO: 11260 - DNA, 254 bp, Arabidopsis thaliana landsberg
cggatctttcattaggaattatttctgaaagattctggtttgggtcttgtcgtctcagatcctttgacacctatgttggttaagggatatctagataaccgacaatgcgtaagcccagtagcactgaaccgggaaagtatactaagttcaaaaagacagtcttttctttcatatattggatttctatttataaaagttatgacttgctcattagtccttttactcaatactgtttaccattcttcatttgtctt

SEQ ID NO: 11261 - DNA, 954 bp, Arabidopsis thaliana landsberg
cggtggatggtggaaaggcggaggatgacgatgaggaggaggataaggcattttgtgaattgttgttgcaatatctgtcttgtgtactaacttagtttatatataccatcaagatgaagaatcattgttaccgacaagtctttgaagtgtaaaacagtcactcattaattaggtgcttagtagaatggtagttatccgtacctaatccttctagctaactttaattattctggaaggatttcatacttatgcatgtatagagagataaatttcatacttaccaccggtttaccaaacccaatcttagtatttccagcatcaaaatacccccaaaaccaaatactaataataccatattggaaccaaactcaagcttggtactcactagaatgtgtagccgctacaaatgccatgaaaaatatgaagaccgtttaaaaaaccgaaccaacaatgtaaaccaaataatcaatcttcattacacatacattctttacatcttggataacggtaaacgctgcgtcccgttggtctaaccaatacatgtttggtttgcctaaccgtttttctcactctctgctcgaacactttccactctatagtattgttcttcaacaatatgtctgagaatctccgtttgttcggtctgatcgtcggcattttccctgctccgtaatatatccgataacccgagaccagagacgacaattggctccctgaatccgtcatcgcaaaggcgtctgatgcagcgcatgcaatgaaatcaagaaccgctagctacataaccagaaagaaaaatatgcaattcttcggtttagtttagcggagaaagttaaccgataaaccgaaaaggaagttttgacgggttttcttgtttttcatttcacctgagatgagaagttcttgaaaggctctagctcagtttgtgagagtacattctctttggtgactagattc

SEQ ID NO: 11262 - DNA, 541 bp, Arabidopsis thaliana landsberg
tctatcctacatatattgaggtagtgaagtttgtcaggttcgaaatgacatggggagaccagttaccgcaaaaaaaataaggaacttgaataccaaaaaattacttaagatctcaaatagtcagagatgggcgaggtagagctcattctcatctcaatttctgcaaaatttcggtttgaagtccactatgaaacacttcagtgcgtttctaccggggttgaccggatcagccgattgagtttataaaaaaaaaaaatccggtctgtgatttaggatattatataagacaatttttgctgtttaggctgaatctaatttagatagccggtctaaattgattaattcgctgttagaccacataacctgtttagaccatgcgagatcaaaccccttaaagaacatggccgatcaattctagttatgaaccaaatgttttaggggaatcttgatcaaccaaaggattagagtgattttgtttcgtttcgaggcttaatttaaaacttaccgaaacatagttagttttatgctccaaaagggcaca

SEQ ID NO: 11263 - DNA, 1589 bp, Arabidopsis thaliana landsberg
tttacccttgtaatttatcagtttagtaggcgacgatggaaccaataacttcataatactagaatctgtcttaaaaaaactaaaattttcatttctaacatcaaagcaagctatcttcacagtctttgcttgtccagcaatgtaatacaaaacctcatcgatgcataccccttcacctataggataatggttttccggacaattcagttttctccatgacatcttccgagttcctaatgtcataatatgttcctcttcattagatactccataaagtgaatttcttatgtttgatactttatatcgtttgccaataggatcataccataataagcttcttgattagctatatttaaatgtaatttttttttactctctctcaattggtcaaatttagaggagataaaaaaaatttaccacccaataattgtttcattattattggctaaacttaggtgaggtgaataaaaaaaatgaacccaattttcgttccattaacattcatttacgtcgttttcttaaatatgagtacacatatatcagtttattcatatagttaaactaatatttaaatactaacatgtgcatacgtgtacgttaatgttatgagtcattttacattgtcaagtaataaaaattgaaaatgagaatttcattttgtttcttaatagacttcagtgatggagaccaagcacctacgcaagcttctccagctctaccaagcttgtggtggcgaacaagagctcacaaaaaccgtccaaaacgtcacatcatcaccattgactccaacgccaccaccacagccaccttcggcattagactccactatggctctcaccatctttatcctcttggctgctctcttcttcatgggtttcttttcagtttacttccgccacttcgcagacagttcaagttcaacggttgatatttcttccatgccaagaacaagatcctctaggatgtctccacgtcgcctttccacatccggcgtcgtatcacggccgtatagtttccggaggggtcttgattctcaggtaaatccatttctttaattatctttctcggttcttatgttaaccggcaagattgggacatttcaggccgttcgatctctgccagtgtaccgttacacgaaagcagcgaagcagcggaacgaagattgcgttatctgcttgagcgatttcgaagaaggtgaaacagttaaagtgataccacattgtggtcacgtgttccacgtagattgcgttgacacgtggctgagctcatacgtaacatgtcccttgtgccggagtaaccagctgttctcggataaggacttgggcatgcaagaaccgcctgatcaggactcggcagaagaacatgacacgtgtgatggtgtggacacttgtgtaaggaggtgtagtagctgttcaagtttggggcagaggactggattggaacgatcgctgagcctctgacatgttcttttttttgtgtgttgttcttaatcttgattttgtctttgtattattgttgtaataaaggaagggtatgaaataatgactttgtaaaatgagattgagtagtaaattttgttagtgttgccg

SEQ ID NO: 11264 - DNA, 1376 bp, Arabidopsis thaliana landsberg
  unsure (1)..(1376): unsure at all n locations
cgggtaaactaactaacttgtaagacgttgtcaacgacctctaattctaaattagctacaatagttttctattttcgtaccctttaaacgttagtctatataaattttgttataccaaaaatagcaaaacaatccaatggtttctgtttgccttcgtttcattataggcttcctctccacaacattcatctattaagcaagccatagagccatttccaagttttttcatcaccatgacccgaagaacaatggagaagccttttggctgcttccttctcctcttttgtttcaccatctccatttttttctattccgcagcggctctcaccgatgaggaagcttcttttcttacaagacgccaacttttggcattatcagaaaacggagatcttcccgacgacatcgagtacgaagtcgatttagacctcaaatttgctaataacagacttaaaagggcttacattgcccttcaagcttggaaaaaggcattctactctgatccgttcaacactgcggctaattgggttggtccagacgtgtgttcttacaaaggagttttctgtgcaccagcacttgacgacccaagcgtattggttgtggcggggattgaccttaaccatgcggatatagccggatacttgccgcctgagctaggtttattgaccgatgtcgccttgtttcacgttaattccaacaggttttgcggagttattccgaaaagtctttcgaagctaacgttaatgtatgaattcgacgtcagcaataaccgtttcgttggtccgtttccgacagttgctctttcttggccgtctttgaaattccttgacataagatacaatgattttgaagggaaactaccaccagagatctttgataaagatctcgacgccatcttcttgaacaacaatagatttgagtcgaccatccccgagacaattggtaaatcaacagcttccgttgtaaccttcgcacacaataaatttagcggttgcatcccaaaaaccattggccagatgaagaacctcaacgagattgtgtttattgggaacaacctaagtggttgcttaccgaacgaaatcggttcgttgaacaatgtgactgtgtttgatgctagcagcaatgggttcgtcggaagtttgccatcgaccttgtcgggcttagcaacgtggaacaaatggatttctcgtacaataagttcaccggatttgtcacagacaatatctgcaagttgcccaaattgtcaaacttcacattttcttacannnnnnnnnnnnnnnnnnccaaagttgtgtgcctggatcgagcaagagaacagtttgatgcacgacaattgcttcagacagccaaccagagtcggtataaatgttgcggtggta

SEQ ID NO: 11265 - DNA, 1202 bp, Arabidopsis thaliana landsberg
caattctaaaagcttattgcaaggaagaacccgatagatcctagtgttgatctggatggaattgcaaagaataactgtgaaggtttcagcgaagctgatctcgcacacttggtaatcatcaacctcttttttactgctcttgtcgctgtgtttcttgaaacttgacatgacccatgttctgtaatgtacgtgattctgattgttggtttcataaaatggaaggtgcaaaaagctacattccaagcagtggaggagatgataggctccagtgagtcgtctgaagatgatgttacagatataacgcagtgtacaatcaagacgaggcatttcgagcaagccttgtccttagtctcaccatctgtgaacaaacaggtattctcttctctctgtttgcatcactgagagaaattgaaatttctatcgcctctcgtttagttggaaattaaacctcattttgatgggtttgcagcaaagaagacactatgacgcactatcaacaaagcttcaagaaagcgttgggaggaacactgaacaagtcaccatagggccatcttttaccctcgagtaaaaacactctttacttatagaatgtctgcaaaatctcattttccaagggtagatacggtctttagttaaatataaagactcgtctgtttttctacttcagacacataatagaatcaagttatgtttccaactgttcttatcggatccgtaacgctacaaaaattctgatactgtaagttgtatgtacagagatgagatagagaaagcgagaacaaaaagctaaagacaactagagggactgataagtggtaagtagaggtcctttatttatcagccagattctcgtttgcagttcccaggtaataagtacttgtagctatcagcattctgaatcaagtatccagggagatgaacagctgaataagaccgtggaatcggaccaagtttgccgataatctccctgaatgtgtgttcttcaggaagcatatcgaaaagatcagttcctttgcagataatgtcttggattcgtctcgggttcagataatgtaagaatctaacccggtcagtatggctataagctttcatcttgaacacgaagtcattgatgtgtctgaaacagaaactgcaatgccaacctgaatctgtcaaaagattgttgctttgccggaaatgagcgtaccgagttttcccaggct

SEQ ID NO: 11266 - DNA, 474 bp, Arabidopsis thaliana landsberg
tttttgacgtgaatttcatttgcactttgttgcggcgttaaaaaccgtatgtgtaaaacttcacgaaaactcactaaaaaatagtacaacaactgtattaggacaaattttcgatcttctagatctggattccatcgaatcttctacaagagataactttagaaatgtgctcccctgattattgtaaaattgtctcaacatggcaaaacatcttcttctgaaagtatatacgcatagagatttagcaaacaaatgtatatttttgcaaggattatttcaagaacttcacctcaactaacttttgggatacacgaggtaaatgcacatatcaacataaataagcaaccttgactagttgtgttcaatcgactagatctacatatctgatagaaaattccataaaggttcagatatttatcatcaagctaacgcctttagggcatataatatgtcagtcagtgttttacaattgtg

SEQ ID NO: 11267 - DNA, 313 bp, Arabidopsis thaliana landsberg
ccgagagctttttcaaggcgggagaacagggggtgagtatgggggcaatttcacagagttggtccgttacgcgcctgaggatgtcagcaccgagtccaggaagatggcctgttttctgaaaggactaagacccgagcttaagaccatccttgccagccaggacctcctcaacttctctcacctctccaacaaggctatccaagtggaaagggcaaaagaggaagaaaaagggcacctcaagaggaaattccaagttcttcgagctcaacagcaagaacgtcaccagaaagctcgaccctttggactcccaccc

SEQ ID NO: 11268 - DNA, 1750 bp, Arabidopsis thaliana landsberg
atgcatatcaaagtaaaataacaccaacacagaaagcttatgattgtgtgtgaatgtgtgcagggttatgtgaacaagattgagtttgattatatcgagtattcgaggcagagattcaaacagtattggcttcgaaagccaaagcttttatctttctacccatcctaataagtaaattctatgtttacttatgtttactctttgcgaataacgcggtaaaaacccgatgatggatccatgatatagctatgccaaagctaaaactatgtgtaattcttctgttctgaacttctgatactatgtaataagtaaaagatataaatattccatactataatatttccacaataatgagaaaagactaatactgttacgtgcaatcacattttattttcaagaaaaaaactatgtcgaagatggacatttaaggattaagagctgccatggaatgcacagaatcaatgactgagtcaataaggtcatgagacttgcttgtacctgcaagctttagatgttttggtgcttcagctctatcgaaatagaatgcaccagagacaagcttctcttttggctgcagtgctaaccaaacgattgtatcggctccttgttcgcttgttctaagcttacccgcgaacctgattcacaagtttaaaacattctttagcaccataaagatgtttccttcagcattaaagatgtttcctttagcagaactatcttacgattcactgaaactcggtaaactcttggcaacacctggtgtctcagcccagccagggtgcattgagtagaaccctatgcctttatttttgtacttatcagcccatttttctgtcagagccacctaacacaaaaacaaactcagaagaccgaaaaaagtgacttcttgactagtagattcagattttacagacctggattcttttgtttcgtgcgtattgttccactccatcaaatttttcaccactaaactgcagaacaatcatatgtagcttgagttatatatctgacataggagtggtgcaagcagttccaaagaggtaaaaagaaaatgaacataagcaattcttgaagatgacatatgtgtccagcagattgattacctgaagatctgtagtaagcggtgaagtgtacattccaccagaggcaactgtaatgactttggcgtctggtgttgctttctccaacaatggaagcatcaactctgtcattgtgtatgtcccaagtacattcaccgcgaaacttaactcgaatctataacagaagatcataggtgtgtaaaattaactcaagatgaaataatattggaacgttcaagaaagataaatgggaccaacccttcaggtgtagtagtacgtttgttctcaagcaaaccagcattattaacctacaatttgaaaaccagaatcaaacaagtgaaatgttattctaagaattagtaaaagaaaagaccacataccagcacatgaaccgggacatccttggaagcgaaactcgaagcaaatgactttatttcattaagggaagacaaatcacatacctaagaaagaagcaaaactaaaagggttgataaagagtatggaaacttgcaaaaatgaatttgaaagtagaaaatgatcatacttctaagtacacattttggtttcctgttgaggtttgaatcttagaaagagcctcttgtcctctttccttgttccggcacaccatgtaaacagttgctccactagaaaaacataagcagacattataa

SEQ ID NO: 11269 - DNA, 876 bp, Arabidopsis thaliana landsberg
ccacaagctctattgatatgtcttgtccactcattgagcatttaactttcaccactacctaccatcatcatcatcatgcatgcatgcttcatataaacatcatgaaatcatcaagtttattcactaattactacaattaataacctcatcacaaaaaggctcaggcactctatatatatggctatgaagttgcttcctcttccacaaatccatacctgtatttaaaacaccaaaaccattttgattatgaacttaaacataattacacacggactccaaattatagctttacatataatttagacaaaaacaatacctttaattgtaggcaatctaggataagagtaatggccagaggcaacaacaacagcatcaaacacttcttccataacctcaccacttttctttacactcttcaccatccatttcttcacatcattatcatcatcatcttcattcaccattcccacaaactcaaccctaacattaaacctaatcatctctcttaacccaaacacttgacaaaaatccttaagatacaaccaaagctcctcatgccccgggaatctcctcaagtctcttccttccttcgcgatgaaggggaaatcagagaaacccattacctctctgggtgaagctaacctcaaggatgagtaaacactgctatgtacttttagggttttggtttttcccaatgtatcttcttcatctacgtttggttggtataaccactgacctcctacgtcgtggttttgctccatcaccaccactttatgtccttctttctttagctctcgcgccgaaacataaccctgatggtcctgctcctatcacacataccgtctttgattgactcttataaatgaactctgtaat

SEQ ID NO: 11270 - DNA, 529 bp, Arabidopsis thaliana landsberg
aagaaagggagagatatgaggaggtttccagggcataaggatttttttttgtatcttaaggactttagtgaagcttggggtttaagagagatgattaggtttaatgttagggttgagtttgtaggagaaaaagaagaagaggatgatgtgaagaagtggattgtgagaagtagagagaaatttagtggtaaggttatggaagagatctttgatgctgttgttgttgctactggtcattactctcaccctagattgccctctattaaaggtatattattgttcatattattttcgcatttaatcatgttatgtgtatctatggttattgatttgttttttcatgtttctttgatggttataggaatggattcttggaaaaggaagcaaattcatagccatgtttacagggtgcctgatccatttcgtaatgaggtatattgaaacttttatatttttaattttggtgatgataatgatggttatggttatgatgacggtgatggttatgatgatggtgataggtggtggt

SEQ ID NO: 11271 - DNA, 1232 bp, Arabidopsis thaliana landsberg
  unsure (1)..(1232): unsure at all n locations
gggctattagataagagttctttgagaacttctgaacaaacgcaagaccttttaaaaaccgtttagagggtttctgcaacttaacttctaaaaccatttgagtttcaacaatatccattggtgttaccgaatctgagtttttttttgtttctactgtttgtgttatgttttgttattacaaagcattatgcctttgttagctactgaaaaccattctatnnnnnnnnnnnnnnnnnnnnnnnnnnnnnnnnnnnnnnnnnnctaaccgaattagttataaacttactgagttactgttagctatttatcgccctgttgatagaaggtcttgaaatttatattcttttatttggctttgcaggaagcagcagataacaattgtgtgtacagaaacgaggttcatcactctgtaagtgaacaaactcagatcctatctgacgttgcttccgacccaactcttccacgtaccaaggctgtgcgatgcgccaagtgtcaacacggtgaagctgtcttcttccagtgaatcattatcttatatcttaatctttaattcgtcatcaatcaaggagtaaagaaacattctttcgtttttctctgatctaacttaaagatcaaaagagatttctttctcttgctttttaatgtgcttatggctatttcggtttgatatagctcgtgtgtgtcatcgaattttcaggccacggctagaggcgaagaaggaatgactctgtttttcgtttgctgcaacccgaactgtagtcaccgttggagagaatagattgatagaagactacatttttcaaatgtaacgtgtatttgtgttccgctttatgagttttatacaattcaatttggagttttctgtgtaaaaatatgaatactatgagactgttctcgggtttcttgaattgtttcagggtcttttatgatcattttggtttttatgtgggtctaattataaatttgtcgttttatgcggggccgatctgaaaattcgtccataaaccatgatagtgttgaaaatttgtatacgtggagtctagccgccggctgctataactttgctataacgtgtgatattataaaaagttgataaatctaatcttctaaaccaaattattttaataatgctgtgtttccttcgtcatcgtatcgaattataaggaagctcatgttaagtgatgacaatatcttcaaataaagttttttcttttctagcaaatatgataaac

SEQ ID NO: 11272 - DNA, 1860 bp, Arabidopsis thaliana landsberg
cgaatattgttacaaaaggaaagcatcggaaagccagccttccagaaaaaagagggccaaaaatccacgtgcgttttttgctttccctctaaacactctccctcttcaataccacattctataatacattacatttgtaacgttcgtataaaatattcacaaacaaaaataatgatcatattttacattgaaaaatcccaaaatttaccgaatttgttaagctaattcttaaatatttaaaattaaaacgaacaaagtcagcttacttttgttatggtatggacttttttttttttgttttgacattcattatgtcaacaaactacgaaatctttttaccaaaaaaaaaaaacaacgaaaaacagataacaaaaagatgagacacacaatctgtcaaagcttgtcagaaaatggcaaaacactaaccgaataatgaatgttttcaaaagtgaaacaacaaaacctgagaaacagagaagattgaaaatgagagacacgaagacgacgactaagagatatgtcgtcgtcttcgttatatcatccgttttgtctctccatctcctccgttctcctcctcctcctattaatcttctccggagaatttccctccaccgcaggaacttcatcaccggacaccaaagccgcagccgcacgtgcgactaacagaggaaggaggaataagcaatccgcggagttcttactcgcgcacaacgcagcgcgtgtagcttcaggcgcgtcgaatctaagatgggatcaagggttggcccgtttcgcatctaaatgggccaaacaacgtaaatcggattgtataatgacccattcaggtgggccttacggagagaatattttctggtaccaaaggagtgagaattggtcgccgaagagagttgttgataaatggatgaatgaaagtttgaactacgatcgggtggctaatacgtgcaagtctggtgccatgtgcggtcattatacgcagatcgtttggcgtacaaccacagccgttggatgcgctcgttctaaatgcgataacaaccgtggattcctagtgatttgcgagtattcaccttcggggaattacgaaggcgaaagtccttttgatatacctaaaataacattgaaattagacaagatttaatcaaatattgttacttcaattcttgaaacatttttttcttcctttaatggtcaagttttttccgttactccttctaatgactaatgtaatatggaccgtattgatgttcgacgttatgggcttggcccttttttaattattatgtgggcttttgaattattttagaatgtgaaacgctgtcgtttatgtagcgaatgtgggtgtaatttcgaatcttcttcaccgtgttcgtcatcgtcaccactgagactctctgtagagaaaaaccctagacattttccggtgagaaatgagtatcactcgtagcgcgatcagatcgagtttgtgtctccggaaattggatccggaaatcagtcgtagctcgcttccgtttcttcaagagtggaggaaatgcctatctaccgccacggagcagcctcctcctgcctctccgttaccaccgcctccgggaggttctccgggagaaggttttctcttttatttcattccatttatctagtgtttctttgagagcatttctccaatttgtgagggcaaagatcctagatcatagattgcagagttttgatttgtttggagtgtgtatatctgaagctattgaaattgaaaatgttggtttcaaatttaaccgcagaggctattatcgaattttgctatccaaaaatgcggactttgtttactttgactgttatggttttgagactttgtttagctcactatgaagg

SEQ ID NO: 11273 - DNA, 1234 bp, Arabidopsis thaliana landsberg
agttttagcatcctataaaaggtatcatttttatgatatgttaatatgttgctgagtagaagagttttttcggtgaaattgtgaaaatacaagtggcttggaatgggaacagcaacaatagcatcatcacaatcaacgttatcatcatcagaagtgaacatagatgtcaatatggaagtggagactggtttgttcattggacctcctgagacaagacaatccaaaaaattccctcctcaaaattaatcttacaacttcttcaaaaagaatgttttaactatacgatgtaagaactttttatctttatatattttcgtccaaaaaaattgagatgtaataattaatatgttcttaatcaaagagttaaacttaaaaatttacctgtaacttacagttccattacttgtatctattaggacttgaacaaaccgaactaaactgaatcggtttaagtatttagttacgtaacatacagagagaataaaaatgattagggacataagcctttaggagtggggtctctgtaacgaataagttggattgcgtactgtcgctttccggcgaattcaattctgttcagacatttctttttcacttttattgtatagtttgcgtttgtgtattgcactttcgatattctctctctaatttcatcatcatattcattcacaatgtatctctttgtaatacattcagtgccgtggctttcaagcttttggtcaatatgggttgtatcatttcttatcggaggaataaaccggcggcaccaacagggttgccggaaaaccgtcctcgtttccatactcttccatcagaaagaagaatagcaaatgatcaagcccaaaaggtgacagaattgttgaagatgagtgataaattaggtccaaaggagctgaagagagaagaaagtattctcgttgttaatgttcatcctcgctcatcggaattagctgcctctggttggccaccgtggcttatttctgtagctggtgaagcccttgttgattggacccctggtcgtgaatctcactttgagaagcaagaacaagtctctcgctctttctcttcctttctttattgattctcatatgataaagagacttattctctgtatttgcaacagattgggggaggaacattcagtaaggtgttcaaagctagagatcttcttcgtaacaagaccgtggctttgaagagaatccggttcgatatcaacaactcagaaagcatcaaa

SEQ ID NO: 11274 - DNA, 1949 bp, Arabidopsis thaliana landsberg
  unsure (1)..(1949): unsure at all n locations
aacttattgacgagatgcttaatgggcggtggttgagacggtggctgcaacagtggagaccatactgtcaacaccacaaatgttacggcctttgcagattttgtagaaaccattttcaccccaagtctctccccacgagttcttgatgatccagtaaggcttctccttgaacctagccggagcgtaacctgccgctccatagccaaccaataagacaccgtggttgagcctcctggtgcatatgtaagggcatgagactcctccaatgtaagtctgcatatagnnnnnnnnnnnnnnnnnnnnnnnnnnnnnnnncttgacaaggtttgcagcaatctgttcttcatcaatggagataacactgaagttggagacagaggcaacgatcttggacttgtctagcttgcaggtcttgccgtcctttccggtgtaaggatagtcttcttctttcatgagccctccggttttgagggtgtattcaaaagcgctgttcattagcccaccattgcaaccagagtcgcaggaatctgcctcctcgggatcacactgcataaggagatgatagcaacaattatcagattagtttcacagagatcatgttaaccattatggtcatattatgaatcttccctaggcactgacgagaaacaagatcattaaaagtaagcaacctgaactaagtagtgagttttatcatctcaacatatccggagagaactgtgaatatctaggataacatattgattgataagtgatcaaacatcaacacagtcatgttcagtgtccttcaaactcatcccaagactcaagagaaagaaaagacaaacctcgtgatcacagtcgacgagctgttgttcgctgaggctgacgagtttgccggtagcgaggaagttagcaccttccaaagctccagtggcgctgaaactccagcaagagccgcaagatccctaatttgtacaccaggattagaccaaatcagcacaaagaaacgaattgaagtttgatccagagtcaacgaattcgataagacatcaatttgcgacatcatcgagtaaaatacctgatttttgacgggagtaacggcggcatgatctctccaatcaaaatcctcagggagattttcggtagggagaatcggagccttgttggcatctttaggaagcttaaagccacttctaacccccaagtgcttcttacggaactcagaccgagtcagatctgagaactgcgtaacaccatgagtcgccgacggatccaacttctggtgacgcctcgctcgcctgagattcgctttgaaaaccgagaatctatagtcatgctcctcgttggaagcgtagaccttcccgaacttccgcttgaagagagaaaagtgatcctctgaggtcaaaacctgaggctcggctccaccaaccacctgacggatcacgagatcatcgccgtcgttgacatcagacgacgaaaccgagacgataaagaaagacaaaacgaaaacggagaaataaagcttaagacgatccatttgatttgcaattagattgaaggaagcagagaaggattaatatagatagaaccctcagtagattatcacacgcaacgtgaatgtataggtgtatgtataggtctctgctacacgtctttttccctttggagattagctttcggtttcttttaagataattttaaaagatattgttgtcatcattattatagtcggagaaaaaatcggaagatatttatggtatttattattattttaagatgccttatccaaggggaaaggagagagttaaccaatgatgtagaaccacgtgttaatcattgaatgggtatggagtaatggaatgggataggttcaacttgttgttagcagtgccgtgttgtcttggataatattaattctctcttttctaaaaactttaaaaaatagttctatcttcctctttttctga

SEQ ID NO: 11275 - DNA, 1261 bp, Arabidopsis thaliana landsberg
cctcaggaaatttatttgtttcttctatttgtcttctgttgcccaggactggttttgaggaggataagaactttcatgtggttttgaattctgtcattgctggtcgttaccatgtcactgagcatcttggatcagcagcttttagcaaagcaatacaagcacatgacctccacaccggcattgatgtttgtgtaaagatcataaagaacaacaaagacttttttgatcaaagccttgatgagatcaaacttctcaagtatgtcaaccagcatgatcctgctgacaaatatcatctccttcgactgtatgactacttctacttccgggtaagtagatgcagaattgtatctttttcttttcaacaccgggtggatattctgctgctttggtgctatgatgtatcaattgttcgattcagcaaagaacatgggacgtgagcctacatcatgacgccattgactgtgtattattggaatctcagttttgcaggagcacctgttaatagtatgtgaacttctcaaggcaaacttgtatgagttccaaaaagtttaatagggaatcagggggagaggtttatttcactatgccaagattgcaggttagccaacatctttactactcatcagttttatgtatgttttcactgctctctcattttcttctaaatcaaaatattgtgcagtcaattactatccagtgcttggaagcattgaactttctgcatggtctcggccttatacactgcgacttaaaacctgaaaacatactaatcaaaagctacagcagatgcgaaatcaaagttattgatctgggaagtagctgttttgagacagatcatctttgctcctatgtccagtctagatcctaccgtgctccagaagtcattcttgggcttccatatgataaaaagatagatatctggtcacttggctgcattttggcagaactatgtaccggcaatgtaagttccagcatcgatgataccagttaaaagctttataattatataatccactaagctagctaggaccctataatgtaacttgcgtctgcttttgcaggttcttttccaaaatgattctccggctactttacttgcaagggtcatcggtataatcggatcaattgaccaagaaatgcttgccaaaggacgtgatacatgcaagtacttcaccaaaaatcaattactatatgagaggaaccaggtgcgtattgaaaaaccaaaaagaaagaaaactttactatatagtgcggctcgcag

SEQ ID NO: 11276 - DNA, 449 bp, Arabidopsis thaliana landsberg
catgagttattttttcccggggtaaggggtcaactcgatgtaagtcatcgactcttgtgattataatataaatatttgatagaactttgatgcacaaaggccgctttggattgcatcctctttggccatgtctgcctgatcaacatgtcaataggcaaaaacttgtggtcctcccagctcgaataagtaaacagattgggcgagtaatatgaattcatcgttgtaccaccccacacttgagtaggacaacatattgacgatgaatagactagaaagcaccattacatccctagaggaggatgactaggcgatcttggttgcaccacattttgggtcggtttagtcggccttcacttttgcatagatcacctttttgactttatttattgggtggccgcgtggaacgactttcttttttcatatatttagcaagcaatagatcaaaagta

SEQ ID NO: 11277 - DNA, 944 bp, Arabidopsis thaliana landsberg
gttcctggtgatggatgatggatatgttagaggcaaagcatgcacgcggcaggcttgctatttctcccgctttcctagtgtgtctgccatgctaagtttactctgaacaaattcccattattgattggtaagtttacgtactttaccctagttcatatagttacctcatatttctaagtaactacactatagccaaacataaatgtgaaacggaagcactcaatcgtcagcgaacttgagagcaaaatacaatacgacggtacggtatcagcataaacgtgaattaatggaaccgcatattttaaaaaatcataactggataaggtttcaaaaaaagaattgttgcgcaataaacgagtttttttgtttattacaataaacgagtatcaattccttccatcgtcaaaaaccaaagagctttttgtaccgagcgaacgacattatagtcacgaacaagattgcgcaaactgttgcagtgccgctcaccacctttcaaataaaaacaaaaaacaccaactatatcagggtcccggaaattcgaaaggactaacaggtccatggaattgaagtgttatttcatacccatttgaacatatgttttttgatgttccacgggaaaggaatgttcatgcctagaatgccaacaactacagagtacactgatacacagatgcttccagcggttaaaataatttcgaactgatacaagtgagacgaagatgaagattagcacttgtggttttgattttttatctaagaactaattcaacaatcttggaatttctatattcactcaccttaattagctgatttcgactactgtctagctgcaagatacggatggttataatttacatttattagtaaacaagagagattacatttttcacataacatgtgtcccctctggaaaataatctaaattcaaaaaataaagttatgga

SEQ ID NO: 11278 - DNA, 425 bp, Arabidopsis thaliana landsberg
tacccacttgaacatatgttctttggtgttccatgagaaaggaatgttcgtgcttagaattccaacaactaaagagtacactgatatacagacgcttccagcggttataataacctcaaactgatacaagggagaacaagatgaagatgaataggacattaagccaacacttgtctaacgtttttgattttttatctaagaactaattcaacaatcttgtactttctatattcactcacctcaattagcttatttcgactactggctagctgcaagataccgatggttatagtttacatataatatatatgagaaagaaaacattttctcattacatgtgtaaaattctggaagatagagagtgtaagtttccattacctggaagttaatataatcttctgtgtcatccagatactcgcgtagct

SEQ ID NO: 11279 - DNA, 561 bp, Arabidopsis thaliana landsberg
  unsure (1)..(561): unsure at all n locations
caggttatactcaactaatgtataacgatgtacttacctgtattgatgaaatgtgtaggttttgggaatttcaacaagggaagaaatcaaatgcatgaacccgaattacacagagttcaaatttcctcagattaaagctcatccatggcataaggtttgtttgttcatatacacattgaaatgtaacatgttcagtgtcttctttagttttctgttaatttaaacatttttcatcataatccagattttccacaagagaatgcctccagaagctgttgatttggtctcaaggcttcttcaatactctcccaatctccgttgtgctgctgtaagtatctgcaagtcatctcaccttcattcattctgcaaaatcttttgtttctttgcctgattttgntgaattgtttcaatcttgccaaccagcttgattcattggtccacccattctttgacgagctaagagatcccgatgcgcgattacccaacgggcgtttcctttcaccgctctttaactttaagcttattgtactaccacacctttctttgtctttaaaaagtagc

SEQ ID NO: 11280 - DNA, 614 bp, Arabidopsis thaliana landsberg
aaatctttgtaagactcttctatgtttggcagatttttaggtccttatcctacattcaccgatgtatcggcgtgtgtcatcgagacataaaacctcaaaacttgttggtaaatccacacactcatcaagtgaaactatgcgattttggaagtgcgaaagtattggtgagtttgatgaatctatctctttggggaaacattttgaagcagagagattcaaccatttattgatcaatgctggttcttgaaacaggttaaaggagagccaaacatttcatacatttgctcgaggtattacagagcacctgagctcatttttggagccaccgagtatactacagccattgatgtctggtctgcaggatgtgttctcgccgagcttcttctcgggcaggtaaatatcttttgtaaattctcaaatcaaacacctttgttctgatcaaaacttaattccgtggttaaccgttaaccaatctgttcttttgttcataccagccattgttcccgggtgagagcggtgttgatcaacttgtagagattataaaggtactaccattgtactgatttctctttttaactattccaggttataccaactcaatgtataacgatgta

SEQ ID NO: 11281 - DNA, 734 bp, Arabidopsis thaliana landsberg
gggcgcttagacaatctttgtatacaggcgaatctaacggatgaagatttaaacgagctaaaaggatcgattgagctaggtttcggtttcaatgaagaagcaggacaaaagctttgtaatacattaccagctcttgatctttactttgcagtgaatcgtcagctctcgcctctcccttcacctagcagcagccgtagcagcagtgcatctgcgtcaactttctcatacagtataccttgtagtccaaagaaaactgattcagattctgttaaaatcttatgcccaggtatctaaactcatgtttttggtattttgttttgaatgcaataacatttataaactaatggtttaatatgatcttttttggcaggggacgatcctcaacaaatgaagcagaggttgagacattgggcacaagcagttgcatgttctgttatgcagtcttattgaagattataagcactcagattttcttttgagagataggaagaagcgaatcttttacaattaggattcgaaagaaacaaaaaacaactagaaaattttggagaaaaagagatgaaaattgtggctctgtatataactcacaagatgagagaaagaaaaagaaaaacacctcttgttcataagctgtaatgatgtatacaaaaaaaaagattacaatatgatcttggattggataataaaatgaacttttttctagataatcgattcttaaactgaaaataagccca

SEQ ID NO: 11282 - DNA, 1250 bp, Arabidopsis thaliana landsberg
  unsure (1)..(1250): unsure at all n locations
ctttggtcggcaagatcaaactttctgatatccatgagcagaaaatcgaacaacggttgaaacaactcaacaaacccgccgttaaatctatccatgtattcacaacaacttttaattacctatggttttctattcccactattttcttggctaaatgcttttatgttttgctttaatttttatattgaatagagtccagatggagatataatcgattgtgtatggatctatcaccaaccagcttttgatcatcctttactcaaaaaccacaccattcaggtttttttgtaatacttgtttttattcactcttcaaaatcatattacctctacgttttgccctaacgcttcttgtttttttcgaggaagatgaggccgaaaagtgactcgacaagggacaaaactggaggtaacaagacagacattatccatcaattgtggcgcacgaaaggtgaatgtcctaagaacactattcccatcagaagaagaacaagagatgatcttctaagatcagattccatcgaaactcatggaagaaagaacccaccaaccatttctccaactacttctcacctccccgatgatcagacagaagttcatgaggtatctatatccccggctcaaagtttttttttttaaaagtgattaaatatttttgacgctttaatttttataattttgagttaaactattaagagctacccttaactattataccttactttggttgtagcatgcgagtgtgtacctggactatggtgaataccatggcagcaagagccgtataagtatatggagaccagacgtttatatgaccgagtttagtttggctcaaacatgggtcgtcggtggagattgggacactgttttgaacactgtggagtctggttggcaggtcagtgctatttttttttatttaggctaacacttctctttgtgtgtggggctttttttgtaaaaaaaaatggatcttaattagaatatatgtgttgcattgttgcaaaatttactgattttataaactcaatttgaatcgataataattggatactcagatataccacattatgcattcagaagttctactatttctaacttcagtgtttgaactccttatgatagatcctacattctatgtacggtgacaataatacaagactttttcgcattttggacggcangtttccctaatttattaatcttactaagaatgcatgcattgactaataagggttactaatattttctgac

SEQ ID NO: 11283 - DNA, 822 bp, Arabidopsis thaliana landsberg
ccacgggctcctccaactgaagatcaaggtatatttacatatatagttgacaaattagttaccatatttatgggatgatatatgtgaatgaaaaaatgagcataatgttttataatagcagttgaatttgtgctctggacgacgaatatatccatgtagtatatatgagaaatatatcaagtatatatacgaatgttttctcttgttgattagggctattgaggaagaggcactatagaggggtaagacaacgaccatggggaaagtgggcagctgaaattcgggatccgcaaaaggcagcacgggtgtggctcgggacatttgagactgctgaagctgcggctttagcttatgataacgcagcgcttaagttcaaaggaagcaaagccaaactcaatttccctgagagagctcaactagcaagtaacactagtacaactaccggtccaccaaactattattcttctaataatcaaatttactactcaaatccgcagactaatccgcaaaccataccttattttaaccaatactactataaccaatatcttcatcaaggggggaatagtaacgatgcattaagttatagcttggccggtggagaaaccggaggctcaatgtataatcatcagacgttatctactacaaattcttcatcttctggtggatcttcaaggcaacaagatgatgaacaagattacgccagatatttgcgttttggggattcttcacctcctaattctggtttttgagatcttcaataaactgataataaaggatttgggtcacttgttatgaggggatcatatgttctctaatcga

SEQ ID NO: 11284 - DNA, 1040 bp, Arabidopsis thaliana landsberg
actacttcttgtccttcgtcctcttctttgtcaacccctctaaaatggggaggaaaagagagtagtatccacttgactttactttttatatgaatagataaattaagaaaggctagtatacgtgattctcccagtcagacatcacaaaagaagagtaaaccgggccaaaccttgtttcaaccttcacgtatcgaatgaaccgttatcccaacatcggtttagaccacacactgcacgctttacattgacttcttaatgaaattcttggtacattgatatttggccgagcttattatctggctggagactaatttatataaaggtttagtagagttggtgacaattgttttgtttcttggatattgtaagtgtaagtagaaataatttctcttaaaaaaaggagaaaacaaaagattgagttggttggtgaaaatgggtacagctgtgagagagagtacaaatacgtaaacaaagaatgtcggattgtgattattactaacaaattcacaaatatgatttcgtcaggggagaaaacagccgacaacttcttttttctactatcaaatctcttcttaattgttttcacatcaaacctaccaaatttggtaacttatgacgtcacatgcatattgaggaactatctaattaagctataacataggatcaagagttttctttaacttgtccttagttaaactcaactcatttgtaatttactaatttctaccttgacattctatttctatgaacagtcgtcgtatgcgatggttccgtaataagactggattttgttagttacatgaatgatttggatggagaatagaatctgaagaaattggcacgagaaagttggatgtatgagcaacgttttaaagaaaatatacatatacacatgtaaaagacaaagtaaacaaacagctacgtagtacgtactcatcatctaattcgatttggttggtctagtgattaaaagttaccaacaaacaagatgaatatcgatttaaaaactaattcacttgttatcaagttccatccttagt

SEQ ID NO: 11285 - DNA, 968 bp, Arabidopsis thaliana landsberg
gaagaagtgtcgtagttgcatcctttcttgaactagaagctgctgctaggtctggtatgagatattacagtatacacttaagccgtgcattggtcaatgctgtaatgtgtgattagagtctaacatgatattgcttttcagcatgccaagatgtagatcagaatgcttctgattccaataatgatagaagtagcacaagttcgtcgcctatggttcacccaagtttgagcttgtttcatgctggtggcagtactctcacatctgactatggcagtgatactgcttatgaaacatctgaggttggatcaccaagtgtaggacaggatgatatttctgaaattggtacggaagatctaactctggatgaagatttaactttaacaaatccaatagagaagctcgttaactttagcatgtccaacattgacgaggggctttcaatgagcgaaacaattctagagcaacttgaagactttcccaaacataaagtccgctcaagatatgtcaataatatcctagggaaggatgtgtataatggaaatgcttcaaaaggcgtatttcttgctaacaatggttcacgacttctctctgaaccagaaccatcaactcactcagtaatgcatgacagaaatgatagtgctgaagggtttgctttacacaccggtcagacatcaacatctggtctcttaatttcaagcagggatagccacctggatctacgccaaggtcctggtgtatcgcttggaactgggcttgtttgtaacccggagaggcagggtagtgcacaaatagttcttccactggagctgcgtaataaattgaacaggattctgttagccacaaatgagagacttgtcaatgcaaaaacagatatggaggatcttatagcacggctaaatcaagagattgctgtgaaagattacctgaacaaaaaggtacaataaaaaaaagtagtcatgaattctgtt

SEQ ID NO: 11286 - DNA, 1163 bp, Arabidopsis thaliana landsberg
taatttacataacaactcgagatattaattaattctatttttcatttacggaagaaaaaaaatcgataaagaaagcaacaacatgatactcatatactcctaatgatgacaatcatggagcttaggaaaataacacatctctacttggtgtttcaactttttatgtttttgccatttttacccctgtaccattgccgccaaaatcagaaagtgttctggggccaataatactatatggtcaaatggactcaacgtacctttctccctttttctttttgatagcgattgcgccaatataaaaagggtatttccagtggtggttctgtcaattagacaagatctctttctcaatctccaagataagaaaaagttaagattatgatcccaatgttatttgaaggttaacacttaacactatagtttggttttagagtttagtcaagttactaaacacttcattgttcaatgtttctattcccaaactccaacacacggtatcttacatagaggtcatttgggacaccacgatttggtccccttcaagaaccttatttcatttccaatattgattattttcattgttcaatgtctcatatttttctgaaagaaaatgtatagctgattagtcataatcgtagcaaacttcttgattttgttatatgcttaattagtcgttaatcgtctattcttcggctagcatatttttcgggattaatttagccattagtccaaattattcagacaacacgttcttgaaaactaaaccttattaatataatcacgaatgctttggattcaatgtacttagtgaaccatataacatttgactgtagaaatttatagcaatttactttatcaatcctcccaaatcactttatcaaagtaatggggtcaaatgttagaaattgaaaagttatggagtgaaacttaaattacataaatgctcttccaaggggaagaagactaagagtatagaatctctctaaccagaggttctatcaccaccaaaacctgattgtaagaagccggtttcctccagatgactcacatcaccccaaacttggatggtccatttgtctccgtcgaataaacggaacacattgaccgatgtataaagtatcttttcaacttttcttgcacttggacgagctctttcgtagaga

SEQ ID NO: 11287 - DNA, 996 bp, Arabidopsis thaliana landsberg
cgggggaggcggatatttgaacagggcatgcttaatatataacataatacaagatttgttcttaaccttttaactgtaaaggtgacattaaaaaaccaagaacagcaaatggagccattaaaacagctacaccccaaaacgcataccgccaactaaaatgttttcctacctaaacgcatcaagaaggaatcaccgattgcgtttttcgtatttataaaagtgttctaatattaaatataacttacgtatccgccatagacataaccaagagcaacaccacttggtatacacatgtaaaacagtccaagccatgcagtttttctgttaaaaccaaacaagctttataaatataatggtgcattttggcttcataagaagttcaaaacaaaattcaaacagatacttgtttttgaggagcattgtcatctataaatggagctgcaagactaatgaaagaagcttcacctacaccaacgaacctaggagtaataataagagtatttgcatccaatgacaaaagttcgcatatggcgaaaacaaaacaaaatcaatcataaggtttactaaacaacttacatacgacataagacgataaaccaaaaggcaaaggaactgccacagccaagaactgcaatagtccaaacagttaaacctactccaataagtctaaatggattgaagctgcactaaacacaaacgaaaccactttaataagttttttagacatcaatcagaagagagaaaaataacaaaaatgaaagttctttctgatcacctttttgccaatgaagcaaagattggtgatgcaataagaagtccaaccataaatgaagatgacaatacaccatcttcgaaattacttaggttaaaatgtcccctaaaaaaagcccatttttaagtaaaacagaacaatactccagattgaaatacgaaaaacaatatgatataaaagtataaataaaattcaaatattgaattatcatcttgattgtacat

SEQ ID NO: 11288 - DNA, 1243 bp, Arabidopsis thaliana landsberg
aaaaaacttcaaaggtagaacaaaaaagatcaaaaggagatatttgatttttaattaattacatccacataattagggaacggtaggatatttgggaaaaaaaattcctcttacttagccaaaaacataggagatttttctttttctcatctactaaagaaaacattaattattttccggcaatgtaaaatacaaattatgaaaagaagaaaaaaatctaaacgtccaccaccggtggagctaggttaagatccaggtttagttctcttctcggttcaacttttacggtttctccaataccaatactcaactcgatattaaccggatcaaaccgaaccggacaaacccgagaaagctctgctcttaacgaagcagctcttgacggatcgaagaaaaaaccagcagaagcataaccaccgacgactttacgctcccggtgacatgcaaacggaaatctctgacgcgtcatctcacgcgccgtcgtcaccgtcgtacggttgacgtaagaatcgttctcgccaccgtcgttaaccgtagtagactctccgggaagagggaaattagtctttgctttggagccacgaaactctctagcggcggtgtcgtaagctcttcaagcttcctccgccgtgtcgaatgtcccgagccaaacccgggttttctttcccgggtcacggatctccgccgcgtatctaccccatggacgcttcctcacacctctaaagtgcacttccttccgcatcgtcgtcatcgtcatcgtcttccctccgccgccttcactcacggcaatgcttctaccgttcgcctgttttggagccattgcttataaaagaagagatatattctcgtttagatagagaagtgacgttgtttttggtttaatttataaaggaaaaggtttttggtttagagaaagagaaagagacggtcaacgagggtttgactgaaaagcgccgcccaaaaaacagacaatgtgagaggttttaatgtttttgtgacggctttttgccttaacgtcccgttactgcggcgtgactttgcgtaatttgattgcttgatctcacgctccttcattaatctacatgactaccacgctctctaacgattaaatgagttttacattaatatgaatttccaagccttattttagtacccaccaatatgaatagcctttttttttttttttttgtcggccccatatgaatagctaatacccacggttctatacttctatgttgacaat

SEQ ID NO: 11289 - DNA, 918 bp, Arabidopsis thaliana landsberg
cataaaaatatacatctctaaccctttaagaaataaaatttaaagttatgttttaaaagaaaaaggtctattccatcaattccttttcattcataatttgaaaaagtcatgtaagtttccttcatggtcaaacatcaaaaaacaaatccacaatgtcaaatataaaaattcaataaatcaaatccacattccacaacatgtccaagactttttttttttttggtaaaagatgtccaagacttttgtatcctcttctagaaaatcatgaataagtgaaagatgatatttatgtgttaatcttttttatatatttattataatcaggaacttccagaatcgcaaagaacagatgctgttaatagcatggtctatgaagccggagctaggatgagagatccggtttacggatgtgcgggtgcaatttatcatttgcagagacaagtgagtgagcttcaagcacaacttgcaaaaactcaagtagagttagtaggcatgcaactccaaagatcaagtctactagaattgatatataatatggagcaaacaaagttgtcagtacaagagcaaggacaacagaagatgtcctttgagagttcatttgaaagcggcgatgagttcattagtagcccggacgaagagagcaatgatttggggttccttgaggacaacaacaacaacaataattcatcaatgtcgtggtgggatcctctttggacatgatcataacttatggtattattagctcactttaaagcgctttagttgttacttccatatgcatattgaagacctaggatatgatatatgcgtagtttgtttttttcttaatttctctaagtcaaccccttatgcataagcacgtaacgaaactgctacaaacttaacaaacatgttacgtgttagtattatgtagtcata

SEQ ID NO: 11290 - DNA, 1348 bp, Arabidopsis thaliana landsberg
agttggtggaagtgaagtggagcttggtttgggtggacgagggattgaaactatgtataggctaaacgttggtggtcccaagctaggtccaagcaaagatcttaagctttatagaacatgggaaacagatttaagctacatggtgattgagaacgctggtgtagaagtcaagaacagctcaaatatcacatatgctttggctgatgattctcctgtggctcctcttcttgtttatgaaactgctaggatgatgtcaaacactgaagtcttggagaaacggttcaacatttcttggaagtttgaagttgatcctaatttcgactacttggttaggcttcatttctgtgagcttcttgttgataagcaaaaccagaggattttcaggatatacataaacaaccagacggctgctggtaatttcgatatatttgctcacgcgggcgggaagaacaaaggtatatatcaagattactttgatccggtctcctctaagaacgacgttctctggattcaacttggacctgactcatctgttggtgcttctggagacgctcttctgagtggtcttgagattttcaagctcagcaaaaatgggaatcttgctcatctcatcaggtttgattcgactggtcactcggtaagtgactcgaagatgcggattatttggatcagtgttggtgctggtatagcaattatcatttttttcgtgttcttgggaatcttggtagtatgtttatgcaagaaaaggcgaagcaaatcagatgagtcgaaaaacaatcctcccgggtggcgtccgttgtttttgcatgtcaataacagtactgcaaacgccaaagcaacgggaggctcgctgagactgaacactcttgcagcatctacaatgggaaggaagtttacactagccgagattcgtgcagcaactaagaactttgatgatggtttagctattggagttggagggtttggtaaggtttacagaggagagcttgaagatggaacactcatagctataaaacgagccaccccacattctcagcaagggcttgctgaattcgaaaccgagatcgtgatgctctcaagacttaggcataggcatcttgtgtctttgatcgggttctgcgatgagcacaatgagatgatcttggtttatgaatacatggcaaatggaactctcaggagtcatctctttggaagcaaccttcctccattatcatggaagcaccggcttgaagcttgtataggctctgcgagaggattgcattaccttcacacagggtcagagagaggaatcattcacagagatgtcaaaacaacaaacatactattagacgacaactttgggcaaaga

SEQ ID NO: 11291 - DNA, 1200 bp, Arabidopsis thaliana landsberg
tatgaaaaaaaaaaatatatattgacaaatttattatgtttacataattgcagatttttagaaattatttaaaaatcgaagagttgcaggatccgtcgagcaaactcggccctctgcaacagttttaccagaattgtaacaatccaagaggatgcacttcgtatgcttttttcctttgctgctggaactagagttggtacttgtagtctaactcatcaaaaacaaactcatcagaatctcaatactaaatttaaattacacgtcattgcaacatcaaaacttaccctaggcgatcttatcattgttgaattctctgcagtatgaatgatgatttctaagcttttaattggccatgggatttcatgatctactgcgtcagggatcacaaatatgtcaagtgttggcctccacacataagccgcctccttcagaacattgacaatcttcacaatgactgcattttttcccaaaggaatgttatcgatcatttggtccggattagtggaacacaaaataccctcagcaataacatcaccatgagaattccaatcataaactttgcatcttgtaactgactcatctgatattgtaccctataagtgattcacaaatattagcatatgaaatttagcttgcaagtattgagaataaagtaagtaaactcctgagacctgggttatctttgaataagaacttataattggagattttgataagttgtccaaaatcactttatccgcttgccaatgaattttgagtcgcaaagcttccccaagtgtgaacatggttggggtaggcctccatagtggcgaatcactatcaattatagatgtgactacaacaactgctgcgttaggaccaagtctaatgcgaccaatcaggtacaaaggatcagacgagcagaattctccttcatcgacaacaacatcttttgatgaaccccattctagcagctgacacctaacccctctgctaacatcacttaccttttttctagctaagtcagtgaccacatttttcaagtctagaatatggctaagcaattcggcttgtgtttcttctagcttttgcacgtgtgtgtctctagcctgaaggaatgctagtttggtagccgtaatccctctgcctaaacccctaactctcctaggttaatccttccccaacacttgactaactctcccagttttatcctccaatgga

SEQ ID NO: 11292 - DNA, 1484 bp, Arabidopsis thaliana landsberg
aaattaactatctgaatgtcgagtttatcgttgctccttacgaagttaatgcacaacttgcatatttgttgaataataaagataaagacatttgtatgtggttctcattactgatacttacctcgtaccatttagatgtccaagagtaagttctctaatacacttatcaattattatttttaatagcttgaaaataaatttaatggtcaaaagatacctataatatatttttaactgaaaaataaagagaaatttatgaaatctgttagttttatgtttttaataagcaaaataaaatattttaataagcaaaataaaagatttatgttttaaattatctaaaaggttttttttttttttgtagtttaaaaagtagtacaaaaagtgttatgattcgtcattaatcattcccaagcactcttattcctcgataattggtcttcaatctcaaatttccataaacaattgaaagaaatttatggatttattaattatatagcgattcatattcaaatttaacattaattttgttatttatttctcgtaattgatactgcggttggaatcctaatttatccaaactaaaaactctcttatttggtctttttgtacttctcttcctttatttttttttttttttaattttctgtcaattgtacatttgttatgacatttgttggctaagtggcggacccacgttatgagtggtagtgccccaattaacaaataaattaaacttaatggtcgagataaaaagtttagtggcgtaatgttttggagtttgctaaaaagttctcaagaggagttttacaccacgaggtaatacagtcccccactatttttttttcctgggtacgaaggtaaaatgaaaagatcttatcatcttcaataacaatattcttacataatcatccttcataaaatgagattcaaaatgataaattggaataagaacttaagcaatcgataaagagacaaatacatgtgtgataaacataaagcagaagaagcataattgttttgttttctctatgcaagttcatactgaggagtatttgtggaagcttcacggtttttaagcctctgtctccgttgagctcttttctgtttgcgagtttgggttttgctagcaagttttgaaataactggcgcaggaatgctctctgttgcttctgaacaaccaaatacaatgtcaagaacatcttcttccgccatttcgccatccgagtttccctgaatacaagacttgaaatcagatattgggaaccggttctcgtccaaactgatgcctaagcatttgcataggccttagaattaacaactaagagtagatagtactcacagagctattttggagcgtctgtttagtctttgaagcatcagatccaccggaaattcttcgatgagaagggtttggtaagccattggggtttctctgagatttggttgcattgacatcatcataagaagaggcaatttcagtg

SEQ ID NO: 11293 - DNA, 1493 bp, Arabidopsis thaliana landsberg
tatatgttgataatataccaaatggtaatgttgattaatgatatagatgatgaatattgattatatcttttgttttgtgtgtagggagctggtggtccggaggaagaggagaaccggtggccgccatggttgaaacctttgcttaaagagcaattctttgttcattgcaagtttcatggagactctcataagagtgaatgcaatatgtattgcttagactgcaccaatggcccactttgctctctttgtcttgctcatcacaaggatcatcgcaccattcaggtaatgtcttgatcttgattgttattttatacttgtgtctcttgcttcttgttgaggttttgagattgtcttgattggtttttggcagataaggagatcttcttatcatgatgttataagggtgaatgagatacaaaagtatcttgatataggtgggatccaaacctatgtgatcaatagtgctaaagtcgtcttcctgaatgagaggcctcagcctaggcctgggaaaggagtgaccaatacctgcaaggtttgctatcgtagcctcgttgatgatagcttccgcttctgctctcttggctgcaaggtacatttccaatactaccaaatagaataaactctggtatttggttgacacttctgattccctctttacacgtttcatatagcaaatcaggtctcacacagcttcacctaacatttgcttgcattttaggtaaattcaattcctttttaaccgcatgaagaaaagatcaaaacttttgaaatgggtcatcctgaaatctgatatatgttttacagtttcacctaacttctccttgcatttcagtaaactcttttctgatacttactttctctatgtttttgggaaatgaaatcaagattgctggaacatcaagaggctttgaaaagggaagggagaacctgctaatggaaacagaggattcaagtagcagcattgcaattgggaagaacattacaaatctccagagtttcagcccatcaacacctccacttactacatctagtaactgcagaatcgtcaagcgaagaaagggaattcctcaccgatctccaatgggataagaaccgagataagaaagaagctagtttcttcatcagattacacacaaaggttttagctaatacagaggcttcttctgtctcttatctttcctcgtataccaaaagaaatggtcttttgcttgtgttagcaaaaaaagaaaggccttaagttaggttttgttgtcctactacttgggcaaatatgtgaatatgtaatgtgctttgtatatgatgcaaaaagggtagaaatggaaatataggggttttagtgggctaaaagtaagaataaaaacaaaattagtttttgggttttcatttatgtatgcattgtgtaaatttggtttggttaggtgcatacatggatcttgaataatgaataataacaataaattaataatgagaatacctacctttgtgtatttttt

SEQ ID NO: 11294 - DNA, 1102 bp, Arabidopsis thaliana landsberg
ttgcactcacactgctgcttgtatcttctattacttggccaccactcttcctctttaaaattataggttacacttggatcggtagcttgaagctaggagactatagctacgagaatttccgagaaatcgatctatggaaacgttatactactgctctatacttcgccattgtcactatggcaactgtcggtataaaaaccaatactattttgatgctaatttgattagttactaacaaagagattgatgggttttttttttttcgttttggttttaggttatggagacattcacgcggtgaatctgagggaaatgatatttgtaatgatatatgtttcatttgatatggttctcggtgcttaccttattggtaacatcactgccttgattgtgaaaggttcaaacacagagaggttcagagataaaatgaatgatctcataagtttcatgaaccgcaaaaaactcgggagagaccttcgtagccagataactggtcatgttagattgcagtacgacagtcactacaccgacactgtcatgcttcaggacatcccagcatcaatccgcgccaaggtaccctaattataaaaacaaaattttcgttttgttaccaacaaatattcatgtactttttaggttagagttagtgtttcttggaacacaatctttgtcaagccggtccgcataacccgctcaatatcttagcctgctgcatgacggattagcgcgcattgacaccctaactaatacacatttttcttgcagattgcgcaattattgtatctgccttacatcaaaaaagttcctctcttcaaaggctgctccacagagtttattaatcaaatagttataaggctccatgaagagtattttcttccaggagaagtaataacagagcaaggaaacgtcgtggatcatttgtatttcgtctgtgaaggcttactggtacgtaaaatctcattgtgcttgtgtctatctttgcttcttgtatgtctcactttgtaatttttggggatttttataggaggctcttgttacaaaaacagatggatcagaagagagtgtgacgttacttgggcctcacacttcttttggagacatc

SEQ ID NO: 11295 - DNA, 943 bp, Arabidopsis thaliana landsberg
agcaccagcaactgcgaaaggcctggtcttgttatctcagtccctcaaggtaactttgggagtagaggtgagtaattgagagcaaggagaatattggtattcatagttttgatttaactaactagctttgattaattaattcttcatagtatttacacaaattgctaaatgtgtacgtctttattctctttggataaagggttctgtgtcttcttgaactttccaacttttggaattttaagtcatatcactattattgctgtgtttaggtttcttaactttttctgtccaaaatatgatctcatacggtgtcactgtaaaatttgcaggcggcgagtttgagagttgcagagcaatacattacagccttcggtaacattgccaaggaggtaaaaacaaatcaattactgtaatctcttccagtctcttggcatagctcgggcttatgtaatgttcatgttttttgtttttttttggggtttagggtacgataatgttgcttccaagtggtgcttcaaatcctgctagcatgattgctcaagctttaacaatgtacaaaagccttgtcatcaatggtccaagcaaagatcaccaagaaacacaagcacttgatgaaacagatttggaagagttggaagacatgggtgagaaacatatatcagaaggctctaataaccgatcaggctcaatatcatttgacacagagaaaccaggtcacaccggtgaaccacgattttctcttcagaaccgcaacaaggatccgcagtaggcagccgaaccggggatgagataaattctttgggcttgagaaaactggaaaccatttttcatctttcaaatatgaggcagtaaccatcttttccgtttgaatagctagaatatcatcactttgcatatagaaacgaatctgaacatctgttctccgatgagaattttcctactg

SEQ ID NO: 11296 - DNA, 1277 bp, Arabidopsis thaliana landsberg
tataatttattaagtgtaacaacaacatactacggaaccaagacaaaggcctgttgtaaacttcattcttgaacaaaacgcaatgcagcctttttcccctccgacttcaggcaaacacggacttgttttgaagcatacatgttcatcctcttttattccagaacctatattttatttaatattagttcattcataaaaatgataaaattacgttcatagtaaaaagaacagaataatcagccggtaccagaaacgatatcagatgttgaacgacaatgaacataagatataacaaagagaatggtgaaaacaaatgctatcaaattctttttggtgatagccattttatgatattttctgtttacgatttttctctatactcatgctcatcacacacatctatatatacaacagacatgtaaataggtatcttttcacacacacacaaaaaaagtatcttttatggtcaaagatgaaaaaaaaaacataatctttcaagaatttatttccataagtcaaaagaaaaataaagaaaagtaatttctcatttaagtaggttttgaacattagtactaaatagcttttattctttttacacatagttgggggaaaatttactttttcctgactataaatctaagaaaattaattggaagattttctccagtttcatctctgaccaatgtgcatactgcatagtgttgttactaataagggaggaaatagttggcctataccctattattaattgtgatatattttccaatttttttttttttcctattattgagtatatgatatattttgtatcagttttatgtaaatgacatgatcaggaatcccttaaatttccagtttttaatagtaaaaagtgtattctaatatttaccctcacttaattgtcttattttcgaagcgatgtttagttttttagtaaaaccaaagcaaagtagattccaaaacactggtgtattagtacataatactactacgtgttaactttttagttataaaatacaagagtgacccatacacaaaaaaagtaagatcccactgggttttgctactttcccacacaccgtgattgatggtcactctccattcttcacactctcacacaatttatcgatattctctacatattacatacccacgactccactcccattttttcttttattactcacacaagcatgggtttactttatctgtaatattacacaaatgtaatcccatttcctcgataaaatttaaaaaatgaataacccactgacatt

SEQ ID NO: 11297 - DNA, 544 bp, Arabidopsis thaliana landsberg
  unsure (1)..(544): unsure at all n locations
tatgtttctgacttctgttgtgatcacgtaaggagcggggcgcttagtttgccctccctttggtactgaacggggatcgaattgctagggacctctagccaggggaaaggaccacgttctcggtggtggtccagagctgggtagccgcttagcctggttttgtaccgtaagcctacaccctccatcatccaagaaaagctgccctagtacctcagactaggtccctaaaggtccagaccttgaccaaacttannnnnnnnnnnnnnnnnnnnnnnnnnnnnnnntccagatacatgattcgaaagattgagcataacaaagtaggatccccgagggtataatactaattgttgggggccttcttctccgccgaaggtcctctaagcaaaaacaccttcggcaagatgacatgcaaataggcgtgacatgaagttgtatgccgaagctacaatcaaaagagctttggcatgatgatacacttgagacgaagggtggcaccgacttaagaggaaaagacacatagtccttgatgttccgatcatga

SEQ ID NO: 11298 - DNA, 1008 bp, Arabidopsis thaliana landsberg
gttgatgaggcagacttcttctcagacaagagagatagggtttcacgtgagaacatctacgactactactacgaaggcaataaggttctcatcaaaatggagggttcacgagttgaagaatacgatcgttccacatatgtcaatgtaagtatagttgattttctcctaatttttgctatcgatattaaatgatttattttatttcttatatgtgttgaaatatatttctttggttggtgagatgtgatgtgaatgctcataacactagcaacaattattttgcaaacagttgattttattatttttacattactacacagataaactgaatctggttaatgtattaatactgtgtaaatatatatatagatcggtctgaatcttctgaccgcgaatacgggaagcgatgagtcaacggtggatgatggactatcaatggatatggaagataaacgtgcaaagattgaggtacctttttttttttttttttactcgttttccattttaatctgtaactaatttatccacgaacacaaaatactacatccttctaactccactgaatgctgtttggttcgagagcagtaaaattaattgaaaagacctaaaagcacaaattttcaatagattactgttcaaaatttgggagacgtttagtttttttttctcgttctaatatgtatatgtctttggttgtaataaatgaaatgaagaacgcacaactacaagaagagctcaagaagatgaaaatagagaatcaaaggctaagagatatgttgagccaagcgacgaccaacttcaatgccttacaaatgcaacttgttgccgtcatgaggcaacaagaacaacgtaactcttcacaagatcatctcctggtaatgttacaataatttacctttttacttagatcgaaatctttatccctctaaaatatacacatattttatatatgtatccgttaaataaaatcaataaaaaatatatagatcgatctccaaaccgtattca

SEQ ID NO: 11299 - DNA, 1266 bp, Arabidopsis thaliana landsberg
  unsure (1)..(1266): unsure at all n locations
aaaatacatctggatgaccataatgcatcctcactttcagtgggttggcaagaacacgctgtcataaggttacaaaacttgtttcctgagcagacatgaaccatgcgagtgaagatactgaaccagtgaacactttctcacggactccaagtatagtaggcttcctaatgccatagtaagtcttgaatgattccaacaagttcctcatcttaagagcctcctcaaaatggttatcttgattcatatcaatggtctgaatcgcatctcctcgtgtaaagattagagcatggttttggttttctggttttccctcgccaagcttcaagggacctggcagtctgatacgatagatctccacctctctctgaagttgttgatcaaatttcacaagaaccgaatagtactcgacctcatcccttcccaagtcaacctcatcaacatatgcaatacgaagggcatcatgattcttcatcaggaacaaaatctcctcagctctatggtcccctcttgctttatgttgcccataaacttggcatgccacaacatatgtgaatttcatcattgcactcccatactcagaccctttaagcaagtgggttataccactagccattctgctaatttcctgagaaggggttggttgtagtgtgttatccccaccatcatttgtgtagtacgaacggcgtgcctcaggcgcaatctgagttcccatcctgatgtccatttcagaagcagaatcaagaaaggcaagtttcttcaaggcactataataatacatcatccctcgcactgttctggacaatgtttgtcccctatatgaagcccagaggcgaagatctctaaccttctttgaccaaatatcattctcattctctgctccctctctacgcatccgctccagaaaattcacccattcatcttcataaattctttgaaggtagaatagggtggaaattccatcctcattctcagctcggagcatttcttgtcgatacatcacttcttcgtcatagtaaggagtcaacacgctgaaagccatcatcttttctacactgggagcctggggcatagtcataaagagagagttgctaaagaaagcaagacgctctctggcctcaatattcttgggcacattatgcattggatctctagaagtaagaattgtatggacccgccgtatctgcctataaaagacaacatcatcaagaggagggagattaatggcattgacaacagncattcagtatctgctttcaactaatgggc

SEQ ID NO: 11300 - DNA, 428 bp, Arabidopsis thaliana landsberg
  unsure (1)..(428): unsure at all n locations
tgcatttgacatgctggtgtcgtcggtaaaggatggtgataatacgaaaaatgttacgaagattnnnnnnnnnnnnnnnnnnntggcattgcagctatgactgttgggatttgtatcataattaaaaaaggcttatgctcggcttgatgataaatcagatcgttttcctttttgtgtgaggtatttatctactgtacatccttcttatgaacaaataatgagtacgaaatcttgagggaatcaatgttcttggtgattcgaatgaagaagaagatgatgatgttcttagtgcaatgaagaagaagatgatgatgttcttaatgcacttgtagaatagtgattacgtattctctgagttagattggaagagaggttatacacttgttcagcacccagaagatgaggaagttgagatttggtgatgggtc

SEQ ID NO: 11301 - DNA, 1283 bp, Arabidopsis thaliana landsberg
ctaataaccgtccaaacaattgccagaccgttcaccgacgaaaccgataaaatccaaacagatcctttttctccttcaaaacatactcctccaggttatcatggtcattcaccaccaggaaaaggcccaacagttccatcttctcctgcaaaagatcctcctcctccaggacatggtcatcatccaccaagccaagccgctaacgacaagaacaccatgtttatgcctgaagacatttttttctgatgagatcactatgttgtcttcccataaaccagagtcataagctagaaagatcagtagatcgtttcactatgatttaccatttgtatttattttctgtttaacaagaaataaataataacaactctacaatgatagatttctgatataatttatatatgatgctatgcaatattattaaacttaattacttatttccgacattatattttgatattaaagagaaccataagaaaactagtttacgacattattattttccgattttttttcaaaagaagcccaaatgataacctaaagttaaagcccatatgacgacaaaaaataaatttaaagcccatatacatcaaagaagcccatgatttgtcatttgagaagaaagttaagaggaatagtacggtcgcaggagattaatcgaatacctgagaaaatggcgaagcctttgggaacaaccggcgaatttttccggcgaagagatgaatggaggaagcatccgatgctttcgaatcaaatgagacacgctcttcccggacttggaatcggcgtcgccgccttctgcgtttatctcgtcggtgagcagatctacaacaaagctttggctccttccaaatcatctcaccaccaccaggaacagactgctccgtctcactgaagagcatctttcttcttcgatgaggtaaatctttgatgattgattcattttgtgtcgctaattttgaatttttcttcgtttgattggaacgtagagatgtagtttctcgtctatgttaaattgatctttgcgtttagttagtgtatgagtgcttagtttttatgcttacatataaaactgatttcttttgtttttgtataactcgcttaaacctgagaatgttgtgaaatgtttttattgcaaagtgatccttagtttctttccatttgttatctctaagatttggcgtagttagctccagcttaagtttgtgaatttgtcttgaatcttgatcagagtattgtcctgcttagcttttgtatattgtgatcaaagacacttgaaagag

SEQ ID NO: 11302 - DNA, 559 bp, Arabidopsis thaliana landsberg
acacacaaaaaatctgatggtacgtatgttgatgaaagagcacggctaattgcggaaaaatttgatgaacttgtgcaagagcgattgtctgaaatggagtctcccaatggagaagttttgacagtagataatctcagtcaacaggagaaaaacgaaatctatcttaagctaaatttatagattaaattttatgatgagttaaaatacatctcattatatatgtacttgtggttttatagattgttggaatatcaaaacaaggtcgtgtatttggacttggattacttcaaaatgagatttctatgcttttgaatggttcaacggtttcctcacaacctactgaagaagaagtaggaacgttagcccaccgagttgatgaacttgaaagtgaattgaagaaaaaacgtgatgagaatttactcctcgagaaacgtcttcaagcaattgaaattgctatgctttagactatggttttatttagttctttcgaacactttggctttggcttttatttttatttaacaatattctatttgattggcatttacttcttttctat

SEQ ID NO: 11303 - DNA, 841 bp, Arabidopsis thaliana landsberg
agcgccagcaacatagtaaatgtaacatccttcaccaaagtactcaacaccatgccaatttggacattctgtaatgttcaagcagtctgaagaggcaaatttccactcaggtgtgaaagttaggccaaatggtggttgaaaatccataatcgtgtcaagaagagcttcacacttgacctctaactcgaaggaataaatagagtcccatcgagagacagagttttgttcaaagatggtgtcaaaagtggtacctgcgagatcacctctcccgacacacatttggaagaacacatatgctatagttgcatagtcatacgtggggacaagttggttaagcaaaaagagagaaccagtcacatcttgctccctagcaatgaggcggatggcttcatagtacatggtcgttgcattctcgaaatccaaacatcgaagaaaacaatttctccaaacctggtcggggaaaatgttagggggtggagacacataggctttaggttggcaaactgaagtatctctcaagacaaactgttgtccctcccacgcttgtttgaacggatgatgggggcaagatgattgaagtcttcatctccaagcttctttacaatgatttggaatgtatcatcaagtaaatcagatagtgacatttttgtttaagacatataagagatatagagagatgaaataggcaagtgaatataggtagaagaagaaatatgatatctatacgggaagaattgatgacaaacgaccaatatataagaaaaaaacaaaataatatattattaatgaattgcacggtgcgacaaatgtacagatgaattgactgtacaatatgtatagt

SEQ ID NO: 11304 - DNA, 552 bp, Arabidopsis thaliana landsberg
  unsure (1)..(552): unsure at all n locations
caacttaatcttccttcgcacgtaattctaatgatactcaaattctctatacagttaaattctccctatagctagattctcggaaaagctgatcagaaaaaagctgaaccaaacagacccgtagccaggccagcaactaacgtctatccatcttgatctggtccggcagcaaccgacaaatcgtacctagatcgcaagagttttttttgtcgccattgatggagtcattatgaatcgtatgaagtgatctcaatgaatcgatccgtatcaaatagtaataaagtcgattctggtggtgtatctcgcttctgagaacagagatcactacctaaaaaaggcttaaaggagagggtgatcatctgagacacatgttaaaaacacgtcattattttttcgcggcgacttcttctttttttttaaaaaaacgcgacttctaatcgtgctcatgtgacatttattataaanatacgtctctagcaaaaatatatatgataatatgacatcattggataataagtcactaacaaaatgtcacgattgcagtgcatgaat

SEQ ID NO: 11305 - DNA, 755 bp, Arabidopsis thaliana landsberg
aagaagagagaagtacatatttgttgttaaaaagtttgtcagttctatatttaattcttatataagcaaatgttatcgggactgataatatattacagaaagaaaaccaaaaaaatattacagtccttcgacggagaaaacataggagataccaaaatataagcaataccatggaaattacatgagaccgaaaaaaggaacaaattacataaagcatcgcataaagaaaaaagtaaattatactagagaacttctagaatacgcaaagcaacatagtaaatgtaacatccttcgcaaaaatactcaacaccatgccaatctggacattcgggaatgctcaagcagtcggaggaggcaaatttctcgtcaggagcgaaagtcatgccaaaatgtggttgaaaatccataatcgtgtcaataagagcttcacacttgacctctaactcgaaagaataaatagagccccaccgggagactcagttttgttcaaagatggtgtcaaaagtggtacctgcgagatcacctctcccgacacacatttggaagaacgcataggctatagtggcatagtcgtacgtggggacaagttggttaagcaaaaatagagaccccatcacatctttctccctaacaatgaggcggatagcttcatagtacatgaccgtcggcattctcgaattccaaacattgaaccaaaaaaaatctaaatagctggccggggaaaatgttaggtgggtggagacacatacccatta

SEQ ID NO: 11306 - DNA, 1380 bp, Arabidopsis thaliana landsberg
taatcagcttacaagcaaatctagcttgcgagtgggcaagcgacaacatcagaaccaattgcgtggcgccatggtacatcaagacctcacttgtggaaacggtataatatactgtactataagatacgcatatggaacattgtttcacttagattgataaatctgtaggaggataagggtagggcttggcagatcaatactatgaatatgtagcttataatgttcacttatgtgattttttgttcttatgcagctacttgagaagaaagaatttgtggaggctgtagtttcaaggaccccacttgggcgcgttggagaaccagaggaagtctcatcgttggttgcctttctctgccttcccgcatcatcttatattaccggacaggtcatatccgtcgatggaggattcactgtcaacggttttagctatgctatgaagccttaatctcgaatcgcaacattactaataaagcaagaatcctcgtgatgtgttggtcttgtttgtctttgtttagtttttgtgacttctttaaacatatagtaatatcaaaacgtttgaatttctaatgtagccgttaaataaatcaaggcacagttgtgcaccagtttatgtagacctacaacatttgtcattgatttaggtatatggatgagagtattttgatcgacaaacataccatcatggatcaaacagtgttgtcttgtgactcttcgtaaattatggaataaacaggtgaaatatttgggctaagtgagtttaatccggtttcaatcaactttaaagagggttaaacgccaaaacctcacaaacagtttcactgtttcaggtccctaatttttctaaaattccaaaaagcctcccaactaaactaaccattgtccattgatccaaagatccccagaaaattctagcccagcacttgtattctatgaaaatgtcaagctctttttcctttagtcttcctcctcttcttggtacgacgcttctcagacgattcaaaccgcttctcacataagagaaccctgtaacttgagtgaggtccttcagcagtttcacgtaagctcgtgtgccacctcattgcgtttccaatctcttgaagctcactcgttacattgattgtgtcccgtatgtatacacgtcctccaggtcttaaaatccggtccatctctagcatcattgttgtcatgttgcatctgaacaaggccaccaaccaaaacaaaggttataataactccaatgtccttgaagattcttctttattttgcaaagcaaagtgactgttattaccttgttctttcaatggaaaacagacccgcagcatgcagcaaatcgtaggttcttgggtaggatcaaaaggttcacacccgcaaagacaaata

SEQ ID NO: 11307 - DNA, 907 bp, Arabidopsis thaliana landsberg
  unsure (1)..(907): unsure at all n locations
actacggggcacgagatgctgtcttttatggacgcctttcggggatataatcaaatcccgatgaacccggaggatcaagagaaaacatccttcattacggaatgtggaacgtactgctacaaagtgatgcccttcaggctaaagaacgcgggtgcaacctaccaacgtttggtcaacagaatgtttaaggatcttctcggcaaaactatggaagtatacatcgatgacatgctagtgaagtcaaccttatctacctcgcacttcgaccatttacagcaatgtttcgacattttgaatgagttcgggatgaagttgaatccttcaaagtgtaatttcgctgttccttcaggggaattccttgggtatatcgtcaccgaacgcggaatcgaagcgaatccgaggcagataaacgctttcctgttaatgacctaacctcgcagtataagggaagtccaacgattgacatgtcgagtggcagcactgaacagattcatatcctgatctaccgacaagtgtttccctttctaataatgaagcggagtacgaatcactgttggctggattacgactcgccatcggggtaggagtcagaaacctgcatgcacattgtgactcgctgctcttagcaaatcaatactccggcgagtatgaagcaaaaaatgcgcgtatggaagcatacctgaatttagtacgagaggtgtcaggaaaatttgagcagttcgagttaaccaggatccctcgagctgaaaattcggctcgtgacgcattggcttccttgnnnnnnnnnnnnnnnnnnnncttacctcgcgtaattcccgtcgagacaataagccaaccgagcattcgtcttgatgaaataagtttcgttaccacccgtgccatgcgaagaaggctagatgctcagtca

SEQ ID NO: 11308 - DNA, 443 bp, Arabidopsis thaliana landsberg
tttattttcatgcgccactttccactcttcttctgcaccatgaccacgttggcgagccatgttggataagcaaccggctcgatgaacctggcttctagcaggtgatgcacctcggccatggctgcctcagttttctcatcagacattttccgcagtcgctgctttttcgggcgcaccgaggggtcgatgcctaggctatgctcgatgatagagcggctgaccccaaccagatcgagggcggaccaagcgaagacatcattgtttcgggagagacatgaaaggagtttttcctcgtctcgtgaggtcaggtcttcgcttattataactgtttgtctcagtgttgccggtgcgaggggtaccgccttcgttctgtcgttgctttggagctgcgctctgactatttcgtcttcgaccgggcaattgctttcgaagccttcgtgctc

SEQ ID NO: 11309 - DNA, 271 bp, Arabidopsis thaliana landsberg
  unsure (1)..(271): unsure at all n locations
taccgagttatattttcaatagcgcttatgtctatctctatcggtgtcccataagtacagctcttgttgaatcgagagagaaccttcccttatgtcctcccttgaattcatcnnnnnnnnnnnnnnnnnnnnnnnnnnnnnnnnnnnnnnnnnnnnnnnnnnnnnnnnnnnnnnnnnnnnnnnnnnnnnnnnnnnnnnnnnnnnnnnnnnnnnnnnnnnnnnnnnnnnnnnnnnnnnnngcatatagagatagaatgggacactccagctt

SEQ ID NO: 11310 - DNA, 1429 bp, Arabidopsis thaliana landsberg
gtcttggtctcttggacgatgctacacagggatatttcaaaagtttacccttatcaccaactagagaacccaaattaggtcttgtaccgattgtagagtatatgtctatacgatacttctcactgtctcttggacgatgcttcacagtgatattccaaaagtttacccctgtcaccaacaaagccaaataagggcttgtaccgattgaagagtatatgatacttcccactacacttgagtaaagaactgtcttcatgtaatcattataaccatcttgttatgcttactatcttcttcaaatcgcagctttcaatctaaaatgaacttttaagtgtcataagactaattttgcttcatccatcgcaaaacgcaaacatcttttaaaacttttactgattttttctgcagtaaacatagtgaacccggtttacgttctggtttagacgtttcaattttttctaaattgggccgattgacatatattggacccgacccatcaacatatcccacatcgttagacttagattttaattactttaatttaatcaatatataccgaccaaaactctctgctcgatctagagtcttcccaatcaaaaacctaaatctaaatttttcattcccttgttccggcgaaaacagtctcagtggcgacaaaccctattaccgagccaactcgcatattcctctagctttcgcaacgcctttcgctctctctccccaccggttcgtcctctcacaccttatatttgttcagcttgttgattctaccctaggttattgctctactccaacgcttctgctcgactctcgcctagggtttttctttagtccaacttagcataagcttctgctcgaatctctcctagggttttgctctagtctaattaccttaaatttctggttgattctagctttttcatggtgttctcttggacttggtgttgagcattagaggagattactcgccaatgggttaagtaaaatatgttgcagatttgctatagtaaataacccagatagatctatcgaaagcttgattttgtggtaatgcactcattcgagttttttgccgttattgtttatctgcactacaaaatcctgattgctcatgggattcttttttgacaggtttacataaagatggaaagtagcttgtatgacgagtttggtaactatgttggacctgagattgagtctgacagagatagtgatgatgaagtagaagatgaagatctccaagataagcatcttgaagaaaatggttccgatggcgaacaagggcctgggggttctaatggctggattaccactatcaatgatgttgagatggacaaccaaattgttcttcctgaggataagaagtactaccctactgctgaggaggtttatggtgaggatgttgagaccttggttatgggtgaagata

SEQ ID NO: 11311 - DNA, 768 bp, Arabidopsis thaliana landsberg
ataggggtgatggtgaaggaaacattgttacaagcgctgagtacttgttttgaagctctaaaggatgcttgtaagggtgcatcatgcgactcggaattgtgtgcctctctatgtaagaagaaatccagcggcggtgttggtacttgtagaacaaagacgacacaacccagtaaaggacaaccagaatgccactgcaggttttggtgtaaatcagatggaagcccctacaagtagaattttcagaccatcaatttatcaagttaaatacatggaacacggagtccctcacatttttcatttgatgctataaaattttgcaataattgtatataacaatactaaataggtaattataaaaactatatactaaataagtagaccatgacataatcacttttgtgctaattttgtcagtgcatgtcatcgcataagtttgtattcacataatgtatgattttaaataaaacatttaaaaattatattgatcatcataggtattttgtgtatttttctttctattaattaatcttccatttaaaatattttcaatatttctttaaaagtttttaaaattataccttatgaccaaaaatatgaaaaagaaaacttcaatgataaaaaggtgaaatcatttatcatctaagatataaataaattattaaaaagaaactaaaattgttaaagaaggtaaaagaatatcctagttttttgttagtcactctttttatttggcctaaataaaaagaactgtctatgtcttgtccgttg

SEQ ID NO: 11312 - DNA, 1252 bp, Arabidopsis thaliana landsberg
  unsure (1)..(1252): unsure at all n locations
gtggaactgatgaagtgcttcaaccccacaagtaaactctctcttattctctctttctctctttctctcgctctctatgtctctctcctctgtttgttatatcaattaatcaagaagatttcttgtgtttttttttttctgttaaagaagatttcttgggagaaaataaggtggattgaaggattagtctttaggaatggtggtggaggaggagaatagaagcatggaggaaggacttcttcagcatcaaaacgacagagatgatcgtcgtatcacagcttgtgtcatcctcagcacttttgtcgctgtttgtagtgccttcagctacggatgtgccgtcagtttctaaaacttcttactttagtcttaatctcttaatttcttcttaattattcgaacaataatcattataatttcttggatttgataggctggttatacttcaggcgctgagactgctatcatgaaggagttagacctttctatggcacaagtatgtaatttgtttttttttcatttcttagcttttatcactataaatactcaattaatccctaattaattatgcttaaaatgcataattacacctgtttatgaactaaaacatcagctgcttgtaaatcttcttgtatggattactaaactatcagacctaaccaggtcggttatgaagaaaatcaaatggataatcatacgcaattacgtgtaaagacgtcattgataaattatagcttcgctactgaaagtgaattattattatttattagtattattctataataaatattatcttacgaattatttattttattgcggtccaaagttaactatattgagagaccacatgtacagacgttctgagagatgcgtatgtgaatattagagagatacgtattttaatattggaaaatgaatattttcccatatataaagtattatatttttaaaaaaacaaaagtgaatattatgaaaatgcgatatgatagctgttttgtacttggagagatcagagatgcattcatgcatatgtgacgccgacaccgtatgtcatatttgaacatgagtaatattaaaatgttgtatatagctgtattttcaattatattaataattatttgagttatcgaatatagttcttctgacaaattttaatatgataggtaactaatcanaagacacacgatttacttacctacaaaaaaagttagcaacagcatagcatttatttgattaatttataatacagtagtat

SEQ ID NO: 11313 - DNA, 1222 bp, Arabidopsis thaliana landsberg
cattgactagtctctcagagattgatcaagctgagatcacctcacatacatcatcatctgagatcacctcaagagggtaatcatgaagtcccattatggagacagtgagaagcatctcggtcggtttgataagcttgaacgtgcaaacatctcagaccactaaacctaaatctttcaccaaacgaatccatcaagcaataaatcttgactgtataaaaccaatgaccttatacataacatcccatgacttgttctctttcggatcatgaatctctaaaatcgttgtctcctttggcatatgcatctcctcaaacatcttcgggatcccctaaataacaaattcttattggactatataattcacatttatataaaccaaatcttacactgtatctttgcttctctcttaccaagaatgaaaacttacaattacaacattaagaagaacgtttcagaccttcgtcgtctaagcatctccttaccgtctattcagtagatgcccacgcgaaagcacagatttcctttgtgcgtaaaggtaagaaactcgttattacctaacccgttatggttcaaaaacttgtcccagcaacttttctccatgtagtagaaaattaagtttcttaagattttgattggccatgagcttccccatgacactttcaacaccatttagccaagaactccttttccgagatacttttgatgaagttgagagaggaatcgctctcttacgacataattttaggtttatggaatttttggccgaacttgtcatagtctagtctagtggtaaatcgttttgggacaggagaatagacatttctgccccgagtttgattcctatagtccaggaatggattaacctagagcatagtgggctgcctctcgctaagtcgaacccttggattagtcgggtccgatggttatattagtttgtcctaataaagaaagtttaaccttgctttttttaatccaataaagtaagtaaaaactatagcaataataataataatgacgataggtttggggttaagtaagtttaacatgcaatttttggttataagccaaaaaatggaatatttttaaaaaattaacgaggaatacaaatttgtggctgggatatgaacgtacatagcctttttagaaatatgtattttgtcaaacaaacaaataatcagttctaattccatcattaaaaaaaatgaaccgaatacaccaatgg

SEQ ID NO: 11314 - DNA, 645 bp, Arabidopsis thaliana landsberg
cctctttactattgctttttcctctcaggtcttgcagtccaaaactcatcctctttgcattagaaaaaggtcctctttttccacttcctcctaatctccctcatttcgtctgctttgcttgcttccccatcaagcttcaaaaaaaccctaaccctgaaaatactaaccatttccccaaatgggtttttgccctgaaagttttcatctttggtgccttgttactacaagcgtatcattacaaacaatttctatctacgaattttctattgggtctctatgctctgcatatatacttggagcttgagatttccttaaccttgataaaatttctcgtcagtatcactcttgggtgtgacctcgagccacaattcaacgaaccatacttagccacctctctacatgacttctggggtcaccgatggaacctcatggtctcgaagattctctggctcgcagtgtacaaccccatacggcaatggcgagccaagagctccgagtgggatcggttcttcgcgattttcgccacgttcctcgtctctggtgtggctcacgagattctctacttctatttgacacgtgagaagcctacatgggaggtgacttggttctttgtgttacatgggttttgcatggcggctgaagtgg

SEQ ID NO: 11315 - DNA, 516 bp, Arabidopsis thaliana landsberg
ttttggcatctttccgatatgcaaaattgtagcaaccgaaattatcatgcaacccatcttctctagattttgtctggtaatgaagctcgtgtgcccggcaaaaaccttcggcaagtggctctgcctcctggcttcggagtgcccagatgtaaacactaagcctaacaatggcgttaggagttaactgatgaaggtgaatcccaaatctctctaaaacatctgcaatcatcccatgcaggggaaaccttaaccctactttgaagaagcttttaaaaaccaccacctcatctttttcgggcttcggggtaacttcctctcccccgaagcgaattagctccctcttgtcttcgttaaaatagcctagcttcagtaacttagccatatcaccttcggtaatagtagacttcccaaactctaagtggctgggtttagatggcgttgcaccgtactcatcttcaaattcatcttcttcaacgtcagcttgttttgcttcggcggcagatgtatcccctgatg

SEQ ID NO: 11316 - DNA, 455 bp, Arabidopsis thaliana landsberg
  unsure (1)..(455): unsure at all n locations
ccaaaatccccaaaggatcatggaccgcgactctcgcgttgtggaacaaagacatgcagtgcaccgggttcaaccccgctgtgaagaaagcctatcttgagcagtactctattgacaccaaaaaccttttggatgctagagctgaggagctcatgcccgggggattgatgttgcttttaggatcgtgtatgagagacggagttaagatgtccgagacccttaaaggaacagtaatggannnnnnnnnnnnnnnnnnnnnnnnnnnnnnnnnnnnnnnnnnnnnngtgatttttaaagtattacctacaattgcatatgaagtaagtacgaactaacatgatctctttttaatataaaaagggtgtcacgaacaggaaaaggtggacactttcaaaacctcaatcgtctttgcagaacaaggcgagataaggcaaatcattgaggagaatgtgaag

SEQ ID NO: 11317 - DNA, 176 bp, Arabidopsis thaliana landsberg
aagcaacatcaaccccccgggcacgagctcttcagctctagcatctaaaagaatttcggtgtcgatagagtactggtcaagatacgctttcttgacagcggggttgaaccccgtgcactgcatgtctttgttccacaagggagagtcgcggtccataatccctttggggattttgg

SEQ ID NO: 11318 - DNA, 1112 bp, Arabidopsis thaliana landsberg
ctcctccaggcgccattgtcatcatctcatatttcttgttccctttctcggccgggctatcagggtgtacatcaggcacatatacgtgagtaaaatggtccacgacttttactgggaaacaagaaaggtttcagatttcttacagtgaatccacttgatattatagcagtgtcatacaagagatcgaccactcttgttgcttcagtgctctctggtgcattcttacaagcagcctgtaccaaaagaatacagaaaattaataaggctttttcgagacaagagatttctgagagaatattataccacacacttacgttcaagtctttgatgatgggatgatctggattgatctctagtattctcctacctctcatgaactccaggcttgaagtgtctccaagagcctgtgccttcattagcctttcacaatgaataagcacataagtcaatgaacaagcacataagttttatggtatgtggatttcaggttataaagcttttgctgaagtactaacctttccatattagctgaccacccgaatttgccagagacaagcacacaaggagaagagctcaaacggtttgagacttggacttttgcaactttgtcaccgagctgctgttttatccagtcacagagaaggttaaactcttgtttcgcttccctgtcctttacttcatcttcatctcctgcgagaatggacacgttttgttacaaacaaatggttgagagaaatgtgcgggcagtcagcagtgctaaaccatacttaccgagttccaaatcttctttactgatatcaacgaatttcttttctttgtaggtttgcaaattctgaatagcaacttcatcgattggttcaaccaaatatagaacctataattaacaaaagcaagtggtgagaaagtcaaatctaaacagaaactcgaagtttaaaaacaagtcttgaagcatatacctcgatatctttttggattagcttctccaagataggggcagacttggcacttttaagactatcagttgcgaggtagtagatcgccttttggttctctcccacgttctcgatataatcatccaagcttgtcaattcctcttcattcttggaactgaa

SEQ ID NO: 11319 - DNA, 1189 bp, Arabidopsis thaliana landsberg
ttttcactgtttggaattcacgtgctcaagtaagcttcaatactttagttcttatcaaccatgctctcattctatatcccctttaatccatagtggcgatcatataagattgtgaactttgcataatgtaattcaatactttaattcttattcgatcaccaccttaacttatatgacaagagacattatatgatgatcgttgactaatgtagttgattaattacatttttcttaattgacattttggtagcatccatatgtgtatggagtgttggtgttcgaagccatggctacatttatcggacaagtctccgttctatccctcattgcactctttggcgcagccacaaccgctatggtaaaactactttcatcatttttactattgcatttcgtttttgtatagtaactaataaagcatcgatcatatcaagtttaggccacatatattactttagagtttaaacttgtgtttgtagaacaatgtaattaatattttgttttgttttggggagtagataacgacggcgagaaaagcggtaacgctgttactgtcctatttgatattcacaaagcctttaactgaacagcacggtacgggattgttactcatctttatgggcattattctcaagatggttccggatccaaacccaaaccccaaatcttcgggttcgggtcagacacccggaaaattggaacgggttaagtttgagaaggaagacgatgaagagagtcgtccattggtctaataaacgacgagagaagatgtttaaaactcaattcttagttcgtttcacattttatcttcagtatatttgtgttattagaaagtagattttttttttttgtattactttgtagtttagaatctttaaatcgaaacatcattcggcaattcaatttgaaacatgatcaataagtacaaatgcaatgaaaatgtttggttttttattacattttaattttcttgggttcttttatttttattgacaatgtttctcgtgaagaatttgaactttgaacacacttgtctaataaaatttgtgatattgtatcacttaagtttgttttgtaacatctatatatctagctcagctatagtctgtgtcgcctatcagctaagttataatggaagtaatcaagtaaacgaatatttagttatcatgtaactatagattatacttta

SEQ ID NO: 11320 - DNA, 702 bp, Arabidopsis thaliana landsberg
cattagaaaaactcaaaaaataacagaagtgtttttaacccgaaagaagaagaagaaaagaatgactaaacaacgatatgaataaacaattaacaatgtgtggaataaagagcaatgaaatgggaacaacagaacattagaagtaattacctcaaatcatctaacaaagatttgattttattcatgaaggttgcaacgacgaagatatgggtgatcaaacttgatgtacttggtccaatacggccgatacttggacattgccaactccaaccatggtttcatgttcccattatagtgaaccactgctgcattctcaatgtccttcttgtcgatactcgggttatatccaagtcccagcacatgccacgccttgtttaagggatgtgttaatccgtagaatgttattaatcctggtggcaatgtccctagcttccatagtgtcctgttctcattctaaacaacacaagccaaaatgagcaaaccacaataaataaaacaataaaccatcatgagactatttgttgcaaagagttaaagagttatttaccatgttttgccacttgtggtatataccagtgatgtctctcttcttccattcctttaggtcgaacatgttcattccataagcccatccacaagcatttggattgaagttcctcgcaatgtgaggattcgaaaagttgagatacttgtcgaatctgt

SEQ ID NO: 11321 - DNA, 877 bp, Arabidopsis thaliana landsberg
tatttttctggttctcggcagtggcaatgctggcaagacgcagggagtatatctacctcggaggactgcttccgtctggcttttccttgctagcgtggctcaagaattctgatcagtttgcctcttcgacagttgagattcaggttactaacgatctaatattacaagtagatttattcttcttgtagttactttggtttctcaacgtttctatgaatctttttggttgtagatgtaccttggactcctgctcttcgtgggatgtatagtggtgaaaacacaggagataatagagaaagcacacagtggtgacatggactacgcggtacattcgctgatccttttcattggctttgtacgtgtgttccttcaaattctcagtataatggtaagttcactaagatattcttcttaactaatattagtaaatggtgctttcgttaacctcattgatggacccttttgttatgcagtggaataactctgccgatagaataagaagaaataatgaagaaacttaggcaaagagtggcaaagaaaataaaacaagacatttgtggtgacaacaggactgtttttttttttcttggtgatattgaccacatttctgatccttaattatttgataaacagtttatagcgattaagtggtccaaagtttcatcatgtgaattgaaaaactagggtgcgaactcctctagccacaattgcaacttgtgtttatagttgttatagccacaattgatgccttaaattgtaaaagtatatggttttatatgaatatgattttgtaaatatggcttaagtaggatttgttattttcctattctaaagctttcacaattagatgttaagagctggtttttgttttagctgc

SEQ ID NO: 11322 - DNA, 1536 bp, Arabidopsis thaliana landsberg
taggtttatctccggtaatcagagtttacactatgttttgatttgacaagaattgcatgcttgagttaaacgcttaatttggaaagtaattaatataatatttgcttaattgtgaaaatttggcaggaccttgccctagttccatttgtcaatgtcacaactcacaatagaacatcacgctatttgttataaaacctaattagattgtaatacaaccaaatgcagcgtgatatgggaaagagaaagtatactcgtgaagaagaaaccatcaactcaagaatgacgaataaatttacaaacatagtttttggaagctcttcaaatcgtcatcagatcgctagcatgaggtgggggcacgtgccccctgctaatttttataagttaggtagtgagtagtgactgttattttagttaagtccattaggtcatttggcaagagagtgccgccccatgtaacattttgggtgcagagttccattttatatttggttgtcacggccacatcttttgtttatagatgcatttttcctatatttgtttttcttaaataaaactattttatgctgaaaataaataaaaataaaattatgctctttcatctactttttttttaatcctagtttaactttaaatattaaagttatctttctctattgtaaagtatacctacatttaaatttaaaatgatagtaaaactagtgagttagtaaccaactatctcattttgtagttaatttaatattttaacgtttaaagtaaatttaaataatactatatacataatttacatttttgtagtgaattctaaatttgcatctttcaaatcaataaatttaaagatatagttttttcaatatatgtaattataattaatgcatatttagaaaccaattgaaacaacatttttcaaaaagttggtgtctttggaatgtcaaatctaaaggtgacaaaatatacataatttaatgctatgaatttagtttttctatatggtctattttataaatctaatattaataattatatatgattttatgccttcttccatattagaatccaactctcaaccaacgacgaaccgacaaaaggattacaattagagcagttgttgtccctaattgtttgcatgtcacattcaatgtggttccaatgtagtaacaatttaatgctacatcttctactcgaacaagaaaacgatagctcaactttcagtagacgagcatagaccgtggtttaatctaaggtacagtcgtttatctttctcaaaatcgaatggttgattagatctgaatggtaggtacaatgacccaacgctggccataggtaagaagcaatttaacccacctgaagcatttaaccaaccttattaccaggacctgtccaataaaaaaagtcaaccttaattttcttctcatcaaacgcaaccttattgggattaacttttggtaattatcttaccatggaggatatagtcgagtacaattttccttccataaaaattgcacctcatgggtttaacccttgagattcatttta

SEQ ID NO: 11323 - DNA, 807 bp, Arabidopsis thaliana landsberg
tttttaaacctttgcatttttttggttattaagggtctatgtattttaacagtttttttcttttcttacttcacttcctgtaacaaaaacaacaaccacaacaaacaaactattaacctaacaagattgttattttgtgtttcaccatccattaactctttttacctgtttatatcccaacacgacaggttggtccacccctaccgggtaacattccaatcgccggtaacctattgagaagattcatgaacgcaatgttagataccatcaacttgataccagaaattaaagtgtgtagaaggagtaaaacataaagtgtggttgaatctagggaccttggcatttggtagttgaaagagttgaaggagtcggagagtgtagaaggagtagaattatcatcattatcagaagaaggcgaccacagatccgatccgttattgtcagcagaatcagcaaacagaagcaaatgatgagcgggcgatgcaaacggactatctggcaagctatcctccaacctaaaacaccccaaaaagcttcagcttaaaatacacaaaacagtttccttgcagagaactcttgtatataaacctacctctctggtagattcattgtatcatcatcagatccttctttagaacttcctttccctttctctcctccatcatactctctcttgatcacggacaatgggcgtggagatataagtgattggctgaaaggattcggagagtgaatgttggtaggggaattgagttggaaatgcttcttgacgtcaagaagctgcagattcatcagccttctgctctg

SEQ ID NO: 11324 - DNA, 1070 bp, Arabidopsis thaliana landsberg
  unsure (1)..(1070): unsure at all n locations
tttgcaacaaggcgttgagaagcaaacgagaaatttattgataaaccagagtagactcaaagtagaacaaaggctgtatttgaatcaatgaaagatgcatattattctctttgtaaatagctacaaagttgttaataacacaagccgtttaatcaaacacaagctggcatttctttgaacctctggccatacattctaactccttcaatatcccatgcttttctgcagattctaagtagaatatcgccttctttagacgactcgcgttttctagaatgtactttgcaacttctctctcttgctcttcaccattgtattgcctccactcaaatatctcaagatatgatgataaacatatgnnnnnnnnnnnnnnnnnnnnncatggttccatcgactcgttgtactcgacacaatgttttcgatactacagaacaaagaaaatatacattctgtcagtgtcaataggccttggagaaagtggaaacatgatacaaaaaaggcagcagagaaatctagggaggaaccatataccaatttgagcttgagaactcgaagttttggagcatcatcgagtatacaggtaagtaagttccaccactccgtagaacataaacatagctccagatggtcaagatagactaaggaagtcccagtaggaggatacggatccggattctgcaaaacatagagagtaagaattcaaatagaaaaggctagattcatgactaacaaccaaaaaagtttgtacctctgaagtgacagaacacagagaaagatattgggttgaagcaagagatcctagaaacttgtcaacacacttttaatctgaatataaaaactaatcaaagatatgaatacataactccttttgctattacaaatttccattagaagagataaagatcagtcattaactaagtaagtaactaacccaattgttaagtttttttaaatgaatgatgggacttgattctctttcttctaaagtttgatttgttcttctactataatgatcagcgacctttacgagcaaaatctttggggtatcatcctctttaaaatctcagaat

SEQ ID NO: 11325 - DNA, 938 bp, Arabidopsis thaliana landsberg
gtacacgttcttatttatttattttagtacaaaagatttagcaacataaaacgagattaatcttactatacgtgttgtattgctcctttgaaatcgtccatgtccgcgtcacaaacccttgaaatccaaaaaatcaagtctgacattccaatcggaagcaagcatacaatttaatgaagtgtgagatcaaatttcagttattgtttaacttttaaaatgtcataatttttttcttaatccaagtaaaaaaattaaggtgaggaggtcacatatatttgtaatttgtttttgatattggctaaaccgatactaaagatatatctttcggacaattatcccctacaacaagaaacaaccatacatcctcagtaccccataatgaacaatgcaactccatggaaatggaaaccatttttaaccaataattatcagtggcattattttttgaaagtcaaaattgtaacattttgttcaaactgtatgaatattataaaataaaagaaaactcaatacaccgatgctttcctcgcccggcaaaaactcttaaaactattaagaaaactccaaaaaaaaagtttcgttcttttttcaaagcatcatttgcagattgcagtatccgtaatggttttacctgaaaggaaactggtaaaaagacagaaacttatgatctcttctgtcttggatctttatcatatgtcgagaagaagcctctgaggatcttccacaacatccttaatacggcgcaagaaatacacagcctctcttccatcaattagcctatgatcgtaagtcagcgcgacatacatcattggcctcggaactacgcttcctcccacaaccattggacgttgcacaattgaatgcattccaagaatagcagactacgtatgatagattgatttgcattagtaacaaacagacaacaaaacaccttttct

SEQ ID NO: 11326 - DNA, 129 bp, Arabidopsis thaliana landsberg
ctgaaccttaagcgctctcctcatcctcatggcccatcatgtgtaattcgttgcgtttagcataggacattgaatcgaagaagatccactcacttctctcgttgctttagctgcgggtgcagctgcggg

SEQ ID NO: 11327 - DNA, 1143 bp, Arabidopsis thaliana landsberg
gctttacggttaaacgagcgttaatgaccggaagaaagtaatcccgagcataaacgagaagaggagcacacaaggggaaaaccagtaggacgacagctccaaagaaatgcaaacgagctgatgaagtactagaactagataggaggagatggaaactcgtcatgacagctaaaacattcaaaatggtaaacacatgggagtcatgtcgtcgggattcattgtccggtgtatgatctagagacggtttagtaagaactgggtaaagagcagcaaaggaaacaacaaggggaaccagagagttcagcagaaggtatagattggacgacgacgggttaattgcattgaaagcaagggagtacaatgctgcactgattccattgaagcttaccgttaaagataaggcgagagcacgattgttcgggaaatgacgaatgcagaggatgaaacatgctgtgttgaaccaacagatacttaatccagctaacaagcagcagagaaacacctatcatgttgaaaagattcaatcactaaaccaaatcaaatgcagttctctcacgattctaacaaactaatctaccaattccacattcaaatcagatccttgaagcaacaacatcttagtaaaaactaacaagaatttcgtatgaatctttcgaaaacaaatagttatatatgtgtaccagagaataaggcaaagtgatgatgttggtgatgactagccactgaacaccgtaaccaacaaatcccatagccgccgcagcgaaaagaacgacggagagagggaagtaacctaaagcaatcccagacgaccacccaaacgctttccccaaatcagaagccaccgcgaggtaattcaacctcacctgagaaattccgagaactgatttgagatgggaagagtaagctgagaaatcgaagttggttcccgtggatgcttggatccagatcgccgccacaagaacagtccatttccgccatcgaccaaacatggtcctgagaggcggaagatgtttccggagaaactttgtttctccgtcgtctaaggaggctcggttaggtcggagtttatctgaaacatctgtgatacgaggtcttatatacaaaggaagatgattgatgttgaccgatgcttgcaataaagcg

SEQ ID NO: 11328 - DNA, 1936 bp, Arabidopsis thaliana landsberg
ttatattaggcctaagaatctaagatttatagtaagttatcttgctttaagaatggtcttagaaattgacaagcccaccgcaaaagaatattgcacgagaacacccaaaaataagcactcttttttttgttttttttgcactctaaattgcaagagaacacctaaaacaaacctctagtggcgaaatccacttcttgtttaacaacaaagttatatacaaaaccgtacggattggagagtttagttcctctaagatgcatttctattcctcatttgtaagagaaacactctcttgcttttcatttgatattttcgcgggagatgataccgttgtttgcgaatttagaacctgaagaactgaaaagaaatatataacaaaatgtttagaaatatgtagacaagaatgtagtattaactatagaggctctcttaatgatttgtctcaccattctcttcttcttatttttcttctcaatatatgcaagaataccctgttggttaaccatcgtttcatccaaagcctaagccggaaaaaagaagaagccaaaccaatcattactacatattcgagtgatttgatgattgaggtaatatagaccttacctttttggtctcagataactcatgctcaagcacttgaacccggttcagcgcagcctgaagtttatcatctttctctaaagcttcatctgctgattttgagtcaagggacttgtacttttcttcaagctcggccatacgtttgaccataattacgtactcagagctagagactggtggtgctgaaacttcatcttggtttggcttagacatttttgcttcctcgtagtaaactgagttggtcaataatgcaacatcagtaagcttccttggaacggctttagatagccggagcattgcaacaattcccatcacaaaagcaataacccctcccacaagaaagctatcatctttcttttgtggctctttccctacgtaacaatgtaggaggcgtaaacagattggaattttagagcaatacatatatctgcagacttgagaattagtgtgagtagattcttataccttttcttagggtttttaaatgaggttttggtggcaaagacagagccatgaacttatcaaccgcgtcaatgtgcttctcactcacattctcttcgatggttttcatcttgtttctctctagaggctacaaatttaatgcatataaaagaatgcggttggtacttgattagatatcatggtgtaaacataatcttagcttacttcaaagaccatcgacattgatgttccttcttctacaagcaagtagtcttcctctgaaattgtcgagaatctggcttcagggttcctagctatctgctttccatagaacacacttatatttggtaagtggctcagaaaaacttttaaattaaaaaggtgctttaagctccaaagttgaccttaagaagctcaggatcattccatgggcctttgtcagatcgcaaacagccacctttgtctgcacaagtacaaaggccgccaaagaaatatggcaactcgctaaaacaaaaaacgagattacgatgatttttgtataaaattagttataatacaaagcaagatatatcattgagttaaggactagaatcttacctagcgtctatggcttcgagcaatttgggttggtatttgttcccaagaacatgaatctttgatgtcgtttttggatcgaggaactttttaattggagcccacaagagccggaatccaggaccagcattgatgatgaacattctgttcaaagtctatgaagaataatttatttacaacgttgttacttgttactatacctacgagtaataagctttttgaggttaaactacctcagggtaattgaaattataaatcttgagaaggcgctgaagcagctctctcgcggatttggtaagtt

SEQ ID NO: 11329 - DNA, 1101 bp, Arabidopsis thaliana landsberg
cttttttcttcctaacaaacatacagtagtacattttaaattgattacattttaaaaatattaatgcagtgattcacttactgtaggtgccaataaaaatttaaaagaacagttacaatctctcccttttgcgttaccaaaccagatcttttccaggttttaggtcatcacaaacggccaacacaacattttgatcaaatactcaactataaaaaaataaacgaagcattacaaatccgaatgaccagaaaccttaatttaacaaacattcaaattgtgtgacctcataccacgttgactgtcctttagcttacgggctctatcgagaagtcgtattagtctagtgataaaagagtgatgaagttcacttgaggccttgaggggtggtgtttgactgttgaagctcacttgagggacttgagctgtgctgtttggctgctgaagagttcacttcctctgctctcatagatcttaacttttctaacacaacccaaatcacagtaaacattatcttggtacttgaataccgaaatgtccgtacaacgtacatgacatacagagcaaaacggtcgagtgttaccatcgttaagagcaatttcaatctctccttcttttccgacaaaatgttggggtttaatgtacatgtcatttcccaataaacatttcagatggagagtgactctacaagagtcacatgtatagaaccactcgctcgcatctagttttgattcacaaatctcacaccagtattgaccacttgttgttcctttttctccatagcaaagtgtgagtggatggctatcgtgcttgtagtgtgctacacttggcaaagtagcacattcaactcccaaaaaggagtcgcagatcacacactctaagtactttcttgaacacgcattactacaacccatgcatgctcctttggtcaaattgatgtagatggggtgatttggatggctctcatggactgatgtatcaggaaggaaagcacacttgacatctacctgaaagtcacaaaattctacgttgcaactgtacacgaaacccgtactatgtctgcgacaagcactgcaagcaaacatgccttcaacaaaataacca

SEQ ID NO: 11330 - DNA, 902 bp, Arabidopsis thaliana landsberg
aagttcgcttatacatgaatagttatctagatatgaagtacccggtattaccacgaaaacacatgacacaatttacaacaaccgaataaaattgcattaaagctcacacaattacgttattaaattttgtcttagctttgttagactctctagtacaaaactcaaaactcagacatacatacttaagaatgtccaatgttttgctagttaccgtaaaacaaaacgaaagaacatatgttttcagtttaaaatggcaatgttcggtaacccctgaaggtggatcaatctagtaagcctaagaaaaatactataaaaaaacaagagaggtggaaaatgttaataaccagtgtaatggcctctagcaaagttattggctgcatcttctttgccagagataagttgctcgggatggaaaagctgtctgtaagtgccggttcttacttcgtcaatgacggttggttcgagatcaagaaacacagctcgaggcacatgttggcctgagcttgtctcgctaaagaatgtgttgaatgcatcatgacatgcaccaacagtactatcactgcaaaacaaaaccaattattaaaaaacatgaacttgtcaaagttttttttattactaccctaaatcatcagagccatgtcaataacaataacaagaacaaaaattcgaacccacaaacaataaagatggtcataaactagagcgatgaatataaagacctgggcatagtgccatcgggttggataccatgttcgagacaataaagctcccaacaagaattttcgacctgaataccagcttgtccgatatgaatgctaatgatctccctcatgttcgaaaatttctcagagacttcttcttcttcttcctctttctctctgttttcgcgaggaagaaggttg

SEQ ID NO: 11331 - DNA, 977 bp, Arabidopsis thaliana landsberg
tatgatcttagagattagttacaaaaaaaaactcaaatatggtggtactcgataaaaacctgatgttattatctcggttggacaagaattttcctaagatattgattgcaaggactcgtaggccaccattttcttcgatgctcattatcgtttgaacgcattcgtataggatagcattccctgcatttttgtttgactcggtttttgatgccacctaatacattaaaaatcaacttaggaatcaaaaatgattatctgcaattacgatcctgactgatgtagatcaaaagcgttttcaaagcaaatttcacaaatgatctttgaaacaaaacctataaagatgagaaaaaggcttcattttttaccattgtttgaaaagagaaaaaggcttgaaaaaaaagctcgacagactaagtacgaacaaacctgagcaagtatatcattcatacagtcactggcatctgcatccccttggcccaaaacacgcaacagtttgagcaatctgatgtgaaggaatggatccgtaattccagcgacgtcatactcaggtgaatatggactgtttgcaatatctctcagggttttaaccaagccctctgtgcatttctgtcaattagataaggaaaccgctcattttccatcatggcaagaacatcaaagattgaaaacactcaaatcagtttagaatacaggcaaatattatccaggaagataatgaatctaaagagacaaaatggagaatgcagggatcatacagattccagacaagaatcatgaaaccatgagacagtaagaggctatgagttacaaagagaagcctaatgaacaaatgtagagtactttccgattctccaagaaagaagaagaacgcaaactagaacatataaggcatcctaatattcgtttaaccacatagataggatatcagcagattaccttccggaaatattcaaggggcttcggactggctttacaga

SEQ ID NO: 11332 - DNA, 891 bp, Arabidopsis thaliana landsberg
aagaattttacttcatcttggccaagagaagaactgatttctttttcgtaaatcgcacgactttggcttccgggtcgggtgcgaccagtattgctgcatatagtccaacaaaccatatattagcctataaacaaaaacatacataatcccatcatgctcatatggcaaagtacgaaacgtacctgtttcgtggagtacccctctcgttagcaagatcaagacgaacatcgcggcctagtaacaatttaccgttcatttccaatgcctacattcaaaacatccaaaaatgaatccaataatcatcgtaatttcaataccacttccatgattccaaaaaaacccaatatgaacttaccttctgagcttcttctggagaagcaaattcaatatgcccatatcccttaaaactcccatcatcaaatgaagaaagtctaacatcgacaacttcaccaacttctttgaagaaattctctctgtattttgggttataaatatcataccaccaacattttataggaagaaccagaaaaaatgttatgaaaaaatgtcattatacttacatgtcagatctcgcaatttgataggaaagatttccagcaaatagcgtctttgatcctcctccctgagtctgagtagttggtgtcttcggctgtaatatataaacaactaacatttaaacgttgtaaccaaaaaagacgttattgtataaaacgtgataaccaaataataatcataactgaaggaatcaaattcttgacaaaattttactgtatggagtttttacctgctttgcattagatttctgctctgcatccaccatttcaacatcagaatcctggtttcattaaaaggttagaacaaaaactatttatgaacattctatagaggatt

SEQ ID NO: 11333 - DNA, 679 bp, Arabidopsis thaliana landsberg
cctaattaatatacccacctttcattcatgtatgttacgtcaacgtttttatgtccgttaaaactgtaatctacataagagatcataatttttaaaatctccatgtatttcgttgatactttaatttggcacgtttctagtttttgagatcaaatgtttttaatctgcttctagtcttatttttcctaaaccttaaactgtaaaccaattgctttttcacataaccttgcttgttttcaattttaaaatttaagtccaatatttgaaacaacctaacaaatgtcgtctatggcaaccaaaaaaaaataaaaaatcaaaacaatttgctaaaaaggaaattgattaaaattgatttctttcatttaaattggaatttaatatattaggtaaacatgtaaacgcaatcacaatttttatgagagacttcgggccggttcgtttaagtgtcgctgcgactataactagcgactggctttaaaaacgactgagttttgtttgtttttattgtttttttttaagttggaatatgtcgtatagatctgtaaaataattcaaatgtggctttgtcccatagattggttttgattatgcaatcatctatcacaacagtggaacattatgcaatcatttattgtctatcaaattaattatggttatgaaatataagaaatcctgagag

SEQ ID NO: 11334 - DNA, 635 bp, Arabidopsis thaliana landsberg
ttttaatcttacaaacctggactactgtttatcttcttctccaatttacaaatttatacaacatatcccaattttataaaaaaaaggaaaaaaaaacaaaactcagtcgtttttaaagccagtcgctggttatagtcgcacgacacttaaacgaacatgccttaatactaggcccctgagaaacctaaatcgatcaacattttaactcaataataaattttaaatatttcttaaaacatgtattttcccggtggaatgcgttagaatttaaaacatgtattttgctttattgatgtgttagaaaattcgacatattaatgttagacaccgacattcatttttccacatggttttcaagtatacaattataaaataactaaaattactatgagaaaaataactaagaaaactatatatttttttttgtcgtcaagtacattattcattagagatatatttgatctatttattatgattaattaagaaaatagttatgggtcaactagtaaagcgaataatttggcacaaaagttttataccgaatcgcatcatatcacgtttataaacaacatttattagttttcattgatcgataataatttgaaacgaaaaaaaagagcttcggccaaaaaaag

SEQ ID NO: 11335 - DNA, 819 bp, Arabidopsis thaliana landsberg
tatcagttgtggaaaatgctccggtgaatcgatcagacatgcagattccatcgtctccgtcaattaaaccgattagcggtgactccgacccgattatcataatcccaggcggatccaatcaaactcgagactactacactggacctccgtcgtcacggagacggaagagcctcgacagatccaattctactagaaaaattgtgacggagctagacgatgtcaaatcggtatctccggcgacaacaacaatagactcaatttccatggaaacagcggtgaacaaagggaatcaaaacggcgataagaaatcgagacggtggggaaaatggagcattttagggtttatatacagaaaaggtaaggacgatgaagaagaagataggtacagcagatccaacagcgccggaatgattgagaggtctttatcggaatcatggccggagatgaggaatggagaaggaggaggaccgaagatgaggaggagtaacagcaatgtgagctggcgaagctccggtggaggatcggcgaggaataagagttcgaggtattcgtccaaagatggagagaacggaatgttgaggttttatttgactccgatgaggagaagctggaggaccggcggtggtagtggtggaggcggaggcggtggtggtggtggtgggtgggagaagacggcggctaaggcgaatagtcacggccactctatagcgaggagggttatgaggctgtattgaccagagtgtcctcttcattttaattattgggacaatgtgaggttttggtttggggtctctaattatctttgtgaataaattggat

SEQ ID NO: 11336 - DNA, 1147 bp, Arabidopsis thaliana landsberg
  unsure (1)..(1147): unsure at all n locations
tttaacttgtgcaaaggacttgctttctaacagaagctgtagctgctgatgcactccaagattatgcttctgaaagtttcgcatttgcactggtaaatggttcacttggcgtatttgaagtttacggacgaagaattcgagatttcaggttgcttttcagggaaaacatcctcaaagccattttttatttttacatgcactaacaatgttaatttaatttcttttgttagaccaaaatggccggcgtcttctttcatctctaccgatgggttaattactgctatggcctatcgcttacctcatgttgtatgtactatgcctcttgatgatatatctgtctggttttaagcaatatcttagaaaatcacttaacaggttacaggtgacaagttagggaacatacggtggtgggatgtagtatccggtaactcatcttcgtttaacacctgcaaagaaggaataaagaagatcaaattttcccctgtcttttctggcgatataagcagaggacgaataacagtgctattttatgacaacacattctctatctacgatctcgtaagatttcttgtaatttttagacgttgttataagaggtctcatattcttaagtcataataatggtctagtgaacactttttctcatagcttttacttgagttgtttataaacaagtttgtcattccttagtaaaccatgaactttgtatcttcattgcaggattcgccagatccgttggccatttctcttatgcggcctcaaattcctggaacccttatacttgaacttgattggctgcctctccgaactagcaaatttgactcgcttgtgttgtgcgttgctgggactgatggtagcttccgcctggtggaggttcatttgtaagtgatgtgtctgcttcttagtgtataatgtaaagtcagaggagaatcatcttgatgtttattgattttttacatacagagatgaaaaaatgacaacccaaatacctctcaaggaaagatttcgttctgtgcctttatgcactcctatgtactcccaacaccacatgccctggtaaggtaatctatgtttgggtntgagctgatcagaagtatgttagcttacagtctatttctaggcgttacggatgatcttacagcttggc

SEQ ID NO: 11337 - DNA, 975 bp, Arabidopsis thaliana landsberg
  unsure (1)..(975): unsure at all n locations
ctttcattattaacacacttctctcgtcaatcagaacattatttggtttcagagtttctaaacatctgagttttttccatgagacaaaaacatggatccaagggtagtaatttaaacaaaacaatgaaaggtgaaacaaaagcctcatatagatcactaaggagtttcaattctgaaagagatgcaactggattctttaggctgaaacaacggcttgttgttttgcttcgctctcttgcaagctctcatagtatttgacaagaacattccatccactcggacacataaatccatctggaggattctcccctgttcttgcataagttcgcatctgtaagcacaacaaaaaacaccgaataaaaactcaggtgtaatcgcacataagcagaacctcgaaacttggagccttcaataagaatcttaagtctcaaaactgtctcttacctttgttccagaaatgaaaagaaactcttttgcacgagaaggatcgaaaaacgccatcttcttctcgattgtatcgtaagctgcaacctgaaagatacaaagaacacatgattgggaattgaagcagcatattccgataatcaaataatcaagaaactttggttttgcagtcagaatcgatttgtgttaccctaaatggaagaatattgagtttctcaagtccaggggccatgcttaagactctctttccatgatcaggatcatatagatctctcttctcagtagggtggcccattcctgcaggatcacgacctacaatgtataaattagcaccagcgttaatccttgccttggcgtgccattgaacttcagttggaccagcatagtgcatcggtgacggaaagatcgagacaatagtagtcttcgggtcaagaactccatcttctagaacctacacatcataagcaaatcaaatcataatctctctttacaacanattctntatgaggaaaacgaaactcgaacaacagc

SEQ ID NO: 11338 - DNA, 1059 bp, Arabidopsis thaliana landsberg
aattataaaaaaattgcatgttgttgagaaaaaaaacatttatgtgtgtgtatttaactattcatacaatcattaaaacccacagtaaacataagtgaaaataaacatctataaaccaagatttagctagctagtcatacacgcaaactaaaaaaaaaatcaaaatcaaaacgaaccagatcaacacctaatttaacacctacctattcttggttgtcatttagactactaggaaacatcaaatgattaaattaagcatgttctcactggttctctttattagtctatgtctttgtccgcgaagtcttggattctgaagatcagccggccagtctggcttttctattaaaaaatatttatagaaagtagacgtcatttacaacaactactactataatatggaatttatacgatcacattccgtaaataatattaaatgtggatttggtatttaaagaatcatttggtagtgaggcatatgaaaatagtcaaatatacatagatgagaacttcagatgtatgacgatatacactttcattgcgtttaagtttccatttcgtgtttgagtcttaaaatcatatatcatacctttgccgcatttagatatatgtatttcatacatcaaaatgcatgtgtacgggaaaatgcattcatcatatgtgtgtgtgtatccctaagattctttgttgttagaaaattaatctacctaagattttctaacgttgttaataattttgaaatgcaatgacctcttcttgcgcagtttccccaaaattatgattgatggtccgtacggcgcaccagctcaagactacaagaagtacgaggtggtcctgctgataggtcttggcattggagccaccccgatgatcagcattatcaaggacattattaacaatacggagaccaaggaacaactcagccaaatggagaagggatcgccacaagagcaacaaggtaataaagaaactttcaagactcgaagggcttacttctactgggtaacaaaggagcagggcacatttgattggttcaagaacatcatgaacgagatcgca

SEQ ID NO: 11339 - DNA, 2008 bp, Arabidopsis thaliana landsberg
  unsure (1)..(2008): unsure at all n locations
tcaaaatgtgtccactaagttatctggacaggggagatttattacctaaaagggaaggactggtcgtttccttgccacttttcagagaagaccagacctatctctagaaggaaaggattagattgaaggatttaaaagcaaactcttttcgtgttcgaaaaagcctgctaaccatctaggagcgtggcgaggcaacataagaactcaacgtgggatctaatgtcacactttttgcaataaaaaaagctccagtattgcattttgtgtaggctcaaacagaacaaaccgatcctgtttggccacgtgcctaagacaaggagaggagcaatgtgacttaaaatcaatggccattcagtaggcttgtgaatagcgttggtgatgttcatagtggatgcagcaaaagtcactttctccatatgtaaactattcatactttttaaagcccattcccagctcaaaatcttagcttcaaacatagagcgaaccagagaataagatcttcaactatgaaaaaggacattgccataagagtccccttaccacccatgaagcaccagaaagagataactttttacaccaagaaaagccaatgttgcatttcaactcatttttccaaggtggctgccatattgattcgacaagggaagacgatttttcttgttttaagtccagtgaatgtgctaaataccaatccttagtatcatcccaagctttctggattaatagatgagaaggcaaatgaaatccattgaaaagcaatgaatttctgttcttccatatatgccataaggtccacggaaaagctgaattagattcaaaacaagtagcctcacaagatttcaaactgagaagataatgcaaattctgaaattctgagttaccataacccaaaattggagaagggatgttggataatgcccaaacttgtcttgcaaaaggacaaagaaagagaatgtgattgatggtttcaatctcttcatcacaaaacaaacaaccatccgtcactttgagtcctcttgatcgcaatctatcatgaaccgcaagagcacctttgagagctttccaaagaaaaactctaattttaggagcagtttctaccttccaacaaacatgaagaactggatttctagagggacatgattcttctattcgtaatctgtctttatggacaaatctaaacattaagtcataacccgacttagcagattagatgccatttctagtttccccccaacaaaaagaatctgaatatccaatcctgggttttattgctttgatgcgatttatttcagaatggtgaaacaaggaccttagcaaagtatcatcccacacaccagactgttgattgaaaagatcagcaactttaagattaatatttgtaagggggtgataacttacgggtcttctagctttaccatcatacaactagttgtcgatccataacagagtatcttccccattaccaatgattcgtttaagacctttagtcaacaaaatctttccaaactgcaaactcctccaagcgtaagaaggacgtgaacccattgaggctgacagaaatggtgaattgacaaagtagcggcttttaaaaaacctggaaaaaagacattatggatcatgatgcagtctccatcatcacagaaatcaatttcttaatggtactcttaggaagcttaaaacatgacatagcgtatataggtaaagccatagcaacagattttaacaggatatctttgcctccttgagacaagacttttgcataccaacctgtcaactttgcttgtaatcgttccttaataaaacctaaaagaagttgcttggaaccactcaaacactctggaagacccaaatacttccctgtacctccttccaattcaattcatgtgttcaactntatccattcccatacatccttatctgatttagagccaaaagtgatagcagatttctgtttattaatcaattgcccagacagactttcatattgatgtaaacacgtcatcatcgc

SEQ ID NO: 11340 - DNA, 1372 bp, Arabidopsis thaliana landsberg
ccaaaaggaggagagaatatagtcaaaattagcaattattggacaaaaactattacactcatttcttattgaaatcaaagtggagtttaataaatataatatttttttcgaaggagttcgttacatttgaccaagtggtagtcaagaaaatgtgaaatcagttaatgaaaaaaaactaattctgtgatcatgtaacaaattagactaatattcaacgattagtacttaccctattaaactagagtcgtcgtcggtgaaaagctcgtttccgaccataattccggtaatcctagtggccggaacatagggtttaatgtgagaatctacccattgggtagcttgttgaggatcttgtagtaatggtaaaacctgattttcgatggtgacgatgatctcgatgtttgaatttgcaaaggcactaaggatttgagggttagtgtcgtagattcttgtttttgtgatccttaaagatctcaagaggttaatgactttatccggtgaaggcaaattgttcccaacttgtccgtaattgatgccaagagacgttactgtttgtagtatattccctatatttccaaacaaagaatcgaacttttagaaaacaatgccaaaaatctttaatattccattaaacaaacattgaaaaattgaattctagacttattatcgatccgttatttcactatgttaaaatcttacacgttgaggttttaaggcggcaacgtaaagcataacttaagtgttaagaatttggttttaaaatttcagaatgaaaaagaaaataacctgagaaaacgagagaaagcaggagaaaaacatgaatgagactggaatgtcttgtgaatgttcttgatgtcatgttgaggaagagagagggagggaaagagattgtgaaggttttgggttttaagagaagtgtttaatggaatatttatagacatacacaataagccaaccaaggtgaagaatacttttcttcgcttgtttgttttttttccgtgtttttttttgttgtgaaaaggtttagtgttgaagtttatgttttaaaaaaaaatgtttttaaattgtttagctttgcctccctatattgcttttctcatttatgccttttttatccactgacggctttctataaaccacaacgaaggatttcttattaaagaaatttattaggttttaaaatatttgtatgtagttatttatcatatagctagattaatgcagactctatgacaagacaatttgcatgcacatgtatggaaggaaatacgttgtttgtgtgtttcgtttaattacatgtactatacaagtggtgttaacggttgggttggtaaaaaaagtgagcaatgttattaaattaagaagagattgg

SEQ ID NO: 11341 - DNA, 1030 bp, Arabidopsis thaliana landsberg
aacacaatcctaagtatttacatgttcttttacttttccacaaacataaaatgtaacaaaacgtgtcaatcattttctccattcttattcatcctccaagaaactttgaacttgaccgagattagtaataatcactcgtgtatataaattcatctcttcataatttatctgccacatatgaacataacccaatctgaagatcaatcataaccttaaaccatctctcataattttagtatttctattctcaccaccaaaactcgttgatacatcacaccccaactgttgttactcatgtcctacagatcgatttaccgcactcttcgaccggtactatcatcttcggtacaatcctccggtttaggaattggaggattcaggggacatctcattagccacttgcccaatgttcggctattgagctctgacacgtcatctccggtaagtgggaataaccagccagaaaatcctatccgaacggccgatggtaaagttatatccacttattggggtatacctcctactaagatcactaaaccggacggttcagcttggaagtggaattgttttcagccatgggattcatacaaaccggatgtgtccattgatgtaactaaacatcataaaccctccaatttcactgacaaattcgcatattggaccgttcaaactctgaaaataccggttcaactattttttcaggtaatttaatcagaaattttaaatcttcttcatttgttcttttatttttaacatgattttgttttttcaaaaattgaataatttgatttttgagtatagaggaagcacatgtgccatgcgatgttgctagagacggtggctgcggtgccgggaatggtcggggggatgcttttgcacttgaaatctctccggaggttcgaacatagcgggggatggatcaaagctttgctcgaagaggctgagaacgagcgtatgcatctcatgactttcatcgaactttcacaacccaaatggtatgtatatatgcatgcatgtacccttttagttt

SEQ ID NO: 11342 - DNA, 1215 bp, Arabidopsis thaliana landsberg
gagcttccttttttttgccactgtgcttgcaacagcagacaattatcattgattggttttagatttagcttgctgcattcaccaaaatatcgccagagttttctctgatattgagattgatgtttctttgctgtttttttccgtactcccatggaattagcactgtgtgctgaattacgccattttttttcttttataaagatgcaacctctggcgcaaaagaaacttgactttgaagagttctgtgcggctgcggtcagcgtttaccaactggaggctcttgaagaatgggaacagattgcaacttcagcatttgagcactttgaacatgaaggaaaccgaatcatatcggtccaagaactcgccggggtatggtcctaatttaagcatctatgagattgtgtaatcaccatctctttcttaggatgaaaaacaattttcttatatttgggcgtgatttaaagcaggagatgagcgtgggaccgagtgcatatcctctgctcaaggattggatccggagttcggatggaaagctgagtttcttggggtacgctaagttcttgcatggtgtgaccgtacgaagctcaagctcgagacctaggtgacacatcatgatgtaaaaagtcttctaacatgtgaattgagtttcaagaaacatcctagacattgtcgtcatcagagacctttggattcaaagattaaaaaaaaaaaacatgaaatggaagtgaagtcaggtaggtatttcctttgtaaatgattctttgagcatttcgttttcgaaacaaactaaaaaaaggaaaaacatattatatatgttatagaaggaattggagaggtgttgttcttctggttttattctctgctttcactttcgttagtctgataatatgttgtgtacagaagggcatataagtttgttagccgatagttgaagcaagtgtcaaaatttagtgtctaggaatgatgatgcttttatctcttatgatagagtcagtgtcactaaaaattgtgagtaacgagtccttagttgtgaatgattccggattttcgttcgtgccaaacttcttatactgtggagtgcccaatgctagtgagaggagctggctttgtggctttggcaaatcctattggaaaatcaggtgagaacattatatcaatccctaggggcactatcaaaagagaggcgtgacacaagtggtctaaacagtttaagag

SEQ ID NO: 11343 - DNA, 1217 bp, Arabidopsis thaliana landsberg
atggattgcatcgaacaccttccaaacatgaaacttcctatgatctagattctagactagcttcatcaaaactaatttagcactaaaacacttagagagtaaggatcaattaagattaagccctaaacatcttgatcatgaatcaatcatgcatgaaagactactcactaatcattgtgaaaatacaaacgaagttgagattgcataaaatacttaagattcatacaaaaaatctcaaagaaaaaaaataataatattcaaaacaagcatccgctcctttaaaaataggtcaacattgtacttatagataaattgtgcggatcaggccaatccgagacataccgggtcaatcccgctttttgcttgagaaaatgcttgcaatcgaccttctaatcgaccacatggtggatcacggttatgtccgagagtgtgttctcgtcaaatcgaccagtcactcgaccatcaggtcgatgaggctgtaactttttatctgctactatgtttgacctgaaatcaataccgttggaaagctaatttaaatttctatgactttgatgaaggactccaaagctaaatcacaagggaatgtcttcatatgacgtgattttcaagtacttcatattgatcatggattatcatatctcttgttctttcctccatatttctttggtcattgtttgttcttttaagcaccaaatctcctatgctagctctcttcttcatagttcttactccaacacctaaatggatgaactcattgcaaatgcaaccttaaacaagtctaaatgctatgttaatgcatcaaaataaatgaaaaagggggataatatcaatgcaaatacaaccttaaacaagtctaaatgttactactccatctgttccttaacaattgattttttagaaaaaaatacacgtattaagataagctttggaatgaaatttttaatgttatacataaatcgtgacaattaattttgaagaaaaaaagaaaagaaaaaaagatataacagtaaattaagagctaattctgcgtaggaaataaaaaacaaatcaatttttttagaacaacttttttttagaaaatcaattattaaagaaaagatggaatatgttaatgcatcaaaataaatgaaaacaaaggccggagagaaagagttgtggtatgttacttcaaaattcaaactgggagaaacaacaaacgaattagaggagaaaac

SEQ ID NO: 11344 - DNA, 1103 bp, Arabidopsis thaliana landsberg
  unsure (1)..(1103): unsure at all n locations
caagttcatactttagcccatcaaaattacatctctcctaataacttaaaaacctaaatgtgtgagtatatagttaaaaataatagatttatggagatattgattgagaaaaatttttcaaaaaatctagcacaaggccaaagattaatgtgaatctggtagactgatacaatgtaatattttcgtagaaaatagattgttttcccgaagtttttttctatagtttagacatagtaaaacgattttttcctagaaatgtagtttaaagtttggacacattaaaccattttatatctaggtatgtatatatatatttaaatcatatacaatataggttacaggtgtatattttatataattttgatgtaaactttatctgatgcaaaaacaaatgtctataatttttgtaatcgcttttgtcaaactgataaaaataaatgattttaaaatgtggtgccgctgccaaaaaaaaaaaaaaaaagtgttgacatcacggcatacatgataaatatttcttctacccattgtcgtctataaggacttacggagcatgtaagaactttcatcttcgtggcagcggaacccaacattgacaaatatttcttctagttaaaacttgaatttccaaattaattaaactaatcaaccagtcacgattacggtccaaaaaaggagcaggaaattcaaaagacacgtttggtatgaaagaacattaaatattcctttatttcatgcaagagtcgctttctctacttttctcttcatactattactttatttaacaacaccaaacagcttatatatacaattaactaaaacaaaacgtgaagacactcttctccattaacacttgcttctctttatcaactttaaaataccccaaacttaaagccgaatcaagaacatgtccgatcaccagaaannnnnnnnnnnnnnnnnnnnnnaagcgccgccacatccaacggctccccttgttccacgtggttcctcaagatcggaacatggtgatcctaccaagacacagcaagcagcaccgttggatcctccgagggagaagaaaggatcaagaagttgttggtgcagatgcgtgtgctacacgcttc

SEQ ID NO: 11345 - DNA, 897 bp, Arabidopsis thaliana landsberg
  unsure (1)..(897): unsure at all n locations
aaactgtttcatttaatcaaatatcaagaattaaatttgaatttactattttaaaaccttaaataatatttttaattttcacaatttttttttatcaatgtttgtggaagccagttttaataaaatagacaaaaaccaaaaatgtattatacttaaaaaaatatatttccgctgccggggtttgaacccggaatattgtatgatcaaattaatgatgatcggacatttagcctgtgtgctacagcagaattatcgttagtctatgactttatactaaacatatagattgatgaaaaaattttgatcgggtttaaactgtaacaattaatcaaatatgacgaattaaatttgaatttactatttttaaaccttaaataagatttttaattttcacaaatttttttatcactgtttgtggaagccagttttaatgaaatagacaaaaaccacaaatgtattatactttaaaaatatatttccgctgccggagtttgaacccggaatattgtaagatcaaattaatgatgatcggacatttagcatgtgtgctacagcggaattatagatactttatgactttatactatacatatagattgatgtaaaatttttgatctaaaacatatattttccactaccagggttttaaagnccggnaataatttgtaagaatcaaaatttgatgaatggatcgggacattttaaacatgtgttgcctacagcgggaattatttgataggtctacgnacttttattaataatacatatagnatttggatggttaaaaaatttttgaatcggggttttaaaaccttgtaaaccaattaattcaaataccgaaagaaattaaaatttggaatttattatttttaatccctttaattatatttttaattt

SEQ ID NO: 11346 - DNA, 790 bp, Arabidopsis thaliana landsberg
tctacgcactttataatatacatatagattgatgtaaaaattttgatcgggtttaaactgtaacaattaatcaaatacgaagaattaaatttgaatttattatttttaatccttaaataatatttttaattttcataattttttttatcacagtttgtggaagccagttttaataaaacataacagaatattggaagatcaaacagatcatacaagcatttaaccatatgctacagcgaattattttgatattctaatttttttttgaatagaatgttaaattaaattcaaaagaaagatatagcgttgttacaactagtgcgactttttaaaaaatttacaaaagaaaaaaaaaagaaaaaaaaaagattcttgatctagcttgtgttcttcagagcgagccagagttggaatcccctatcgtatttgtggtggccattagctttaagtaccgagagctgattacggatgtgtttatcaatccacgagactaaacgacttgctgaatgtggtggtgtgccatgattacggatattctaatttctactatacatatagaatcatgtaaagtttttgatcggttttaaagtgtaacaattaatcatagtatgaagaattaaattttaattttctattttaaactcagtccacaattaaatatcattttgctaagtgtcatgattctccatccgactcccttcttcacagttgagtatttgataaaagagcaggcatcaacttgagagttgtatcgctgtagggttggttctgaatcatataaataagtcat

SEQ ID NO: 11347 - DNA, 1248 bp, Arabidopsis thaliana landsberg
cctttgacgattgagaacttctcctttgaagaatttgtttcgttagtgtggcaattcatttgtagcgttccagtgatggcgctggaagagattttcccatggatgacgtctttactctctcccaaggagaaatctgaagttgagacttgcttcaaagaagttgtcccaaatgaactctctttgcaactggtatggtatattcaatactgagatatggctttagtctctttcattttttgttattgtgacacgactaaattatttctgaaggtcataaactcttggctgattgatgacagtcaatcttctttgacggctcttacaaagattatgaaaggagttcagtctgtagaagtgtctgaaaatatgaccaactctcagacaaattcatcatcaagtggtgtgtttcaacgtttttggcagtggagtaaaaaaatgtccttgtctagtccaaatacaggacacattttggttcatggtatccatctttggcataatgcaattagaaaagatttggtagacattcaaaaaggactatgccaattgacatttccaagcctttcattggacctcaatgttctggtggttcggctaaacttccttgctgatgtccttatcttttataggtaataatttggggaactttgattttgtttctttcactttgacatggtgtgtagtctcttggacttgtcttgttccttttctctgagaaactggtgacatacttcatttcagcaatgcatttaagacgttcttttacccagtgtttgaagatatggtggatcaacaacactcttcctcttccaaacaattcaccatagatggacatgtggaaaacttcaagaagtcactagaccttgaaactagagcagggagtgacaattttgtcataacccttcaggagaaactggagtctcttatattgacagtagctaagcagttctctatagaggaaacagaggtgagctgatttattatttggattttgtctaaaatagaattgcatgtttttgaagactagtcactttgacatatttagcttcagagattacatttaaagtatttactcattgttcttctccaggtattcccgatcatcagcaagaactgcaacattgaaatgcagaggcaactactatatagaagcatccatgtcctgcctcttggattgctaacgtgtgtcataatgtggttctctgctcagttaccagaagatgaatgtcaatcaatattcactacttaagc

SEQ ID NO: 11348 - DNA, 412 bp, Arabidopsis thaliana landsberg
  unsure (1)..(412): unsure at all n locations
tttgatttttaactaaacctgcccttgtttaaagggcttaggaatgtgatgaacctgtggaggtagctgggactaacaatgaacactcagtggtgtaaacaaaccatcttgatggctcataccatcggatacatttcaccttggttgaggaggccgccttcccctcaagaacggggttacaattgatacctcctaaaataccctcgcgtgcactgacgggtacattcaggaaggcatggatggatagatnnnnnnnnnnnnnnnnnnnnnnnnnnnnnnnnnnngtagcaatgatgccactcgaggaagaccctgacctgtatttccatcctcactaggatgtgagaaatttgatactgaaaaggatcaatgtgtattactaggcagatgatgaaagtgactgccactccat

SEQ ID NO: 11349 - DNA, 467 bp, Arabidopsis thaliana landsberg
tttgattgttggcaagccaccattcttcgatgggacgaaggacccatactggaagattcacatgtctgtgtttcttcatagtattgggagattttcctcgatgctacgttgaatgttgtaagtgaacgaatcactgcaattcaagtggaggtccatgattcgaacaacaaagctcgcaatactttgttctcctgcctctcgttgggtgagtttgagcgagttggacatctggctatggctcacgagatctggtccaccatcgagaaattccatgagcgcaatgatcatgtaatgaccagactctttgagatgtatcgatgagagtacgagaattttgtgcagttggctggagagaccattaacacgatattttctcagttccagtcgattgtcaacaagatgcgtgccaacatggcacaactaccctatgatgatctcgagagagcgctcaagctacttcatgctct

SEQ ID NO: 11350 - DNA, 1449 bp, Arabidopsis thaliana landsberg
ggccttagtgggccgtgcaaagagatgggagttatgaaacgacaccgtttagttttaacttagtgtcaaacactctaacctgaacagaaggtctcaacaataagagggggactagcaagaagactctcaagggaaggacaacttcatgaaagctcacgtgaagtgaaaccaaactcatcctttgtcttgacgatttgatttctcttgtttttgtttgtgcaattccctatggattcttctttggtcgttggtcttttttgtttttgtctgtgggtcgatgtgattttatcaattcttgtctttcaagtgtttgttgaaatgcctcaatgggaaaatgtaaggtttttcagggaatccattaatgggttctgctcaacccaaggattcaagtaaccctataacttcagctccgaatagggctgcagtaaaattgcttaagtctctcttcattgggttatgcgttgtgctagagtttccaaagagatgatctttcatttctcttttgcaacctcttgttatcaatctatgggatattaaggttattctccattttcattccggaaagaaattaaccagttagtgttgctcccattgatccagcaacttcagaactatgtcacggtttagatcattgtggcaagccctcggtgaatgcaacaaagaagggtatttctccattttcttcaattaccatgttcaacactttcttgtaacttagtgaatttcttgctataggtgtgctatacttattcttgtttgtaatcataatcaagtgcgtttgattggaaagtaacgattttgtttcaagactaatctctatggggatgaaattttctcacctttctactttgcatactttttagctagtctctaacatattttcacaatgtacatactgtatatagctctaacgtgggaactcgaagaatgggtaccccctgtagagaagtgtatattcaagttcaattcaaaagaagaccttaagacatggcacctatactctgattctgaatatggaggtacttaaatcacacaagttcaggcatctgcccataatcatgttacagaacctattattgcctgtttacatagtttcttttactttcattccttgttggttcatgttatgaaataatatttctgatatgcagtgcataacaattcttcatgtgatatgctcattatagtgtggatattttactttataggattatcttcggcttcgttggaaattaaagatggaggaaatcgatcagattgcaatggttagtatattgtggaacaagtgtgccttgctttttctttctgttactttttcgcttgggtctgatacaattagtttgtgcaagccagattttcgcattaggctgggaaagttaggccatcgatgaatctttgacttaaatatactgtgatgattttctcatatctagaggcataggagcgttc

SEQ ID NO: 11351 - DNA, 1460 bp, Arabidopsis thaliana landsberg
agtgtcgctctgtaatcgcctcctctaaacggtgttatcccaaatagaagctcatagaggaatatcccgaatgtccaccagtcaaccgcgcttccatgaccttctcctttgataatctctggtgctaggtactcgtgtgtaccaacaaacgacattgaccttgcgctagtcggttcagctatcagctcaggaagcggtctgatttggcggctcatatcgttcgacttcttcctgtgctttcctttagacaagaaccgaggagtgaaacacactggctggatgcagtcaggctgaacaatgcagctcgattggtctacacatgttggttggatacagtagcttgagcttttggactcaagcgtgattgctgcgaaccgaaccaacgttggagagactgcacatctcaaagagaggtcgaaatcagatagcattatatgtccatcttcacgaactaaaacattctcaggcttaaggtctctgtatatgatcccaagcatatgtagatactccatagcaagaagaacttcagcaacataaaatctacaaacaagacagcaaaaagatcaaaactttcagctaataacgaaaacattaaccgtaaagtctcgaatttttacctagcagcttgctcagggaagtactttccacgctgtttttgtctaagagaatgtaaatcaccaccaggacaaaactccataaccaaacaagaattcatctctgtttcgaaatgtgagtaaagcgtaggcaagaaaggatgatctaacgattgaagtatctctttctcagtctgagctctaacaagcttcttcctcgctgcaatagcagctttctccataactttcacagcaaaactcactccagttccaatcaactcagctaagtaaacattaccaatatcacctcctcctaacttcttaatcagcttgaaatctttagcctcaagcgacgaaccaacccgagaacgaaccttctgaatcgcaacccaacgcttatcgttattatctttatgtggcttcgaagctgcattactcagaccacttgagctactctcatcactaacattactccctatacttcctctgtatatcaggacagggttcttctccaaatcaataccacctataccaatagtgcttatgcttgcacattcactgaattctgtgttggtaaagctttgttttgcttctgtgtaaaacgtgttggttgggctagagtaaaaccttggctctgattgtttcttcttacgtataatcgaaattggtgtctcggattcagctgaaacagaggacacagaactttctataacttcaggggaagttggttctggttctgggattaataacgtcttcattgatttcttggtgcctcttgaatcgattgagaaagatgtaatcgaacctttggatttagattgaaaagtttctggatttggatgatgaaccaacgtaaacgactgatga

SEQ ID NO: 11352 - DNA, 1003 bp, Arabidopsis thaliana landsberg
aatttaatttcagtatcgagttatagagttgataccgtgattaaaattgcacatgagagattctatactatagccatgggtgttggtatttgtctgctcatgagccttttggtttttcctatttggtctggtgaggaccttcacaaatccaccgtcgctaagcttcaaggcctctcctattccatcgaaggtatgtacttaaatattatagattcaaattaaatagattgctttttatactttcggcctcatcttattttcaatgtgaaatttttagcaatctagagttttttttgtttggaatcaagaaataagaaagtagatatattttcataattgagttagtaaatcttgctaatttcgatcatttttatattttgtaacgatattgcgatattgttgtttttaagtgcaaaaatttattattatattattccaattagttaagctgattaaatatacggtattttttactagcatgtgtgaatgagtactttgaagaggaggagaaagacgaatacacatcatatttgtcataagactcgatctataccggatataacactgttttggattccatatccgccgatcaagcacttgtaagtaatttctatcgaacatttatttcaaaactcgaatgaaaacaaaaacttgaatgtatatgaacatgtgtatataggcaatgtatgcaagttgggagccaagacacacacgacattgtcatagatttccatggaaacattatgttaaagttggatctgttcttcgtcagtttggttacactgttgttgctcttcatggttgcttaaaaaccgaaattcaggtaactttaaaatgttcttttgttttgaaactagaaattatatttagttataagctatagttcagtttttgtatattgatatataatgttgtttctgttaattttctagactccgaggcctctccgtggactcttcaaggatccttgcgtacgactagctggagaaatctgcaaggtttt

SEQ ID NO: 11353 - DNA, 1435 bp, Arabidopsis thaliana landsberg
atgaaacagggtcttgatccaaaatcaacggctaatctatttgcaagatcagtatgcatgggagagaagaagataaatgatgaagactgtttcatactcaaacttgatgctgagccatcggcgcttaaggcgagaagcagcagcaatgttgagatcatacggcacactgtgtggggatgtttcagccagagaacaggtcttttgattcaacttgaagactctcaccttctaagaatcaaagctcaagacgataacagtatattttgggagacaacaatggagtctttgatccaagattacaggaccgttgatggtatcctggtagcacacgctggtaaaagctcggtgtctctgtttcggtttggtgagaactcggataatcattcgaggactcggatggaagagacttgggagattgaggaaatggattttaacattaagggtctgtctatggattgttttttaccgccttctgacctcaagaaggacgatgatgaagaagaagaaatcgaatgtggtttagctgctaataatgagaagctgcctatgaaaatccgaagcgcttctttgaggattagttcctcaaaggtcttagcaattgtggaagaagaagatgaatcagaggtcactgaagagacataaaagcatggcctgagtttcggtttttgtacatagcctttttaatctattgcaacatggaaacagaggattttttctatttttggtttttgagttcctctgtaaatcactgaactcttgggatgcaaaatgcaatgcaagtgatcagatcattcataatacaatgagataagagaagagactttcacaagactgcatttgcattaagcttaagagtgactagagctatatacatcatccgcaatcaagaaacagatttacatattctagatagaaattaaacccgcaaatagcataatgagctcttctaggtcttgttcttcctctctaaacttacatcaaacttaatagtgaaaaaaggcattggtacaagagtgaagtacctttccgagagatctctaatgaatctcttcttcttatggagagttgaacattacttgtgttgctatgtagaaggaacattgaagtggaagagccatgagataacaaatgcaaagaccatacaagctaaaaggaaattcaagaaccggtgaccttgccagaagcttctaccttccaccaatcgtggaccagatgttctcagagttagattctctacaccatttgcttcattccggctttcctcagactccacctcaacacttccaacaacattacccgcaatcgacccacaaacttcacagattctgcacagcaaaaccaaaccatgaatctcatcacaaagaaagaaaaagctaagctttgcgtctctcatctgacaacaaatggcctcaaaactgaaacttctcaaaaagac

SEQ ID NO: 11354 - DNA, 876 bp, Arabidopsis thaliana landsberg
acaaagtcatctgcaagcttatagcgaataggctgatgtaagtttttcccaacttcattgctggaaatcaatcggcatttgttaaggataggttgttgattgagaatgttcttctagccacagagcttgtaaaagactaccataaggattcagtctcaagtctatgcgctataaagattgacatatctaaagctattgactctgtacaatggtctttcttaagcaaggttttttcggcgttgaattttccacctactttcattcaatgggttatgctttgtgtcactacagcttctttctcggttcaggtcaatggagagttagcgggttatttccgaagttctagaggcttacgacagggttgctcactatcgccatatttctttgtaatgtgtatggatgttctctcaaaaatgcttgatagagcagcagaggagaaaaaatttggctaccatcctcggtgtagaaattttggtcttactcacctaagttttgcggatgatataatggtattatcagatggtaaagtgcgttccgtggaaggcattgttgcggtttttgatgcttttgctaaatgctcaggactccgaattagtatagcaaaatcgactttgtatttggcaggcataccaagaacatctccgcttcaccaggctactcgttttccctttgaggttggtaaacttccggttcgttacttgggacttcctttggtcacgaaacgtttatcgaaagcggattacacgcctttgatcgaacagatacgacggagaattgaatcatggacagcacggttcctttcttctgctgcccggctcaatctcatttcttcggttttgtgaagtgtctgcaacttctggatggctgcatataggt

SEQ ID NO: 11355 - DNA, 1909 bp, Arabidopsis thaliana landsberg
cttttgggaccgatcttcatgcaatttcgattttccccagttttacccccacccaaacgacagccgactgtgcgggcacatccaccaagagaaccgtaagctatcaacaaccaaaaacacttcatgatcagatgatatatataaatttcaatcttaacatttattaatcttgcaaacagaggaactagaggggctaatcattggggcaaccgtcacactgaatgttatatttgctgggtaagtttcacatttccccctcaatctctgcaagttaaaattcttcaatggtaagaatctttttggcttaaccaatgggaacaatccaaactcttattttacaaagaggtatcaggagcatcgatgaatccagccagaagcataggacctgcactagtgtggggatgttacaaagggatttggatatacttgctggctccaacacttggtgccgtttctggggccttgattcataaaatgttaccgccaatacagaacgcagagcctgagttctccaagacaggatcttctcataaacgagttaccgatcttcctctgtgatgatgtagatcaatctttaaggtcaagcatcttcaaatctgttcgctgctctcattgtaactaatcattatcaacacaaaatggttgtaaagtagaacatatgtatatgttactgtgtaaagtacactgtaaatcaaattaaaagtctgtatcattccgacttatgaaaacgattcaagaacgtaacttataagtctatttggacaatgcgactttaattagcagacaggatattacaatttcggttgaagaaagatattaaagttacagtaagtgtaagtcccgttacaacaactagtcaaccactgattcatctacttcccgcctgaccgtcaagatataagttgttgttgatagaatgtgttccatctctttgttgtgttctctgacctgttcttgggatgatcagaggtctgaagaaaactaaggcgaaaagtaattccataatgaacaaactcatgctgatccagacaaacaaagttttcctccagttccatatgatccttttcaagaaaggaagtttggattcaaggaacagagatgcatcgtaaatctcaggaatacctgctgcaggacgaaactctgcacgttgttcgatcatgatcttcaagcaagcagtaggaataatgtccttttcgaccaagcctttaagcttcaagttcaaggtttggatttcagagacatagcccgtgacaagcggagcaatctttagcaaagtctggacaagacgtataggctcgctactaaattttaccatacacggccgccttgaactagcaagcacatgaccactcgcggataagaagtccacccgaacctgaaacatcccgagatttctattgtactcggactcaggcaatgtcattgacacagttatctctgtcctgtctttcaaccctttgaccttcccagtttcaatactctccttgccactcaaaccaaaggcaacaccagcacatgaacttatgggcacataagcttcaggactactcttggtgtaatcaaaattcaagctctctttgataacaagtggttcatgagccaaataggtaatcacaaaaccactaatcataaacgcagaaaccaacaaggcaaacaacatgatccccacatgaacagcacaaaacacaccccttgttactctacgcacaagctccaacacaggcttatcatcttttaaccctgaatcacataacccaacaattcacgatactgaataacgaataccacccctcattgttcgatacggaccaaaaacaaagctcaaacatttactaattaaccatggaggaaaaccttataaagggaatcatcgaactaacttgaaattcaattgtcctgtgcactacac

SEQ ID NO: 11356 - DNA, 998 bp, Arabidopsis thaliana landsberg
aagatcatatatatcatgtgtatgatgaagtctcttggtttagctgatctcttcatgttctttattactttctttatctccaaacccctcacccatggccatcagtcttcaacaagtcaaagtaaattgataaattcagtatttttcattagacaccccaaagtataaaaatgtatcgttgatacggtgatacaagaaccaaaagatggaaagatatataaagaattttcaacttttcatcaaccatcaaaatataactctgatccaagtcattaacgttcaatttggttagagttctgttctattatgtgttgatccataaatgataaaaagattgaatagtatacaagtaaaaagagcctatttcaacccaaacttttctttcctaaacgttttaaaaattcaaaaaaatatgtaccttaaaatttgtgtgtaaatcaaaatatagttcatttctcgagtttcatatatatacatagacgaaagacatcaagatcatacacaacatcagaagatgaaatttacaaaatacgagagagaccttcttgctaatgctaacaactaaattaccaaccccacttcacgcgcctctagcaacctcagaagctccaatcaccgtcttatcctcttgattctccgccggcaaaccaaaattggtcggcgcgtgaggtccaatcagcttaattgaagcgttatcataagctagagcagcttcctcagcagtgttaaaagtacccagccagagacgatcacgtcgtcctttacaagctcctcttccacatctgatctccgccacccacttcccccacggcctctgcctcactccacgatatttcttctccgttttcgccgtcttgagaaattccgccgggatcctgattttgaaccgtgttttgcagacatcgagtttatcggcggaatcggaaggatcgattacgatctctttaacgaggcgtttcccacggcgccgagtctgggatgctcctccacgctcctcc

SEQ ID NO: 11357 - DNA, 248 bp, Arabidopsis thaliana landsberg
ttgactgtaacttgtctttaagaaaaccaaacaaatccttcttagacccacttaagcattcaggtaaacccaaatacttacccaaaccaccttctgtatgaatcccggatttcattttaacccatgccttggtttgatcatcaatcctggccccaaatgtcaaagctgatttatccaaatttatcacttggcctgacaggtgtaaacactatgataaacaagctaataattcttcacaatcatctgga

SEQ ID NO: 11358 - DNA, 1350 bp, Arabidopsis thaliana landsberg
acataactatataaatatgaaaaaccaataagtgttgtaaatgtggaatatgatgagctagctagaaagtctcaatcatgtaatcaaattgaagtattgaatccaaactcaggttgtttgaaacaatcaatcatacaatgccccaatatggttgattggagcatgacaaaggaaccatgtgcttccacttatttaaatttatgttgtatttatctttttttcggaatattatttaaatttacgcaaatttgttttgaattaaagacctattatctaatatggtattagaatcttattcacacgttttcaactcgatccactgacgattagtccaacctatatttgattcttcgatccatgtccaaaaatatcgagatcaatagctaaaaaaagtcatcatctggaaatggtgtcaaagcttatagctaaactagatgtaagttggcatcgatactcttatactcttcacatcacatgcattgagttctgatgtatatatagaatgggacttttgaatagtccggtgaaagagaccggattcatgattatcattttgttattttgtgaattacaatttactctcgataaacaaacacgatttaccagcatcagtgtaatgtcaagaaaaaaaaaaagaacagctcatgtagcaatgctatttcaaattttaatagaagggcagtcgtagcttaatcgattgaatcataacgtaaaattttgagagtagaacaaacgaaggaacaataacctatatataggtaataggctgcaaatgagtttgaccgagacgggaacggaggagacaaagtgaaagatctcttccttcttcttttaaaaagataagggataaaagctcataattaattattgtttgaggttcgagaatttttttttagagagcatatgaacgtaaagtttatgatagatgatattatctggtcatagatgaaagaattaagtttgatatcatattcaaatatttgttttaatagttataggtaggatggtattatgtttgaactaatttttcattgaaaatatatgaacaaaattaaacaaggacaactagtggttccatttacgaatagtacaaacaaacaaaatcctatcaagtcttatgggctctacgatttctctaccgaaaacatatagtttcataaatttgaattttttgattacaaggtttgtcgtgtcacgacaaagattcttctatcgcttagagaaaacatgctttggaaagcaagatagagatggtcaaagcaagaaggcaatcatgtaaattcaataatgaatctgattttttgttgttgaattcctatctattaattctgttaaaagggataataccgc

SEQ ID NO: 11359 - DNA, 909 bp, Arabidopsis thaliana landsberg
tctcatagttgtatttatgtactgactgattctttgggggcacgcacaataactttgatgtccaattttccttaaatacatcacatttgttgtaccatcaaattcttatacttgtttacacgtcctctctttaatgtttcgacctgcaccactcaattcttctctatttaacttcattcccttgacctcactttattatatcaccactaccaaatagcaccaactttaccctgccttaatggacaccctagatataaacatcgcccttgatatagcattgtgggttgggcaagactcctgttctgatcttgcaggcatgctatgcacatccaaattatttcgtgcccttgctttacatgattccgttctcaacaaaatcagtcttcatccctactttctcactccttccagaataaacctaacctcttcttcacgccctttctttggtcgttgctttgaggatgctaaccccactgcaacctatctcgaaagccttagactagcttgcagagaaggacgagccgaagaaggtcttcaactcttgtatacccatcaatctcatctcccccatgcagccttctctcaggccttgttggaagtttgtctcggacattatgacgaagcaatgacaacaattgcttcatttatttccatgacaaactcttacgaagcagctgatgcgtttgccagtcatgttttccaacaaattatgcaaataggtccaaggaaaattagatctcattgcaacactttgcggtttgatgaatacccatattgtcttctaactggttgcgggattgacaaacgctgcatcaactgttttctttactggatcgctgttatgtatcttgtcctctgttagcatctttcaaattatataacccgcttacttgttactctaattttcag

SEQ ID NO: 11360 - DNA, 905 bp, Arabidopsis thaliana landsberg
catgctccaactctgtttcattacgtcttcactcaccccaatgctcgcaattgatcgtacaagataagaatttacaaaccaatctcctacctcctccaccttagtcgtaggttcccaaattactttggaaagttgaaaacatttccggtcgtgagcatttacaagagagttctcatctacaccattgttccatttcttgaggaacttgtccttcaagcgacggattttggttgtgaattgatgttgattcgcttgaaagctaatgaagttcttcaccgtatcaataaaaccagtcatatcatcataaggactcttccctttatcattctcaaaatcaaccatgccttgcagcaaaacaatctcatcatcatcactccatattctttgaaaataattctttttggtatctgttgacaccatctcatcatcactcgtcttggttacaacaactgaaacctccttctccagcgaatctgaatcagagtcttgacgcctcttcaccatcgatggatcttcctccggtttgagacgcttgttcgtctctcgatgaatcttcctccggtttttcttggccgtcagacgtttgagagagcgggagaccaaaagtttttttgttattcctttcattttttttttcaagataaaaaagttgtagagataatatcagaataaagatcttctatttatatagccgcttagcattagggttaagtgtttgacaaaaaaaaaaaagcattagggttaagtaattgtggctacaactttcaaaaagaagggctgtcaagttttgtttctaatgtcactaaagatcgatcattttggcccatatcaattttttcttttggttggctacaactcaacacctcttttagaactattttgaatggaggctgtgacattatttt

SEQ ID NO: 11361 - DNA, 649 bp, Arabidopsis thaliana landsberg
gttggacagccattgcggtttcccgagcatccaaatgtgagctttgtagctagagatttgatcagaggattgctagtgaaagagcctcagcatcggttggcttatagaagaggagctactgagattaagcagcatccgtttttccaaagtgtgaattgggctttgatcagatgcaccagtccaccacagattcctcaaccggttaaaccaatggatcaagctcacagtgttcgtcatggttttagtcaaggacatggacatgttggttatgataagcctcctactgtggatgtgaagccttctggtaattatttggaaattgatttcttctgatttgtgatttctttcactatcagttttggttggttcaatctgataccggcgtattatgtttgcttttgaggtttgtgtctagattttgtgttactgatgtgtttggtcttaccaaatatttgactgttgtgttcttcacattgtggtgaggttgtatctagtttttccaatacaagtgtcttttaatttgcaactaagaaaatgtaaattttaatcatcaatagatgtgttctttaatcattaaacagattagtgttactgaaaattgaaaaagaatctaacaaaatggtaaattagagtaaaacacaaatatgat

SEQ ID NO: 11362 - DNA, 1419 bp, Arabidopsis thaliana landsberg
atcttctcccatttctctcctactgttgtagatcctcccatttgcgtctacaaaacgcgcgtccacaacgttatctgcagctaaaccatgtttcctcatcattgcaccaaaccctcctccgctaaaatgacctccaactccaacactagggcatgttcctgcagggaagccatggatcttacttgatttggcaattttatagtaaagctcaccgatagtggcaccggctccaacccaagctgtttcatctgccaggttgatctcgatcgatcgaacattaacgagatcgagtatgatgaaaggcgagtgtaatgagagataagaaaggccttcatagtcatgaccaccgcttttagttcttacttgcacaccaagtttcctgctacagagtaatgatctctggatttcagtatcagttcttggtgtaacgatcagaatcggcttctggcttgtgaaattcaaggtcagaaatctgtagttttgtgatattaaagactgcgagaaatcggtgtagactcttgaatctggtttgtggatgaagcttttagggtttatgaagctggaatcagaatgtgtcgacatgcaactcagaaattgatctttactaggagaagaactagagtcagaattgacccattttactaagaagacaagaaacagggacagagcaaaagcttcaagtgttctcatctttagtgttttggttttcttgtgtttgaagttacagagatatagcatttgttcttgttctggtgatgatgagagagtatcagagattttgataagaactgatgatgttgcagaaagagtaaactaggttccacctaacaccgacgtagaaattattaaaaataaaaataaatttcagtgaaaattttgtttttggaattttgtgttgcaaagaaacaaaagaacattaaatcataggcttcgtttttatttttcgagtagtaatgtattccaacaatggaaataacgagttgtaataatatgcattatcatcttaatcacttatcagtcttggaagattttacttatagacatagaagaagaaaaatattcacaattttgtgctaatatgtagtaatagttttttccacctaattgtgttaatatggcaaatacctacctacttacatttataatttgtagacttgtagtgttcaaaaacgtttcaaaaaaaaaagcattaacgtaaatcaaaataaaactttgatatatcgattttcaatttagttttcaccctcacataatcacatataacaaattttgattatgatcaaaagaaaaaatcaaataaagtatcattgatatgaaattataagcatcactgatcacaaaatctatatcaaattgatactgatagatacatatatttcatatttatttgctcattttttgaacaatatatataacata

SEQ ID NO: 11363 - DNA, 1530 bp, Arabidopsis thaliana landsberg
caattcaactattcaatcagcgagcaactgatgaggtaatggtttcttaactatcaagttattggatatacaaaaaaaaacacttacaccaaacaatataacacttttcattaattatcaaagcaagtccctttcctcgtaaataaaatctcactctcttgtcgttacattttaaacaaaattcttggttcaatacgtttacaatgtaggacacacttaaacggaggaaagtcagtttagttttcttctctgcttattcttggtttagaaatctctctaggtctaatcttttacgagaactattgtgatgaatagataccagaaagaagctcatgaaatttaatatttaaccaaaaaaaaaaaaaaaaaatcatgaagaaaactaaactgacttgttagtttttcagtaggtttagagaaactatcaaaagaagcaaaattttcaattctgtggtacaattatttttttagtttaagcgaagcataaatctttcattgttgttacgtaattggcgaatggtatgattgttcaaggcattgctcaacagatctcaatagaaagaaacctctaatcctcaatcttcactgatatcttcatattatatttaaacatcaacagaattcaaaaggcctttctgccccttgtttttttgaaaacgcaatgtaggatataacattagtttgctctcacaatttggacatgataattaaccagaaaataaatataatattgtaaacgacaattaagtcacataactaacactttttaaccaaattataaacatttctatgtatatatgtggagttgaattacaagctgacattgaagttgaagccatagatatagattccaactctttcacaacctcatgtcattatcttgtcactgttttttttttgtcactttgtgatgttctcagtcatattcaatttctttctttcggttctactctaaatagtctcataacgttttccttcggttctcttgattccttgaataagcttctcaagatactactaataaaccaatatagctagacccaagtatgttccaaggaaattcctagttagactcttgaaaaatatttgtattgctttgaaacaacaattcacaaactctagatgtcactgcgaaatgtgatgacagcatctttgttagtggatgtgaaccattttttcaagacttacggatagagagataattaaagaaaatatcaccttttatggcgtaaaattatgatctcgtttgcaagatatattaaaagcttgtcctacttcaaaactccatgaatcttgtcttttgtttcgttatctaaggatcagtgtttcaaatttttccatgaacaagaacccacgattaatcaagaaaatagctaggtctgccgaatgatataactaaaaaaaaagcaaaaaacaaaaacaaaataaaatagcaaagccaacagagtgatatagcatgttagcaaatgattcaatgacggttgtgatggttgttcttcacagacggagcagacttgcagaggtgacgaa

SEQ ID NO: 11364 - DNA, 1323 bp, Arabidopsis thaliana landsberg
gctcttgctttaccattgaggttgagggcctttgaggcatcatcttccttagaggatgagtcttctcctccaccgtcttgatcagcgcagtttgaatcttcctccgtacagaaagtggtgcttgagttctgtctactcatcattgccccattctttcttttcttcaacttcgtctctccttcttcctcttccccttcattgttatccccactcatctctacgttcttctgggccctcttattcactcttgctctcttgtttttctgagtccattgcaaaaccgtttctatattagtcactaaaccaaatgtgatctctctagctaattgccaaccagttagaaaattaaagacttacatcagtagatgtggcacgggatctctttttggagccggtgagagattttgtagtagtcacagagatctcagattgcaacaagctttcctcgtcatcgtggttctccactacggtttccaaaggcataagagtctttccagaagagtatttctcaacgtcacactcacttgtctcctcaccaacaaggtatgagtttgtgttgatggtcacatcttccatcccaaagtccattgtctcattttggttctcttcaaccgtgggtggaacaacggtgtaatagccgctgttcccagcgctgtagctgctgctctcttgagagaaacagaagctaccggcttcagagacgaggctaaggtggttgtgatgagaaccaaggttccaatacaagccttggtggtcaccactggctgctgcgccggaggatgagccggtgccaggatgatcataagaggcgagaagctggttcatgaaatcggcttcctcggttgcataagtgtacattcctccgaggttgttgctccattctcccatggcttccatttttatatgttttgttaactaagcgtcttaattaagagattaatcttaattaagaagattgttagttggaagtcttgtgggaagtgagggaatgaggaagaggagttggaatgtatatatagagaacatgagagatagtggatatataaatgtcaacacataatgacactagttaatcatctttctaattaatttataaataaccaagtctgggataccattagatatggacagctaattatggtgggctctctgcaacttggtcatcgaacattaagtttaatatatatttgtcgtttgtcgtttatgattctgcatttctacttatatatgttaaatacatcgttttcagttaaacacaagattatagttggttgatataatagttcatatgagaaatgattgtggtggccgtattcaccgcag

SEQ ID NO: 11365 - DNA, 1255 bp, Arabidopsis thaliana landsberg
atttagtctggttttgtgcaactatatgtatggcttttgaactccactccaggatcccaccatttatccatatttccatcataatggaaaagaacaatcgtgaaattcgcgggaagaaactgagacacaagagctttacgttaagaggaatcctctgttcttcttcaatgcctaggattagtatcaactcgagcaaaaatagcaataccttctttacaagagcgtcgacgttacccttttgcttaagtcctacgggtattgccaacaagttacggttagtcatttccacaccctgtgttaaataatcacaacaaacatcagaaactcctcaagctacatagatattcgaagaatatattccgcgattcttgatgcctctaacctttgacctcagactacctctagaccagagaggctttaattcaagatctgatctagactgtatgattccacgaggcaagccttttaatttatcgttaactgcttcagattcctgaacaccatccacaagtgaactttacattaaaccggtaacacgcaacaaatgatgactctcctagtatcaaaacgttaccttagccatgtcaaaaggataatctgtttcttctatctgaacaaagtaagaaagaagtttacttctctaataatcgaatccccacatctcacttaataggattggctccaacagtacctctgtttgttcaaactgaatatttgtggtcttataccaaaagatcaaaagagctgtacacatgagagccaaaaagggcttcattttccacccggatttactctgcaattgtaccatgttccaaagctttagtcaccgaagaaggcaggataaatgagaacataatcgaaaattctatatagtaggaaaaacgcttataccacttcttgagcattggtttttcttttaacaagtgacttcaatgatttgatagacttcatagatggcaaaccatgtatcatattttacctgcaacacaattcaacataaagactaattttgcaagaaaatttataaatcttttcaagaatcagaaaactcaccagactccacactgcctttgtgttctcccaagaacagagaacaagacaccaccacactggtcactaaatctcagtcttagaagctgattttaagcccatgcatgttgctgaaatcagtctgaatttcccacaagaaaacaattttagaaaaatttacttctgaaccttatactaatattacaaagagaactactactttgca

SEQ ID NO: 11366 - DNA, 1050 bp, Arabidopsis thaliana landsberg
gaccatgaccatgttgatgctcaggtactaactaaaggtaaatttataatctctcacgggttggttctggactcttagtaatgcgatactattataacgttataatttgattttctctacaactaaacattttgttaaacttgcttttcatattgcagaatatataggtcttggttttgaaattggtggaccgtttaatatctaattgatataactcacaatccagctcaaacattaatattttgatacaacgcatttgtttatttggtatcaatctcatagtatggttcatttgttataatttattgttgcaccgagatcttcaattctttattgtaattatataatgattgtaaatcatgtaagaagtctgttagttgaacgttggaaatataacttattatccaacataaaatattcggaacttgttgtttctctctacatttccactaactagaaagaaatcaaataatctcattatagtaaagatagaagaaacatttgtttcttgccacacacgttatactgatccaaatagggggttttccttaggttgatgcagtgcactcagctttgaaatcgataggattcgagaaagtggaagtgttagtggccgaaactggttggccatcgaccggtgacagcaacgaggtgggtccgagtgttgagaatgctaaggcttacaatggaaatctcattgctcacttaaggtccatggttgggactccgctcatgcccggaaaatccatcgacacttacattttcgctctctttgacgagaatctcaagcctggtccttcttttgagcaatcttttggccttttcaagcctgatctttccatggcctacgacattggactcactaaaactactagtagccaggtactacgataccataataatttcatttgttaaatatgtaaaaaaattttatagaaccgggggatcttggacagacatcaacactaatctcccacagcgtgtgaaaagcctgatattcttgctatttaaggcaaacggagttgaaactactacaccaccatgaattgg

SEQ ID NO: 11367 - DNA, 991 bp, Arabidopsis thaliana landsberg
ccggaacagctgcataggaccggaatgccaacgatgttgttgctttttgtaagcttcataagactctggcaactcgcaagtgacttcaacatcattaaggtaaataaacttccagccgttgagatgcgctctaaccgcgatatccatatcttccacggtggttctctcgagccatccgccggattcttccaatgccttgatcctccatactccagcggttccattgaatccgaagaaattgagaaacacaccgttcacttgttgttctacttcgaagtggaaacataagtttatgttttgtagcctcgtgaggagattctcatctttgttcacaaatgaccaccttgcttggaccaaccctagctctggattaccctgtgcaaacaaacaacacaacactcgtaagaatcttgatattcaaaaatgtttgcataaatgtaaacttccacatgaatatacttttacattttaacaaaatctattgactagtctacttaaaaattgcggtctcagtcatcttgagttcgactccaacaacccacatgaaaaataagatatgctctttaggtggggtacataaaaataaaataatagaatttcgatttttcacaaaacaataacttataaaacaattattattataatatgtaaatgtaaaaacaaaggaataattgaaacccggaatcaaacagaatcaagattagcttcaactagattgaatttgaagacttgtcatgttagaaaaatcaaccaaagaagtcatgagttttgtaattttatatttgtcggttacttcgatttcatacataacaaattaccaaattggattttcctaacataaaaccaaaaatacaaaaaacaatataaaaatttgtcggttacttagaacatgatccaccgaaaaatagataaaaccagcaaagacaactgtcggtgatgagtataatcaaaaaaatattttctatcaaaaaagtgtaaaaaaagaaacaaa

SEQ ID NO: 11368 - DNA, 671 bp, Arabidopsis thaliana landsberg
aggaaactgtcaaaggatggaatccatttctttaagcagctgcctgcttctgatgatgatggaatggttgaggattttctcaaacaattcgaggatcttgctggatctaaggtaatataccgtgaaactgaatctgtctctacttaattgaattgaaactcgaaagtttagtctttcgatcatcagttgaaaatattatgctgtcttttactgtactacaagtagattttagtagaacattctgctggatgatgtttcattgcggaaccgatctgtgagttcttctattgtgtcttcaaggttatgagttcatagaactggtcgctgattgattagaatttgttctttatgctatgttaaggttatatagagctcattatctacttggtatcttccgctttgttgactctcatcttgttttttgcttattaggacttggaatcaatagtcgagacgatgatgcaacagctattgtcgaaggatattctccacgaaccaatgaaggaacttggtgcaagatatccgaaatggctaaaagagaatgaagccagtctaagcaaagaagactacaaacgatattcacaacagtgccaactaatagaagacctcaatgctgtgtacgagaatgaacctaacaattcatctaaaatgatggagatcatgcaaagatg

SEQ ID NO: 11369 - DNA, 570 bp, Arabidopsis thaliana landsberg
gtttttttggggtttgtcggttccttgttgggactggattcatgctcttctagccattttgggtatcttgcaccaatctctttcattggttcgtgaagaatatccttcgataacagctgttgcatcatcgtgtccactatcgactccaagtcctaaacaaaaacatggaaattatgaaatgagaaatcataaaaacaaaacttctagtgatcaagactactttcaaatggttctgcaaactaattctcatcttcaattgtggttttttcgatattagtatcagtatcactactattaacacagccttcaaaactactttgcaacatgtgttactactctgcaacaaccttaactagatgaaactttagtaatctaatctaatcagagaacttgaagataaagagaacattaaactagataagtatagcatgaagtaacaactcagtttgtgtatacttacgttagacccagtaagattctcgaattgcttgatccaatcttcaaccatagcatcatcagaacctgtacgttgctgcttcgatgacaaggacttaagtccttcacagtttc

SEQ ID NO: 11370 - DNA, 1053 bp, Arabidopsis thaliana landsberg
atttttcctgattaatttaaataaaatcatttatgaaatatataattgtggttggacttataatctctatgtttttattaaatgtggcacagatggacttattaggtttctacagctgttggaatggtgagactaattccctttttctatgttactgatgaataattaacttaatgagtccaaagaaggcaaataccacgtgaaaagactgtctgaaatgtgcaatatattatttttcttaaccaaaatgaatttgattccaataataatactcaaatcaatgatagaccaaaaactttagttcaatttatatattgtctttcctaaaaatcaaaattctcttacctttttgcctctaaattaaacataaaattacgactagaaattttatgtttgtttcttttaaaagttgactatgtgtgctaaaatatttaaaaattttagagaccataacctcaaattctctagaatttaaattttcctaaaatacttcatatacagttttttttttcttttctttttttcatatacagttttaagatcaaattcatttttctatatatatattatatacaaaaacaaaaattttgattttattttttcttccttggtttttaggctaccagaaacaaagatcaacagaggtgattgttataaaggacacaagtacagatccaaacctcatcatcgttagtttcagaggcacagatcctttcgatgccgatgattggtgtacagacttggatctctcttggtaattttagtttctttttataatttatttccacacacaaacaatctaggtttgtttttatactctttaagttcatccttttagtttcagtaataaaactagtactgatttccaaaataggtacgaggttaagaatgtgggaaagattcatggcgggttcatgaaagctttaggccttcaaaaagaaggatggcctaaagaagtaaaccttgacgaaacccaaaaagatacaactctatatgcatactacacttgtagggcgtcacttaaaagaaatcctcgaccaaaacccgacatgt

SEQ ID NO: 11371 - DNA, 956 bp, Arabidopsis thaliana landsberg
gggtttccaaaaaaacagtattagtattttattaaatattagttttttaattttattttaattattaaaataaaatttggtgcaatgcgtgataaacaagtgtctttgtgggtttctcatagtttctcagttaagagactctcttcactctttttcttactttttgattacattttatttttatattaggtagtttctaaatgagaaacaattgatggagatggtctaaactcaaattcatatagatgcttcggaaacatacaattttcataaaggtagggacttttgaaagagaaatgattcaatcatggattttccgttttttccaaaccgctaaatgcaatcaattacgacctagggcaaagatcctaatcctaaacttgaacttctacaaggcaaatgaaatcattaacccatatgcatttgcaaacgcaaactagatgctactagactcaattctaataacaaaaataaatatgcaaagctaccagattctttttggattttcaaacttttcaaaatttttgatttatctcaaaacatatctattgataatgcaagactcaaaatgaagaaatcaaaatatctccaaggtcttgcgagaaaactatatccatagagacttgaagccttccatacttataggctataggagatgacataagagcgaagatttctgattttggctgtatgaagctcgtactcgagggagtagactcatttgagacattaagagtggtgggaaccttcaactatattgatccagattatgttggtaaattagattatcataatctgacttaatcttcagctcattatatgtataagtatttgtgttaatttaactattttcaaaataaggaaaaatataaaaaataatattttcgagtatatttgtaggttctaagagggtcatcaaaaaagcggatgtatatgcatttcaagtgattctaatg

SEQ ID NO: 11372 - DNA, 1140 bp, Arabidopsis thaliana landsberg
gctttttttttttttgggttggtgtctttgatttatttggcaaagcatttcaaaatattgaatgtgttgcttttttcgtctttttgttgtggtagttggatgtgacggttgctcaaatgcttgtgaccgatagcagttttagagataaggatttcaggaagcaacttagtgaaactgtcaaagcgatgctgaggatgagggttattccagttttcaatgagaatgatgctataagcactcgcagagccccctacaaggtttgttgattgcctttcttttgctctttgacatagagttctactaactttggagatgtgagaaattgtaaagcgatacttattgactgtacatgatgaaactagaatcaagtaatttcctagttcctctgaatcttttagtctactaacttacagcttcactgtacttcaacgtatacaggattctactggtatattttgggataatgacagcttagccgctcttctgtcgctagagctgaaagctgatcttttgattcttctaagtgatgttgagggcctttacactggccctccaagtgattctacctcaaaattaatacacacattcattaaagaaaaacaccaggacgagattacttttggcgaaaagtccaaattaggacgagggggtatgactgcaaaagttaaagctgctgttaatgcagcttatggtggcgttcctgttatcataaccaggtaaaaggcccttccgtactcataatctgtaattatactgcataactctatgttgtaaaaaatttagtctccaactttgaaacagataattctttttcttcctctgctgcaatgtaaagtatgggaattaaaaaaatgagcgatattgtaagctcaagattgtagcactgttgaagttctctactttaccacatctttttctctccacgtagcttgttccctgaatatttagaatcctgtcttcccttgaaatttcagaatatagaaggccctgatcaataagctaacaacatataatgttggatggaagagtgatatttttttttttttgctattttcatgaagtggatatgcagctgagaatataagtaaagtccttagaggactgcgtgttggtaccctgttccatcaagatgctcattta

SEQ ID NO: 11373 - DNA, 237 bp, Arabidopsis thaliana landsberg
aaatgtagcgtttagagttactattcataatgtttgaagtgaaagccatcaatctaagcctatcattttcgaagatgcaataatcagtgatgagaattttgtgaaagagagagagaagatgattttacattgcccatgaatttcttgatattggtgctgttgttggcgaatgtgtacataaggacgatcgggacagcgacatagacaccgaacttgacgatctccagaacccctttc

SEQ ID NO: 11374 - DNA, 517 bp, Arabidopsis thaliana landsberg
ttcatcaatttcagtcccaaaaaccccaaattaatcaagacccctaaaagcttgctcatcgtgtgttctatgtgaatcacatcaagatattggagtctcatacaaatgtcatcagtaggaacatcaaaggggattctagaaatcgccaaattcggtgtatacgtcgcagtaccaatcgtcctaatctatacattcgccaacaacagcaccaacatcaagaaattcatgggcaatcattcatacgttgtttatcctaaagaagctcctcgtcctccttcacctgaagagctacgtgagatggctaaacaacttgccctcaaaaaaaaaaaaaatcccttctaattgatctattgcaaaaaaggtaactttatgtttttgattcctgtaagatcatatcgaaagtcacagactttggttgaaagttttatacttttggtgaaattcatcttattgatgtaaaagggtacttggaaatgattgagaattgaagaaatgagaaagcttttgttgattttag

SEQ ID NO: 11375 - DNA, 1041 bp, Arabidopsis thaliana landsberg
  unsure (1)..(1041): unsure at all n locations
tagaaaacccgctgtcttaatgatttggtggcaatactaggctcttttgagaaggggattgtttgcggatatagatgtaggaccaagaaaagtgttaaacgctgaggattatttagtggaaacttcctatgatcctttaataacttagattttacctgacattttagctattattcattgctctctttgacacagttgttcaacttcaatgtagctcataatttggaatattgctatggagctcacgagtatccaacaagtggggtatatgaggtggaacctatgaactgtccagggttcatctttagacggtcggttttactgggaactaccagcatgtcccgttcagatttccgctcatacatggagaagctttcaagagagtaccatggtgacacttaccatttgattgccatgaactgtaaccatttcactgaagaagtttgcttgcagctaacaggaaagcctattccaggatggattaatcggctggcccgagtaggtaacagatataataaacctttctctgtgttaagttacgaacaaattgtgtcctaaatatttactcgtggtttgtttgagtttcaggttccttctgtaattgtctttggaacacaaagcattcagcttacagctgttagtgctcttcccgaacgccttgaattctccggtaagctcctaactaagagaatgttataaccaaaaaaaccccaactcctttgtgatcaaaacaaatcatgaatggnnnnnnnnnnnnnnnnnnnnnnnnnnnatgaatcaaactcagaggcatcttctgtgtcagatgaagaaggatcagagcagcatctcataaatgtagcagacagagagattgtgtatctacaaaacaaaccagtgcgacttaccagagaggagatcccctgagaaaccaaccagcgacgacaatgtacttcctcctgaatcaacccaaccaatcatcaaaacttgcagagtgtggtgtgcccatggaagctgacagggagtaaagtatatatcatcgtttgtcaccttagtgctgcg

SEQ ID NO: 11376 - DNA, 1243 bp, Arabidopsis thaliana landsberg
  unsure (1)..(1243): unsure at all n locations
catttcggatttctgactaggtttgattttattttggaaataatgtcaataaaccggatattagattgattcggttggttttttttttttttgagaaccataccatttgaaaggcactaatcatatattagccactaatataaaggagggtttgaatttgatcatacaatatcaatatacaagcaaggatttggtctaaacatcatttataatttgatatgtaagccatttacaagtaaagattggttgtggaccttttgatctaatcctaatcagttcctattgtctgttttgttgagccatttgaaccccattttggccaatggggtcatcaaggggactaggatgtatatttcttgtaaagtggatcctgtaatgtctaagttgttgtgagaggtatagactgaccgaattcacaagaatttcccatttctcgcggagacagagaatgaaaagtaccgcaagagcgaaagcgaatgaaacaccgatgattataaacaaaccgcggaatctgtatagagttataggatttgatgtatcatcggttgtgtatggaagttgattatcaaaccatcttttctccatctcgtttagcttctcgctcgtccttagctttgagatttctcgggacacattaggcaccaactcaaagcccttttgaaacatctgatataacaaaccaaacatttttttgtcagcaagtgcaaaataaagaaagagtaaggaagcttatgatgatgaagaatgatacatacaaagccgaaaccgttggtggtagattgtgtcttgaccatgaaaaaatgtgttggattctcgccaaggacaactttgaggtatggcaactcatcaacaacaaatgaaacagtcttgttcagcaaggcttgagcataatctgcagcactattaagacccaatgatctcattgctcggaggctggaactagtgagagccacatttgcaatgagggagccggaaaggtgacccacgtagtcttcattcgagttgaatcgtatctgttgnnnnnnnnnnnnnnnnnnnnnnnntgcagtgtaacttgcagtcagtatgagcactgcaaatacccaaactgtaaccacaaatcttgataagttgtgttttagcctctcccctgtcacacatagtataagcagcaaaaggtgaaaactaaatcttgataagttgtgattggcataaatgaatgtgaaaggtgagtacttactatgagcatanaacagggtagaga

SEQ ID NO: 11377 - DNA, 460 bp, Arabidopsis thaliana landsberg
caccaattccagcctccgagcaatgagattattgggtctcaatacttcagaagattatgctcaagctttgatgaataaaagtgtctcatatattgttagtgagttgccatacctgaaaatcctccttggcgagaatcctggacattttctcatggtcaagacacaatctaccaccaatggttttggcttcgtatgtatccttcttctgcatcatcagttgctttactcttgattttacttgttgaaaaagaaatgtttggtttgttatactatgttccagatgttccagaaggggtccgagttggcgcctaatgtgtcccgggagattgcgaagctgaggacaagcgagaggctaaacgagatggatagaagatggcctgatgaacagttttcatacacaaccgatgatacatcaaattctataaccctatatagatgccgtggtcagtttatgatcacc

SEQ ID NO: 11378 - DNA, 1256 bp, Arabidopsis thaliana landsberg
gaaagctagttttaaactatgcatcggttatatatatattcttgaggctaaagatagaattgatctttgttaagacatcaaagcaagacattaggtaatgaagccaaacatattggtgggtataacaaagcttttcaactcttttcagccatttgtttgagttttaaacacgtttcgaaattccctcaccactaacattaaaaaacctcgtgccgattctaccacaacttgtgcatgattgtaattcttttacacgaccatatacaaagacaagtaccaaaatatacatctgttttttgtcaacacaaatgtatacgcataaaagtgatagataccgaaagttagatattccatatggtggtgtaactgaaatttggattgaagttgaatattatttgatttatttacggatctttcgggtcttggatcttaaatttttttaaaccacacatgtatttaataatagcttcttttttttaatatgaatgttaacttctttatggaattcgaaagggattctaactaattacaaaatcgaagcatttggcaaatgttgttctacaaccaaagcttacaaagtctcaatgcaaacctttttttattgctcgacgtagatgtagctgtttcattgcatcaacaactagatcgaaccttcaaaaacataatatattttttttcaaacaaaaagtgatatagtttattaactcgtgatgattatccttcattatgattaggtggtcaaaaattgcaaagcatttaccaggaagaaccgacaatgagataaagaatttttggaggactaagatccagaaatacatcatcaagagcggagaaacgacgaccgttggatcacaaagctccgagtttataaaccatcatgcgacaacgagccatgtcatgaatgatactcaagaaaccatggatatgtattctccaacgacgtcgtatcaacatgccagcaatattaatcagcagcttaattatgggaattatgtgcctgaatccggttcgatcatgatgccattatctgttgatcaatccgaacaaaactattggagcgtcgatgatctttggcccatgaatatatataatgggaattaatgaataagttcgttaaaacttatatatatttacggcgcaaagagggctctatataaacagagtactgtatgggtttgcctcattgtttagaggtaggtacttaatataaggttggagatcttagatgtattaataaaatactcgtatttactaga

SEQ ID NO: 11379 - DNA, 976 bp, Arabidopsis thaliana landsberg
atcagtgtgctttgttgatctatgctggaagtgtacgtttttctcatttattatctgctggttcaagactcaaagaaggttgtcacattaatcggagtttacttactctcggtactgtcatccggaaactaaggtcacttttgcaccaatttagtaattctttgctaggtctcatatcacttcatctttgagctgatatgagtcttttattgaaattactacagcaaagggaaaaatggacatataccatatagagactcaaagctaactcgtatacttcagaactcattgggtggaaacgcaagaacggctatcatctgtacaatgagccctgcacgtagtcatctcgaacaatcaagaaacactcttctctttgcaacttgtgctaaagaggtgaccacaaatgctcaagtcaatttggttgtgtctgagaaagctttggtgaagcaactgcagcgggaactggcgagaatggagaatgagttgaagaatcttggacctgcttctgcttcttcaacctctgatttctacgcgttaatgctcaaacagaaagaagagttgattgcaaagatggaggaacaaatccatgaacttaaatggcaaagagatgtagctcaatctcgggtcgagaatttgcttaaatcaacagcggaagagcggtcatcttcaagttcaatggatagcagaagaagaagaataagctacgattcaacggattttgatgagcctcgaatgctaaataacttggggaagagtaacttgtactctcctgatgaggatggtttcctgctggatgatactacccctcaatttccggggcataacctacatgataaatgggaggagatggctcaaagcaccacccaagaaccagaagatgcttgcaaagaagttagatgcattgaagtaaacagtggagaagcaaaaagagttcaaatccaagactcactagatgacattgttaaaagagggaata

SEQ ID NO: 11380 - DNA, 1019 bp, Arabidopsis thaliana landsberg
ccactgagtaaccaagaccagcccatagaatctttttcactttttgatgagctaacacatcaatctggggcttgagtacttctcatcttatcaaactcttctctaatcaactcatcatctggattcaaacctaaaggtactgcctttctaatcaaatcaaccacctacaagaaacagagtctcattaatagaaacaaagagattagggttttcaaaacagatgcgtttttgtaagatttcacaaaccttatgaggatgaagatagactttatcacgaaagatcaaaataacacccgcatcatcaagaacacgagcaaaagcatgagcttcatcaagagatctagcgatacctaaaccttgagatgattcaataagtgtgttgtaagtaaccatttctttatcacccataccaataagcttcttcttcatatcttcaacattcactaatctcattaacttcttagcttctaacacagtcatatcctttttctcatcttcttccttagactcaacgttgagacatctaaacccaccaagcaaagacctaaccggagaagctttattcacggtggaggacatagccgtacgtctcactaaacccatcaccgaccacatcttttaatcaaaaaatcggatttttctaatgacccacggatttgtttcttcgatgaaatcagtcagatctggagttttgtgaaatcaaaagatgggttaagaggaaggaacaaaaaaggtgtgagattcgattctgatgcactgatttaaaaagctacaccaaaaaatggtaatgtaattgaaaaagaggaggaggaagcttaaagttgcttactttctggaattagaaaatttaggtcgccattgttgacgagttaaaggcatggtggcttttcgaaatccctaaatccatttgtttcgtttgttttggttctttctgttaaatacagagtaaaggagaagttagagaggtgcttagggctggccggctgtggaagaggaaagttcagaaaagtaaaaaggat

SEQ ID NO: 11381 - DNA, 923 bp, Arabidopsis thaliana landsberg
caagtttatgaaaaatatgcattcgatctcgcttcatgtagtttgtctatcaacaatcgcattgtaaatgatttccacttaagctaaataattgaccgtcacagtcatacacaaatgttatgacaacagggttttaccaatggaaagaggagatttatatgaaatacgatgatatcagaagtttcaagaaaattatttttttctctattcaagaaaatcaataaacatcactgacatataaattttaacggtacctgaagaatgattttctcaggagcctggtaagcatccaagaagtggcaaacattaacaaatgcccactgtttactggcactatcttcccgtttgagatgattccatccaaacttaatgagctcttttctatgatgaaccaaatcactctgaagatattttagaagcaaagttgctaattgcaaaagttcaatcctcaaaggttcatcatattcagccgaaacctacaataatcatgaggagatttaacaataagatcttaacaattctgaaaaagtggagaaaaataaatttatgaagatttgtacagggtaacccccaaaaccctgtacagatacattcataaccagtatgacaattataaagaagtcttccccacaattttcttgatatatttgtttaggggagtaaaggaacctacctcttcgggtggatcaagaagcctctcaacaatggttttgactatatcagggtcaataacctcccaagtttggccgttttggaaagcatgggcgagcattggaagaataagcatttgcatcgcttgaactaaatgatcatggccgagttgtttggaatggaaaaggttaagaaaatgcagtaggagtgctcttttcatgttgggcgggtatccttctgcaacctcatgaatatatatcccagttattata

SEQ ID NO: 11382 - DNA, 547 bp, Arabidopsis thaliana landsberg
ccaaacatgaaaaaagcaattgttttgcattttctaaaccttttccagtcgaaacaacttggccatgatcatctggttcaggcaatgcaaatgcttattcttccaatgcttgcccatgccttccaaaacggccaaacttgggaagttattgaccctgatatagtcaagaccattgttgagaggcttcttgatccacctgaagaggttggtttctttctcctctaagcaacttaaatttttgttgatacagaaattaatgtggggaaagattactgtattattttctggatgtaaatggtaaggatagtaacctgtccaatttgttatttctgacatggtcttattgtacttggtctgatttacatttcatctcaaatgttggaggtttctgctgaatatgacgaacccttggggatcgaacttttgcagttagctactttgcttctaaaatatcttaaagtgatctggttcaacacagaaaagaacttatcaagtttggatggaatcatctcaaacgggaagatagtgccagtaaacagtgggcatt

SEQ ID NO: 11383 - DNA, 1077 bp, Arabidopsis thaliana landsberg
cccaaaatgataagacttacttatcaccaaaaatcctctgtttaaagttcatgtgtccttggtattcttctccggttcgatctcctgcgttgtacgttggccttcggtgatactagacgagcctgatgggttctgaccattgtcgctagtcaaaccactgcattcgctgctaccaaatgttttgctttcgaacgccattttcttgaatttcttcaagtcttctttgtattgtgttgagctataatctgagctcccgtctaagctgtaaatagtactttgtcctggggcagctccttctgttaggtcatctatagatatatttccttcgaatgctcgaactatctgcaattgtccaaagaacaatgacaccattgaactcacaaagtttcattttttatcctagtgttagattgaatgttgccaaaaggttttgatgtgatagttagtacctggctcatttttgggcgacgtttagctgaatgacggacactagcagcagcgcaagcaaccattctcgtcatttcgttgatatcaaaatcattctctaaccgcgggtcaacaagaccgtcaaagtttccatcgtttaacgcttgtatcatcagaggttttgcctagagcatgaggtaaagtttaaaagcttattaaaagtggtggtaagggaaacaagataaccaacccaatcaacgatgctatcatcatcagcaaaaggctgtgatttatcaacaggacggcgtccggttatcagttcaagaagcaccactccaattgagaagacatctgatttctcagtaagtttccctgaagaagcatattcaggagccaagtaactgcatcacaagaaagaagtttaaaagattgttagtatgttatgaacttattatggttatggttgcgtatagaaaagagtgtttcgtacccgaaggttcccataatccgagtggagacatgagtatcagtgtctaaagaagacctggcaagtccaaaatctgctaactgatgaaccaagttcagcattattagtagtgcagtctaaacaacatttttatatagttttacaagttcaagtataccttcgcc

SEQ ID NO: 11384 - DNA, 1354 bp, Arabidopsis thaliana landsberg
tttacaagaaaaacaattttagaaactttcgtgaaatgtgtacgcaaaagcaaataatttggataagaataagattattaatatgtgggagagtaatacgatgataaacaatgaatacgaagtcgactctgcgcttctggccgaccagacaagtagacaactttcacgctttgtattttcttgaaaaaattgacaatgaatttacgaagtttaattcttataaatatggaggaattataataatatatgtgtacaaatatttagtaagtttagtttaatcattggttggcactcattcgttgtaacaacagtacacaagaaatgtgaggaagtatttacgagatgtaggtggcataataatattaattgttatatatagatttctatggcagtcgacgaccgtgactaaataatgctcctttgagtatcgtatcaatcagcgaatgagatcaaatgttgttaaatgattgtcgtgttaattcgttactgtgattagacacgacaactatagcaaatcgattttctaggctccatgaatttatgttcattttacgatatgtatgtatgttagagatgatttttcgtttttcaatccaaatgacaacatataaacaacacttagttagaatcgcctttcagaaaacaatataccgcagcgggaaaccgggatttttttcttttttacgacaaaatattctatatattattaaacaggttcgaaaaggtaggcatcaagagccaatcacttcggaacccgagaatttatatagaaaaaatgacatctcgaaaataaacccttttgcaagggtgtcagctcggatattcaactttctaggtatagtgatatcgcaaaacatctaaaatgattacgtaaaagaatctatttccgttgcaaacactgaccacatatcttcttcttcgacaatttttaaaagctcgagtttggaaccaaagtctcttataatcatttaagaatcctttttttgtgtgcaaacaattagtctcctagaatcctataaactaaattgatctgacagaccacacacaaactcggttacgataccaagatttgatagtttcctatatatactttttcattgttttttttaatgaaatggatcctcagcagtataaactatggatgatcattaatgcatatatgaatcaatctacacatgtagacacattctatcatctgttagagtaaacacaacacacctcactaaaaaatagatgcttgtgcattaggctagaggcaacattttttaatgtctaacacaaaactttccgtgaggaccaattttctcaaccgcactcatctcccgtttatgtttgcccccgctccaaaaatact

SEQ ID NO: 11385 - DNA, 1944 bp, Arabidopsis thaliana landsberg
ttaaatgactttgttgcaacttgcaccatgatttctttcaaaccaaaaaacaggtctagaccgggtggtccacagatttttggctcacaggaatattcctacatataacactacaactgtacaacatacatatagagcagtagatagtaaattataccgaataaaaaaatctagttacatttcaagtcacacgaactgttagaacggttcatgttaggctcagcatatttctaagtaataaattttgaaatcgaaaaggcttttctaagtatagccggactgaattactatatgagtcgtggacttaccggtccgacggtgaacaactattggttccgagaattgtatttctgcgttcagaattctgtgagtacggattaataatatatttatactgtcaattgtcaaagagccgatttccgatttaagaaactaatttgtttgataatgaacacaaacaagaaaccaaaattaaggccggatttatacccatgacacgttatctctacgtccaatgctcttgccatttgctgtgatccgtaagttcccaaagacactttttctttcaccacagtcccacttttgatctttctttttacagtaaagtcagaactcagaagtaccttgaacaaaaccctaaacgcacttttaatattaatcactctcaaaccaccatttaattattgtaaatcatatactccaatggaacatactttttttactgtacttttcatcaaactctaaaaaggttatggcttatgggtgttctttttggatgaaactatctatatatgaatattattctaaaacaaacaaaaaaaaacgtaaaaagttgagactccgttttattaagcggcagggtttgttgaccacactctcatcatctatctctttcttatcttcactgttttatgttttctttcggattaaattaaataattttttcctccataatttatactcttaactctcatgaattattggtctctctattatagttttttaagtaacaatctaattgtagtacggatgtctcttgagatgttcaagaattaagaaataaagaaagagggatcggagaatgaattttgaggatcaagaagaagatatggagatgtcaggtgttaatcccccctgcggttacgactctctaagcggtgagggagccacatctagtggtggtggaggagtaggaaggagtaaaggagttggagcgaagataaggtatagagagtgcttgaagaaccatgctgttaacataggtggccacgccgtggacggttgttgcgagtttatgccttccggtgaagatggaacgctcgacgctcttaagtgtgcagcttgcggctgccaccgcaacttccaccgcaaggaaaccgaaagcatcggcggtagagcccacagagttcccacgtactacaaccgcccgccgcagccgcatcagccgcctggatatcttcatctaacatctcccgcggcgccttacaggccacccgcggcatcgggggacgaggaggatacatcaaatcctagcagcagcggcgggaccacgaagaggtttagaacgaagttcacggcggaacagaaagagaagatgttagcctttgcggagaggttggggtggagaattcagaagcatgatgacgtggcggttgagcagttctgtgcggagactggtgttaggagacaagtgcttaaaatctggatgcataacaacaagaactctcttggtaagaaaccctaattttgctcgagacatgatttaaaacactagaggatcataattgtttctttttttggtatgactcttctgtaactacttctgcttattagttatgttattttttcctggacatacagtttcttcttctagtccataatcgtatctggtcgtttcggacaattaaagagacattgtgattaatctttattaactttggttcg

SEQ ID NO: 11386 - DNA, 481 bp, Arabidopsis thaliana landsberg
  unsure (1)..(481): unsure at all n locations
cggacaaatgataaatttttccaaatcatcgattcaatttggccataaggtaggtgatgatataaaagcagaaattaaatcagcgttgggtattcatagcattggtggaatgggttcttatctcggattgccggaaagtctaggtggttcgnnnnnnnnnnnnnnnnnnnnnnnnnnnnnnnnnnnnnnnnnnnnnnnnnnnnnnnnnnnnnnnnnnnnnnnnnnnnnnnnnnnnnnnnnnnnnnnnnnnnnnnnnnnnnnnnnnnnnnnnnnnnnnnnnnnnnnnnnnnnnnnnnnnnnnnnnnnnnnnnnnnnnnnnnnnnnnnnnnnnnnnnnnnnnnnnnnnnnnnnnnnnnnnnnnnnnnnnnnnnnnnnnnnnnnnnnnnnnnnnnnnnnnnnnnnnnnnnnnnnnnnnnnnnnnnnnnnnnnnnnnnnnnnnnnnnnnnnnnnnnnnnnnnnnnnnnnnnnnnnnnnnnntgtt

SEQ ID NO: 11387 - DNA, 871 bp, Arabidopsis thaliana landsberg
cacttaggttcatatatcaaacatcaggtagcagaaataattgtcttccttatttgtctgacaagcgaaaatagtttggacacaatcttacacaaacctagaaaatcaagattcgaatttaaaaaaaacaaaacaaaacatatctatttgattccctgttatctctgaattcctctgcaaacaacacagtggtctgaaattatgatgtctatgacactgcccttaccgatcttcagctttctggtgatcttgttccatagatgaagcccatagctttctctattcagcttcaccagatcggttttgagtaacgttgagtcattgcttcctctcggcgtttgaaacagtcttggaatgtctaaccaattgaatggatagaatgctactggtggcagtactgtgaaattatccccaatcgtttttcgtgctctttgtgctactcttgttaccaagtaaggaccattgtgtccccatttgttcccatcaaaggtagaagcaaactcctctatgaaactgtaaacaagcgggtgatctttctcgaagatcagaaccgcattgttcaaccttgtccagttctttgaatctccttccactactgtttgtgctcctattgaattcttcaaccctttaaagcttcttgtgacgatgaaatcggtatctagatacacacctccgtacttgtaaagaaacgctagcctcgcgaggtttgaaagattctgatgtaacggtatccttcctggatctcttttgcaacttttcatttcttgaaaccaagatttggccggtgtgttctcaagaagcaatgacatgtctggtgtggctgcaaaaactttgtaaccgcgatcatttagcggctttaggatgctatctc

SEQ ID NO: 11388 - DNA, 427 bp, Arabidopsis thaliana landsberg
ctatcccccgggagcgcgatgagactgaggtgtgacctctggctgcggatcccaggctgtttgatcttcaacgtgctacagcagcacgagcacgtcggttcaaaaacgtacccgtggagacttggctaccggctcagagagaccctggtgcagttgatctcttcagcacctggattcaggagtcttccttcagagctcagatgtctgcacagattgctctacgagtgcaccggcttttggaccttcctgcgtttctgctagccatcggtgctgactctgaggtacacctctcgtatctgcctggccttctctctcttttgactgccagcggagaatatgttgaggaatgggtccgagttttctatgctactgtatggatcgatcctgatcaccactggatgagattctgctttgagcaagagtatgt

SEQ ID NO: 11389 - DNA, 1588 bp, Arabidopsis thaliana landsberg
tggattaaaaaggacttggtattgagctattattgttctactacttaaagtaactaatcgacaatttcagtacagttttttgttgaacaaaatcgtaccaaccatgtcagctaaccacaccaactaattttttatgcttcatattcagtaccgaatatgattgatctcgaccaatcagaatttcaagatgattctgttattcttaaagtttattgattaataacaaatcacaaacattctatcacacgagacttggtttgaaacttttcaaaatttgaattataataatactagcatataataaaactgtatatctgtaaagggcatactgtactggcccaatggttagagaattttgagataatgccataaatacattattccaaatgatgcaggaccattttgtaactagacaaattatccgaagacttggaaacaaaactctttcatggaccatttcagaaaatcttcaaaacaaatgatcatggaccattttgtatatgtaagcttaattcagatcacaaacaggttaaatgagggactcaaataagcaaaaacaattctttcatcgagggctgttttattttcgtgatattgttaagggaaacttaaagatatgtttggaatgcccaagtcaactaaattaactattttttaaaaagtcaaactaaactttaggatttaaatgacatttgaaaagttcatgtttttttcgtcgacaatatgaaagttcatgttttctcaacattttttcctttaatcaatctattaattttcactaaagaattgttgttttgaaaatatgaacggagccaaaaaaaaaaaaagagtattggtcccgaccagttttgtgtatactatgtgtttcttttatatcaacaaatttaactttcatccaagaaaacccacgcccatatcgagtgccctgccctcgaagccatggctatttggagaccataagaattcaaagttacacttgtataactctgttgtataagaccaaaactatcacttgtttttaacctcaatttggatggattatcgtcttgtcatttttagtcatcttgtattcttgttaagtgatttttcgttaagtaatggtttccttatattccatatttttttacaatttggtaagtttctgtaataaagttttactcctcatttactctgttgtatttttctattctcatattccataattcatctttttggaaatgaattttgaatatgtggttagtgactaggtccaccccaaacgtcctagtaacgcctaaagaagtttttgaagaaaggtaatgttcttcaaatctctgctagaaaaaactcaattaactcaactgcttaccaatccgtttgcaacactaagttgtcaaccatatgacgaaactaaacctgatccaaaatccttgacttgagtaaatgtttttacagtctccagtatgtttacagctgtaaatataaaatcttattgaatcagttgaaaacaaagttccagtgaacgcagagagtttctttcctcagtaagaaaatgaaacttactacgacaatcagagagtcagcagaatgctgtaagaatcataaacat

SEQ ID NO: 11390 - DNA, 1030 bp, Arabidopsis thaliana landsberg
agcttcgagattcatcgtcttgaaaactggaattttgtagcattcattacgaaagatgtgtcatttttctttaaaaaaccaaaattaacaagaaaaataaaatggataaaatgaaaaagacagagagtttactctatcatatctgcaccgcagactttatactgtaaacaaaaatttattatatttttcgagatctgcttgaggagacaaacacaagaaaatcacaaaaaaatctctcccattaaaagactgcacaaagaaatattttatacaaagtgaaagagagaaacacgacacgaattttgtataattaagattacacaaaaaaaagtgttagaaagagaaatatcttcttcttttttctgtgtgagttgggtttgttaaagttttatcctttttgttctcaaaatcaagaatcgatggcggagaaggaagaaaaagagccggcgaagttaaaatcatccaccggaggttcacggccaacgatttcactacctcctcgaccgtttggtgaaatgttttttagcggtggcgttggatttagtcctggacctatgactctcgtctcaaatttattctctgatcctgatgagttcaagtctttctctcagcttttagctggagctatggcttctccggcagcagctgctgttgccgccgctgctgtggttgctactgctcatcatcagacacctgtgagctctgtcggtggaaacggtggaagcggtggtgatgttgacccgaggtttaagcagagtagaccaacgggattgatgataacgcaaccaccggggatgtttactgtaccgccggggttaagtccggctactcttttggattctccgagcttctttggtcttttttcacctcttcaggtgtgaaattcgttaactactaaaaaactcaaagctttgttttttttttgctcattgttagttcgaaactctgtttttggtaaatgaaagttttgtttggatattttgttgctgtttctggtttttgttttctttcggtttatgtctttatggat

SEQ ID NO: 11391 - DNA, 1463 bp, Arabidopsis thaliana landsberg
gacacaagaacaagcgatctacatagatattgtctcagccaataaaaatcatccattttcagatgaacttgaatattatttttagagtgacatgagaactataaaaagtagtgtaaaatctatccatacaaccaaactgctatttaatttgtagatattgttagaagacatcaaacactacaattacataaagccgaataagcctcaaacttcggtataaattacttacgtgtaaccaaagacaagtttggtaaatttatcttttcaaacgatcgacaattgcagtagtctttaaatagggtcttaaactattcctctgaacaattattatgaattataatataaccaacaacccaaaaatgatagagaagagaaggaaagcgattcaaccaggccgtaccgttaatatgattatgggccgtggagcctactttcttttcaatgcgacaacgacaattggggatagatatgtatatccaaagaaaatgtgtcggatgtcttcaattctttaaaatataatcctaataagttactctgaataaaaagaaaatagtattttcatttgtcattttccggttaaaacttgtctgacaatatccggtcttaagaatcctctggtgtgtcttttgtgttacttctttcaagaaaaaaaaaaaaaaaaagtataactgaagtgagcttgaaaattccaagagcataggccaacgaattgtgttgctctgaactgggttcttcgtttaatacattagcattctattgggccgtataacttgaagcccaatctaatataaactaaaaaagaacatggtattattctaaacagaaacataggattagactactactttgaacaacaaattcatgcgtctgtatgattctatacgttttcggatttcttgtataaagaaaattatctaagtctacgaactaccaattaagaaaacagagagcgataacagtactcaaagtcgaatagatcattccttgagaccgtatcctcgaaccatcggctagatttgtcgaagtttccgacgcaagtaaactatttaacgtgaaattagggtttgttccgtacaaagactgtactccaacgacgtcgtccatattcaaattcactttcttacttcttggctttaaagttggatacatagccgcgtctttcaccgagctatgtcctaatccaagcacgtgaccgatctcgtgcaccgccacagattccaaatcgacggccacactagatttttcctcatcgaaatctacggcccacgtctctgctttgtctagatgaagcctaccgttttccggagagaaagtgtgtgctaaaacacctaaaacgccgtcgaacggttctccgtcgccgtgatctccgttgaagatccgatcttgatgtcggcgatgacgtaatcctctgtttcgatgaaggatactgtgatcaccgaagcccactcgtcgaaagcgcgtcg

SEQ ID NO: 11392 - DNA, 823 bp, Arabidopsis thaliana landsberg
ctctcctatctgattaaataaacacatagaggctctgatttagctgagcactcaaaatacaatcccgataatagatacgcagacatatataagaaactgtacctttccccagtagccagcaaccttatcataccaatagtgtccgggttttagcttcttgggtggatttggacatgtctgcaacgtgtaaagctcatcttcacttaaaggcttgtcattgacaatgataagtcgtgaaggcaattgattcgccttgcaggtgatctcggcattcatgacttgtcgaagttcagaatccgtgagatggcgcttgagcattcttgaacactttccgagacttgctctcttggactcatcaatcctataaccaatgcaagcttgacactttcttccttcgggcatcgcacccatggctctgcgcacacagttgaaacagtatttggcatcgcagacaatacagacttccttctcagtaaaccggttccccaactggcaccggtaacacgatcctcttttacctttcctttcagctctatgcgttgcagctatactttctccatcagaaacataggagctctcatcacattcactactctgaaaaggttcaacgaatctcactgctctaggtcccacatccgaaactctgtcatcatctaagtgatcctcctctctcgctgatgcagacaatggtgatgatggtgataaccgaaaatcagcaggacttttcacttcttctggtacatccaacctctttgatgatgatgatgatgatgagccagaaacaacatcacgccctatcaaaaccacactagaaccagctgca

SEQ ID NO: 11393 - DNA, 1118 bp, Arabidopsis thaliana landsberg
tcatgagaagtccagatgtcggttgtttgcattatgggatgatcgagcgttaatccagtttcgtgcatgaaaccaagcgcttcatcaacacggttagctagttcacggtacctgccaaaccaatataacgaatttaaacacacatacccaaactgtagacaaaaatacccaaatatcctacatttactcgataaggttggaccaatgattaggtttatcagctactaaaaaaggaaaaacttctaaactctttttcacatccactccataaatgtgacctaactagttgataccaaataaggttaggtattcaaaaagtgaacactgcatcaaaataagccaacacaagcaataaaaaggatgtagagtcagttatatgatcccaaaactagacctgattgtttcttttcatttgcgtgtaagaaaatcataacatgaaaacgcaaacgtaaacactcagatcttactcacgactacaacaaatccctaactattatacattccactagacacaaacaatcaagcatctactaactttatggcaatcaagagatactaatccaaaagcttaaaagttttgtttaagttacctgtctccttgctcactacgttcagtgaaatcaagattccattgagtaactctctgcatagcagcataaccaccagtagcaaaagctctcaaaagattcaaagtagctgcagattgacaataagctctaatcatcctctgtggatcaggaatcctagatttcgaatcaaacgcatctccattaatgttatctcctctgtaactaggcaatttcactccatctttctcctcaaacgaatccgatcttggtttcgcaaattgacccgccattctcccaacctaacaaactcaaatctcatcacataaaaatccaaactttattcataaacaaatcaaaaagtctcaatctttgaataccttaacaacagggacttgacctccgaacatcaacacagcacccatctgaagaagaatcctgaaagtatcacgaatgttattcgcattaaactctttgaaactctctgcacaatctcctccttgtaacagaaacgcttcacccatcgctgcttgtcctaatcgttcctcaagc

SEQ ID NO: 11394 - DNA, 975 bp, Arabidopsis thaliana landsberg
aatttatacataaaaatcattaagtttgacgtgtgagtcgtgacatctttttctcatgcaattacacatcattacttaaagcgtaaaactttttgaaaagaaattaaggtgctaatattgtgacgtgtgatttaattgtattcaaagaattaaactactaaaccgtgtacaatggaagcaaatctgtcactttcatgtttggtatccaataatctctataaataaattagcatgttttgacgtgtgacatctttttctcatgcagtagacagtagttacaaataattaaacaatgtgaatttttttcgtccatattatgacgtgtgattcagttatattcgatgaattaaactactaaaatgtcaaattcatgtttgatatcctatactctctattctaattggctcataattttagtatagtgtttaacgtgtagtggaagtgaaacatatctccttttgttttttacatgtaagcaatgaaataaaattagattaaaattctacgcgttacaagactcaacaagttaaactaaagtcacctgctcacaacaaactcttgagattttctataaatacttcacatccctgcttttgtctccaacacaaaaaaaaaaaatcattagagaagaagaaaaaaaatggtgaacacaagtttcgaaacacttcctagacatatgcaaatggagattctgtcacgggtgcctctgaaatttttaatgaaattcatgtgcgtctcaaagaaatgggcatctatcattcgtggggaagaattcagagaagattacttgttccaatcaatgaaaaggcctcgagtgttgttcgtcatcgatcatagagaatacctccctatcaaacccgaagcgttctttcactctgtttatcaagaagatcccccattgttgttgtctggtaaactgcgtatgcgtaatttcgaaacaccacttgttcaagtttttcaacccatccgtggttt

SEQ ID NO: 11395 - DNA, 3044 bp, Arabidopsis thaliana landsberg
accttgctgtgcaccagatactgttctctcacacgcatcttatgcattcaatacttatttccaacagagcggagcaagcagcatagattgcagctttaatggagccagcgttgaagctgacaaggatccaagtaagtatttgtatacatacactttccaaaacacatccattaagagtaatgtgaagccatagtaggctcatttgagctctcgaaattgcaggttatggtaactgtttgtacatgattgctccggctaccgacgggtgacttctctctctgattacgcaatcttgaatctatcgaactggaaaaacgaatcttacttgctgatgttgttgttgttacttttgcagattcaacagaacaatggcgggtaatatcactggaaacataactgccattgattcccccttggcttcgccttcgtcaaccaatgaagcattcagacaaatggtggttgcagtctctgttttgttgccgtgttttgtagtttgttcgagtatttggtgacaagtgtgtacatgaatgcactgtcgccttcttttgtatgaagttttgagtagtgagcgaacttaaactagaatttagcccaactgttgaacttggtaatttctttcaccacgtaaccgaaatgtcaagcttggtgatgtatttgtgactgaacctagtaaatttttatgagctgatcgagaacaaatgatcacaaactcaaatttttattccaaagcgtaattatacattacgaaatacagtacaagagaaaaacataagagccatcataggagagggtcaaaaccataacaaatatgattgtttctttgttctttttaagagtataataactttgtttgatgcacaacaacaatcaaatcacaatacatggcagaagggtgcttctctagtgaagaaagaacccgaaaaatgaaatttgtttgaagcactttgagtgaacttagagaccagactcgataaggtaatcgccgagcctctccacgaccaagttgcattgccctccggtcatcggttcatcatagataccaaagactagagcttgagtagtcttcttgatagtgactccaccaggtccctgcaagaagtaagcatgaactttaacttgctgatctaaaagactgatcctttgattcattatctcaatcaaaaccacaaaaaaagagtcttctcgaatgaaaaatgttacctttttccctcggatgacggctccagcctcaccttggacaaccatgtacttctcaccgccaaggaatagcccggttggggcaagatgtccggcttcttcaaagtctttgttgattcctgctatctctgcaggcttcaactaaatacatgaacaagaacaacaaagtaggcaattagcttcaaccgactgagcaatgatactactaccaatacaacagatcctttacatggtttatacaatactgagcagaggtgacaattcatatgcaatgaccctaagatctcaaattcaagtaaaataccaaattttgaagaatttggtgaaaagttttatcatttgatgaattgaaaggagataagattctgtgccaagcaaaacacctatagacaagatttgactactgaaaccatgaaaatcactgagaaaatcagattgtcagagagaacaagtcagaagctagcaaatcaaaaccagatccaagtttcctcagatcggatcacaaggaataaacctaaatcagacgattgaatcagatcgatgaacttatttgagacagaggatcggaagaaacgcgaagaagaaggaagaaaaacctgagggaaatttggcgctctgagcccagacactgccgtcttgaccgagaattgcggcggcggtgagctggttgccttcgacatcacacataaggtgatcatcgacgtatgattgccacgacatcttcttcttcttcctctccggcgagtactgaattctccgacgagattgtttcttctcagagaaggtttttatctacctcgctctcgattctctctttgtgagctttatgatcgtgtagacaaggaaatgttgtgcttatataaattaataaaaaaaactttcgtcaactgcttaatttcaattaattattatcccttaaaataagcaaaataaataataatgctttaccaaagtaacaataaattacataataatatttttccattataattttatttttagtaatggtatgtaaatggtttattatagagatttattatatgtagataaataaaagcaaattggtatgtgtaactaaaaatgcaaaatggaggaaaaaatatcatttaccattttcttttatcaaaaataaaaaaatcatgtaccatttataacatactttacttacctatactttaacaacaaaacattgtaagctatattaagaagatttttttatatatatccttctttatcataatactttctttaattttttccaaatggatgtttttttaacaaaaaaaaaaaaagaaactcaaaaacttttcccaattataaaaataaagttttttattccaaaaaagaaaaaaattaatatgccagaaggcaacatcatttgttctctccaaatacagagtggatatgctatatcaagatctcaaattgagattctcaatcatatattattgcgttacaccaaatattgcatttacgtgtggtccatcactttcgtattttcaattttttaatcaaacttgagaaataatttagtggtattgtgattaaatgaattatcatggaattataaagtatgaattcagagttctctcgatcatggtaggtcattataggaattgaaaattttgagttcgagttctcgcaatcatggctggtcattttagaaattttaattggcaacaataccttctgtttcacaagattcaagatatgaaaatatagtctccatttcaatttaagatcccatatatgtatttagtgcttatcatggaaggaaattaggagatacgtacacatgaatattgagggttttgtgatattggttcaactgataaaaacgccgtcag

SEQ ID NO: 11396 - DNA, 1032 bp, Arabidopsis thaliana landsberg
cggaactactcagtaaaattcttagccaattagaatagagattattagataaaacatgaaatcgacttggttcctttcattgtacacggtttggtagtttaagtcatcgaataaaattgattcacacgtcataatatggatgacatgagtcacattgattaattatttgtaactgcatgagaaaaagatgtaatcacacgtaaagtaatattatttatgaaaatttagcatataaaaactgaaagtgacagatttgctttcaattgtacacggtttagtagtttaattctttgaatgagatttgaatcatacgtcaaaatatagatgagaaaattcacattaattattttgtaactggatgagtaaaaatatgtcccacgtcaaaacctacaaattagtaagagatttggtgttaagcgtgacttaaaaggtttatctttcatcgtacacaatccacagaatcaatagaaacacgtttctaactttttaatggttttcacttttcactttgattatttgtacacaatttttgaaagggacgtttcacatacacgcataaaaacttacataccacttctcttaaatatctttatttttcatcaggttactcgttgaagattgtttggtaggatttaaaattgaatacaatgatgtaatgttcttattattaattatactattcaaagtgttattgttggttataagtacttcacaaagttaaaagtccagccaaacagtaaaagtacaatatttaaaccaaagcagagaataaagattgatcgcaaccaaaaacaacgtagcaattgcaaatccgaatctttaaccgcactctcttttctactacccatcattttaggttctccaaaactttgtttaagagaaactcttatgaccaccggtttgttattgaggctaaggtcgtgagtaatggtcttgatggtgctactttagatggttcgtttctggaaacatcaaaaaaaaaaaaaaaaaaaaaaacactaagagaaagcaattgtagagtatcaggaagaa

SEQ ID NO: 11397 - DNA, 1118 bp, Arabidopsis thaliana landsberg
tctaagcactcctgcttatattttctttgaccgaccttgttggacattctccaaagtctcttcctctacaccaggatcagtccccttaagatactcgcagttcacatctttactagtgccagattggttctgtgatgattcaccaaatgcctctttaggcaaatgtctccgtcttcttatcccagatgtatgcccacctttgtccacacttgtatccagaatcaagaatgtcatcggttcatccaccacttccatcttttgcttccttttacacttacgttcatcagcaaacttgaatctttccacagaagagttgttatcccctcgacaagcctttgattgagaagctaaacttggaatcctcaactcccgaagttcgtacaactttcctcttgaagcaaaacgactagtgtccacaacagtgaacttcatatgagtagaagaagagcttggagacctgaggtaacagtgtttctcctgttttgattggttgtaagtgttctcttctctttcttcttctgctgtctcctcaagaagctcaggctctgaaacaacctttttgagaatgtcactgatagaatcaaagtaatgatcacgtttcacaagtttctttcttgaaaacttctttaccccagggacgaggaagacaatgtgttctttagacttgatgtaacctcggtcctttggcagctcagaacgccaacccctatgtagcaaacgcggccatacagcatcccagaagatatcattgcaacgagctttgctcacacgggaaccaccagacaatttttcgattataccttcaactgtgagtgaattgtattcccctaaaccagcaggtaccgcagaagaaactctaaaccatttttctacatctacgggttttgttgtaaggactgtcagatcttccttatctttaccgattgctacagcctctacaagacaccgaagacccactagtttcttaaccgcgttgatgtattcctccagagatttcttcccttcagcaaatgactttgagacctatcaatggtgaaaacaaaacccctgcttaagcatattttacacttggagatattcagagtaagaatgtgaaaagaaagactcacatccactag

SEQ ID NO: 11398 - DNA, 859 bp, Arabidopsis thaliana landsberg
tctaaacctcaggcttcagtgtatagtttacttagctttagatgaatcattaaggccttaatgctcatatcctatacttttgttttcagtatactaagtttgtgaagccgagcttcgatgaatacattcagccgtcgatgaagtatgctgatataatcattccacgaggaggagataatgatgttgcaattgatctcattgtacaacatattcgtacaaagctgtgccaacacaatctctgtaagatatactcaaacatcttcatcatatcttcaacattccagatcaaaggaatgcatactcttatccgtgatatcaacacaaccaagcatgatttcgtcttctacgctgaccgattgattcgactggtaaaaagaccgatcaaaacattagatttccgatgataggttgcttagaaagatcaaaactaagagtggagttgtatatgtttgtttcaggtcgtggaacatggacttggtcatcttcctttcacagagaaacagatcacaactccaacaggtaactaagccgctttaaagtttgaggaaagttaaagattaaatgtcacttaagctaccatctcttgagacttaacagggtcagtgtacactggagtcgacttctgcaagagattgtgcggtgtctcagtgatcagaaggtatataatacatcacttttctgtctcatttctttcgggtttgtggcctctgcttcgtagcttaaagttttcactacttacagtggagaaagcatggaaaacgctctaagagcttgctcccatgggattaacattggtaaaatcctcaaacacagagagaaaacgagtggtcgtcaggtctgattccattgggttttacat

SEQ ID NO: 11399 - DNA, 1225 bp, Arabidopsis thaliana landsberg
gagatgctcaggtatgagtatttggtcctgagactcacattgtatggaatgtaagtatgtcttccattgacagggccaacagtgaaaccatggggaccagccatcactccatgaaccgcgctttgagctaaaagcgtgcagcatacattgtctgatgcattgctcggaacagctcgtatcatgtaggttggatctgaaagacaccaaaaaagaagaagaaactttatctattatgttccacatacacaaaagaaaaactcataagatatctatatacctatatatttgagggtaagggtcatcttcttggcaaaatgatcctatataagaagagacaaaggaaagcaaatcattttctcagtttttgtctcacgaaaatcctctgtttttaggaatgtcaataatgttaaccttgatctctttgggagatccataggccaatgtcttgaagaagtttgtttccaaaggcatctttgagagttgtggactctttcatgctttcagacaacaaatcttgtcccgtaccttctgcaattacaaatcaccatatgaccacttctcctttaaccgtttatcgataaattcaaaaagccccgcccgagcccttcaagaaaaaaaatggagattccgggatcaagcaacagtccacatctcggctggctagagtggcatgcattgcaatgaatcctgcacaaacccttaagaatccgtaaacatctcttcggtgctcagctaaacttgggtgaaaactacctaagtctagggaaacttcttaccgctgtaccgtcccattaacttcacaagaccaataccattctcaaagcttgtagcttcgacatgtgctgcattgatagcacgttgagcctcttctacagctgtgtcaaacccgaaagatctatcgataatctgtaccgagaaagaacaaacagtcattatcccaaacaaccataagaatctacgatacaatatcgaaatctcaaaccattagggggaaaaaaagaattacaggaatgtcattgtcgattgttttcgggattccggcaaccgcaactttaagcttgcgtttcctaatctcctgcagagacagtcattaaagaaataaccaacgcaattattgatcagaagtagttatgcctacctcgaatatagcagctgctcctttctgtgatccatcttcaccgattatataaaccttgttaatcccgcgatcttgaatactatctac

SEQ ID NO: 11400 - DNA, 1436 bp, Arabidopsis thaliana landsberg
attcatgtatgtatatgtcttcacatgttgacttttcaaattaaggctaatatatatctgtagttttagtgaatcatcatcaaacataatcagagagtgtgttattaacttataaggatggctcagtcatctttgtcaacatcgtcgtcatcgtagtaatggaaaggatgtggaactgacttgaaggctctgtatttgcctacattgttcaagtgctcattctccaacctgaagaagctccatattccccgacgaataatctctaaacatgaaataatgcttgttactgcgattttgtgaagcgacttcaagttgaactctagcactagctgcatccatgccactcttagaatcacattcactacctgtcaaaatcaaatatgattcaaccagaatctttagcacatgacatattctgatgttaaaatgttactacttaccatggctgcaaaatagacgcttttgtgagggaccagtaatttgtcccttaagtatgggttcttggagtgcttacggaggagtccccagtctataacaatgtcccagaatgtgttcatccctgtcgctacacctgagcttataagagccaaaatcatccaagtgcgtccctctttcagatcatacgctgttcttacgatgactgcaatgattgtcaacatatatttcaacgcattgtatccgtgtacggattctttttcttcgcataatctgcgtttgcactgcaaaaaagtgaatacatgtaagttatagattcggatgtgacagaatcagtgaaggcagtaataaaaaaaggaagagattgaattgtgtgaaacctggaggaagcggagccagtagggtataacagcaacgacaaagtagaaggcattgtaaacaccatgactatgacacttgttttgcctctgcaagtattctcctaagccatagtagcaaatgaatagctcaaagctccttatggcttgtatctgaactatcaaaacaaaaaacatcagtctattattctgatcatttattgtcatttgtcagcaaacattaatgcaaatctataacctgactggttaggtggtctcccaagaaaaaatctggaagtgtgacctgtgataaaggataaaatcatgaagatgaatattgaataacatccaggagtcaatttaatacgattacctcgtagaggggggcacatatacagtgaaacagtgatcgtataaagaaaaaccgacttgagcggtatatgatgttgaaaggacaaaaaaagtatgaaaagagcaatctgcaaaaaaaaaagagagatgtttaagcctgacggcttccatctgataacgattgcgcaaaatgtaaacaccaacagaatatctttcagtggccaaacacaaaggaataacttcagggagtgtcttatgatgttttgtggtgcggtccatatcgagctgcaaatt

SEQ ID NO: 11401 - DNA, 589 bp, Arabidopsis thaliana landsberg
tcagagtttttggaaagttacaaaccacaagaaacaagacgagagttaaattacagagaaacacaatgatcttccataacctacaactagggaaggagttttcgatacattgcaaaaaccaaacccaacttgtctcaagactgtggaagctctcgaagcacaccataaggactttccgctaatatatgagaacgggcttcaacacaaatggcgcaaacaagagagtggaccttggccttctccgcataagatgcacctttctccatgagagtctttgtcaagggtctcccggataaaccgtaaaataatcaagacccacataacaaacgagtaattaagccaaacatcgcttaatactaaatgagatagatccaagacacaaccaaaaagctcaaccccaaactaacgaagtaatatagtcgaggaagagaagcttaagcccaaacgagggagacgacaacccaaacgagggagacaactaaacctgagcaactgatgaaaccaaatttaaataggatacaatctgatcagagcgactaggggacaaaagaaggaagacaatagatgtacacccgccccgcatatagac

SEQ ID NO: 11402 - DNA, 1815 bp, Arabidopsis thaliana landsberg
ctctctgctgtggagaagaaggttttcaatgagttgattccactgctttcacatgaatcagacggactaatatttcaaggttgggacaatccttatgttttcggacccaacaaagatctactgaagtggaagtttgtggaaacacttgattttctgtttgatatggacaagtatggacgtcaaatgctcttcttgcaagaacgtgggaggatgaagcttatggaaggctttgccgttgagtttagaggtgatggttgggacaatgacctggctagttactgtggaaagattgtggagtgttcatgggataaggagaagaaagtatgggttagtttgcggattagagttgataaatcgaaaccgaatggtatccggaccggtcgtagcgtgataaagtgcatagaagatgacttaacgaaagaggttttgctgaaggagatcaaagagattatccttctacagatgtacgttgagcgcatcgaaaatgatacaaaagaagctgcacgtcgcaagcatggaaaccgtaaaggctaaggagtgatacagttatttggttttggtatctaacagtaatcaaaattctctttggtttaaactttaaagaaagttatttgaatttagagttcgatatttccgactatctactactgctaagtcgtttgcgtcttgtgggccagaacatcgtttacttgcgatcaagtcttcaagattcttaacgcggaagagatgagctgaagtttgtccggggctttttgcttgtattctttctctactgcagctgcagccagggaatgaagctctggggctgccgtagcgtctttgtcctctttgttcctgccttttgagagctgtgcaatggccgatgcacactgaaggaggaaagcggattttggcggttatctatcagttgcaaatagagaagatctatgaaaattgccatagtagacgagaaagagactataccaagcagattccgagaagagctctagtgtttttgccgcctgttaaatctacggtcgctgcatagtattttcttgctgagataatgttttctactccgccgattgtatagagaacctgattttgaaacgaaagagcgtaaagaaaaacaaactactaaattcagagatttgatcaaatgcggtctgtttaaagaagtgacacttacctcagcatatgcgaggtggtacaatggaacagtaggctgagatagtatgagctcttcatagcagaaagctgcttgcttatacctgtaaccaagacacacaccttaaaactctgcaacagaatctggagggaagaagaggattgaacaaggtttacatttgcaaggaaaggtaaagctctgcgagttctctccatgcatcatgatcagccatgaatctacacacaacgaaaaaaacgctgaagtgatctcatcttatagctctcctttatatgtgatttgtgataagtaaagtactcacagttcaagatatttgttaagaagctcaatggcaatggaaggtttgcctagtgccttggatatagccactcttcgtttgtgtatcgcctatatgagacattttaagttttacttacaaaaccataaacttagaagcaaatgttgggtgtgaagacttacttggtcgagtggattatcctccaaaagactcgcatatgcttcctcagcctctccccataatcccttcgcttcaagaagcaatgcctcaagcctccctgagattcggaaattaggcttagacagggatcaatgtaaactacactcaaaagaatctccaattcaaaacaaccagaaaacctacgactagacca

SEQ ID NO: 11403 - DNA, 209 bp, Arabidopsis thaliana landsberg
aaccaatctcagcccatctctggtttcgtgtcccacaagtttaaaccaaagaacggaaaagctgttacgagcggctgaagagtggcttgggcggttgcaggtcatttttccggactttagatacttcctttctcctaattagcgatgatattactattagccataagttaagattaattaccgtctatatttttttttgtcaaaacatt

SEQ ID NO: 11404 - DNA, 1521 bp, Arabidopsis thaliana landsberg
actgcattttggatgatgacaacgatgttgctcaagttgggagtcagagattggcaaatagaaataatagtcgcattagagggagtggtagagacggtttatcctctgtcacggcagcagagatgtctcagactgaaacatcaaacaatctcaattctcctgtctctttggagctgttctctggttttccagaatttggcctctctggttccttattgagtcatgacagttttcgcagttataatttagatgggatctccgaggtaactattgtctgttacttactctacgagacatctatcttgtctgagcatcatcaaatagtgcttacgacaattcccttaacaccgtttaacttttgttgttttatgtttctcggatgcttttgcagattctgccagaacttgataggatcgaacaagatatcgaacttaattatgaggttgaatattattaacacatgttttgacttttgagtttcagatattgtgatgcgtgttgttactcatattttcctctctttgagcaggatctgcttatcatggaaacaggtttacttctcggtggactaagcttccatgaccaacaccgagacatgaggctagacatcgataacatgtcatatgaggttcgtctttacatctttgaaacccacgttttgttttgggatgtagtatctttaccgttttgtcttttcttttgattgaatacaggaactattagctctagaagagaggattggtacagtaagcactgctttgacagaagaagcaatatcaaagtgcttgaaaacaagtatctatcagatgaaacctttgagttatgggtctatcaccaaaagtcctagtgataacaaggaagatgccaaatgcagcatctgccaggtctgtcccttttgttagtcataatcaagtctttggctttgatgaaatcttaagtaaaacctgtcatgggttgatttagctaagtgaacaacaccgaaatctttgatgattacaggcgtttcattgatgacatgatggtggatatagaactgatatgtatatgtaaaatcagaagttttctttcccttttctctacagttcttcatactctgatctttgttattctcaggaagaatatacgattggagatgaagttgggaggctacactgtgagcacacataccatgtgaagtgtgtgcaagagtggttgcggatgaagagttggtgcccaatctgcaaagccacagccgaaacctgctgtaaataaccgtcttcttcttcttcctcgttcgttgtattagttctttcatctaaagcctgtgaacaacaatggaacctgcgtaaaaaaggcctcaccatttgctttgtgtacataccaattcacaccggctctgtctctctctgccttgtgtctaatgacagagctatcctgtgtttctcttgtcttttcctctctgtactgttgacttccgtaatgtaaagtgggaaagacggaaacgatttcatttgaactttgaagatcaagtaaacatgatct

SEQ ID NO: 11405 - DNA, 426 bp, Arabidopsis thaliana landsberg
tttaaaatttgaaatgaggtttattgtggaaaattattttaaaattttcattccaagctcaactggtctgaccagctaaactttctagctcagctggggagaccagctgaacttctgagttgaacttcagttcggctggtattcaccaggaaaccccctggctgaaaccggttgaaccggtgtccaggaccggttgaaccggtctagcacagtttgaccggccagtctgaccattttttcagactgcgtcacgcctttttttagatgcctttttcagtctgcgacacgacctttttcaggcgtcagatcaacttttgtagcaccttttcagtaacttttgcagcactttttcattcaacttttgcagcactttttcggtcacttttgcagtactttcagctttaattttgcagactttcaactgtt

SEQ ID NO: 11406 - DNA, 672 bp, Arabidopsis thaliana landsberg
gagccacgtaagctgttcggagccacatctcttgtcttcaaaagtaccaaacttcattcgcttctccaaacaaacaatctctttctcttcttctgccaaattccacaggtgcgtttcactcttagctcatctgtgtaatctcaagcattttctgctttgtttggtctgaatttctgaaatcttttgatgataaaaatttctatgaaatctcggtctgcttgttgcatgattcttactacctgggttttgttcagcaagtctatttgtctttatctgttttcttcttaatttgactttaggaatgtctaataatggtggattcatgtgttgaaatatagactaatgttatatccagtggcaatttctacaaatttttttatcttggagcatgaaaatgttccaatctttcttcatatgcgtcgctaatgatcgcttatgttgattatagtcttaccagaaacttgcatgttgttaaaggtctcgttttgtttggttgttctttgttcagattgtttttttttgttcacgccatggcttgtaatcgtctgtgcagatggctgcttcatcggcttgtcttctcggaaatggattatctgtctacacaaccaaacagaggttccaaaagcttgggcttgataggacatctaaagttacagttgtgaaggcttcttt

SEQ ID NO: 11407 - DNA, 666 bp, Arabidopsis thaliana landsberg
actctgaatatcgagtgatacaaaataacacactttagttttataaccaagttatttcatgatcaaatacatctacacattttccaacatttgtttcaacatgacaatcaaacaactccgaaataggaaaggcttatcatactacttggtttgaatttcatcttgcatttagacaacaagtattccggcataaacaaaacatccatagtcaaattacatacctcaaaaagcatcacgaagctaggaaaacccaaatatgagcctaatccgccctcaaagtggtccacaagattccaaatgtctttcatattctcttcaaatgcgaatcgaccccatgaaaatattttactccaaactagatcttctacagcctgaagaaacaagtcttccacaagatctgctcgtgaacctatttttctcttccctacgatcacattgcataagaagaataggactgtcatcttcgaacaattgggtctcctatatttcattgagtagtttggccttcactttcgcgtatgtcattgttgtggttggaccaaaatactttccactgaaccacctgctggcatatgctgcatagtttcttagataagaatggcaatataagccgaagatgaatgcaaattcttgaatcaaatagcggattggaacacagttgacaat

SEQ ID NO: 11408 - DNA, 1042 bp, Arabidopsis thaliana landsberg
tatggtgcactattttatttaaccatcataattcatattgggctatatactacgaaaaccctagtttcacacatacaccataatattgtgtatagatatatatagtgttaaataatatgttgatatatatagagaaagtataagtaattgtataccccatgtgtagttccaactcctgatagacccgtgagagtcatgttcgctcttcgtgaacggtaacatttcggatgtggtggccgatagcatcagggaagacatggttctcgttcttccacctcttgtagtatttctcggccgatccttttagcggaacttccgtcacgtacgttcccgacgtcgccatttttgctctctccctctcgttttaaagcttccacttgttttttatgttttgttttggttgatgagataccacttgtcgtcgccgtggtttatatagtgaatctgacagttaaaaacatagtttttaccgtttctttttatcatttgatagtgcatgctagaatcttcttttcttcatcttttttaacgtacgtactatttaatgggcactgatgggtcatcaactcgtcataaaaatgtgtactttaattggtaggctgattttcgaccaccacgttattaatgtgggtagttgccacaacatcctttagaagataattatgacataaaaatatatttttaccaagaaatggaagaaattttctatgattgtttaccatttttgatttcatacgagactttgaattttttttaaaaattatataaatagaatgagatccatttcatagcatggtgatgcatttagtagttcggatttggtttgaaatgattggccgaactacgtttatgatttggtctgtcaaaccataacaattttcgagacctaaaataatgtaaaagggtggaaatctattgcccatactatctttgagatttattttaattatgttattgggattggaaaatgacaattttgtgtctagagtatagtccgtagttattatatagtttggtattgatttcctttatattttaatat

SEQ ID NO: 11409 - DNA, 925 bp, Arabidopsis thaliana landsberg
  unsure (1)..(925): unsure at all n locations
tagtattaagaatgctgtttatgtggctggccaaatggagaaaatgggaatcaaacgtgatgttgtagtcgataccatactcattgatactctttgcaaaaatagacatgtggttcccgcgctggaggttctcaaacgtatgaaagacagaggaatttcaccgaatgttgttacatacagctctctcataactggcctttgtaaatccggtagattggctgacgccgagattcgactgcacgaaatggactccaagaaaatcaaccctaatgttatcactttcagtgcattaatcgatgcatatgcaaaacgtgggaaactgtcgaaggttgatagtgtgtacaagatgatgatccaaatgtctatagatcctaatgttttcacttacagttcacttatctacgggctttgcatgcacaatcgtgtagacgaggccattaaaatgcttgacttgatgataagcaaggggtgcaccccaaatgtagtcacttacagtactcttgcaaatggatttttcaagtcgtcgagggtagatgatgggattaaacttttagacgacatgcctcaaagaggcgtggctgcaaacacagtctcttgcaacactcttatcaagggctattttcaagcaggcaagatagatctcgctctaggagtttttggatatatgacttctaatggtctgattcccaatattaggagctacaacattgtgttagctggtctatttgctaatggggaggtagagaaagcattgagcagattcgagcatatgcaaaagactagaaatgatcttgatattattacatatactatcatgattcatgggatgtgcaaggcttgtatggtgaaagaagcatatgatttgttctataaactcaagttcaaaagagtggagcccgattntaagcatacacgatatgatcgc

SEQ ID NO: 11410 - DNA, 753 bp, Arabidopsis thaliana landsberg
aacggtggactacaaaaaggttttgggtttttctgtgaaaaaactgaagcttttaatgaaaatacccattgttaacatctacaccagcgcaatacaaggttccattcagagaatacgctattggattggaaaagtggccaagtactatcagactccaaatctttagctttctttgaatatagcccaatctcataaattatggattttattgatgagtcaccttcacatttataataatcgagcatcttgtattgttttttgttatcataacctatgtcatatgtgactggataacgatgtatggatgggaaaaatctagtttgtctcaaccaggggttccaaatcaagaccccgttaaagtagctagtacaaaacaacaagccatcacaatcaacatagtcgtgtagccgtatcggcatctcagatttcaaaccaggaatggctaagggtaactcatggacctctatccgtggacctttgaaatttacggctaccgaataaatcttagactcggttcggaagattaattgtggttgtgattgaacaaagtggtcgttgacaaacttattatcatcgaaaagagaattccattgcttacatacggttctgaatttaacaagagattgaggtggaaccctacataggatctcttccactaattcccatggaaggttgaccgacaccattagctttaagatgaaaataaagattatacttgggtgtgacaaaattttctaaattataaaacaacag

SEQ ID NO: 11411 - DNA, 1028 bp, Arabidopsis thaliana landsberg
  unsure (1)..(1028): unsure at all n locations
gtccatgagttaaccttagacattcctggtttgaattgtgagatgccaatatggctatacaactatgttgattgtgatggcttgttgttttgtactagctacaagtttaaaggggtcttgatttggaacccctggttgaaacaaactagattattcgcatccaatcatcattatccaacgaaatatgtcataggttatgataataagaaacgatacaaggtgcttgattatgaatttgaaccatcatcaaaattgacgatttatgagattgggttatattcaaagaaagttaaagatttggagtctgatagttcttggtcagttgtccaatccaatagtgtatctctgaatggaactttatattgggctggtgtagatgttaacaatggtattttcattagaagcttcagtttttcaacagagagactaacaactttttgtcgcctacctttgaagtacaatgaagacaatattctagcccttgcggtttttaggaaagatcggttttcgttgttaaaactatgcaataaaacatcaaagataaagatttggttgacaaagaatagtataaataatagggagataggattagtagaggacgtggtgtggataaaactcatgacagtgttaatacctgatttccctaaattgccnnnnnnnnnnnnnnnnnnnnnnnnnnnnnnttacttgcttgacaacgatgatgctaagaggctcgttatctgttgttatgatgaaactcaacaagtttacatctacatcgtaagaagaaatattgtaaaaaaaatcaaaatagatctctttgaggatctacttgatcaatctagtcctcatctgcgtacttatatgcccagtttggttcggcctacccaggtcaaagaggacaataacaaactatatgtattataatatatatttgtactttggtatttcgttaacaaccatatttttcttttcaatccaagatttttcttatctatagtctgatatttttcttatataaaactttgacatgacggcttttggta

SEQ ID NO: 11412 - DNA, 1445 bp, Arabidopsis thaliana landsberg
  unsure (1)..(1445): unsure at all n locations
gattctcttgttactatctagtccctctaaactagttcttgaactgactttgtaaaaaatggctttcttgaattgattctctgttaaagaaattggtttcttttgggaactgtttgttacaattaaacttcggttacagctaaagaattttattgacttctgacatacatgcttgataattnnnnnnnnnnnnnnnnnngcttcagaattacgaacttttattcagggtcagtatgaaattatctcactgagtggatctatattcggtgcgagcacgggggtaaaactggtggccttagcgtttgtttatctaattcagatggtcagatctttggtggaggagttgggggactcctaaaggctgctggtccagtccaggtatctttcctcttgtcttatagtttaatttacatgtgtgcacaaactcacctgaatctagaaaatggaattccttgattatttgccaagtttgatagggatagtctttgtgctcttggctttggtttcccgtacaggtggttcttggcacgtttcagctagagaaaaagaaggatggaagaaatggtgcgaaaggagatgatgcttcgggaagtagaaacatgttaccttctccttctggtacagaatctttgtttgggctaccatcccgatatggaatcttccggaagaaatccaaacgatgagcatcatactattactagtagtgcattgggtggtggagctcatttcatgatgaaaccacctcagggcatgcacatgacacatgcccgaccttctgaatggggcggtactgggtatgatttgtcaggtaaaagtaggtaaccacttactcgtttgtatcttttggggtttccggtgtgttctcgaatatttagtgagactgataatatcaaaagccttaataagattcttgttgtttgttgtttggactgtaatggtggccttatggatgttatgttgtgtaggactgagaggaaatgggtaatcagaaaatggagattatgagtaaatggcaaagattagttacggattcaagtttccgaagagacgaagagacgtgtgtagggttttagatcaaaactgaggttgagcatgagtcagggtgagagtggacgtatcatcatataatgtctaaaggaatttttcattgcaaaggcagagaaagagaagtaaagaagacagtgatgcttttgttcttggttcaatgtaaaattataataacttcactttctttttctggattctctttgttttcatccttttttttgttctttttcttcatataatcagtttttctttttttggttaattgtattttttttctcaaacgaattgaaaatttagaaatatggacaatcatatatatatgaaagaaggcccactctctactacaacagactacgttgattgaaatgaagtttactagactaaagtggtctttaaat

SEQ ID NO: 11413 - DNA, 936 bp, Arabidopsis thaliana landsberg
tgatggttccatcatttaggattgcgataatcaagaccatgaaaggtgcgaaatcaaatctccagattaaagcaacaagcatgaatcccaaaacaatacggatagtgatggaaacagcgtagattgtgtagttcttcatcctctggaagatagcgcgacttgtcaatacggcacttattatcacgcttagtcctggttctgttagaacaatgtctgaggcgcttcttgccgcatcagtagcatctgccactgcaattccaatatccgctttcttcaaagctggagcatcgtttacaccatctccagtcatcccacaaatgtgcttcctctcttgtagcttctttacgatctcatacttgtgctctgtgtaaaccaaatgaaaacaatgtaattgaacaaaccaagtgagactgatgtaactgaacaatattttaacatttgactatttgaatatattaccagggaagactccagcaaatccatcagctttctcaatgagctcatcgatagggatgccaactaatgattcatcctttgaattgccaaggagtgaagtggatgggtacatgttggttcccatgccaagcctacgaccagtctcaataccgatggcaagttggtcaccggtaatcatcttaacattgacaccaagctcaagggctcgtctaatagtttccgcactgtcatgtcttggggggtcaaagagtggcaacagaccaacgaactcccatggactaccatcactttccttagtcttctcaggcacagtctgcatttaaatagaaaaggaattttcttaaaaccatataacgaaatatgtttatgtcattatgtgatgagtctaactatgacatacctgttgagcaacaccaagagaacgaagcccacgttcagcaaaaccatcgacaacttcgtgtgcttttcttttagtctctc

SEQ ID NO: 11414 - DNA, 631 bp, Arabidopsis thaliana landsberg
  unsure (1)..(631): unsure at all n locations
caggtcgacgctagccacacatttcacgttcatcgtcagtctgcagagcacagaaaataagtatatatgtcatgtaggattggcaacacaaccttagtatctcagtttggaacagcagaaacagggtggcaatagtatgttttgtttgacagatcattttatattcctattttccaaaatgcaaaattcagtctgatgaaatcgaagaagtctagcctttttctagaagtgaagggctagacccagtttcatatatcagatttcattattcaagcatggtgccagtatgtttagtgctttatcagataaaattatcttatatgctggcactattgagaaatgattaataatatgatatatgattaaaaatgtaaattacagacattaaaacagatgccgaggctttcaagttctcaccctccagataaaccaaaatatgcttttatttgagccacattccaataggtattctctcccttagattccttaattgcttgctctaagagagcgcatgcgcgcgatatgtgctcctgctgattgcccatcaagtagattctcagattcatcataatcatttatanaagttacaatcaaatcaggactaaagtgagatgcccagacactgtagtct

SEQ ID NO: 11415 - DNA, 859 bp, Arabidopsis thaliana landsberg
aaagcagtttcacatctgcatgccattgacggagccaagcaatctccacagcaagaggagcagttttggtcatccctgatattcccaagcgaaaacttcactgcagcatcttgatacacaagactttgggctatgtaatggaaaactggaggaactttgtcgttgacctcattcacccagggaatctcaacagtttctttccctagactgatgtccccgacgctgcttatcaatctccactcatctgcagaaagttggcattcaggaacaactaccaaagccatggaatcaccaactgcaccgttttcagcatcacgcatatgttcgttgctgcagatttcaacaacatcattactggcctgagaagtataagccatccttgctgcagatttcttcaatgcatcaatgttcgttgtgacaaacggcaagttttttggcaattggttagctgaatctctcccgtttgttgccaggtccaggtagcagctacagatgtcgttcataaaaccaagcacagaaaagttggggtccagtattttgtatgatcggagacacttctcctccattgctcttcgtagttcctccatagaaggtaaatggggatttgatcctccagttgcaggagcaaaactaagattaatcttcacctcgcctgaagcagaagaagctaattcaagtgctggaggttcttctatggttgcagctagcttgtgatcactaaatctcgcaacagttgtaggagaaatgtcattggtagtaccatcagcagtacttactgtttcaccagccctctcttccacatgtccatttgatatgtctatctcaagcatggaagagtcccctctatctactgaatcta

SEQ ID NO: 11416 - DNA, 431 bp, Arabidopsis thaliana landsberg
tctttggttattgttggaagatccttcttgtcttcctctagcaaaatttccttctgatacagatcgattactctgtgacaactctctttctttgtctcgagctgcaaccatcacatcatctaacctcaacttttctcggctattactatacttcatggtttcaactaaaccatcatatcttgaaggcaacgaacttagcaacagaattgcttgaacctcatcagtcacctcaatctgcaaatgattcaaatcagccacaatctttaagaaatcatcaatattctcatcgattttcttgttttcttgcatcttaaaagtatagaaacttagctgagtaaagactctatgaggtagagatcgaatcatgaacaatcggatctagagttccccaagcttctgctgcagtttgacatagctcgatctttctttaa

SEQ ID NO: 11417 - DNA, 1445 bp, Arabidopsis thaliana landsberg
ctctaaatgcacacaggaatggtgagatttttttttgttggtcaaagaaatgttgagatttgttttcaagatttattgccaaaaatctatagttcacaacttcacatatttgactgataaaaacttatcttccttctctttattatgacaaatgtgacttatatatatattttatatatagatgcgtgggtgtataaaaaccagctgcgtatttgaatatctctctctctcttgtctgtgttgaaatgggttcaaaggataacgccatttctaatgactctgcattagttttatcgcttcttcttcttcttcttcttcccctgcttcacgaagcagcagaaggatgtgacatgttcacggggcggtgggtgaaggacgattcttaccctctctacaattcctccacgtgtccgttcataagacatgagttctcttgccagagaaatggacggccagatctcgattactctaccttcagatggcagcctctttcctgcaaattagcaaggtatcatccattctttatttattacatacatttttatcttttcaaaccttttttttttgggtgtctagctattgaaccaaggtatcgttatagatatgactatttttatttttttacttttgattcatgattttgttttaatatattcgtcggtttttatttgttgaaatatgacattacattagcgttataggaggaccacaattttttgatttgaaagataaacgcaataataattcagcagtgtgaagaaatcttgatttggttcatataattacttttcaagaaagttgaaaatgtttagagatattgtttttgtgtttgtaaaataaagcacttttgagtgagcaaccaatgagaaaagagaatgctatttatatagttgtttgctataattgaatggtgtttagaatctccaaaattgcacgagatgaaaacgaactttttttgtcacaatatatgccaagtggtggatccggcgtgagttacacgcgccgccattgagattaggacagccaccaaactcttcctcataagaagacataaattcccccacacttgtggggacagtaactcaaatctttcgacggttctgtcctcctgtttcttaagttaatttcaatgcatgccaccgacataaaacgccaccgtttatattgtttgttctaggttcaatggattgcagtttttgaagaaaaacaaagggaagaagattatgtttgttggtgattctcttagtctaaatcaatggcaatcgttggcatgtatgcttcattcctctgttccaaattctacgtatactttaaccacacaaggtagtatatcaacctacacattcaaggtagttgcgattaccaaatctacacttgttttggtccaggtgaatagaaaaccgggatgtactaaaccggactggtgaaaattgcctgagtatgga

SEQ ID NO: 11418 - DNA, 1232 bp, Arabidopsis thaliana landsberg
aagaaaacacaaatattacttacatcaatctttgagatttctttaaggtaaagaaagagtcaaaagtatagtggaacaccaaaatcttacaggtgggaaattcaaaagggaactccattaaatatataaactttcttaaccatttttcacacatatataatatatacacactcataattatataaatacacataatcaatcacacatgagagatagtcacatcaaaactaacaatctctctctctctttcctataagtttgaatggcgatttaagagacccgtagttctctgatcatcctccggtttacactctcatcaaaacacaaacacaacgcttatctctctcactctctttactcattcttctcatttggataagatctctctctttctctccctccttttcagcagattcaatccaaaccctaacctctttgattccgatctttagagaatatttctcttcaaaaaatccattataaatacttttacttaactaaaaactttttttttttaccatctctctttttttttttacttactccatatgccatcaatgtcaaattgttctttctgtcctttgttcttaattagtgtcaccaccaccaccactacttctatactacaaacccttctcgtattctcttaaccaatacgtacttattacaccaaaagtctctttctctctatatatatatagataacagccaagagagagaaccaagaagaagttattttcttgatggatttctgttggaagagagagatggaaggtaaactagcacatgaccaccgcggcatgacgtcaccgcgtcgtatctgcgtcgtcaccggtccggtgatcgtaggcgccggaccgtcgggactagccacggcagcatgtttaaaagagagaggtatcacgtccgtactactagagagatcaaactgtatagcatcactatggcagctcaagacttatgaccgtcttcatcttcaccttcctaaacaattctgtgaacttccgattatacccttccccggagatttccctacctacccgacgaagcaacagttcatcgagtaccttgaggactacgctcggaggtttgacataaagccggagtttaaccaaacggttgagtcggctgcgtttgatgaaaaccttgggatgtggcgcgtgactagcgtgggagaagaggcacgacggagtatgtttgtcggtggttagtggcggcgaccggggagaatg

SEQ ID NO: 11419 - DNA, 2003 bp, Arabidopsis thaliana landsberg
  unsure (1)..(2003): unsure at all n locations
tagttctctagctgataatatacgtagaccggatcttcatagtgtttgtcacctatcataacaaaaattcatcaaagaagattgtgaaagaaagttcaattaagaagaactgaagaagaatatagaaagaactaaagatgatatagatatctaccgttattgttctgttacacctcttatcttccaagccctgtatgtatcggactttgttgtccctagaggataatggaatgcagtctgtgtcnnnnnnnnnnnnnnnnnnnnnnnnnngatcatgtatgtaataaaagatcaaattatattcacaaaatatatataattgtagctgaggaaagtactgagaaaagactgaaaacatacaccctgagaagcaaatagacaaatcactcccagaggaataaagacaacacccgagacaagaaaagtcagaatcacctgcaaaacaagataaaccaaagaagagtttaactataataaacgttggaaattttatccataagaatgttacacttttatgagttattgaagctttacccattttggagtaagaattggtttgcatgctggaagctcctgttgggtaaatcttgaatctgatgaagcaaagttagccaacaaattatgtttcttagttgacctagattctaggaaacttatcttaagaagagagaaatcaaaaggtatcacacattttaatttgttgggagttacattaatccaacaacacacaatgggtttcatctacacccttgttaaactttcacatgaaatggattactaaaacataccaaacaaagaagaaaacgcaagcacccatttgtgtgtactagattaatattaataatcggaattttttcctatataatatatctgtatacacaatataaattttagtcatttgcatagataaagaaatcatagaatatgatgatcgagagactagcaacatctcaaagaaagaatctgagttcttaacatttttttcaatacgttcataacatagaagaactgatccattacgaggtgaaaattataaaggcattccagaaacactaggtacgatcccaaagtacagatttgtcaaatccgcaaaagaaacaaaaaaaaatcagaaaaataaccgcaaatgacaaaatgtatcaaaaattagggaataggttagagatcacattttggacgctttgaggtgtttttggcagcagaagcctcagcggatccaccccctaaggcaattgaggacgtcgcagaaaagctcattacgaaagaattgacaattagaaaaaaaaaactaatttcgttaaattcgatatatcttttattctttagttttcaaaaacacatgcgttatttttttcgtatttgactttttcgtttatcaatcatttcactgattgttaaataaaagcatttggtccatcgaattgattgataactttgaaagctcacaattttttttcgtatttgacttttttgtttatcaatcatttcactgattgttaaataaaagcatttggtccatcgaattgattgatcactttgaaagctcacaaatttaaaatgtcaccaatcaaaccagtatgtgaacggacccgatcaaatgtaaccgtttaaaattaaataatcatttctataaatatagactatattgtatttgtggtcgacaacaaataacgatagccttccttccccttctgtgacaaaagaagaaactataactttagttgacagatattattgtcctatcctgtcttatcttcatcattccttttatatgaggagaaagcatataaaaattttaaactcattgtatttttaagcatgatctgtcatggaagatgaccaacctatatttcttcaatgcatataaaaggatattaaggacaaaagataacataatcataaatttgactaaaatttaggtattacattattaaaaaaaaataggtattgaatttataaaattagataaatcaaatccacgactaatgagttttgaacgactg

SEQ ID NO: 11420 - DNA, 885 bp, Arabidopsis thaliana landsberg
aacactcatttttacatcagaaactggtgaaagtcttcctggagaatttgcaaaggggattgatacttctccttctcttgaactttcttttggctctggtgatccggttctcggtttaaagcttggtaaacgaacgtactttgaagacttttgggaagtggagaatgctaaaggtttgggacttcccgtgagccttgcttcgtcttctgtttctccggtgaagaaatcgaaatccattcctcagaggttacaaactcctcactgtcaagttgaaggctgtaatcttgatctttcatcagctaaagactatcatcggaaacataggatttgtgaaaaccattcaaagtttcctaaagtcgttgtgagtggcgtagagcgtcggttctgccaacaatgtagcaggtaaaaaagctagtctttctcaagagagaaagttgtttaatctctctgcaaaagtcttaatgaaatcttaacttttttggtctccaaaggttccactgtctctccgagtttgatgagaagaaacgtagctgtcgccgacgtctctcagatcacaatgcaagacgtcgcaagccaaatcctggaaggacatatggtatatacaacaatcatttatttcttatccttatatgaactctgaaattgcctgtagttcagttatagcatttagttagtttcctttgtcaagatagatatcatttcatgtagttttgggggttcacaacaatctcattgatggagaattggacatgcttttgtcatatgcagatgggaaaccacaggtggattttgtatggaacagatttgcacttatccatccaagaagtgaggaaaagtttctatggcccagttcaaagcctgtaccatcaagagtcttaatgccgc

SEQ ID NO: 11421 - DNA, 699 bp, Arabidopsis thaliana landsberg
gatttctctttattagtttctgcatctcgaggggtttttgggattctctgattcgatcgagttctatttgtcgttgtgtacaacatctcgggtggatctttgttgatggcgaaactgagacactcgcgatttcaagcgaggaaatggtcgacattgatgctggttctgtttatgttgtttatgttaacgattgttctcttaatgcttttggctttcggagttttctctcttcctattaacaacgatgaatcctctcctatcgatctctcttatttccgacgagctgccactgagaggtgagctttgcatgaatttcttgatctctctggaatttttatattaaatttgtttaatttcttttttgtttgtgtatcgaattcagaagtgaaggacttgggaagagaggagaccagtggactgaagtgctttcttgggaacctagagcttttgtctaccacaatttcttggttagtctgattctttattccacagattttattcgattaatttaccactgattgtgttaatatcttcagtttgatcattgtttaagatttagtatctggaggattgattaattaattattgatatgattttgaccagtcgaaggaagaatgtgaatatttaatcagtcttgcaaaaccacatatggtgaagtcaactgttgtagatagcgaaaccggcaagagcaaagatag

SEQ ID NO: 11422 - DNA, 1393 bp, Arabidopsis thaliana landsberg
  unsure (1)..(1393): unsure at all n locations
aactttagatcccggtgtataaagtgcagctcatgtacgtaagccatacccctggcaacatccaacgcttgcataacagctaacttcaaaggcacagctcggttttgtctcttagtcagaaactgtctgacagaccctccttttgcatattcagtcacgatgcaccacaccatcggtttaatgcacgcaccaataaacctaacgatgttaggatgcttcaaaaatgcaagcatagaaacttcctgctgaaactgctgttcgagggcttgtgccttttcagggttgctatctgacctctcgagtagcttaatggctacatcttctccgttgtaagtccctctgtataactttccaaaagccccttgagcaaaagcaggacccatatgtagtttcttcagatctattgtccactcttcatagttcaccagtccctcggttggatacttactatccatcaatgcttgtgctaaggcatcatcgttaagtgcatgagtaacttttcctggccgaaatacgctttggccatccgagagagagtagggatggcgcataggcttcaacccaggatggccaataagagcatcactcgaaccaacgctactgttatcgacagacattgacacagaccctccagcattacttgtctgcatactgtcaacagacatgtttgtaccttcttccccgagcttttgataaaagtcttgggtgaaggcatagtaattgttgtcgttgttgtgattgccaacagcgtgcaaatcgaactttggattctcaagcatcctttccaatctcgtgttgagtgtaatgtataatgtctgaccgagctgcaagtcacatgtaaatcgctttcaatcacttcaacatgcacctaaagcaaatatagaccatagtaaaggaaacaaaagaaaggatatgagaaatcactattatcaaaatggtattttctttcattgaagtaactgcaaatacaaagaacttacctttaagagcaaatcaagaagctagaagaaatgaaagtttatgtttcgtgaagctctacaccgtcaacaccctaaaatagaaacatatatatacatgttagtataagaatggaaattttcgtgaattaagctgaaatcagatgctttaataactcagctcagcttcaactaggtaaaaatagtaacttcatcattgaattccataattttatttcaaagaaaacaaagaaaaatgagaggtcatatgagaaaactcgttggatgaaaaaaataaaatcatcatttcccacaaaacccanaaaagtagacccagatccgataattccataatgagataagctaaagcaagaactcatagattacctagagctttacaaaacacaaaacactntgtatgacatgaaagaaacacg

SEQ ID NO: 11423 - DNA, 1057 bp, Arabidopsis thaliana landsberg
tatttacaaaaatctaacgatatgccagaaatgacaagttaacatttcttgaccattttatcattaagtcaaaaaaaaaattgtaatttaaataacatttgaaagttcaggttttttcgtctcaaatttgaaagttcatgattttttgatttgaatggttatagaaaataaataaattaaactaagaatagatacaatatttatcaatgaataaattctattttaggatttttcccgtctcttattggtttagttctccgatcccccatacatgcttatttgttagagttgggcattttgtagccttttgtctatttgccatttgggctttggataggttcttgttttcgtttcattatgagtttaaaaataatagtttttaagtttggtttcttgtgttgtaaatttccctgataaaatttgatcgaccaaaaaaaacaaaatttttctacttaaaacttgaaaattactactagtaaccatggaaattcttccaagattcttttcataatcagacaaaaaacacataacatgcatttaaccgttagaaatttaaacttgtataatataaagattatttggaactttaaagaagatgatttcgcttttgaaaaaaaaaacgttcagaggactaattgataaaatattctatatctctcttccacgtataacggctctcttttgccaactgtcgaatatttcaaatgttccttccctttaaccaacaaaagtcaatttcaattcaccccaaaactcctcaaagttatcaatctagtctacaatttcgactcgagacaagactcaagggtgaaacaagtgataagtttcttatttgaggagctatatgtaaataatacatataaagaaagttagtagacatatttcagttaattaataaactaaagggacctgtatcttttctctaatatcaacatttcaaaaaaaagtttctcctcagaatttgaacttttgaatttcttcaaactcaaaaacgctctcttcatcttcttcaccaagagcgtctgcttcaatttcttcagcaaatgggttgctgtct

SEQ ID NO: 11424 - DNA, 1453 bp, Arabidopsis thaliana landsberg
aataactaactctattttagagttaagttttattccaatcctattcaatttccaatttctaaaatagagatctaatgtaaattaaaaataaggatctcttaaaagataaaaaaaaaaagtttatttttgaagttaaaaatatagtagaattaagagtttttttttctttctaaagtagcgttaaagaatatggaatagaattggagtcggtctaaaaaacagaatataattttagtatctaaatataacaataaaaaacaaatgtactatgtttgtaaataaaacgtcatagagaatcttagaaggtcccacaaacccaaatcacaaatgaaaaccccttctataaattccaattctttctcacacccaaaagaacatttttctccaaaagttaaacatacctactctttagtctctcactctttaaaacattttccatcatccatcaagaatggagtctcatcctcacaacaaaactgaccagacccagcatatcatcctcgtacacggtcccatcatcatcggagctggcccttctggtcttgccacttcagcatgtctctcgagccgtggagtcccttctttgatcctagaacggtcggattcaatagcatctctatggaaatctaaaacctacgaccgactcagactccatctcccaaaacacttttgccggttacccctcctggacttccctgaatattacccaaaatacccttccaaaaacgagttcttggcctaccttgagtcctacgcttcccacttccgtatcgctccaaggttcaacaagaacgtacaaaacgcagcttacgattcttcctccggtttctggagagtaaagactcatgataacacagagtacctctccaaatggcttatcgtagccaccggtgagaacgcagatccatacttccccgagattccagggagaaagaagttttccggcggaaaaatcgttcacgcgagtgagtacaaaagcggcgaagagttccggcggcagaaagttttggttgtcggatgtggaaattccggcatggaaattagcttagacctcgtccgacataacgcatctcctcatcttgttgtccggaacaccgtaagtataaactctttttttttttttaattacatttttgaaatttccctatcgttttgtttcaatataaacgacatgttaccaccatttctattaggttcatgtgttgccaagggagatacttgggctatcaacatttggagttggaatgacacttctcaaatgcttacccttaaggctcgttgacaagttcttgttattgatggccaatctttcgtttggaaataccgaccggttgggccttcgccgaccaaaaacgggtccgcttgagctgaaaaatgtcaacagcaaaaggccgggtctcgatggtggaactatgtctctcatcagatccggcatgattcagctaaaaagaaa

SEQ ID NO: 11425 - DNA, 1977 bp, Arabidopsis thaliana landsberg
caagcggcagcacacaaaactctcaagtcttgtctcgttctcttttgtttgtgaaactgagaaaaaaaacagaatgggtggcgtgaagaggaagattgctatagagaagattcagaacaaaaatccacgagcggtttcattctccaaacgtcgtaagggtctgtatagcaaagcttctgaactttgtcttctctcggacgcagagattgcgatcatagcgactcctgtttcttctaattccaaccccgctttctacagttttggccactcctctgttgataatgtcgtcgctgcttttctcgccaatcagcgtccttgtgatgaaaggttttggtgggaagatgagagtcttctaaaatcagagaatctggaggagttgagagaggcgatggattcaatgtcgactatgttgcgagatctcaaggagttggagaagcaaagagatcatcaaacgcaaaccctaattcatcagccgtgttctgcaagggtttgcattcaagattatgtaactgtgaatttcgatgggtttaacacggaagagcaaaccctagcggtttctgacaatagtaacaacaacggtttacttggaaacttggatgagtgcaatgaagattttgatgatctcgatcaaatcttcgatacggtgacaaactactgaatttttatcggtgaatttggagatggatgatgtaactgtgaattctgaagggaacacggaagagcaaaccctagcggtttctgacaatagcaacaacaacggtttacttggaaacttggatgagtgcaatgaagattttgatgatctcgatcaaatcattgagtatttgacaagctctgaagctttatccatgaatttaaagatggatgatgtctgatgcatgcctctatggtgacaatttgtgtttatgttgaaattggatccttgatttaagtattgcttcggtttaatatttctttgtatgtcttttatcagcttatgactttatttgatctgcgtgatattttcgtatatctaaccaaaacataagagcatccccaaccacaatacaccaaattttaacaccaaatttgatattttggtgtttcaattgttttatcatctccaaaccataacaccaaatttcacactaaaaatattactttttattattatattattaaacttaagattttctttatttttttaatagtttgatatacataacatatttcataactaaattattttaacttaattaatataaaattacaatcgataaattgaaaataacaaaaaaaattacattgtactaattctcagaattagtatattcggaccacaagtgttcaattaatgcatttcgaagtttaatatgagcttcacggtctttgattttcctgtgtcgaactaaaaattcttgaaatcgaccatcatcgatcgtctcccgccgtttcatcttctagagttgggacctcggctctttcttcaatacttgcatcaaaatcacgttcatcctctatgtcatattatgcattatgatacaagtagttataatatcatgtaacactttcttactccaaaaacgtgttggtccagccacaattgcaaaatctgagatctttcatagtcaaccaagaccaaaaagatctttacaaactcgaatgacaacgattctttctgctgtctccaagctaagaggatgtgtaaccagattgaaaacaagaatcctagcggtgcttccgagcatgacattgtaaatatacatacttgagttagttgttcatgctctaccattattaatttattttacttgctaattttcatttttcttgtcaatatcaaaacagttaaaccaagcgaagatgttattaacacaatatggcaattacaagacaggattcaaattcgatcatgtttggcctatccttaaaggtattgagaaatttcaaataaccacattaatagaggcgatgcatttcaagaagaaagtcgtaatg

SEQ ID NO: 11426 - DNA, 521 bp, Arabidopsis thaliana landsberg
  unsure (1)..(521): unsure at all n locations
cctgaggctatcagcgatgaactacttagagcatatannnnnnnnnnnnnnnnnnnnttatccgcagccttcgggggacgagggaagaaaagattaaaccgagtatttgatgccatcggctttatataccctgattatcactacccattgcgaaggcaagggaagaaaagaaaagctatcgctttggccaccactgctgtgccgaaggcaagaaggtgaaggtcctgacccatcgaccgcgatacattgaaccggccgtggtgcctgaattttgcgaaggaacctcttcaactgccaaagtaaaacaagctgctccgattgcgcagagcaccgaaaagccgattgtagtgccgaagtgcctacagtcgggcctatcgaagccaaagatggtgcggccgaagagccgatagtggaaaaggtattgaaactgccagaaattctgagcccattagcaggagcagaattgccaaaggtacaaaaaactgctgctgcaactcctaaaaggaggaggatggccacag

SEQ ID NO: 11427 - DNA, 1113 bp, Arabidopsis thaliana landsberg
acctcagaagcatgaactcgtgagatgatagagaaggcgactgctcgtcgggtaaaatcttgaacacatttattcaggaagatttatgcttgaatatctgattgttagaacacgttgatctccatggtttcttgtgaacacagaaattgtattcgaaatttcacagtaaatgcttgcgaacaaagtgatgtcgtctctccaagcaagcaatgcccggttccgagaaatttataataccaagccggagcgacacttctgttgcagtgagtgaatcaataaagcaataggaagtgcaaaccaagtcgtgaccctcaacgcgaattgccatttcgttgcttcttaccggaacttttcttttcctctgtttcttgctctgctttgggcgttgttgtttagttttggagaaaaccgtaaaaaaaaagtaacacgaaactcaagttttttaaggaatgaagaagacgtgtgtatttaagagtacaagtcgccattggtgattcagttgttcatctggtttataagggggtacggtctattctccccccgacaacgatagtatatggccacatagagcccgacctctgcccatgaaatagaagttatatgtttatttctcgaccaattaaaatttgagagcttaatgtccataaatcgtaagttcaagatttaaaatcccgtagcactaggttgaatcggtttactgtatactaaatcaatgtttttttccatgatcacgaacatgaaccacatacttattttttccatgatccacttcataaatccttcttccatttggaaataacaccacttcaaactcttttttcgtttctccataatagcaatcgccttgggtatgatcaggcttgtaacattttgcatctctttgatcttaactaggttactagccataatatgccgtcttatatcctctagcaatgcaaccactagtttttctcgagcatctttcaaaacagcattgtatgattcactgatattattttctaccgcagccgactttgtgatatcactaaaaaatgctctacaaaaggagaaaataataaatccattagatcaactaaaaccagagtgacaattgtagagaacataacatgagtc

SEQ ID NO: 11428 - DNA, 1282 bp, Arabidopsis thaliana landsberg
tagaaattagggtgagtttttataggagattttcgggtaaaaacgcatagcaataaaaatgtcatacatgagaataatcatgtcggtaagacgtgtaatttggaatccgacaatgagtaattaattagaatgtcctaatcggagtcttaatctatcactaacttaattaatatctgtaaaaacttcgagatgattctctattgacaaaagtgaatgaacaaaaaaaatccagtaaagagatcagaaagcaaaaccctaggatccggtcatccaagggatccactgaaagtaaatctttataataaaggaaattaaactatattatacatgagagagtgtgacatatcacatatgacatatgtatagatcaaatttgaaatattttattgtatgcacggaaattcattttcatggtcgaagaaaacaacaaaaaaggaaattgtttttatttattttttgacagagagagtgaaaagacaagacaaacgtcaaatcggatctctttcttatcatacgactgccagtgccttcttgtgttgtcatcctttttacactaatatatactactttttctcagctatagcacaagttaaaaccaatttgtatatatttttttcgtcaaaaattgatggatttgggaaaaagaaactgttcttttcttctttatttttctgtctaagcaaaatatggaaatcaaaaggaaatgtatagcaacccgcacgtgtgttcctgactgacctcatatgggtgtaccatttgaagaatatttcattcgagaagcactcctccagtttaacggtccatccgatgggaataccatttatgattattatttgtataaatagtagattagtagttatacaatttttctgctttcctcaaggaaacatgcttaagaattttaatcgaagtgatttatcaaattgaatgttatccatccttgaataatgattttaaaagatacttactacaacaacaaaaatatatgtaaaaaaaaaacaacaacacaaaaatattgtagcggtccgacagaaggacccgatcaacccggcagacacgcatccccatgcccttcgactctcctccaccaatttcttaaaattttcattatttattacttttggttttcttatcccatctgaattatattttttgcctcttaatttttaaacaaactgattctttcaacttcttgaagcatatgtagtataccgctaaaatgtattttagttattagttcatatttcataaaattagctaaaatatgtattaccactttatg

SEQ ID NO: 11429 - DNA, 1383 bp, Arabidopsis thaliana landsberg
caaaaacttaaaggtaaggcgcacgcccttctggtccgattcacaaacccaacgaaagaggtatgcctgaaaagcaaccacaaccttattgaatctatgagtcttcatactctcaaggctccacttaatcgttaagaactttgcttcatgttcatctctcacattaacaaaggctcttcgactatggagtaaagtcttcccatcactatctctaacgacccacgctcctcctgccaatctatttctttttgaccaggatatgccaacattacactttaaccaccccatagaaggagggttccacttcaccaccccacttgtaccttccaggcccactccctcattaccaaccaacccgataccatttgactcactctggtccactacctgagcctcaaaccattccaaaacatcatctcgaattttaaccatcgtttcaaaagcagaaaagcgcttcccatcaaagagcaaagcgttcctattagtccatattctccatagaatccaaggaaacgtttttcttagctcctttggccactctctgtttttcctattttctagaagatgttgaatgtttgagaaaacagagcctccatgaaaaccaaattggggagaagggaaatcagacatagcccagacttgtcgagcaaagggacatgcaaacaaaatatgcataagactttcctcctcagacccacaaatttgacaagtggagtccacactcatcccccttttattcagggcttgggccactggcatcgcaccacacaaaaccttccataagaaaatcttaatcttagcatcagtttgaaggtcccagacctgacacttcaaatcatttgtggagggtaaagccatcgcatcttgcatcacatccgaaacaatgtcctgagaattcaaccagtaggcagatttaacagaaaaatctccacttctgttaaatttccagacataaaaatcgtcctgcgacaccacaggctttatcttttttattctgatgatatcttctggtaagaataattcatcaagaatctgctcatcccaatctcttcttctctggtccaacaggtcacaaactctcagacccggattaaagaaatagttcctcctgtaaggagctctcatctcctcatccaaaatccaagggtcaatccaaaccaacatagatttaccattgcccactttcttattcatccctttttccagcaattctctaccaaaaagaatactcctccatccaaaggatggtctgcgagcaataggaacctcaagaaaatcagcaaagggaaaataccgactcttcatgactttggctaaaagacagtctggttcctgcaaaattctccacgcctgctttgcaagaagggcttggttaaaacgatg

SEQ ID NO: 11430 - DNA, 1630 bp, Arabidopsis thaliana landsberg
atatttttttaaaatttaatttattagtttgttttaaaaccaattttcaatattatatattccatttttctagacactttaattacctaatttataatataaacttaattatagttttacacactctatattattgatgatatttgaatttcattagtataacacccaacacatcttcgctacatttaatttagtatttctttttgaactaactataaatattactcattttcattttgtaatacaacttaattatttatttcatcataataaaatatcgtttttctaaatattgtaatctgataaaataattttgatcatgttaaactaattttaaatgactcaaaaggatttactcctaggaatgatccgatgaatttttctaaagtaaggcagttctaggttgatcatgatgcttaggagtagataacacgaatcgttgttcattaggtggactttaatgctagaatagcctagatctaattgatttggaatttaggaaattagttgcctcatagatgttgtttaggtggatataactgaggtaagcgaagctgtcacaatgtgataatttcttttcttttcaagatatttaacttgtcttggaagctccctctcaacttttctctttttttcttaacaatgaaagaacaagaaagccataacatctaaagaaccttgatggtcttgtccaaaaaactaggatcctaaagaaccttgatggtcttgtccaaaacatctggtagaactaaaatgagagcttacttcaagtgagaggttcgcgacgaatcatgtttcctttattaatccaaaaaccaacgaacttgaacaccgataaaagtatattttaaagcaaggccaaaattattaactgaaaaacaaataaaacaaccaatttaaacaaacttggagacaacaaatgagatgaagagttcgacttgattgggtatacaggcgctactgcgactgcacatttcccggttggttcatggaagttacgttgaagcctaaggtatccgccttctccccactctggtccccaagaattacgaataagccagtagtctccttcatctgatgatgttccataccccacaattagcacattatggtctccccacaaattactacatgctcctttatacacaccctaaaaaacaacacaagagaaaccaaaaagaatacttgatcacaacttagtaatattggagttttaaaagaaaaaataacggtgacaaagtcatttgttattacagatttgtagtcgctcatgtttgcagctgatatcataacactaataggttgataagtaacagctttcttcaaagacatctcatcgtttacaggaacaacctcatgaccattaatggtaacaaccctagtggttttcatctgcaagatgaaaacatagattaacaaattgaaaccattatcaaaactacaatggctactatacctcaatggccttgcatgcggcagtatcatcaccggtataaccataaacttcatcggatacaataccaccgttctccttaatgaactcaaaggcccatactgctccacctccagcacatccaaagttgtcgttccctctatcgcagtcaatgagttcttgttccgataaagatac

SEQ ID NO: 11431 - DNA, 924 bp, Arabidopsis thaliana landsberg
agcctcttagtggaggctctgagaagcccaggatgttcttgttttcaagcagtgatatagaggaggctcagtttgttatggaacatgcagagggtgattctgaggttcagtatgttgttgctgtcaatgggatggatctaagttcacggagaagttcccttggattaagtcctcccgggaacaatttggatgaactacttcatgggaattttgataggaagatcgatcgggctgctacagaaccagcagtggcttcgcttactcccttagcaggtaatgaatctttaccagcgagccaaacttctcaacctgtaacaggattttctactggaaatgagccattttcacagccttatctaggacaacaattgcagttccccggacttggtaaccaccaaatttacacgtcaggtcacatggcaagcataggctatatagatgagaagaggtctgctcctttacatgttcaaccacaacctcattatatcccgtattctgtgaatcctgaaacacctcttgaaagcctggtgccccactatccacaaaaacctgagcaaggatttttgcgtgaggagcagatctttcatgtacaagatccagaaacttcatcaaaagaggccaaaatgagaagagatgactcatttcagaaggtaaatgatcatcctatatctactgtcgagagcaatctttcagcaaaggagccaaagatgaggagagaatcctcaaccccaagggtcaatgagtatcctgtttcttctatgcctagtgatttaatagtcccagatgacctcccgaaggaagaagctccaattgtcacacaaacatctagttcaacaccagatccaagttcttcaactctatcaaaaaaaagttttagggaatccgaggaccatgttgagaaccatctgtcagcaaaggagccaa

SEQ ID NO: 11432 - DNA, 1022 bp, Arabidopsis thaliana landsberg
aaagtcaaaaacaaaaaacagaatggctttcacagaagaatcaagttcttgtcttaatttaaagaaaacaaaaagtacacctaattcgggaaagacacactaacggaagacgaccaatcagaaccagtttggtctgaaaaggacttagagaatccacacaaatggcggcgcatccattcttgtcccaaccacagtccggtacagatacaacttatccactttctgcctcccctcgtgtccgttttcttccatccggttattatcattctcgtttatgatctctacattgagccatggcgctttctctgcgagccttttgcatccactgagtgtgacttcacatgaagacatccaaagggatcgcattgtttcatacttgctcacatcagcaagaagcgccgtgtccccaaacggactatcccttatctctagtttcttcatctttttgcaaccattcaacacatatagcatgcctttgtctgtatctcctgcaaaggctatggagagcatctcgagctgattcgcgtacattccgatgtagaggaagacttggtctgtaaggagacctgagagagaaagccttctcaggctcttgcaggctttgacgattgctccaaagccttcgtctagaggttgagatgtgacgtgatcgggtttgtttggctcgaggatgcagagtcggaaacggatgaaatttggacagttcttggcaacggttacgagagctgcgtttgtcatttgttggcagaagtagagtatagagtggagcttagggcagcctgccgagatggcaactagaccttcttcggtcacagctgtgttgcctccaccgagtaaatcagatggaaaaaccctaagctcttgtaactctttacatgtagaagctacaacttcaagccctttgtcacctatactatccaaaatctacaagaaaacattgaagccattacgtataaatctatctgctcggttcatatatacactttaggaaacattcgcttacccataaccgctgaagtttc

SEQ ID NO: 11433 - DNA, 521 bp, Arabidopsis thaliana landsberg
ttgtccgttttgaccctacatgccaaagcccgtaaggatttgttattgggttctttcccaaaaagcctcatactagttggagtttgactatacttatatattagacccttcttttctaaacttctaatgtgggacgttggtttatacaacaacaacatagtagtggttcctctatagaagtaaacgttgatgttgtgtttggtatcaagtattatgatccattggaaataactaaactccataatattctcactaggaccatatttgaaaaagtgaccatatctgttaaaactatagaggtacatttactttctttagttctattcacagattatccattccatggtggaaccgtcgcctccattttctaacttgtctcgcttggatgcctcattagtaaaatcttcttggaaagtttgatgcatgaatctacattcactcacaatagtgcatttatcggtttgctagggtgggttatctggctaacaagtggcggagagtccgagatttgatctattatg

SEQ ID NO: 11434 - DNA, 1350 bp, Arabidopsis thaliana landsberg
  unsure (1)..(1350): unsure at all n locations
ggtaatgaccgtgtaaaagcacatgatcaatcatttttttcttaaattttagggttttaaattacagaattataattttttagagaaaaggggttaataagaaacggcagagattaggttttgaggaagaaggtgaacactnnnnnnnnnnnnnnnnnnnnnnnnnatgagttaaataatattgggcttaacttataatagtttcagcacagggtccatttaatcattgagccgggctggtgtctctagtatcaagcttcaaaaactttcaaagttcttatctcttccgaattaatcatttggtgtgaggtggtggtatgcttccatgctttttatccttcttttttttggcatgtgaccatatttgactatggctatgcttaattgtgtaactcaaactttcactgtgaaataaatattcacattctactaaaaaaaaaacatttatcgtgaagcggatgagatgataagagtgtttctttagccgtcaaagatgggatcattatgtgcaagtagattaatatttgaaaactcaatcttgtgattttagtttataaagtggacgaaacatagtcatactaacataatattatcaaaataaataaacaaagcaacccaaacaaaactgttaaactacacaaccttgggaatcaaaaccgggtcaattcctctttcccttgttttttctagacgaaacaaccgtccagccatcatcggctactggttcatcagcaggcatggcttcttgtttctggttagacgcatccaccatcatgtcagtggtttgatcatcatcttcatcgtcactttcctcttcatcaccgtttaaaacctgaaaacaccataattagtataagaaactacacagcctcaattctaactctcggaaactatcctaactagattgttaaaaaccaaaccaaagtagacttgacatgagctcaaactcagagtgaaagggacaagacaatcggaagtagtagaaagaacccaaccttaacaacacttgcacttgtctgagaacaagttgcccttagttcctcaagcatttcatagttaccgttacagcaatcttcatacaaatctactagtaaattcgccacctttagtatcattacaaacaaaaaattatcagtatccaaaaacagaaagaatcaagacattagcgtaagattccaaaatatgtaaaatacctcatcaacacttccatcttcagccgtagtattaagctcatcaagacctttatctagaaggtcacctaatttctcaatgtccttcactggatctacacgaaacgtattgcaacgtaatcagaaaagccaacatctttagaccatctccaatgtgact

SEQ ID NO: 11435 - DNA, 1398 bp, Arabidopsis thaliana landsberg
aaagaaagattggttgacataaaatatgctaagacaaagaaaagactcggtggttgcaaacttgcaatattattagtttatgaccaaaagtccaaagactccataataaactttaaaaattgcacatcaattaaggcatggaacctaatttgtgtaatataatgtagcagttgaagacacaagatagagacaatatctttcagatacagatgtatctaaactattgccttgttggagataatatatgtatagattttaaataagaagctctacagaaacattaggttatacggatcaagtgtatcagtttaacataaaagctcacactaattaatggaaccatgtgcagttaaaacggtgtctccacatttagtaatcaaaaaattatgaatacatgaaaagggactttggtgtgttgacttcaatggttaacatcaaggaaacactataatacatcttctccttctacatcttcctctgcaatcaagatctgtctaccataacctcatccaaatgacgaactcttctcagtcgcggaagcctcaagtgttcatcagtttcaggggtaaagctcaaaggaaaaccttagtgagctttataaagtcaaagttagaggagatcagcgaaatcaatgttttcatggacgagtacgagattagagggaggccaatcacaacactcttcgaacgaatcagagagtcaagtatcgcactagtcatcttctcagacaagtaccctgagtcacgctggtgcttagacgagctagttgagatcaagaagcaaatggagacaggatctattgttccctttccaatattctacaaagtgaaagctgagtccgtcaagaatcagactggtcacttccgtaatgttctcctcaaaactgaggaagacgttcgcaaaaaggttgataggagcaacatcaggtcaatacttgaaacagaggatatgatttggggatggaggcaagctttagtctctgttggtggaagaatggggttttcttataatcataaatgtgataacgaattcgttaacgatattgtggtccagatcaagaaaatgttagccgatttatctccatctccaagaaatggtcttaaaatcatagagaggcctcagatgcatcctcaggaagaagtaacgtcattgttacaagctctaaaccttaagaaatctgatcttgaagatcttattcatatcaatggcgtcgtttcccatggcactgatcgtctggtgtttcttgacctgatctctcttcagaatcctatcctcgctgatcgattaatcgagctagttcaagctggaaggaatctcttggtgttgttaggttctctagaatactacaataatgttagtttcctcaaccccctcaaagtctcttcactgaattgttat

SEQ ID NO: 11436 - DNA, 920 bp, Arabidopsis thaliana landsberg
caatagtctgccaaaaaaagatccccaaaaagatatctttgttatgacaattccaaataatcttccctttaatatattcaacatcacatgcgcatgtgttttgtataatctatgcatgtattttacatgtatgtaatcaaatactagatgcttatgtatgtaaactatatagtgaagaaaatggtaccgtcatgtttcttcctcatcaagtttttggcaaaaagcaagcaaatgacaagaaagccaacaccagctgctcctcctactattattgccaccgtcttccctgttgctcctgtccacattttcattcatttctttttggcatcaatattattaatttcaattgtacggcgttcataaataaagataaaatacatctattttactcaatttttctgaggatacttaaagtactgttgaagaaaattatgagtggtagaccatatctctgaagagtacttttcaatgaataagactttcattaataattcatttgttcttcttatgggtgaaacaatatttaatgaaagcataatgaataaagtgttgttattaaatgaccaacctatatggaatattgagaattccaaggaataattgtgttaccaattaaaataaaaagtacgcaaattttttttccgttaagactgaaaacggaagaacaaagtcccactatgaaatcttcaaagtctagtgactctaagtttaaatcggaaacttttcaaattcataaaagattgatgctttttttttggtacataaccccacatggacccataaatcgacatctaacctgtagaagtggatcgatctgaatttgaagagccataactggaggatgaagaccaagatgaagaaaagaacatctttttgcgacaccatttgggtgataactatcagcgatgaaacacttatgt

SEQ ID NO: 11437 - DNA, 938 bp, Arabidopsis thaliana landsberg
gaaaaaacaacataagtaatcaattttttttgcctttattcttcttctcaacatatgcatgtgtatgtctattatatgcaagctcttccacacttaattttcaatatgctcaaattagaaggataattaatatctctaataaaaaacactgagtaatctattattttggcaatacaaaaatgacaactcgtatgaattacgttacatatgcatgtatgcttatagacgtgatacgtgcatgaatgttgtctacgtgtatgtatatataagtggagaggaagtaattaccgtcatatttcttcttcatcaagtttttgacgaagagtaagcaaatgacaagaaatccaacaccagctgttcctcctactattattgccaccgttttgcctgttgttcctgtttttttccatcaaaaaccatttcatcatcctaataaaatatacctaaaaatacatttcctaaactttacgctctcttttctaaagaattaattgttacgaaaccgtagcaaactataatgttgaaaagaaaaaaacaatatttattcatcaaaatgaaaagaaacaaaaatcacaattggagcctgaaaacaaaagaacaagtttcacactgaaaaccttttgaattaaagtgaagatagtcaaataaattaattattaacttcaacatcgaatcattttctttttaatgaacaccttttcaagattttccagcaaatattagaacgttggtattgaaattttccaccaaaataataaacaaataaaaagaaatagaaattttcacctgaagaagatgaagaagaagaagaacccgaagagccagagctaggataaggagaagatctcttgggaacaccatttgggtagaaactataacagacaaaacacttatgaagatatatctgaccagatattgagcttccacatgcgacttga

SEQ ID NO: 11438 - DNA, 1028 bp, Arabidopsis thaliana landsberg
tacaattattaccgatacttccggtgcagaaatcctctgatgtagtattcgtgaagcagctggtgaactggactttgccggcgttgcagagaaatggcgttggagaaggctggaaaggattcctctatgctctggaaagtctttacgacaaagatggtgcaattaagaagataaagagattaaatatgtatgatgatgaaactctctcagtaatctattgtggtgggttcacagtagagactgatgtcatggcggtaggctggaaaatgttgcttgtttgttcattattgtaaaaactatgatactgcagtaaaatcctttggaatgattagacatatgatcatgaaagcgacatgtgtgattaagttagtaaacgtttttataaaggaacctgtctagcattttattcacaataaaagaatgaatgaatcatcaaaatacaaaagaatgaataaaattagaagacaaaagttgactttcatcgaacaatcaaaacttttccacacctctcaatagacagagagaggctatgaccaactgtatcccttaggaagcttcagctccatgtagaggttatctaagtcaaaagctctgtttcaccaactctaaataaacatcgtatttttcttctgagtgctactaattcagttcccactttcatcatcgtcagctagacatttcaggttaatgaatgcttcaagagcttctctcatccaccaattctgacatacttctcttgcttcatccaaacttacccatctgcgttgtctcatttccgcctcaggccatcgctcgaactcttgactgacaagcaaagcaaacatatacccatcgtgaattatgctatgtcttttgcttttgtattgccatttcccaagcttttcttcgagctctcctgttacacccgcttcttcgatcgtctctctcaaagcagcttcctccattgattcatccgtctcccaacctccttttggaaataacattcctttgcccttttgagcactgacaagaagaacttggattacttg

SEQ ID NO: 11439 - DNA, 876 bp, Arabidopsis thaliana landsberg
gtaacatttaatgttcaaaatcttgtagtttcaatatggaaatccagataaactatgtgtcccgcttgttgaagcaaagaagaatggtagtgatttaatggtaagctcacaacgtttttcttcctctcttcatgctatataatctcgcttgagccgtggagcttacaatattttatttgctaaagactttgaattgtgtttatgatgcaggaaacatattcaacatatgttagagagtattgcatgagaatttggggattacgtgttagaacatataaccgaaaacatctgagaaacacagtagttaccgcagacagtgcatatcggttatggtggtttcaagcttgcacagaactaggatatttccaggtggcacctaaatatgatagtgttcgatctcatcaaatcaatacaacgtaacattcttgaattatactgtttgtttacattttgtaaagtcacatttttatttaattttctgctaacttgattaggtttcatttggatttatgcaagagcctttttgggaaagatgtttaccctaaagttgatgcaacaaacttgtactatggaggcgatagactcgccggtataaatgtgacattaaaccttcttaaatgtcattttagtctgtgcacattatgataatgtttgaggattattatgcagcaaccaaaatcattttcacaaatgggtcagaagatccatggcgtcatgcttccaaacagaactctactcatgaaagtaaagactcgatctcttatgcctttcgacatcgattaattttgcttaagttttgtctcggatttgtgcattttcttttttgagacactaacaaaaacatgcgccagtgccttcttacatcataaaatgtag

SEQ ID NO: 11440 - DNA, 321 bp, Arabidopsis thaliana landsberg
gtcgactctagaagtgtgctctataagtggctcaaactgacttctacaagcaatatctacaaaaagttacatacatcaaagcacatcaagactggatcacgtatcctcacgcacgggatgcaaacccacgtcgaatggttcatcgattcttggacaagcaatattttccattgcattgcatacactaacggatccgatcttaccatcactaatgcaccaggtcccatcagatctcggcagtcaaacccgcttcggagtgagtagtattcacgatattgtcctccagggaaataaagatgttggagccctctccgatgtgta

SEQ ID NO: 11441 - DNA, 1450 bp, Arabidopsis thaliana landsberg
aatagaatcaaaactttacactgagattagaatctggtttcgcaatacctggatggtgaatccttattggctcctgtgcttggtgatgaccatgagtacgttgcaactgcgcttgtgaatccattttatttgctagatttgattttgttcttttcctttctatgcatccaaattgtttctgagaaaatatgaggagcttcttcaaagttttatacagagtcagagagtatgggaaagaggaggaagacgcatagccgaactacctctggatggctgtgtcctctgtactttatcttacgaaataccacgtgtcatgccacgtatcaggctcttgattgtgtgcgtggcgctctcagcctaatctttatccgagaagaaccgtcgatgttaccttctttcacaagttagcccactagcccattccaacaacatgccgtttcgatcattgggaaaacagcataacacagtcactgaaatccgaaaacgacaagaaatgatatcatatgaatagtttccattgcgcaatgggttggtccaacagaaatgtacataatgggccttaaaaaagatccagtatgctctatcgcggtttaatggtttggttggtggtagaagaaacagacacgaagcgcggaagcggaactagtagatgcagctactacaatatccacgtggcgaaacattagtcgtttatcgagaactgccccacgaaattacacgtctgaatagataaatcgaaaatggatcgtgaggcccacgtgtctgcgaagaagggcccacagtggattattgaaaagaagaaatggaaaatctgaggattgattcgtctcagaggccgaggttgaagattaatcggacaaaggagattagaagagtagaaaaaacgacaagaagaaagaaacacagttgcaggagagaaagagatatggctgtccggataaacgcgatggcggtgacgtttgtggcgcacgcgctggcggtaatagcggcgattatggtactggtttggagtatcagttacagaggtggattggcctgggaagctactaacaagaatctcatcttcaatgtatgtttctttctttaatctcctttaaagttttctcttttctgtctctcgcatctgcgttgactttttgtatgtcttgtatctgactgcgaagcttcttatttgttcctcagtactgtttctgagtgagtgactttattatgtaaaggagaattcttttgttgtcttgatatctgttatagcttgtaaaatgactcttttggaagcaatagtcctctggtttgtcccaagttttgctatggacgtgatttaggatctatgagtgttgttggggtcgtattctgtttattacagtgtgagtgaatgtacgtaagatgatgtttcgatcttctggtttaggtttagttgatggtaatcacaactagcatccaaaaatcgaca

SEQ ID NO: 11442 - DNA, 1092 bp, Arabidopsis thaliana landsberg
aatcaagatcccgaagatgcctacaaagaagaaagaattgtaaaacagagttacagacctaacacaataataacactcagcaaacactactacatttgtaacacacaaccaaaaggaaccattgcaataactaaactgtttattccacctattttctaagtaaatcggatattattgttcgaccaaaagctagatttgcgtctttttagccatattaggaagcaagtgtgcaatgatatgtaaaccacaatgaaacatagcatctatagtcacatataaaacctaatcttcacacacaaggaacaatttttataacacacaagaaaaaagtgatacctgcaattagcggcaatagaggcaagaccatcagtggtaaaaccttcacagctaacaaggaccaaagacttaaaattgacaaaagaacgagaaagcagctcaagactctcatcagtaacaaccatcctcttcaacctaagctcttcaagtcctacacggcttctagccaaagcctcaatccaaggtagcacaaaacctccccattcatgaggaaccaaattgaaatccgcaaaatgaggttttcctttcaaagtcaaagactttagacatgggaatctccgaagcaacctctctggattaatggcataacagtttccaatgaaaaccttttgcctactgtatctttcaatcttgtaccatgatttgcatacaagagatatagcattcctgtctttgtgagatgttacaaagtcgaatacatgctctattacttcatctgggaaataattcatctctaacttcaccagcaagattccaaattcaacagatcttgaacttgagtttgacttagaccataggaactcaagaacacagagatggattaaagaagtgaattcaacagatctatagatctagagagtaaaaaacaaaaactagatctatgaagaacaagattcaagaagaaagaactcgaatcaatatatgagaaaaaaaaatgaacaaattctcaaaaaaaactgtgatgattacaaaagaagaaaacgttgacaatgatcgaaggagaatcaaataatacatctgtagaagaagaaatca

SEQ ID NO: 11443 - DNA, 1004 bp, Arabidopsis thaliana landsberg
acaaagcctacaagaattcagtaaaagctgtattagccctacttgagagccatgatcaacacaaagtctagccaagatttcaactcttgttcagaaaccataactaaaaactaatcaaacaacaaagtcctatggttcaactgttgttcagaagccaacagctaaagacaaattaagacaacaatcaaataacaaagccctatggttcaatttttatcacgtcaagagaaaaaaagagagaaactgacccaataaagaagcttcaagcaagtgtgttctccaaagaacctgatccataggagacattgtcccaagctttgcacctttattctggatcttgacaatgctcataagattagaaaagagaataacagacatagttccagcgattgttttcacagtggcaggacctttacccatcttcatctggtcaagacttttaatcacaagctctctcaaaggaccaatctttatcaacagtaagaatgcaatcgcaccttccacaaatagaactagaaacagtaactgaatcatgtctgaatgagttctccccctaaagtttgttcctttaccacaattcaccaataaggtaaactctaaaccctaagttctatagctcttgtcttctagttttgctacttgggtatggatttaaaaccaaaacccagatcggagaatgaagagaaagcaagcaacgagtttatctaaaactcattagctttttcaagaaatcggtcactgagttcttgataccaccaagaaatcataaaatggagaagactaagagaagaattgaatttaagaaactgaagaaggttttagtaggagagatgaaacactgaagagagaagaaggatctgagaaaagttcagtagaaagcataaaggtataaatgttgtttagtactaatcccgcgagagagagggagatcaatggttgtgattagtggtgtactaattaattatgtaaacttaagatttaagagtgaactctactctcttttt

SEQ ID NO: 11444 - DNA, 808 bp, Arabidopsis thaliana landsberg
agtgttgcattgccattactaatgcttgaaactcgctctctagtgaactatttgtaattgatcctatcaccagccctgctcccagataagttcctctgtcgtctcgcattattcagcccgctgtgcttggcaaatctttgatataagtggcatcatagttgcattttagtccagtgatcatcgctgacatgttatggcgtaattgctgcgggaacctttgtaagcttctgaatatgatcttctgcgtcttgccattcctttgcatcctgcaacatctcacacaagtggagtcattagttatgtgtcggtatttcagcgttgcacctgtaggtagagcattggagagtaggcaccaaaagaagtgtttgatttttggtgcggttttgattttccagtgagcttgttttaattcaacatttccagggggaggaagcacttgttcgccttcctgagcatgtgttgccagccaataccccgatttcactgtatagaaaccatgtcttgtgtagtgccatcctatgagatcttgatgggctgtcgaacaaagtgttatgttgagaattgtctccacgtcttgcgggtctatccactcttgtatcttggcgacatcccatcccgttctggattgattcatcatgtgttgcactagaacctgttgtggagcgttgtcactttgaagaggaggtcgaggtgggtaagtaggtaagtagggatccacccaagcatccactaaactaccgtcccctatgcagaaacggagcccctttttaactagatccctgccatggaggattgatttccaaataaa

SEQ ID NO: 11445 - DNA, 1884 bp, Arabidopsis thaliana landsberg
  unsure (1)..(1884): unsure at all n locations
aaaatcgggatttatcttcaaaatttcatcatagcttgatgcttttttaccttaaggagttgttgtggttagatctttcaaaagagacgaagattgagataaaacgaaaatggtggttttgttgcccaggaagagccctcgttgtacggctttgtttcttctccttgatacgccctaagggaagaagaatttgatgcaaagcctctctgatatatatcagccgctacttctcttccacacacacacgttgcactaccctaatcaggtttcggttcaagattttgctctaaaccaacttaaaccgaaccaagataattcaaactggaccgatataataaccgtattaaccacctccatcttcagtcgtaaaaagagattcgatcaacgattagctgttattcgttaaattagatccagtaattaaggttcttaattgatatgtgaccggaatgttttgtatatcggtttacattgatttttcggtttagttgtgcttttttttttctgtgagtgtaaagtccaaatttcttgtaataaaatcttcaagatagattatccagttgcacaaaatgcgaaggaaaaagtctaaatggctttttcagaagaaaataaaataaaattaattgtttagatgagaaccaaatctacacgttattaatagacaaaatctggattttcggtactaactagtactattaaccaacgaaaagacaaatttgtagtttaattttaatatttggagaacgtgtctgtgttatctctatgtttacttattacttaatanagattaatattctataccaatatttagtaaagtttttatacagaatttctcgtaatttttatgattaaaaaaaataagtgtcaaacttcaacaagaaactgagatctctgttttcttaggagaaaagaaaagtaatgtctctttgaattttagttacaatattattgttgtaaccatccataattacaaaataaaatattgttgggagtcttgacccaacaaacgtgagaagcatttaagtttgttttgtggcacaatccaaaacttaaaacaatgtaattaacgatgacataatcaagtaaaatttccattaattctgtattaatgatctgaaaaataatgtaccttttgtcgaggtaatatattcggctgtgaatcagcagaaatgtattaacaaagctttctcacatgatcacacttcctctcacgtcgttaacacaaagacagatggaggattcgtttggttcactactactaaaacaaaagtaggccacagttttaagatatggataatttggtataaaagtaataattttatttaaataaataccaaaatcgggtttaacaagtaaatgtatttttcaaaatattttattttatcacattaatatagtgtagagctcaaactcaaagcaatagattcattatacgtaacatgtaaattttaattttattgccatgtattacaatttctgtttaataaatctgggctggccaacttttatatggatcactttcctttattacaaatttacaatgagcaacatacaggttttgagaaagtctatacattacagatagtattataccatgacaattgacacagcaaaagcacttaaaatcttcaaaggaagggaatgaagttatcttccatctcatgtgcttgaaccagaggatcaatgattttcttccatcctccaaaatttgaaggggaagcagcatcagacaatacaaacccgttaacgtagaaggttggtgtaccataaacccctcttgaagcgctatacttgcacacacaacgccacgaaagcaaaagatgaactaaaagtcactattgttcgttttcagaaaacaacgagaacagccacagggtactatcg

SEQ ID NO: 11446 - DNA, 1145 bp, Arabidopsis thaliana landsberg
ggtttaaaaacactgctcgtaccaaaatatgtcacacaaagctatgaaagatacacaaagagatgtaattgatttttacaagatgttagattattgtacaacacgatctccatcacaatcctaaacaaaattacaaaacaaataccagttttatcataatactaatctttgcacaacctttgcctttgcctttctcttcacaatcttagtaaatatatatagctgttgccaaaggacttctcggcgggaattctgatcagtacttagaagaaaccttgggttgcatttagagtgtttgtatacatatgttttagccaacagattcttactctcaaaacagagcttcccttggtgcaccgattaagttaagtgcggttgctgcgatgtgagatggcatgagtccagcttcagctagttgatcagctggtgcaccgtgatcaatgtatcgatcaggcagtaccattggtctccactgtatattcaaacagttgcaaattagaaacagtattttttgaaaagacagaaaaatattagagaatttctggaagtaataagtaaccttgagtttgccatcaagaagaccatcgagagcaagaaactgaacaacgtgcgagccaaaacctccaatggaaccttcttcaaccgtgatcagaacctcgtgcgacttagctaagctgcgaatgagagcacggtccaatggcttgcaaaaccgtgcatccgctacagttacgtttaatccgcgttcttcgagcattacagccgctcctaaacagctctgaactgctgagccataacccaacaacgcaactctctctccttcctttaaaattctacctttcccaatctgaaatacacccaaagagattttctatctcaaaatgatgaaggaagagagacatatttgagaggaccaaagttatacctcaattggaacacctttgtttccgggaggtaatgcaactccaataccgttacctctagggtaacggaaacaagaaggacgatcatcaatcgcaacagcagttgcaaccatgttaaagagatctgcttcatctgatggagccatcactatcatgttaggaagacaagccataaatgtcacatcgaaagctccacaatgtgtcggaccatcaagctccacgagt

SEQ ID NO: 11447 - DNA, 387 bp, Arabidopsis thaliana landsberg
ttgataatatttactctgtgtgcaactgtgagctgcatttaacaagaattaccctcatcttgcctgaggctttggatctcggatgctgggcaagctgcgtaaatcctcgagattgctgcattgaacagcgctgttgctcacgaatcgttgttagagagtacttgctcatagctgaggcatcacagctggttcgatctctagggatgaggctgatcgcttcggctgcatatgggactgacccatttcttcgatcacctcagcctgatggcactcaatcttagaccatagatacgcacgatctagatcgtccactagagattcatggtcacgcgcattgcacgatcgacggatagagtcttcacatgttcatgagatcctagcgattta

SEQ ID NO: 11448 - DNA, 1244 bp, Arabidopsis thaliana landsberg
gaaattaaaacataagccaggaagagaagtatcatatcttggaattggaaaaacagtggcgttaaaacggtaatcagagcagagtagaaacaagattggagaagtcagggtcttctggttcgatgaccttgatgctcctaaagccaagggtgagagtagtcgttgggttatgcacgagtataagatcacttccttgcctcatcttaatctggtactggtactttcattcttttcttacataagtttatccgatagagttatggtctagttacaagggcccatccggcgtacaaagaattataccttaatggggtcatattttattaaatatataataatattatttgttaaactaaaataaaatttaaagtaattctatgaattaaattttataaatagagaaagagaagaagaaaaaattatacctaagtaaagaagaaaacgtgaaaacctatataaaatatgatcaaaagttaaatagtatgtattataacaagaaaagattagtcaaaaaaattgattagggggtgcaaatgaaaaatatgaactaggaacatagggtcatattacatatttaagccaaataattcaaatttctaactaaataagcttgaattataaaagttatggggtcctttgaccaccttgccctccatttagctccgcccccgcccatccttgtgtctttccgaaacgtaggttatgaggagaggaacccatgaacacttatataccaacattctcttctctatcttaacgatatgcgatacctatcattatttcttgttcattatgagatttttcggtgttagatgcaaaacagttatagaaaaatattgacttttgatagagaatttgtaaaagaccgtctattgatagagaatttgttattggcaacagagctagtgaaagattaccacaaggagtcaatctcaagtcgatatgctataaaaattgatatttctaaagctttcgactcggttcaatggtcttttctcagaaacgtccttttggctatggatatcccgtctgagtttgttcactggattatgttgtgtgttaccacagcgtctttctctgttcaagtaaatggtgagctagcagggtattttcaaagtaaatgtggattaagacagggttgttctttatcgccatatctctttgttataagcatggacgttcttgctaagatgctggacaaagctgcgggagctaagaaatacggctatcatccgacatgtaag

SEQ ID NO: 11449 - DNA, 819 bp, Arabidopsis thaliana landsberg
ggccccttgctttttagacagcgaccccaatgaaactaaacaaaatcgtttcactcattgatggatttttcttatggcagaacattccggaatctctagtagcgagcaatgttaaatttgtgggcattggatttgcaatccaatcagctaaaaactcttccaaactccattggatgtctttccaaacttaagtttcttaatgtctccggaaattatctccaatctctccccaaaactatagaagattgcaggtaagaccacttccttgcgtaagtatctatattccaagtaatgtaccaaaacgcgaaacgcaaaaacaaaacgcagatcgctggaagagctgaacgccaacttcaacgagcttacaaggctcccagacgcgatagggtttgagctaacgaatctgacgaagctctccgtcaactcaaacaagcttgttctcttgccaaactccgttagctacttgacgtcgctgcgtgtgctcgacgcgcggctaaaccgccttagttccctccctgaggatcttgagaacctcgtgaaccttcaggtcctcaacgttagccagaacttccagcacttgacgacgttaccttactccgttgggttgttgatatctctcgtggagcttgatgttagttataacggaattacggttttaccagacttccctcggctgtcttcgccggattcagaagctatccgtggagggtaatcccctcattttcccaccatttgaagtggtatgtacaaattgtttttcagacaaaaacctattaaatttgtttttttttagaaaatgcctttccaacaaaaaaaata

SEQ ID NO: 11450 - DNA, 919 bp, Arabidopsis thaliana landsberg
tcagattttaattaaggcataataatgcctgcagcgattactcatcttttcctaaatattgaaataaattatcgttttatttgtgatgttacagtccatatatacatgtaaataaaacaagaaggcaatttggtctgaattatcaataaacactttatgtactttaaaatattatgcattccttatagaaactgatacattaaatagaaaaaaaaaaatcaagtctctattttaattttttttacaactcatggtgtataattgaaccgtacgtaagattaattaacttctcgatgcatatagattctcttataaattttgaccaaacaaaaaaactatcttatgagatgcatgcgatagtcgagagacagagtactgtatagataaaaaaaactttaccggcatttttgggaagagaacgccatgatccttcgccgttggactgaatgtagtcggagagagtccggtcttcctccgccgtccagcgccccttcttaattcctaccttctcacagcacggcgcccttcccattctctcggccggcgattattaaaaatcactcacttcacttgttcctaaagtcaatcactagagaaagagattatttaaagagaagtaaagtgacgacacaacaaaaagtgattggtttagtattaaatatttataggagtgacatgcaagaatagagaggagtgggttatatattcaggtgatagaacgagccacgtttgtctatgttgaaacaaaagtcgtaggcgctcatcataggtcgagagctactaaccagctgtccagctgggtcgtcctagtgtctctaattagatgctaactatagtttttaaatactagttatacattttttttttttttaaatactagttatacatttattatttctgacttgtttctaatcatact

SEQ ID NO: 11451 - DNA, 1187 bp, Arabidopsis thaliana landsberg
  unsure (1)..(1187): unsure at all n locations
cgacattcttaacagaagaatcatgtcctgaacgatcttgccattatcggagacgattatgctatcttcagacaagcagttatctctggtgggcaaaattctcttgagctcttttccatgtggaagttctttcaaaccgagtttgtgaacgtctaggaacggtttcatatctatctgcgcatctcccatcttgtcgtccgctgtaaatgtatctttatcatacaccatctgcactcatacgaaacaaaaacatatggaaccaaccacttatcatcagttggttttgagttgaaaattcatgattccggtagttactgacgggtactagtactcaccagcttcacaggttcattgggatcttcgatcgcaagagtcaactcttcgttccactctgggttgcagttattcttcacagtaaaagatttcagcttctggtgcaattcaaagatacaaccaatttcagttagaacgaatgcaacacaacatcctatagctatagattgttttcattttgtagcatgaaatgtaaaatctttttaaatgattattaatcatgtttcttaaaggtcgattctttggtcttccatctgcgaagaaagtaaacagagaaaccatacatctcaagaacagaaatagaaacatcaaacagaagagaaccaaatcagattagaatcagaaagagagaaaaagtacctgtggacccatggttatgacgacaaaagggtcgctgcttagagcgtctcgacgagcaagatcgatccctctcttcactaggattctcacaagccctaccagttccttcatctcaacctcttcctctgttttctccatcttgcttctgagctttgaagagaaagcacacctgtctcctgtctctactacttttcttattcacttacaaacaatcaccgactcaaattcaacgatgctacttaaatcagcttattaaaagaaacaaacaaaaaagaaaaggaaaggtgaattcaaaaggtctcttttccaactttttgtttcctgctaactcactttaattatcataaacgcgttactcacacacaaataccttctagattctattcataagaaatatctcctgtctttttctgacattgacattagaaatatcatcattacatttcacananaagaaggtactaccctgcaaatataattntgtatacatactg

SEQ ID NO: 11452 - DNA, 563 bp, Arabidopsis thaliana landsberg
tgataccaattaccaaaatattttcgtcacttcaacaccacaagaccataattcaagaatcaacacgttgcttcgctaattttattcatcttgtagttatttcaccaatggtcccaaaaaaaatcattgctggttataattgtaaacaaattctatttgtcacgtcaaaaagatatttttttgtcttgatgtggttagaccctcttctatataatatcatctccacacacaactctcttctcaaaaaacaccaaatcattcgatactctctctctctcaagaaaccaaaactaaggagaggaagaagaagatcatgtcaggcgtgtgggtcttcaagaacggagtgataagacttgtggagaacctaaccagtcaggatccgacacacagaaccgaaggaaagtgatggtctatttaccgacaggagaagtggtctcatcttactcgacgctcgagcagatcctccagagtcttggatgggagagatactttggcggcggcgacacagatctcctccaattccacaaacgctcctccattgatctcatttccctgcgtagaga

SEQ ID NO: 11453 - DNA, 1681 bp, Arabidopsis thaliana landsberg
tcggaacataaagttcagctttctcgcctcacttgagttttgggtcaccatcgaaaagcatgttgattcagtggtatatcaatgtagattctgagtgtttttgtgtgaatctctcgatttatctaccttaatttctcgctagcatctggttgttatgtcttttcaaaatctgcttgttgatatttccagtgatttatgtgacagattaaggaactcaactcttatgttgcactaagaaaaacgtaagtacgtctacttccaaggagcttcattgtctgtccctatatttgattttctcatataccaatccttttagcaaatgtatgtttttttatatagagatatagatcggtatgtgttaatacattcccatttgttgtgtgacttcaggtacttgaatacactcggcaacaagaaagttgaactttttgatactggagctggagtcagcggtgaacccacagctgaagaaaacgtccaaatggcttcaagtgagtctgtctaaatatgtcatctattcagttgattttcttctgcaaccagaaaaagtccaaaatttgacacattggaagcttaaactgttttctatatatcagaatgggtaggatagttagtcctgcacttttggctaatggtttggtatcatttgatgtgtttcagtaagtttctagtggagagacatatatgacagtaactgtttacctactttaccttttaatgtgtttatgttggtggtttgatgttagtaaatttctagtggaggatcatatgtggctggatttctaatatctacatgtgttccaagaataattgtccttgaactatcctgtggaaaaagtgtggaactttatgttgactcttgttttatcgtttatatatatgtagcaatgtcaaaccaagagcttgtcgatgctggaatgaaaaggatggacgagactgaccaggctattgaacgttctaaacaggtaagttacagaaagaagtatatctcactcagtctttgatgctatgtctctagtaacatccagtgtttctttccaggttgtgcatcagacactcgaagttggcactcaaactgcatctaacttaaagggacaggtaacacaaagcattcaccatctcttctcgatattcttatcaggtgtagttccaaatatgctgacctaaatattttcagacggatcaaatgggccgcgttgtaaacgacctagacacaattcagttctctcttaagaaagcttagcagctggtgaaagagataggaagacaggtttgtatgatctctcacaggacataagattctaagacactgcaaaagctaaaattgtgtctaactattatcgccgtttcctttcaacctcaattctttcttgtcacaggtagctacagataaatgcataatggcgttcctgttactgagtgtctgtggtgttatagctataatcattgtgaaggtaaccattgcactctccaacttttctcattacggcccaaataaagctatgattccttaagcaagttttaacactgcttaaataaaaacacagatcgtgaacccaaacaacaaagacatcagagacatccctggactagctcctccagaacaatcaaaaaagctcttgtacttcagagaatagcctttggcagggccgagagggaaggtttggtgcatatgacactt

SEQ ID NO: 11454 - DNA, 1407 bp, Arabidopsis thaliana landsberg
acaccaacagcagatcagtggccggattaacaaagcttccagattatgtagagtatcaatttgtccctgcaccgtctctacgttctttattcccagcagttagtgatgatgctctcgacttgttgtccaaaatgtttacctatgacccaaaggctagaatttccattaagcaggctctagaacacaggtgcctaatgttcaccatctgtttataggcaaagtatatctagcgttctgctctcacacctttgttttcattatttcaggtacttcacttctgcacctgctcctactgacccggctaagctcccaaagcccgttcctaagcaggatggtaaatcatcttacggtaaacatgaggccattacagtgcaatcaccaccacgtaagcttagaagagtgatgcctgagcgtgggagggttgatagtttgaagtctcatgttgacaaggatcaacaagcacccatgtcattagattttaccatcctcgctgagcgacctccaaacaggccaacaatcaccaggtaaaaaacaagacagtttctccctcactgcatattaatctcatttgtcattacagcctcaagattgattgtgttttaatgacttcttcttgttcaatttgtagtgctgatagatctcatctgaagaggaaactcgatcttgagttccagtaagactgttggttatgcactcttctcttagcttctccattttcatgttctggtgaaaccacaccattgttaagttgtcaatttactgctgcttgtgtaatctggcgatttattcttttccatatttagcttgattacaaaccagagggaccttagattcacaatgataatattttgttgtcccataggctttttattcattgtaaactgatcatactgtactatgaagtctatgattataaagctttctactttttgcttctagaattctttgcggtacaaagagagctctgtttaatcttcaaactcatttttctttcgatggtggccccaggaatttaattgatccattgacagctcaaaaagattttaccaaataccaacatcaggtttataaaacacatacgagccagaaaaacagatgcccacatgtcagtcaggctcttctttagtcatacccgcttgaagactatcacgattgctgtgcagttgtctttgcaacaacgttctttcacagcttccttcacaaggcggcgacttaccgtgcttacatgcaagccctcctacaaaatcatagttcttagcctcttagtttctcacatttaatttcccttgacactctttacttgtgtgcacaaggttctaccaagccatttagctcaaatggctaccgaaaaacatctgttttttgagcttctttctatgtagttaaagagagtgtgaaatggaggac

SEQ ID NO: 11455 - DNA, 947 bp, Arabidopsis thaliana landsberg
ttttacctaatcgatcagatcaagtcttttcattcaatatttagtatcatccactagattatgcattaattcataaatctagtgtttaaataacttgatcaaacaaatataagctagagtatttggcaatcacttgccagagaccgccacagttattcgaacccgcaatgattcatataccagcctagtgatggatgagcaaatatgaaatatcaatggttcacaaagcccaccaccctgcacccgctacttgagccatttagtaaagcttatcgaatcttagattatcctctcggtggctttaccgatataacaaacgtaaacctgtaagctccattcctaagcagagttcttgaagttgatccttctcgagagtgacttggttccctagtgaactatatatatcactgagcccggttcaaattggctcatccagggataacattgatcatctagtgtataaatgtataatcttaatttcttcttaaattgacgacattttttacgaatttgtataataatgtaatatagagggaaagaaaaaaaacaaattgtgtgaaaataattttcttatgtaactttataaagatcacaactcttttttgtttggatccaaaatttagaaggagcattaaggactctagaaaactttttgttatcaatgctaacatatcttggtcaatcccatgtcttttatatatgaaagaaaaatcgcattcttgctttgtggatttggatcactagagtcaacaagcagtttttttttcataaacgagttgatgaatttatagaaataaaataaaattgaacaaagacaaatctattacaactttgaggaaaagacaagacactaataacgacttcatggtctagttccttattttaccttatttgtgacatattttctttataatgaaattggttcattcaagattttgtatcgtgac

SEQ ID NO: 11456 - DNA, 974 bp, Arabidopsis thaliana landsberg
actcggcactctttgacttgtttggtgcgactctgtccaaagaaaacccggagaggatacattttttggggagttttacgggagagaagtgatgaatgtgatagcatgtgaaggagtagatagagtggagagacctgagacgtacaagcaatggcaagtgaggatgataagggctggatttaaacagaagccagtggaggcagagcttgtgcagttatttagggaaaagatgaagaaatggggttatcataaagactttgtccttgatgaagatagtaattggttcttacaaggttggaaaggtcgcatcctcttctcttcttcttgttgggtcccttcttagcttttgtgttcatcacagaatatccatgtaatcccaagtcctgttttattatttttgttctagaggcagagcttgtggagtcattgatgtatcatttgttttggtgtacttaatttgctttacttttgctgtatacaatgacattctactgtctaaatacgatgagtttgaaattggaaaaagatagattttatatataaagtgaaaactttgttacttttccagaaagaacaatcaatccctccgtgctaaaacagaaagatacagaagcgtgttttgttattgccttggattaaatgtacaatgagtagtagtaacctttgggtgtctccaacagctacgtcggaactacctgtggctcaagaggcggaattccatcatcctccacaggcttcaccggcacagactccttctggctctccttctccgactcttcaaatccagatttaaacctgtcgtaattcgttgtctcacccgacttaaacggacgctcgcccaatactttagtgagattattctgatgcaaaacctccttctttagcaagagctcagcgatctgagccacttgctctttgggttactctatcagctcaaccgtccgtttgtaagctttccccaccaattttcggac

SEQ ID NO: 11457 - DNA, 1712 bp, Arabidopsis thaliana landsberg
aaactctagaagtttggagatgcactttctgtatcacatgaatcatgtgaaagtgaaaactcaatataatcttataatagatattttaaaatatttttcaggatatcaaagaaatatttcaaagttttatacaaaaaaatattaaacccataaaactttttctactcttatgcaaaagcaaacattttttctaatccaatcctttaaccaaagcttataggtttttccaatttaattgtccaattttaaaaatgttgaaacctaactgtgctaagtcaaaagttaataccatttaaattgactatcagtcaaaccagatgattcaatttcaaagtcaataccctgtctttctaaaatgctgaatttcattgaattgttccaagtaaacaacatatgatttcaactgattagaggtcataaagtgaacaagatagagacatagagaagaagaagcacgtggcgaagtggaggggatatggatcagattcggctaatgtcccgaccaaagacaaaggtagtgagccaattgatagcaacgtagaaacggtttctccagctgacgactcgagtcagataagcagacctccatatgaaccagctcagaaaacctgccattgatattcctttcccttcctgcacaagaaaactccctcctcgagtttagctatctactattattgtgttttgagggatttttaagtgaaagagaatgagagccttttcttttaaacataccttgctctcacggagatcaacgagagctttgtatctcccaatagtagccatacttccgagatgtttatacacaaatggttccccaagctccatttcctttgcgctattggcccgtcctcctccagcttttcccatcacgttaaacagattcgccaagtatttgccttctctctcagccaccttcattgatcaaagagacttgtatgttaagactccgagtatagaaaaaaagtaaatagattcttttacaacattagagacctgtgcaagtgcaggaagtgttgatttccctgtgctctcgagataaccgctacagtcaccaattgcaaacacgtcttgtacagaaggtacacgcatccactcatcaataccaatcctatcgaaacagagtgatccaagatcagaaaatgtttttttggagggaaaaaaacagaacaagctttctgttgtgacattggaactaacataccttccacctggatctttaggaaaatcaagagacctcacaaatgaagatggaccaacaccagttgaccagactaagagaccgtaaggaacttcagtgccatcatcaaggattagcttctgaggcttcacttctttcacaatcccacgcacaagcttcactccagactgaagtcaaaactagcagattttcaaaatccaaattctctcaatttaaagcatatgaagtttgcatatggattaactataataaccttgtttaactgcttgattgcatagtgccttagccgatcgtcaaaagaagaaagtatatcccttgcctggaaagaaacaatggacaaaatttcatatttatgaaacagatcatatatatagtagtttttatcaatgaagttataagctaagaaaacctcaatcagagtaacacgaatgtcgtctttcacatgagaatatctctgacgaacatctatcatgatgaaatcactcaattcaccactaaactccacgccagt

SEQ ID NO: 11458 - DNA, 1081 bp, Arabidopsis thaliana landsberg
tatatcggtagatattatacatgactccagaccagagtttgctgtcttttttgaaactctcttcactcctctgctgtctaaagaggctaaccggtgtctacgctaacctctcaggccaaccggaaggccattcccctattggactgaccggttgtttcggtagacaagtaagcataggagtgctccttttgattcgaaaaattgttatgaattggtttaagagacatcaaaaactctgttttttttgttgaaatgatatatttaaggatacaatgtcattaccatgaactgttcttcttggtctcttcttcaatgcagagaggcggatctttgtttttacgagattcataagaagaatctgagtctggtttctggtaaatcacgaatccaactttagtgaatcgagttctagccacaactttccaacacattgatgtagtcaaagactccattgctgcaagaaaaacacatacaaaccataaaacattcacaaacgtcttctgtatgctaattaaacataatgaggagggactaagaagaacaagtaaaactaacttttccaaacattacggtgcccttcgtcgtgttgataaactggtgtagctgaccaaacaaaaaaccctccaggccttagaacccggttaagttccaaaagtggtctaccacctgcaacaacacatttccatataacaacagtattaacaaagcaagcaagttcactgattcaaaagcaaggatatatttggagtataacaaccgtatccatgccaatggactctgcatctagcgcaatggattacgtcgtaagcattatcaggaaaaggaagcttttgagttccaataacagcgagtgtagcgggaatccctcgttccagtgcgaactgaatctgagcttcgtgttcgtctttaggagcaaatgacattgtgataacgttcttatcaagtaaagtcccccaaagctagccccacacaaccaacatctagaaccactcttactttcttcccccatcaagaataggtacgtctataaaagaaacagtactcagtaaactgaacaacttttggatatgtaataggtttt

SEQ ID NO: 11459 - DNA, 1079 bp, Arabidopsis thaliana landsberg
ggggatatatatgatcaagatcaagcttacggaaattattttacacaacgaatttaacgagttcagagggggggtgtggagaccctacatctcgccgggagttttactcccggaaatccactaatatcatcacttcatctccgatcctttacaagtggtagaccaaaacctactttggtgcatcttttgatctctttggatcactgagagtctaatgttttcagtaaccaatacaatatcttcggagataaccctaaccctaatcttggtggagaagaaaagggtggttgagaagctgtgaagctgtccatctctcgcttgctttcttgcgtaaacagcagtccatgaaactcttcaaatcgtcagagcattcttcgggggcttttggtggttctccaaaacaaactgcacatactatcgcggcttggtctggtagcatcgggtagtaacccaccaagatctcgagcatcgtaagcccaaaactccatatatctccggcgtaaacgtttgatttgtcttcttctgtaacaccatcagcttcactatcgagtctttcaggactcatgtatgcgaacgtgcctacgaacgagttgcacttgtttaaagacctgaccacgatcttgctcactccaaagtctgcgatcttgacttcttcttttgagctacgtagcagattcgctggcttgatgtctctatgaacgatcttgtgctcgtgcaagtaattttttccttccaaaacttgacgagacatcaaagcgagttgtttttctgtaaccccgcgtagagactcgagcgagccaagatccatgtaatccattagaatagatacttctccggaaggattctggaagatgtcgtgacactttgcgacgtaaggagagttgaccatgcgaaggatttcgatctcacggagggaagtagaatcccagttttatttcactttcttcaacgcgtagatctctgaggttgtcttgaccttaactttgaatacggttcctccgtttacactgccaaaaacactgattctgtccaaattagctacagacaaagtgttgcttgcgcatgaagaaactgttgca

SEQ ID NO: 11460 - DNA, 595 bp, Arabidopsis thaliana landsberg
tggctggcaagaaaccgggttataaacacctaatatggttttgctctattgcttatgttcatcaagaccaagggaaattaaaacctagagctttaaaatgagtttttctgggttatccacaaggagttaaaggctacaaagtgtggttgttggatgaagagaaatgcgtcatcagtcggaatgttgtatttgatgaagattcagtctacaagagtcttctacttgaaagtgataaagagcagatagatggggaactcagtaaagagactaccattactgtaattgacagtgttaagaaaaaggagaaagttctgtttcaggtggagctattgaggaaatcagtgacagtagtgactcagaggttgctgctacagaagaagactcacctatacagactgtaaatctcgaaaactaccagctagctcgagacagaacccgaagggttactagaccacctactaagctgtcagactatacccattttgcttatgcgttagtaatggcagaagaacttggtgaagaagaagaacctcagtgctatcatgatgcaagaaatgataaagactgggagaaatggaatggtgggatgtctgaa

SEQ ID NO: 11461 - DNA, 248 bp, Arabidopsis thaliana landsberg
taagactcccactaggactgcgctgctccccttagcagatagggaccatatagaaccttctcgcgatcgttgcactaagcagtgtgcaactcacgctccacagtacgcagcgaatcttcgatgtccatggaatcagtagaatgggaaaagacagggggatggcacctcatgaattctgcccgcttgtctctaggcatgtgcgacatctgtacttgcacttggggttgaggtgggggtgcctgctgctg

SEQ ID NO: 11462 - DNA, 584 bp, Arabidopsis thaliana landsberg
gaccacaacgttcctgaagagttgtggctgagcaagaaacctttctataaacacctaagaaggtttggttctatggcttaggttcatcgagctcaagggaaattaaagcctagagctttaaaaggtgtgtttctgggctatccacaaggagtcaaaggctacaaagtgtggctattggatgaggagaaatgtgtcatcagtcggagtgttgtatttgatgaagactcagtttacaagaatctgctacctgaaagtgataaagagcagattgaaggtgaactcggtaaagagactactattactgtcaatgacagtgttaaagaaaaaggagaaagttttgtttcaggtggagctattgaggaaagcagcgacagcagtgactcagaggctattgctacagaagaagattcacctatatagactgtaaatctcaagaactaccagctagctcgagacagaacccgaaggatcactagaccacctactaagttgtcagactatactcattttgcttatgcgttagtaatggcagaaaaacttggtgaagaggaagaacctcactgctatcatgatgcaagaatgat

SEQ ID NO: 11463 - DNA, 614 bp, Arabidopsis thaliana landsberg
  unsure (1)..(614): unsure at all n locations
ttcttggctatcgacagtaatcatcagtgttttcacgcccgacccgaaccgcccggtccgaccggttaacccgtgacctgaacacttttccggtttgggtttaatgctaaaacccgacaaattcaaaaccgaaaaaacccacaaaaactcgccattaacccatgacccggtgaatcggttgaaccagccggatgtgggttttaaaaaattctcttcattttggaataaaatgtggggttttaaactttcttcaattatttttataagtttttttagttcttaaattcatttgatgttttagattttggtgaagatttcacaatgcggccttaaaaatgaatcgaatggtgatatatgcaaacgagattagttgtttgaattcacgatgtttcattagtttgtttctatcattggtgatcttctattatatttgttacgatgttagacatttagttgaatttaaatttgttaatcactttcttattattgtttgattttatatatatatatatatatatatatgcctcttctggcnggaatgattttatatgttacgaacagtcatatgggtatatatttgttattaacgtgatatgattatttgagggaccgag

SEQ ID NO: 11464 - DNA, 621 bp, Arabidopsis thaliana landsberg
ctgctttgtctccgataagcattgagtcgcaagtcgaagtatttttagcaccctcagctttttactgcacctgaacaagaccacggtaacaatttctcgaatgcccagccgaaattccctttgaaatgattctactttttgtattctttcctttgtgaatcatcttagtccctgtatcagcttgctgatagttattagtcaatgccacggagtaaaactcgccaacagaatcatcgccttctaaaaccacgctcgggtacttccaagttatcgcagaccctgtctcaacctgagtccacgagattttggaacgatccccagcacaaagaccacgctttgtgacaaaattataaatcccacctttaccttgttcatccccagcataccaattctgcacggtagagtacttaatctcagctcctttcccgcaataaagctcaaccacagcagcatgaagctgattcgtgtcataagaaggagcagtacatccttctaaatactcaacaaaactcccttcctcagcaacaatcaaagtcctctcgaactgaccagtctccatcgcgttaatcccgaaataagtcgaaataggcatcggacatctagtgttcttcggtatataac

SEQ ID NO: 11465 - DNA, 1081 bp, Arabidopsis thaliana landsberg
ttaataacttgattgttacggaagcaatctaaactatttcctattttgcaggttatgactaatatctttaatgaggatattgagtgtcaaaaagttaaccactcaccactcttatttcttattacttaaataagtcttcaccttatgtttgcaactatcaatgagggtattggttacaatgttcgcttgtcatcacgataaagtaactgtgaaattttattaaactctaagaagaagctacttcttaaacatgaaagtaacagctgatgatccaatagaataggtatcaacggagttgccaggaaatatccagttgtgaaatttcatctgcttgattaaacgcaaacccgtttcttcagcaagagccttgatatcttgctcgttaaatgggtatattgtcttatgagtgacatgaatctctccattttcgtctttcaccatctctctcgcactctccataaagcttttcactacctcatggtgtttcctgtgaattgtacacacaaatgatgatgattattatataccaaagagtttaacaggaaaaaatgttgcaataagtaatggaccaaactttatgttattctcacgtatccaaatgcataaatactaaacaaaaatcagagcggttccaaacatgcgtacggtacggatattttgagttatagatcaaatactgagatcatgattaatagactcctaatatcctacgcatatcggatcagatttcaaatgttttgtccatccctatatcacaatatacatgcatgatgaaataagctttcattctcacgaccaaaaccttaccctgcacgaatgaaatgaaatatgattatgtcatatcgagctaggcgacaatctgaggtcatggaatgtatgttaacaccgcggaccacggtgcacccaagtctctccaactcttccacgttggcttttccattgttgtagttacgacctagcccatctaccgtacacataaaacattaatcagtaaagttgataagctatattgttgagtttatttttcatgtattgattatgctagtatatgatgataacaattaaaacaatataaaacgat

SEQ ID NO: 11466 - DNA, 1450 bp, Arabidopsis thaliana landsberg
ctttgaaccgatcgaaaattccttcgactggcccgtatactcagttttcctcgaccccgaagatcttcttctcggagaagtttgtgaagagccacggacacctcttattaagactcgaaagatacgagatcctcctcctcgagtatctcgtagatcatcacaagtatctagaccgatttatctccgccatagatttctcccacagtcaaggaaacagtcttcttcttctcgacgccaacgttagtcttataattaagcactctcattttaaatttatccacgaattgaatatgtttgtgtgtgttgtaaatattctaataattggatgtttatgaataagcctaaaggcactgcttgatgtttatatggaatggttattgaacaaatcatgcgattgtataattttatttacgttacagaaagaaaggttttacatgtatcatgtatgtatatctcaatttctggtataccaacaataacctggaaatttgtgtaccacatatgccaacactaaatttaagccgcaagcaacttctggatgtccttctgccaaacaaacatattgttagtattaaattataggaccactcaacattccgccgtgtcacatggaaaaataatgttagtaaacttatttggtatcaacttttaatccatattttacatatgttaggaatgttaaaacgtaaaattgatagattctctatttacattagaaaagttcaactggtggtttggttcacgacatgaaccatggatccagttatccagattgaattagagttttgaatttggtacctcgatttggaaaggagaagttgtgggagggtatctctcgacaactttgccctttttatcaaccaagaatttctcaaagttccatttgatgatatcaccaaggaaaccaccagcattggatttcaagaacttgtagattggagctgtgcttggtccattcacatcaacctgaagaacataacttatcaaaactaattaaaagatatctccctaaactcaaaaaaacgagagttctttttttctatataccttgtcgaatatagggaactctgctttgaaccgggtgcaagcaaattgcttgatctcagggtttgaaccgggttcttgacctccaaattgattgcaagggaaagcaagaatctcaaatcctaaaaacgagagagacacaataaataagaatctcacaatcactgtgttaccttaattaaatttagatgtgtaaaaagcttactataacaagcacaccttggttcttgtatttttcgtacagttgagaaagctctgagtaatttgatgatgtcaaaccactgacaccgtgaagttaaaaaataaacttaaaaaaaatttcagatgaaaaaacttatcaaatagaaaaattcgaagaaacaataaaaacaatcaccatcttgacgcaacgttaacgatcaacaaa

SEQ ID NO: 11467 - DNA, 774 bp, Arabidopsis thaliana landsberg
ttaagtagattttcttaagtaacccaaattacagtatgatgtttagaagtagagaaagaggcacatacaaaacctggaaggcagtgcaatttcctatcgtctcaggtatactaccagtcaaactgttgtttcttacgtcactgattcaatatcaaaacaaagacagatatttgatatttacaaaagaactcatcatactattcagatgtgcaagaagactcacaaataccaaagaccagtcagttgacacaaatctggagaaatgttaccgactaagttgtttcctcgcaacccactgctcatcatagtacaacaattatcaccgggtaatgaagagacattgacagacttcaaaaaacattgacacttacagatactgaagaacttcattccagtaaataagtcttggtatctcaccactgagtttattctgtgccaagtccctgcaattgaaattacacatgtatgatcacctatatagctaaaagtagtaagacatgtaagaatcatggggaacatacagaattttcaggtttggaatctgtgaaagtgttgaagggatcggtcctatcaattggttattcttcagaatcctggacaaagtaaaaatccatattccacatggagagtatatttttagcaatgacatatgaagactagtagcagaataactagctacttacagctgctcaagttgcttcaacttcgaaatcgaaaacggtatgtcaccacttaattcattgaaggataagtctctgaataaaaacaacatga

SEQ ID NO: 11468 - DNA, 606 bp, Arabidopsis thaliana landsberg
  unsure (1)..(606): unsure at all n locations
tcccgccagcaggtgacgcgagtccatgacaacaggtgaggctacgctacgcacgaccacaccatgggactgacccacgggatccaccgcacactactatgaagatgtcagcggtggactcgctacagggacctgtatgacgaatgagcgagacagtacgccataccgggagtacagctacgcacgacactacggaccgcatcaggagcactacgtcaaaccggggcaacagattgcccctcataccagtagagaacaagtcatctctataagannnnnnnnnnnnnnnnnnnnnnnnnnnnnnnnnnntcttcttcacacaaacacacctgttgtaacacgtacattgaagtagggtgtgaaccaaagcagtataacttcgtgttttagatctctcgtggagtcccagtgattcaccatatggagcgagtccgtgctagcgtcccctgaacagacacaaatcttattgtctccctgttctcgataccatggcagttagggtgcgtttggttgaatgtacaaagagggatgaaatgatgcggccatgttttctatagtgtttggttgagagtcaacggtggcgaggtgacaccggagtgatttttg

SEQ ID NO: 11469 - DNA, 1179 bp, Arabidopsis thaliana landsberg
cggaagaaagatcattggagctaccaacccagcagcttctgagcctggaactatccgtggggactttgctattgacattggaaggaatgtgatccacggtagtgactctgtcgagagtgccagaaaggagattgctttgtggttccctgatggacctgtcaactggcagagcagcgttcacccttgggtctatgaaacttgatgatctgttgctttttcagtaggtgtgttttctacattgcttgcttttgaacaagactgaaatattttaagttgaatttgattatccttctctactttgcttgcttgctacatatgaatacaacagctaccaactggtgatataaaatatatcagttattgcagatactgaaccaaaattgactcttaccaatggttagatcaaacctatttagtaaacacaagatcatacttcttgtaaccttgtgtttcatgaacacataatgttgtcaatctcttagatgctctcgaaaactgcgacgtttgtcaaagtggcaagcttaagttgtctagtaagctattgtccaagtttgaggctgacaccaacttgaagggggcatactaggagagagtgataagaaaagttttgagtatttgtctactgaatttcaagcttactgatgaacattggcaagctaaatttaaataactaaattttacaattttggttcttcaaactttagagaagaaaagaatccaacggtcaggttcaactccaacccgtctgtttcaatcatctattttgaccgcttattgtagctgcctgtaacagttcaaacccagccactgtcaacaatcaaagccaagtttgtttccaaagatggacacagctaagtagtcttttttgtcctcttccaattgttggttctaagaagtcggttaagcgagaacgcttctccttgaccatcgttaagcgaccgcagttccagacagcaagctgttagttgtcggagaagtgtctctagatgagaatgcgattgatttttgccctttggttttgtagataaaatcgcagcattcactgtgtctgccactacttccctttgagtctcttctaggaaataccctacattcgattcttcggggcgttcgtacactagcaaagcaaagcagtcctgaaatagataacaagatgctcgaatctctttaattaaacca

SEQ ID NO: 11470 - DNA, 1184 bp, Arabidopsis thaliana landsberg
ggatggatcgtcccgccaagaaagaacgtttgcccgtaccgaatgcttcttcaatccggaagttctcgcgaagagaataagatgctgctccccctccctctgtcttttttcgctttgctaatcttccccttcccctctaacgggggccaggcggcggcgggcgcgggaggaaaaaacctaagagaagacgctcttaggtccttcttttttcagtgcaacataggaaagcgccctctttttgtcatttctgcagctttccagatttggtattgaacgcatggcgtagctaggaccttaaaattatgtttgagcctatgttcaaacaaaacccatcccccggctggaaagaatgcccgccaagttctgataaggaaggaacaaccccggaaaggctcgacgaagggaggtagattacagaggactgaatggagtcactattaaggaccggttccccattcctttaattgaagatcttatggacgagctgggaggggttgtggtgttctcgaagattgatcttcgagctggttatcatcaggtgagaatggaacctgctgacatctttaaaacagccttcaaaacacattgtggacactttgagtatgttgttatgccttttggcctaacgaatgcacatgcttctttccaaggcttaatgaatgacattttcaagaagtttctcaggaagtttgtccacatattttttgatgacattctcatctatagtgcatctcttgaagagcacatacaacacttagagttggtattccaaacaatgcgagaacacagcttatttgctaaggagtgcaaatgtgagttcgctacaaaccgtgttgaatacttgggccattatatcactgcggagggagtctccattgatccagataaaattaaagcagtagcaaaatggcctattcctcagtcactgaaggtttgtcaggaattttggtactattgcaagacctcttaccttgttaactaagaaggatgcatttgtgtggtctgaagaggctttggaatcctttcaacaattgcagtccgccttatgcaatgcacctgttttagcacttccactctttgataaaccctttgttgtggaaacggatgcatgtacagaaggtattgaggcattgttaatgcaagagggtccccccttggcttatattagccgtcatttgaagggt

SEQ ID NO: 11471 - DNA, 583 bp, Arabidopsis thaliana landsberg
  unsure (1)..(583): unsure at all n locations
aagctgataagtggcttatgatatgttctcctgtcatatggattttttantaatgtgtttattagtaaataaatcaaagtttccgataaaatttaaaatgattagaaatagataaaatataggaaataaaacaatttttgattaaaattcaaaatgattagaaaactaaaaaaatataggaaacaacaacattataattagcacatttgtttttccgaataattctgattgacaataaaattccttttgttttttctgataaaataattaaaattatatatgattttttttttaatgacatgtgacatattttcctattattaggttctcctttttctattactaacattattattaacttattgtagtatcattttaataaataaattttaattgttgtagtttctctaaaaacaagcattgagaagttgagatgtgacatctctgcattccatatgtatcttttctttttaaactttaactaaatttttaatttgattaaataaatatctaaacatagcaaaaagagaaaaatatattagagaattactttcgatgtttattcagctctttttataattta

SEQ ID NO: 11472 - DNA, 953 bp, Arabidopsis thaliana landsberg
tttttgtttgcttttgtaaaatgatggacgtaataaatacccaatatgttcatagtttaattatttgctaacaacaatatcactatttcaaattcctaaaactcttgagctagaccaccatatttcttgctcaccgacttccttctttcatcaacacggtctccaacataattttgatccccagagatgatggttccgttcaaaggcttaccaacattggaaatgatttcgaagttaaaggagaacatcaatgttcaaatcatggatattgagacattaaatgttattattcatccagtagcaatcactcttctcacaaaaagtaggtttcgccaaccttatttttttttcttttgagtactaaatactgttttatgtaggaaaatcttggtggtcgttaaaatgagttaattttaggagatctatgtaagaagatctttttggtctttaaattagttgattttgggagttatgtaaggctaaattagttgatttaatttatttttgtagggaaaacagagctttcttcacttataaaggaggaggcaaaggtgaaggaaatgagtaaaagctgtgggcttgatactccatatggttatttgttagatgcttacaaagaagcagctggcacatatggatattttccgactactttgagactatccatattgatccctaaaaaaggtcactaaataaaatggtcgcaataacgtctcatatttgtgacggtttttgagactgacttatgtggtcgtatattagcgatggtttagagatacatattagtaatcatatattgagactaaattgtgacagtatctaaaatcgtatattagcgacttcttaatgaaaaactattaaaaaaaatttgaaaaaattaactaacaaatagaaaaaattaatccaataggaaattgaaataatatattttttatttttaaaaatataacaaa

SEQ ID NO: 11473 - DNA, 759 bp, Arabidopsis thaliana landsberg
aatcatatggatcttccccacatgaggtgcttttgtgcttaaaaactttccaatcacaaaatcttcccacattggtttggcaccaacgaaaacatctttcgggacaactactctctcctttccatctactacatccaccacaaacttctgcttagtgaaagtatgcttttgggccacttgaacatacgattttttggtaaccggtatctcttttgcttgagtcgccgttggttctttctggctaggtactaaagaaatctctgaaacttgatcatcgataagcactggagtctgctctgattctctctgcgattcgtttagaacctcatcttggaacccagcctgaaactggccagtgactaatcctttccctgacgccgagatctcctccgttaccaccggagaggccgtcggcggcagcatacgtgctggaaccgcaaaaaccctaatctcactctctgtcgcccttgccacgtcagcagagagaaaaacttaaaaacttatgcttccttgacttatattgctaaccgacgccataccatttcatgtttggaataccatctacattaacaaaacatacacaacaagaaaatgaataaccattaacaaagactgtaaataaaccatttcatactttcaccctgaagaactctatatatccttgactcatatgctaaattgggatgcacaatcttcacactttcctacacaacacaccaacaaaaacaatattctcatgatccaacccaaccaaaacgt

SEQ ID NO: 11474 - DNA, 1326 bp, Arabidopsis thaliana landsberg
ccccctgagaaaggaggttggagaagaggtggaaattggtgaggagatgcggcggctcacggcggatataatatcgaggacggaatttggaagtagttgtgataaaggaaaggagctttttagtctactcactgtacttcaacgtctttgtgctcaagccactcgccacctctgttttcccggtagccggtaagtttttttcttttttcacaaatctttcttttgattgttttgtgttacgaaatgcaagtaattatattaaatcattctatgattctactaactttttgtcattttgcggttttttaattaaataaattttcctaaaagaataatgaaataatattaatatattttgttttggttttcacgattctatagtgttgaaacgttgatatataaactatccactaacatattaaagataaaaagattgtacatgaatgacgactctacatggtcactatttctgttttttgcttgagcaaaataaaaacgttgcatgcatctcatttgatgacttaacgtgtaactaatctttcgtgtctcaaaggtggctaccgagcaaatacaacagagaaataaagtctctaaaaacggaagtggaacgtcttttgatggagattatagacagccgaagagacagtgtagagattggtcggagtagctcatacggggatgacctcttagggcttcttttgaaccagatggatagcaacaagaacaaccttaatgttcaaatgataatggatgagtgcaagactttcttctttaccggtcatgagacaacctctcttctcctcacgtggactctcatgctccttgctcataatcccacttggcaggacaaggtccgtgatgaggtccggcaagtttgtggccaagatggtgtcccttccgttgaacagctgtcaagtcttacttcggtacgttcttaattttcacttacattatcacctttcttcgttgttttttcaatggaacaatggttaattcttatcacctttctagcggccgcttagacacctataaattcaactattgttttttttagcttagacatccttatattatatttctaattgtttttaataaaatacttagaatatggaaaatatatctagaaattttttaacatcaatatataaaattttatcaacaaaatgtaaaaaatcaataatacaacaaataaatttcaattaatcgttaattaggcgttatgtccttctcgaaagttcgattagtgcctagtgaactataaatattgatttttttattagtgtttaacgtaaactcgtagcttttagagtctttcttatttccaca

SEQ ID NO: 11475 - DNA, 461 bp, Arabidopsis thaliana landsberg
gactctaatggatattcaccagttctttggaagcttacctatcaagcaagctgaggagaagttgacaacgagagcgacgacgttgactgtcagctgaaactgcacgaacttctggatgttgatgtacaccgatcgcccccatttggcgacagtgactatggtggagaagttgtcgtcgaggcatatgacgtcggcactctccttggccaccttcaaacgaaatccacacatacattagacccgacatcagccgaattcctagtgtaataagtctacgagaatgcattggagtgaatcgtgtacgtacgttacttagttgcaggcatgcccaacggaaggccaatgtcggcctccttgaaccccggtggaacggtccgtaccacggcgggtcacggggccaagtcggtcaacggtattcgtagatgcttcaccagggtgtgcttgtcaagccgcgaagatct

SEQ ID NO: 11476 - DNA, 1156 bp, Arabidopsis thaliana landsberg
  unsure (1)..(1156): unsure at all n locations
tcttcttaaacatttacatcaagtaaaatcaaatccaagataacattaaatttgacaagagttttcaaactatgatccaacttggaagtgtctaaagacaaaagactgaatcttgataacgtgggctgaaaacaaatcggttcttcgtttgtattatctctcctcaagcgctgctcactagcatgtttgtagactttgtggtcgcaatcgctggtcctcgtgtcaaagcttttatgcttaacggactgtttcccttctgtggacaccaaatttcataaacgaatcagtcaagtaaacaaacaaaagcaaagtctttaagccataagagagaacaagaaactaaccattctacaagtattggcctttaaatcgcagacagggtatgactgggggcagcagctagaaccatcatcgcaacaagtggctgactcatacggacaacatccccagctatagcatttaccattgtactcatataggcaacaacaagtggacttagctggacaagtgttagacttgtcacaaacaaccggtgaaggcgctggcggttttggtgggtttgagcctgatgatttggtagggtaagaagccatcatcgccacaccgcatttccctgatgactctttgatgttacgttcgagcttaaagtatccgctttctccccagtttgatccccatgagttacgaacaatccagtagtcttgaccaccttctgatccgtatcccacagctacaacaccatggtccaaagatgttccacatgttcctgtaaacacaccctgaaaacaacaacaaaagggattattttatgaactcgaaaccaatcttggattaagagaaaccaaagtaaggttcatagaaaattacagatgtgtaaagctggaaagctctgccaccagcttcaatggcaacactaataggttgattagcaagagccttcttcaaagacttctcatcgttttgaggaacatcctcataannnnnnnnnnnnnnnnnnnnnnnnnnnttctgcatgagttgaaagaaaaaacagaacataacagataagcactatacaccataaataaataaagtacaaacaatgtcgttgttatcactgatcagtggttctttaccttatcagaatagcacacgttaacatcagttgcaatataag

SEQ ID NO: 11477 - DNA, 1096 bp, Arabidopsis thaliana landsberg
gttttctacgagaagtttatttgcctcaacaagaagccactccaaaaaaacaaaagaccaactaataagtactagttgttgtagtgttgtagcaaattaatgacgagttcataaacgaatattgaccctttcatattacccttttaagttgtaacaaaaaaaaaacattgaccttttcatttttggacgcagatatcgtaatgaattaatggaaatggataaagatgaatatcgagatatactagaagatttcaaaaaaacaaaaactagaagatttcaagaagaaatccaaatggatgaaaaggtactatacaatgtgatgatctgttagttctatccaactaagcttaataaaccaaatgtacctcaataatgtttgcgactaatatactcaaaatagggtttagaaaagacagaaaaatattaatgaaacatgtatgtgtgatacactcaaggtaattttcattcataatttactgatatgcatgtgattggtaagttaagataatattagtaaatcaatgtaaagtttaagcttccattcatttctctcatatgcatgtgattcggaggatccgaggaatttgagtccataatatagaatttcttgttttcagagatctcagattgtcaagcatatgttagtatatcccaagttcttaaggtacaaacatgaagaatcttttggtagcttaagatctttccaaaatcgtttcacacgtttcccaatatttctgatttttaatcaaattttcaggtgcttcgtgatttattaatcttttgtccttgctctatttatagaagcaagtgtgcagttcttagtttcatgtgaattaaaggtaaccaaatatgagtttaacctctgatctctccgaaaaatccagtgataaaatgaaggttctagaggatttaacatcaaatgtaacgcagatacaagacaatgtattggaggagatactcacactaaatgcaaacacgaattatctccaaaagttcttccttggaagctttgataaagaaagtttcaagaagaacgtaccagtggtaacttatgaagatgttaagccatatatcgaacgtgtcgtgaatggagagc

SEQ ID NO: 11478 - DNA, 812 bp, Arabidopsis thaliana landsberg
ccatgagataaaaaagcatttccatacaccttatggagtatgctactgcaagaactcttcccatacaccttggtcgccgtttcacactgatgatcctccaagggcttcaatatgtacatcgaggtgactttgttcaggggaccttcgcagcggtaatgttttactctttcatagctatgaaggattagaggcaaaactcagcgactttagaaaatccaaacgaattaataatactagctggtggagccctgtaaatcgccacttatgataaaacttgatcatgtcactagagtccatttctcatggtatcacgaacgaagcacttgacgtatgggctgtgggtacttagttgataggtgatcttagatgaccaacatgtaactattttgcaatgttggagagtaaaaatcaaccacggctctcttaaccggaagagtgggcgtcaattggattaacatattctcaatgctctgcaagaaatagataaaaaaatttaaaaatttgactttattagttatattttccttggtataccggataactcgcttcgctgaccgataaaaccgaaccatgacctaaattgcgctccaaattttagcagtccctttcttcatttccttcctctgcttcttctccggtggatgtcctctttcatcaatggcggcgaggataaacacttcgcttcataacgccctctcttttttaaagccttttaacactcccctcaataccaaaccattctcttttagaagaaacagcttcagattttccaaaaagcttccttattattctcagttttcctcagggaagag

SEQ ID NO: 11479 - DNA, 1145 bp, Arabidopsis thaliana landsberg
tggttgtgttgggtctggaacagccatccccctaaaaatgaaataaaaaatttaacaaaaaaattgttagattcaaattgtatatgaaaagaagaagaaaaaaaaatccaaatttaaccagacaacaaaatatctatctcactagtcactacaacaatctattactatgcccactacattatttatcacatgagtatgattgaaaccattagaaactgttggagctagatttcatgtaattctaataaatcagaaatgtttctaacactttttaagttttatgcatcagatttagtttaatacttaagtttctaaatttaataatgtacagagacattaccttcggatgagatcagcagggagaccttccatatcaaaccgccatttgttcttatacgcagcggaactaatctctagaccgtattgaccagcagtgaagcacgactcgatcacaccgtccgcactaatcaaagtctgtcgtgccacggcattgatctccaaagtgtacctcatgtgagggtctaataatttgaatatcggatgcattgcgcttaattgtctatgagcagctaatataaacggttccaaacacgcatgagtacgtaaccaatgattcacaagctggtggacaccagcgtcattggacccaacgtgggccttggctagctgccacatccagttggaggttgcgtctactggaggtgtgaccacgcgcttggacttttggtttgagcttgattgagaagggaggcttagctcgatggcgataggcttgagtgtaccgagtcgggtcaagaacaatatggttcgagtcgcgtaagccttgcgtccatcaagcgcgttgattctatctagaaacggtaagtatatgtcatggtagtccaccataaacaaacggttcatctctaacgcctgaaaattcaatcaaaagataaacaaattaataatattactcaaaatttttttgtctttgtgtaagttaatgagatgatgtatattcatacttgttgtacggttaagccatcaagttgaccgatgatgtggtcttccgtgagagcggagtgaagacctggtccgtagatttcagggtcaagattgctgaccggtggataagacgtgactcgttctatgttgaccgggttgat

SEQ ID NO: 11480 - DNA, 1287 bp, Arabidopsis thaliana landsberg
aaaaaatacgtttgggttaaaacaccaaaaacttgaggcaaatcatcttcttgatgtgattcgaaatatttacatgcctgatgttcctaaagaagaaaaagagtcaaatcatcttcttgatatgatgatccggcagatatgtatgcctagagaatcaaaacaagaattggatgtcatgctcaagaaagaaaaacaggaagtggatatttccatgctggaagaaggaataccaaaatcagattcgctcgaagaagaagatagtactactggtcgccatcatctgaaaatggttctttcagcaagaaaacttcagttgaaggggataaagttcaaaccgaggaaaaaagcagaaacactaatggacataaggcataaggggaaactcctccagataccaccattgatcttggatgactttctcattgctgtcttacttaactgtgttgcatttgaacagtattattcttattgtaccaagcagcacatgacgagctatgtagctttcatgggatgtcttctcaaaagcgaggctgatgcgatgtttctaagcgaagtagggattctagagaactatttcgggtcaggggatgaagtctcccgattctttgaagttgttggtaaagatgtcttatttgacattgatgaaagttacttagctcgtgttttcgaaggagttaataagtatacttcaagtggatggcatgtacaatgggcgggattcaagcatacccattttgatagtccttggacagctctttcatcttgcgctgctttgacgcttgtcattctcacgataattcaagccttttttgcagcgtatggctattttcatccgcctaagtgattgatgaggtcgggaacaagactatttcctgctagagttttgtcatgtttttttgttttactagtagcatcttcatatttcagaaataattatttcgtctttggtctctttgattcggctaatatttgatattcaattcactctataatattatatcgaacttcgaaaagcacaataatgtttctttccaaaatgtaataaatctttttctacagccatcaacaaaaaaaaaaacaaattagattatgtgaagtgatatacaatattacaatttacgtggatgcactaatacgttactcctcctcaattgtttacttatttgtatcgtcctcaaaataatagtattcttaattttaaagttgacctaaaaggtatcacaatactactacttgtggataagaattgagtatccgataatatagcattgagagagtatcccactg

SEQ ID NO: 11481 - DNA, 1015 bp, Arabidopsis thaliana landsberg
agaaccgagcaggtgaaaagaagaaagcatccaaatctttcattttaggagttaattaaatcagatcagaaggtctaggggccatcggggaatccgttacaagagcggtttttccagaagacttaagaataacagagaagaaaatctttgatcctcaagacaaaacacttctcgtatggaacagattgttcgtcatttcgtgtattttagctgtctctgttgatcctttgttcttctatcttcccattgtcgataattccggaagcagctgtatagggattgatacgaaactagctgttacaacgacgactcttagaaccattgttgacgttttttacttaactagaatggctcttcagtttcgtacagcttatatagctccttcttctcgtgtatttggtcgtggtgagcttgtgattgatcctgcaaagatcgctgaacgctatttaacccgttatttcgtcgtcgattttcttgcagtgctgcctttaccgcaggtaaaacagagtgaaaagatcctttgatggttactaaaaatattggacttttgggattgattatgatgttttgtgtggatattacagattgcagtgtggaagtttcttcacgggtctaaaggatcggatgtgttaccaacgaaaacggcattgttgaacattgtaattgtgcagtatattccgagattcgtgaggtttattccgttaacatcagagttgaagaaaactgcaggagcttttgccgaaggagcttgggctggtgctgcttattatcttctctggtatatgcttgcaagccacgtaagcgtttctatgtatatatgactcttcttaattagtgttttgagacatttattcatcattggtcactttctgactttacaaacacattttgacagataactggagcgttttggtacatgttgtcagtggagcgtaacgatacttgttgaaaatttgcgtgtaaagttcagccagatccgcgactctgtgttcagattctgtattgtggactaaat

SEQ ID NO: 11482 - DNA, 508 bp, Arabidopsis thaliana landsberg
gaaaatcattcacatcaggtgtaacaggagctgctctccctgaagatctaagagtctcccagagttattttctttgctcctcaagacaaaacacttttattatggaacagaatgtttgttactctcttgcattcttgctgtctctgttgatcctctgttcttctatctccctattgtcgataactcaaagaactgcattgggattgactctaaattagctgtgacaactactactctaagaacgatcatcgatgttttttatcttacacgaatggctcttcagttccgtaccgcttacattgctccttcttctcgtgtgtttggaagaggtgagcttgtgatcgatcctgcaaagatcgctgaacggtatttgactcgttatttcattgtcgatttcctcgcggttcttcctttacctcaggtagttaataaaacgctccaatcttttctgttttgtgcattgctctcaattgaatagatgattcttggtggtgttgatgcaattgct

SEQ ID NO: 11483 - DNA, 849 bp, Arabidopsis thaliana landsberg
aacgtgttctttctcccgggggaaaagaggtacttctaaaatctgtggctttagcattaccagtctactcaatgaacatcttcaaactcccgaagagtatatgtgaggagatcaatggaattctagctaaattttggtggagtgatactgaagataaaaaagggatgcattggtttgcgtggaaacgaatgggaatgtcaaaaaaagaaggaggtatgggatttcgggatatcgagaattttaatttggcgttactcggtaacaagtgtggcgcattatgcagaaaccagagtgcctcatggcaagaatgttaaagcgtcgttattttaacgataccaatattcttaatgctactccgcagaggaaggcttcgtttgtttggaaatcattgatgcaaggccgagatctcataaaacgaggactcagatttataattggagatggttcacacattaacacttgggtggatccatggttacctgtacatccaccgcggccacctcgagcaaagaacaatcaatcgacgagtttcctattgacagagtggatttagccttcaggaaggctatggaaagaggatataattagagatatggtgatagaggaagatgcaaacttaattttgaccatcaagctttgttctgatactactggagatattctgggctggcattacactaagaacggaatatactcagttaaatctgcgtattggcttgcgaatcaattatatatggatcccactactcagcccccccccccaggaaacgttgcactcaaagaaaaaatatggaagctccatactgcaccgaaaatcaacatttcttatggaagatttgtcagaggctt

SEQ ID NO: 11484 - DNA, 1185 bp, Arabidopsis thaliana landsberg
aatatttggaaaacatgtggacatatgctatgaatatgctgacaaaaaaaaaaaaaaggatgctacgaatatggaatcatgatgctatacatttgtgttatatctttagattagatttattttctattagcttattgaaacttaaaactttgctgattgtcgaaatcctcgaataatatgatttcaaatgccatatccaagtcattttcatagtctttgtttcttttataaaagttttgtaatgtctttaataacataaatgtaagagagcatctgtctctcgtcgatccctaattcgttttttttttgcatctgctttgattcgtctctaaccaccattggaaataggagataaaatgttcttgagaagttattattgttaacgctctatggaacaccaattattattcctaaatcactctaataaatataaccaaatcaccagttatattcgttttttaaaaaaataaaaaatttaaccaagtcaccagttatttactcaaatctcaactaatctccaaaatatgaaaactccaccaaacacacctactattgcaatacacccctctcagtaaagcaaatttctgaggatttggtacatcactagtaatgattctcaaggctaaatcaatattttgccatgcttccactagcaagatctgcctgaattcttactcttaaggtgattctatgcattttgtttttgttaagttattctggactcttcactatttttttattttatacataaaattatgaacaattctgtttcttaatgacttttatattttatagcaactttaatcaattttgataactaagtagtgtatattatttaagttattaactttgcttaatgtattttcagctcaaggaggaacttattctacagttttcgattcaatatcatcgtacgctatatattaagacaaaagacttaactttcataggcatcttagcaaacaaaaaaagaagaagaaaacattcagaggccattgaattagattcagttgtaatattctcaaaacttttaccttcagttttagttgatgatcttcttctttaatattcttcctatagttaaaaaagagattaacatttcttacgtgtaatcattataatagaggtactgaaacaattagtccagacaatgaataatgtaacaaaaaccatattcagacataa

SEQ ID NO: 11485 - DNA, 1248 bp, Arabidopsis thaliana landsberg
cacggcgttgttttcttagacactggcttcttcccaccacatgacatcatctccgccgtcttcaacaaagctttctctctttccactagggtttcgtgatctctatgagttcttcgattggttgtttttttcttttctcaaagtttctctctctccattagtctgctgatgttaccaatgaacctaccgaccttttctctcacgcgctagcttcggcgtttggtaataatcttcatttggtttttatttcacctgcgtggtttttttttcctttcattttaaagattttgcagtaacaatcatattgaaatccaaatggctaatgttattacaatgcataggttagttgcttctagttatttatattaaagatttgatactactatgaattataatttgattggctataaacatccgattataccagctcctacaattgagaaagttataacaaaatggttgataatacattaatgaatactaaccaccttaattaaaattgacaccagtgaaaaagcattaaatatttggaccaccttttaaatagatgattaatcagtaattggacaaaatgctagtatttttacaaatcgggaaataaaggggtgaaatcgtaaataaataaaaagtatgggccacataataaagaagaatacaggcgcatgagaaattaacataattacctctcctttattacagttagtcaatttctaacccaaaacttttgttttgttctttcctttttcttaattttgattttattaaaatttggtcatgtattttcactactgtaatagagctggcatctctgatctttcaactccaccaatctcgaaatcttttctttcaattttctcaaaaaattaaaaccctaattcttattggattctgtttccttgaggagcaattgtgttctgttcgctgcattttttttgttctgctgacggaggaagaagaaacgagaagagatggcgcggcaaatgacgtcatctcagtttcacaaatcaaagactctcgacagcaaatatgtgagctttcttcttctccgtaatttctgggatttgggttttctaatgggtctccttaagattttagctttagtaattttattgattttaagcttaagtctggtgctttttgctgttttctcttcaattttgattaatttcaatggttgatccttgatatgttgagggtagatgctgggagatgaaattggtaaaggagcttatggtcgagtttataaag

SEQ ID NO: 11486 - DNA, 587 bp, Arabidopsis thaliana landsberg
  unsure (1)..(587): unsure at all n locations
tgcttcggcagttgaagaggtcccttcgccaaattcaagcactacgaccggttcaatatatcgcggtcggtgggtcaaaagcttcattttctagcccttcggcacagcagtggtggccgaagcggagtttttatcttctttccttgccttcgcagtaggtagtgataatcagggtatacgaagccaattgcatcaaacaccctgttcaatcttttcttgccccgacccgagaagnnnnnnnnnnnnnnnnnnnnnnnnnncttggaatatgtcccaagtagctcatcgcttgtaacacctcaattttattttgagacatataaaagtttctccaaaagacttgaggtaaaacatcctttaataatagattccattttcggtataaaatatatctctctacagtaaataaatgatagatactataattttatttgttatgctttaattggaccatacatttaagaaattattcaatttcactagtatttatgtaagtaagaatatatatagagacattcacttaagttagtaataaatatgtatgtaaaatggactttgcatcgatgtgttggatttgattttggaaa

SEQ ID NO: 11487 - DNA, 765 bp, Arabidopsis thaliana landsberg
cagtcagctatgcggacgttaggacatgtgttgccatcatgatctctgatttgagcaataaagacatgattcccctggttggtcccattcatactaagctgagaaatcacaattgcatggtttgcatgctgaacaaccaaagtatatcaacaagtcagtagatagcagatgagtgtgggagttaagcatagtgactacttacgttagctgcctcaccgatccaatacttctgagcagattcacaaggagtatttatcacaaactcttcagttgttgggtcataagtagtcactgtttcaattccccgtacctgaaagccaccaaatcaaagatcaccaatacatatatagtctggataaatgcaaaatgacactgcaatatgcctacattagttccatggcctagctcagtcattgcaaagcagcccttgacaacataatcttcagtgtctttcagccacttttcatggtgacgctttgtcccaaagaacttaacagcattacccctgaactttccaaatcctcattttgaacaacatctctctacttatctctaaaaatgagaaaataaagatgtgatttttgaaacattaccacaacaagaagtgaacaccgagtttggcaaagagggagtaatcataaatcccgcaaacttcgtagagagcaaacttgttgagctcagcttcaggacctgtctccgttagccatccttgaaagaccccttttttgagcaagtaaaagatccgcttcatactgatctggcgct

SEQ ID NO: 11488 - DNA, 428 bp, Arabidopsis thaliana landsberg
tattgagttctatttatttcttttgatataggtacggggaattgaaacagtgacaacttatgacccaaaaactgaagagtttgtgataaatactccttgtgaatctgctcagaagtattggattggtggggcagctaatgtaagtagtcattgtccctatcctgagtgtacctaaatacttgtttctatttagttcaccctcctgatttgtcatatactaattttgcgatatacttttggctgttcagcatgcaacccacacaattgtgttttcacagcttcatatcacggctcccaaccagggggtccatgcctttatcgcccaaatcagggatcgtgatggcagcatctgtccaaatatccgcgttgctgactgtggacgctaaatagataaaaatggtgttcacaatggccggcttgtggtataa

SEQ ID NO: 11489 - DNA, 1331 bp, Arabidopsis thaliana landsberg
caaataagggcattcagaccaaagaagatagcaacaaggataccgggaaacatgaatgcagtcttcaaggtcattctcttccacttgtttcctttgaacattttgtgaaggcgagacgaggagtaaccagcgaatatgcccatgaaaacccacaagagaaccatggcagtcataagccctcctctgttggatggagataagaagccaagcaacgcaaacatcattgtaacaagtgacattccgaagatctgaacacctgtaccaacataaacacacaataaaccagagttcaccggtggcctgaagacatctccgtgtacaagcttccatccagtctcttcctgggcctcatcttgggtctcgagctgattgtagtttgagatatccttgtataaagttctcatcatgatcatggctaccattccagaaaggaaaaggacaatcataagtgaatttatgatggaaaaccagtggatttgatcatcgttcatgagaaggtacgtgtcccaccgagaagcccatttgatttcactctcctggatcatcaaattccggaaaatgtttagcaacccaaaaagtaaagcaaaagaaggctaagtgtaagtcatgtaccttaaacgagacatcatatgtaaacactatttcttttccttgctcaacttcttgagggacagtgttgccttggattagattcttcgtgtccttattacatgttgttaactgaggatttttttcatcccactccttgtattcatgcaagatactatcaaaaagataaagacctattagcttatacaattagacaagtactcctcaaaaatccagtaggtaacctacctgctaggagtaacctcaaatccaacaattcgagcagaatcagactcttggtctgtgtggtacatgactcggaagcttaagtgattatgtataaagtatttctcctctttgctctacgaaagccaagcaactattagttggtatataaaaggtaatagcaaagactgaagcactatatattagagatataccccttcataactccctttaaagccaacacgaaaaccgtgttcataagtcgcagattgacttccatctcttctttgtctaagcacagctactggaagattatcaagaatcctgtacaacaattcgcgttaaggtcaactatatctagaaaatatagtaaatctatatgacacagatacaaagagcaagcgtgctataactgctacttacatattagccctgtattcatcatcaatcttttccttgaaattcttggaggagtcagcattaagtttaacacggcaacctactttgcagggctgatc

SEQ ID NO: 11490 - DNA, 553 bp, Arabidopsis thaliana landsberg
  unsure (1)..(553): unsure at all n locations
caggaagaaaccggatggaagcttgtacatggagatgtcttttggacgcccatgaactctgggttactgtgtggttatgtcggcacaggtgttcagattttcggtatgactcttgtgacaatgatctttgcattgctgggcttcttatctccatccaacagaggagggctcacgactgccatggttctcttatgggtattcatgggcatatttgctggttactcatcttctcgtcttcacaaaatgttcaaagggaatgagtggaaaagaatcaccttgaagactgcattcatgtttcccggtatactcttcgcgatcttcttcgttctcaacacactcatatggggagaacgatcatctggagccattccctttagtacaatgtttgctctggtctgtctctggtttggaatctctgtcccactagtcttcattggtagctacctcggtcacaaaaaaccagcaatcgaagatccagtcaaaactaacaagatcccgagacaagtaccagagcaaccttggtacatgaaacctgngttttccatactaattg

SEQ ID NO: 11491 - DNA, 574 bp, Arabidopsis thaliana landsberg
ggagtcattaagctttagtcatagtggcagattagggtttgtgagggttatagaccttaccacatgtctaaaacttgctgaagttgagagtaaggatgatcagcgcgagtcttgacataatagtttgtgaatcgataaccgaatcttttatcgaatttcttcagtatcttgcggataccaatagcattcatatcgatgaaaaacagaagcttgagaagatcttgtcccacggctctataagcctctcttagcttagctatctgagataagtcaggctcatcttgaagtgtatcatgccattcccttagcttttgtaacctacttgaaagcaaaccttgttgctccaacatgaaaagagcgattttctcgatctacaaggtgaaatgggtatgcattcagttcgatactttttatgcaaaccgcgaagttttgtgaatgaaaatgaaaaaaacctgatgatccaacatccttgagaaatctttaagaacatggcggcgatctaaacttcctacttcgatttgtggaccatattgcttcactttcttcttcatcaatttgtaattgatgtaatatc

SEQ ID NO: 11492 - DNA, 734 bp, Arabidopsis thaliana landsberg
  unsure (1)..(734): unsure at all n locations
ttctgtgtatgtgatcattcttttatctctgattcttctctgtgactttctttcagtgtagaagatggtagccttcgggaaaaaactcaaggaacggagcattcaagaatggcaagggtaatttctcgataaacttttcgaaaaactcgtaaaaatgtttgtcctaatgttaatcatgatcgcttgtagatattatatcaattacaaattgatgaagaagaaagtgaagcaatatagtcgccaattagaaggaggcaatcttgagcgccgtcatgttcttaaagatttctcaaggatgcttgataatcaggtaacaacaacctttagtgtctgtgaagataaaagtgtggagctttataaaaagctaattttgaaaatgaatgcatactagatcgagaaaatcgctcttttcatgttggagcaacaagggttgcttgcaagcaggctacagacactaaggggatcacacgatgctctccaggagcagccagacatatcccacatgtcttatctaaaggaagagtatagagctgttgggcaagatcttctcaagcttttgtttttcgttgagatgaatgctattggtatccgtaagatactgaagaaatttgacaaacggtttggttatcgattcacaaactattatgtcaagactagagctaaccatccttactctgaactccagccagtctttagacatgtggnttagtaagtcttaagatgaaacaaatgac

SEQ ID NO: 11493 - DNA, 780 bp, Arabidopsis thaliana landsberg
gaagaacagcttgtttgcctgaaaatattcaaagttatcatacttttttgacttcacgaatttatagtacttcaagggaaatgtgagctttttgactaaaaataatatttatgaaatatcacaatttagtcactaaattaccggattaacggcttctacattgccggtaaaggatgatccgtcacaatatcgtactttgattctgttccaattgtagaaatctgagcaaaagaaaatcatttttttttatgaaaatcaagatagattcaacagcattaattgatcataactctcccacaaacctctggatcattagaaacaaaaaaaaaaaaagtaatatacctgggttagtgctttgcttgccacccaagataccggaaaatccaaagtctttgttcatgaatttggaagaacccttcattgtacccttacgttcattacatgaagcaacgtcggtacaccatcctcctccctaacatataaacaacatttacacttcattcaaatattattcaactaattctaccttgtttttatgttacatttcttttcagtaaaataattattaaaaaaaaaaacataagatgctaacgataaacgccgcaatgtttttaagttttaactaatcacacaactataaagaactacgatttatatatatttaaaaaaaaaaaaagaactcgatttatatgtacagtcatttcaacgacaaaaaaatatatcaagtggtccagaaatttgcaacaaaaaacaagtttctttacctccatgtggacgatc

SEQ ID NO: 11494 - DNA, 305 bp, Arabidopsis thaliana landsberg
ttcctgaactaaatctctagtaccaatatgttcagacacaactctaaattcgtccacagcatttgggcatgatgtccctggtgtcatgttgcactgaggtctagtaaacccgaaggtcagcttcagcgggctctgaactagcttctcctttttttcatcaatcctaaccataaaacctttcagtcttccaactggtcggccatttggctcggtactatccaccggtgtcttcatgtctttatgataagcaaaattatagcagccgaagttctcgtgcaattcgtcttctctagccttcgtctggt

SEQ ID NO: 11495 - DNA, 604 bp, Arabidopsis thaliana landsberg
  unsure (1)..(604): unsure at all n locations
ccgtataattttagttaaatttttttttttttttttttttacgttggcgtgaatgaatnnnnnnnnnnnnnnnnntagttacagagaccgtagacgcagaactcgccgagatcgcaacgatggttacactcaccgcaatggcgtttatcgtaggccacgtaaacgcactgaccacgacaacacgtttgcccgaacttgcatttgttcttacataaaccgcagtttttgtcgtcggttgataaatccatacacttgttgttgcaacaagccattgtagcgtttgctcctgtgctgtaatcgctgctgctacagatttcattgtccttgttgcaatggtcagctgcgtttgggttacgggcttttggttctttacccttgtcgactttttctgccaagaaccgacttggtctgatcttgatcgttcctggtggtgtaaggtccttgaaagggtcttcgagagcaaatgttgcggtcttggtggtggttttggtggtgacgatggcgattgtgaccacggttgttaatgcaattgtcacgagtagcttcatgaaatgggccattttctcttgatctatgaatgtgttagtgagttacacgagatata

SEQ ID NO: 11496 - DNA, 1790 bp, Arabidopsis thaliana landsberg
aataccaagggctatttggctggggtggtaaagtatgaaaaatttagattcgtttttttcaaaataattaaatttatcaggaaattttcatattgttagtttctttattgtgagcttaaagatttcttaaaaccagtaatcaagtaatcaacacaaacaaaaatgcgggtattagtttcagatcaaaatcaattgaattggcaaagcagccatatttttttattggattataaatcaatttttggtttttaggatatataaaactaatgttaacaaaaaaagtgtacggtttttcatatcagtttgttatgcttaactaggcggttcaaatacatttggtttatccaaattgaacacttacaactttttaaaaattgttatctagtattgttttcttttggataatctatttgaaggtatgacgatgacagaaagcaaaagatgtcacaaagactctgattaggttggcagaggggcacgttcaaattcttcgccgtgtataaacgccggatgcggaggggcatagaaacagtctttaagtcggtgtagccgagcgtgtgtccaccagggtaatatctggtatgacccgttttggttttgatcattgtgtagccgatattaagtaagaaaacgaacatgttgtaatataacaagagaatttgcaaagcttgaataaaaagtataatttaaatttgtgtacgtttcttttataataacaattctttctattcagaagtaaacaaaagctacaaagaataattgtaaagcagcgcattacaaaagtctttacactagaggatgaaaataagtagtattgtttactacccaagaaaagatgaacattgtattgtatagtaacaatctaattaaggttgctatggaaactttatatatctgtatctttatgtttgtactgtatatcttccttttgtatacatgcagatttttgctttaaataagttataccgtgttggcaatggtctatttagttcatctacaatctcgaaaactacattctttagcccaattgtaatgtggttttcaccaatggataaatgaataacatagagctcaccaaagacacaatttccaaagtcgcttatcgctcatgatgaaaagaagagtaaccttaaaacttataacaccatggttcacaagatatgcatgaaccaataagaaaagatgaataccatacgtaccaagaaaaaaaaatatagtaatcaaataagataacgactgtgctaatcctaaatacttgccataagcttcagatccttggacgtctaaatttgcatggaagacgatatgataaagagcagttcagtgaaatatcgactgcggaatgtggaatcccatagctttgatacgcaacgaaatctcgctatagactttgccgacaatttcaagagtatctccaatacgagatcgtatgggatctgttccaagtttactccttcattcatcggattcgaacaagctcgtgtcttcatcatggtagagacgcttctcttaaacactaaagtctcttttgttttccatttgctaaattgaaacagagatctaagtgtttctttaaatataatgaatatataggggttaatgtgaactgtcctaatagtatgagggcctaaatgcaaataataaaattctgataaattttttaatgaaaggaatttggtggaacaagttaaaaattatttacaatgggataatatgcatccatctagaatctcactgggatgttgaatactactaatattggtacgacaacatactcgagacacaacatg

SEQ ID NO: 11497 - DNA, 1067 bp, Arabidopsis thaliana landsberg
tgcgtatacgattggctcattgattataacattttcatttcgactgcattttttttgtttttgggttggagtggctaagcaggcatccacaatatttctccaaccctttatatgttggtggagattcttattccggtatgattgtcccggccctcgttcaagaaatctcacaaggtatggttttatcatatcagtcaattaaagtccacttttcttcgaatatcatttaatccattttgttacttttaaacaatatcgacaacggtgcaggaaattatatatgttgcgaacctcctataaatctacaggtcattgatctttgatttacttcttgtatcatacataatttttcgaacaataaatattgatagtaaaatatattttcttaccaaaacaaaaacagggttatatgcttggaaaccctgtaacatatatggactttgaacaaaacttccgcattccatatgcttatggtatgggattaatctctgacgaaatctatgaggtatgaaataaggcatgcttatattgtcactagagagtttaaatatttgacgagtcgatatactacaagaaaaacattgatttcttatagccaaaaacgtcggaaaatggtaagaaataggttttttctataattttcctacgaaaaatattggtagtaaatatttcataggaaatcaatattggtaggaatttggtaggaaatgtctcgagagtcttgctctgagttttacttatatggtagcaaatgtctcgcgagtcttgctctgagttttgcttatattgtatcctataataacatgattgaaacttgccatttcgaagctcaaacgaaataatactgttcgaaactttcatcaaaaataataataataattgtttgttttttttgtcaaagaataataataattgttcaaaactcttttgttgcagccaatgaagagaatctgcaacggaaattattacaatgtggatccatctaacacacaatgtttgaaacttactgaagaatatcataaggtacatcacactcaaaaattttgggtcgataccttttaatttat

SEQ ID NO: 11498 - DNA, 1009 bp, Arabidopsis thaliana landsberg
tagacttgggtaatgatcgataacacatagctctcctcttaaaacccctaaccatgaactgtatttcgactccgtgtgcataggagataatagctcttggtactcttccttggcgaaatcgaaacagaggatggtgtttttcctacgggggtttttggtgtgagacctgtctgctatccacaaccgtaccggtccggtctatgaatttgcgatgaagagaagtatctggtacactttctctccaacagctttctttgaaagcatagatataggttttgaaaccaattttcgttacaatcttgtaatcattagaaatccggtcataaccaaatcccaatagatttgtggtttggcccggtataaccattggtattctcttgaattcctccgaacctggtttccaaatcgctaggtcattgttttctttgagggtcagacacatcattccacgacaatgaagaatacagacaggttcggtttcggccggtaatgtaaagggcaagtctagcttcaacaacgtggtttcgttgaggtttagacggtataaaccatctttgtgtaatgaaatgagatgtgatgattgttgattcgacataggaaaattgatcaaaacagatatattttggtgaaaatcaagaaaaaaaaaggatattgattgcttattttatatagagcttatgactatgaacaacaattcattttatagattgcttatttattaatattgagagcgtgcttacatgtttaactaattgtttagttattagttattacttctaaattgtttatagatttggaaatctgtatatatcaaataaaatttattatactgccacataagcaaatacaatctttaaaatcagcctcatcattaaaagaacaattttttttgttgaacatatcatcattaaaataactatataattgatttcttacttttttcttcagtcaatataattatttacttgatttgcttcatttgtttgttattgaaaatatcaataatatc

SEQ ID NO: 11499 - DNA, 464 bp, Arabidopsis thaliana landsberg
  unsure (1)..(464): unsure at all n locations
ggaagcggcgctaaagccggcagcgggccaaccctcggcagcgcctgcggagaccagggcctgaggggctccccgcatgcacgattggccttgccccggagcgggtaagtatatgaggatacctctgttttggtttttacacnnnnnnnnnnnnnnnnnnnnnnnnnnnnnnnnnnnnnnnnnnnnnnnngggcccggccggtctggcccccacgaaggcccttaagacggggccggcctctacagccagtgttgcggcacccatgccggttggttggcctctgcccaaggcgccctccagcggggggcccaggcggcacaagttgccatggggcaagcctcctaggctgacccccctgttggagcggctatcatgccgggggaggatgctgacgtggctgcggccccgagcatgcctgacttgttgcaggcgccgacatcgactcctgccggggctgtcgctg

SEQ ID NO: 11500 - DNA, 949 bp, Arabidopsis thaliana landsberg
  unsure (1)..(949): unsure at all n locations
tccctagttaaaaaaaaaaagttgcagttttaatcaaaatgacacagaataggtaaatatatcaaagactttgtggaagaacaacatcaacatgagtagatatataaagtgatgcttttatgtgacttacatgacacacaatacatctataaattgaggaaagcattaacaagaacgaagaagaagaacaaaaacaaaatatatatacaaaactctttttctcttgttctactacgaaaagaagaattcaagaaatggttcttacagaggctgagattgaagccgaattggatcgtctcatggaagcaccggaagtagatgaagagcaagtgaaggtaaatgttttttctggtatttttgaaacttctaatgtttttattctatgtagaacacattagttaaacctttgtaaaatctaggatttggagaagagaatgatcgagttcactaaaacaaaccgaggtatagatcccaagtatatgaagacaattgaatatctaaagatggataaacgactcaaatctatgatcaaagttacaggaacttctattgtgaagcagaagtcttcctcttcatcttaattagttggttttttcagatgataagtaaaagaagaattattagtataataaatatgatcatcatcatattcttaaaaaaaaattagtgaatactttaagtttaaggtttgttgtattaattaagaaaactaagaaaggcatgtcttttatcttacttattcgtaaaaggattctcataattaattactcagttttctaataatattttcctgtctcaatttctttttttgtgtcacaacatacttcttgattcatataattggtttggactttgattaatttttggtaggtatgcgtgttaagtaccgtataaatggtattaaattacataatcagcgaatnnataataagagattaataaaatatta

SEQ ID NO: 11501 - DNA, 628 bp, Arabidopsis thaliana landsberg
ctgtagaggaataaaactgatatattagttgtgttcacagttaagagcgaccttgagggctcctttgattagagatactatggttacaacttatgatgatgacgactctattaacgatgattctaactatggattctgatatttcctctatgaggaggtactctttgggttaataacttgggattgatgataaaacttggcttatattaatgactagaacttgacaaagtaaaagctacctgctattagcctaactccacataaagctagcccactccaggcaaacaagtcacttgctgagtatgttgatgtgtactcatccttgctttaacacaaaactctaggttgcccctttgcaatcaatgcttaggagaagatgaagacaatgaagcagagttctaggagttccaggactttgaggagttctagacttagattagcgcaaccccagtcagctgcctatgagaggcctttatctttattgtgctctgtgttacactttgataattgttaagtctatgattatgtggatgtcttcgacatcatgttgtaataagttaatactctttatggtgctattctacactgtgcaatgatgtctattatgtaacgatgtgtcatgagtctg

SEQ ID NO: 11502 - DNA, 1296 bp, Arabidopsis thaliana landsberg
ccaaatttttaaaccccaaaaatcatacaaatcatactcgaaaaaaagagaaagaaagacttaacacgtttcctcaattgcccataattattaactttagaataaacaattattggaaaaaaaacggtgagaaaaaggatgctatatcaatattaatctaatgctagaaccgtactaatgtaatagctatagattaagtctagtttaactccaaagacaaagcaataaatcaagtaattaaatttgtagccagcgcgacgaccatcgtcaacgagggacacatcaaaacttggacttgcatagctctcatcgtacgtcggcgataacgttcataaataagcatttattactctctttttttggggtcgagctgttattttcatagtagttttctacacaaatatctaccctcacggcctccccacatgatcgtattatgcatggtttcaataccaaagatccatattatacgtatagatatacacgtataaatatgatttctttttaaaaaaaaatcatcctatcatcagtcaattcgtgtaagaatactttcacgcaaattaaatataaaacgggaatcataagtcatatagtaaaagtattcggttaattcaatcatataatgatttaagttaattatcgtgttagtacatacactacgtaaatgaaagtttaaaagctgtattttaaaagagaacgtaccgttagcaagatcaagaagaaaatcagccggattcataggaaaagccggcgaaaatccgacggattcaaagtaagccatggcgtctcttccttttccgacgaacaaacactttccttcactcaaaagaagcaccgtatcaaacatctgaaacacacgactcgacggctgatgaatcgacgtaaccaccgtttttcctttcccatgagccaacccggcaagagtctgaaccaaccggagcgccgccgtagcatcaagacccgaagtaggctcatcaagaaccaaaagactcgggtttataagcaattcatgagctatactaactcgtttcctttctccaccagagatacctctaatgaaagtgttcccaacgactgtgttctcacatttcgttaaacctagctccgatataaccgattcagcggctctgagtttaacgtctcttgttagactccgaggaagacgaagcaaagccacgaaaactaaggtttcacgtacggttaagtgagggtaaagaagatcgtcttgtgctacaaatacggtgcgttttaatgtttgtttcgttattttaccgtcgtttataagtatgtttccgg

SEQ ID NO: 11503 - DNA, 1543 bp, Arabidopsis thaliana landsberg
ttggagtaaaaggagcattatacccagaccggcgtggaaggcacacgaggctcaaaggtcgactagaaacgaccattagcttcgtgcttccttcagttctcgcgcttgtaccagaagatgttaggagaaacatggccaatgcggtaagaaactgtttcgtttcatatatgcgattggaaactcaaaatgctatgttccgggtttatacatgatttatgtttttgattggccctttacagattttggccggtttggtggataacatgaagcatagggttattgagagcttggtcgctgattatagcaaattcaaatatgaaagaaaaaaacactagtaattgatatcaatgtttgatcatgtatagttctagatccaatatatgaacaatcgtgcgaggtgtagacctcgatcgtttgaaataattgaggcttttaatctcaatgtttaaccatgtatagttctggatttgatatgaacaatataaacactatacgtgacacttatgccgaagtaatgcttaatgtatgtatggtcaaatttagaatacaaaggtggcaaaacaacttttcacacaaaaagaagaaacagaataaatcaaagactcacaaaacgaacacaaccgttgttcttcgatttggtcggatttaggtacagaggctttacttggtgagtttgaagtacaagatgatgataatggcggcaatcaatgcgatgatgatggctccaatggtccatttgttcttgttcatcctcctcgtcatgtctgtcaagatcttcttgctctttccaatgttatcgtctactccatgaagctgtcaacagagttctaaattttggttagcacgatatcaatccagcgtagataaagaaaacaagaaaacatagtcttctttatgatatagcccttaattctcatcttattttgtcactttgttcagaatatcgttgagaatatggagtaaatgtgttgcagagagacaataccgtttcgtgggcacgtaagagagactgtctctgaccgtgcaagtcttggaggattgaaacaccgatttcttcagtctccatcattgttctacgactgtccttgactctgtcagtggttcggcccagacgctcagttgacatcatcaatcttgctctctgatcagctgaagcctgatctcagcgtttcaataaaaaaagaaaatcataggtcgttttaatagcaaagatatgagatgagataaaattgaaacaatactaccgagtcctttacataccgtctttgtgtcagccataccagcttctagcaactcatcacgagcagcagcgttcaactgtccagatgtgattctcttcacttcagttttgaaattgttcagatcagacttgaattctcttaatttgacaaggaggctggacttaagattaggtggaagggtccttgcctcgagatccattttcctaatctggtgaagaaaaggacagagaagcatcaaaatgaataatggacaatagagaagcttctataacttcacggtacgcatatcacataccaatact

SEQ ID NO: 11504 - DNA, 967 bp, Arabidopsis thaliana landsberg
  unsure (1)..(967): unsure at all n locations
aacattgatgtgacccatgtgaaatcttcttaaaagattataattaattagaaatgtgactggtaattttttgcagaatacagctgaattattataggtatagtatgttgtaaaatattgttagtattttttcattgatgatatgcataaatatgtatatgagagaagaagaaaaattaccttccaaattaataagcttatatcgaattgtccacctttatacgaagatctaggagaaatcgcagctcctatcgcgattcgacggttggtttgaacgaaaccggaacatagcaaattgtagcaacccgttgttcgatatgcatcggactgaaaatcactatcactaccattgttaacaaaatgttaattcaataaaactaaaaactttaccgtaaactaaggatactaaagttgaaggtaacatttaccgtccaataggtaaagaatcttgggtaagtatcgccgtacaactccgggctaatttgccaaccggcttcaatggtattaagatcgtgtgtgaacgaaccggcaataacccaaatctgagaaagactaaattcgtattggctcgtaacacgtggcgaccacacgttaatacttgcttttgccccgtaatattgtctcccggttacatatcccaccgcatgctacaaaataagtcatttttacaaaaataatcaatcaaataaattctcaaacgctaaaattggagtatcattttcgtaaacacagaaaaagagaaaaaggaacagagaataatcttttttacgatgtgaacagagaataatctnnnnnnnnnnnnnnnnnnnnnnctttggatgatacaacttagtaatggtcgtgcaaagaattacgaaaaagctgaattttggtatcattctctatctttntctttatagaggataaaaaagggtaagaaacctctgactttntgctttaatatgggtatcaaaatggtacttacttc

SEQ ID NO: 11505 - DNA, 827 bp, Arabidopsis thaliana landsberg
ttggcttcttttcttattcagattatagagattgaagatgatgatgatactgtaatgtattcatcgatcttcaccaattgtgtttctttgtatttacgacctttttttctaatcagaatgaagtgaaccaagtagacgaagaaaatcagtatatagtggaggaagcggacgaagaaaatcaggtggaagcagagaacgaagaagctcagatatcagagaacgaagaatttgtgattcaggaacaaccgaagaaactgatcatgagtgatgtttgggagcagtatctgacaactgcggaaattcggaaagaagacatgaacaggctcgtgatgaactttcttgtggttgaaggatatctagaagctgtggagaaatttcaaaaggaatctggaactaagcgtatcctctttcaacttgtggaagaactttctcagattctttctagtgcttggtgtgttatctggtctctgttatttccttaacaagaaacagcagaagtaggtgttgcgagcatcagtgacagattggctgttaaaagggatatcgaaagcggagatcttgaggatgctgttgagaagttgaatgctataaatcctgaggtacaatgcctcacattttcatgcaaactgatcattggcgtggacatatgtgatgttgcttttctattcctaacaggtcacagtttctaaccatatgagagattgaggtatttgcagatactgaagacgaatttttctcttaatcaccagaggttcatagaacgaatccgcataggggtgacaattaaggagacctttaattttgctgagaaagagcttaaaccattg

SEQ ID NO: 11506 - DNA, 1143 bp, Arabidopsis thaliana landsberg
cttgtgcaacatcttctgtgacttgggtaatcggcatgtacttgtgttctttgttaatattatctctgtattggagttagcatagcaggctgaggaacaatgtagatgatattgctagctaataacatgtatcatggtaatatacatttgtcgctttaaaccacaaggatacttgagaatatgagctacttataggttgctttgtttattttgcctggcaacgcttaaaatttctgcatccattgacgctatgtgttctgttattttatcgtaggctcttacttccactgctctcaagaatggagtactacatgctgctaatgttgccacacaatacaagtacagaaacactttcttcgatgtcaagatcgatactgatttcaatgttaagtctcttgtttatccaatgaataaatttgtctcaattgatcacaatacgctaagtttgtgcctctttttttttcacttgattagatcctgacaaccatcacatcactgagatcctcccatcgacaaaagccattgcttccttcaaagtgcctgattacaacaactctagcaaggttttgcattttcagaattctttaagctagatatatatatgacattttcagccaaatgaattcaaactcaactatgatttacagctggaagtccaatacttccatgatcacgcaacagttacagccgctgcagccttacaacaaaaccctctaattgatgtaactgccgctcttggctcaccaactatctcatttggtgctgaagctgggtatgacaccacatctcgaactttcacaaagtacaacgtcggagtcagtgtcacaaagccagatcaatgtgtctccataatattgtaagataaagaagctcttactaatcaaagttctatcgaactgttcttaatatattctgaatcttttcttggaaaatctcaggggagataaaggagattcgatcaaagcctcttatctatattacctagatgagtcgaagagaagcgcaacagttggagaggttatcaggaaaatctcaactaatgagaccacagtaactgttggtggattgtatgcggttgatcacttgacgaatgtgatagctaagctgaacagtaacggttagcttggtgctcttctgcaacat

SEQ ID NO: 11507 - DNA, 586 bp, Arabidopsis thaliana landsberg
  unsure (1)..(586): unsure at all n locations
caaggctggctcaggcgagacggactaggctgaggcgacctcgggcgagacgaagtgagtgatgtcgtcttcgggtgaggtggagctccgcttgaggtgggagatgctcggggggtgtctcggcttttataggtggcccggatgtcgccccttgggagttagtccttatctctctgagtgcgtttgttagggggtaatttgggtgttcctaattatcgcacccaacagtagcccctgagccttccaaggaagtacttttggtacttatttggaggctctcctacttgcccgcgagcatgctgctttttgagagataggacgtgctcgttattcgatgggtgcgcatgagcacactcgtcgggtgtagcccccgaggccccgaagatgtggttgactcttcgggggcttttgttctttggtaggtccatttgatctttggtcagaccgtgggagcctttttatgtggtttatgagggcagccccgagcctnnnnnnnnnnnnnnnnnnnnnncaagggatgctcgacttgtggttcgacgcccttcatcgctctctgcgaggaggaagaggggggaatcgtgatcca

SEQ ID NO: 11508 - DNA, 570 bp, Arabidopsis thaliana landsberg
caaaatgaaacaatttccagcagaaggcatacagcatacagtcagcattatgtaaatctcaaagtaattatgagagaatcgactgcttgttgtgtattgcatagaagatggttacatatatagagacccagggaaccctaaccctaatgggccggcagcccaacagtggtgccaaccacctacacacatatagaaacacacactctaacatccccacggagcagcaaccggaagcaccacaaacaatgagactggagcagaagccaaaggtaggagccgtcggttgaaatccccccgcaaacgtagcgtcgtgagggtgcgagtgctgcggctagagtagatactggtgtgcactccatgtacatgatagccactggacaccgaggtagccgaagccgacgcaacaatagcctcggtcttcggggggttgacgttcgagcgtcaacggtcggcggtgcacgcaaaagggacagcagcagtctcgtgggccttcttgcttctttccgcgtccggtcgtcgaggacccggccaggaagccagcgatagcacgcgtctgcgctggtcagggtg

SEQ ID NO: 11509 - DNA, 1215 bp, Arabidopsis thaliana landsberg
ctcgcttctatgctttttggtatacttaaaagtctccttcttactgaaaatcttgtgtctagtactttttttctacaatgttgtgatattgtctctttgatctttgtaggatcagaggaatgtctagagtggaagataaggtataaagtggctctaggtatagctgatggtctgagttatcttcataatgcttgtccaagaaggatcattcaccgtgacatcaaagcttctaacatattgctcaaccacgattacgaagctcaggtaaatgatcttgacaaatgacaacatctctaaacattttcttggtatttggttggtttgagaaccatttacatattgtacattttctcaattcagatttcagatttcggacttgcaaaatggctcccagagaactggcctcaccatgttgtattccccattgaaggaacattcgggtaaaagagagaaagctttgtaactatccatgaacagctttgctgatcaaaactataggtttcattgggttttttctccctttagatatctagctccagagtatttcatgcacggcattgttgatgagaagattgatgtgtttgcctttggagtattgcttctagagatcataaccagtcgccgagctgttgatacagcaagcaggcagagcattgttgcatgggtaaatgcatcagagactctttattgagactcatcaaaagttcagcttgagatcttttgtttaccttattgatttggttatacaggcaaaaccttttcttgagaaaaatagcatggaggacattgtggatcctcggctaggaaatatgtttaatccaacagagatgcaacgagtgatgctaacagcttcaatgtgtgtacatcatattgccgcaatgcgacctgacatgactcgggtatagtacctattcttcccatgttcatagagccaaaacagatctttggtatcggttttgatgtgaattctttgtgcagttggtgcagctgttacgtggagaagacggaccagctgagctacagcagaaggcaggtgaaagaacaatgagcgtgaacgcttgtgatctacaagatcacacctcttcctcatacctcaacgaactccggcgccataggcaactcttaatggagtgagtagaagcaataacatcaacttaaagaactgtttatcaacctctttctttttagatgttattttcttgacttgagttttgc

SEQ ID NO: 11510 - DNA, 1357 bp, Arabidopsis thaliana landsberg
attatttttaactgaaatttcttatattaattgtgctttaatgagaggattcaactgtttaaacgtaacatttactctagattttttacttgcatttaacttgtagtaattaatgtttataaaaattacgtaaaggcataattttatatttaaaccctaccattttccatccaagaaatggttttcattatgataatttattttcttgtaaaatagtatgatttttttatttgttactttaaatgatgaaaaacaaatcaaataaattgtaggaaaaatttgtgaagtagatgtatcaattaggtgatagtataagaagccactaaatttacgtcttgagtttagttctacttcacgtataaatttagtagcttctaaacaaaaaatagtggcttcaaatgataccgtgttatatagtaagtataaaatgtatatgatatttactaattttgcactttggaattatgttcaaactaattagtctttgtatatacttataattcacatattcgaacggttcatgccaaatattagagaattcgaccacatattaatcaacttgctttttattattcattgcaacaatggaagcgatagatcaatcctcatttaacgaaatacattttataataaaaacaccattattcttaaggatcagctggtcagactcaaagttgatagatggaaaatccgtgtttactcatcagagtcccaaatatatcatgttcttccttttgtctgatgcttgacgatgtagagagtgatctccatgctccagaactcactaatacacgttcatagaaatcggaaaaaggtattcttaaacgctattttttagatcacggagattgtttgtgaaaagacgttttacaaactagccaaagggaaattatgtattccttaaacgttttgacaattgacaaattttaattattctaatgtgtgacttttgaaaattttcagaactattcaaatttagaaagttttaaaagcttttcaatctagccatttcgtacattcatatctcattgaatttaacttcgattttcaatcgtaaatagaatatcttataatgttcattacaacaaattaattgactcctttatccagtcattccagtgaccgatttcaacgataaagtccacaggaaattgctcgaaagcactttttccaaattggagttttatgcacataaagacgcatgttcgcataagcagccacagacgcaggaacaggaggaggcgcaggggcaggtttaggcgtaagggcaggcgcacgaacaggtacaggagcagggacacgtgaagtttttctcgcattgttgatcttaatatttgtcacatcaacttgtccatct

SEQ ID NO: 11511 - DNA, 1232 bp, Arabidopsis thaliana landsberg
aaaaaaagaaaaagaagaagatcatattcatagttcgaaattcaaacaagataattccaagattttgtttggcaagcaatcgtagaataatatgatgttttgtttggggcaacaaagaacaaaagcagttgaactaaaataaaaagatgtttacggatgtttaacaacttttcatctctctccacttttccaaacacatctccactgctcacaacgtaggaaacgtgttccctgtcctttactctttctctgtcctaccatttttatttaatttctttcatctctatacgtttccacattcctagtttcttcaaaaataagtagtgacaattattgtgaaaatgttattggattttattgtaaatgtagattatagctatttgttataacttaaaccagagataataatactatttatacaaatacaataatcctaaattaaatatctagaatgtaaaactgagtgttgaaaacaatttacaatgcataaatacaaatgtatagaaatatatatcagctttcaaatcagtccgtgacagtccatgaaccttttaacagttgtataacagcattttgtcagaaaacaaggtcacaacatatacatacacgcacatagcttagagccatacgtaataatatcacacaaatatcaattatgatgttcaaagtcatatttaatatttgctcttctcctccaatgaggatggagatggtgcatgctgacgtggcgtctctctccataacaccttgcttcccgtcttctttgtcttcgtcctcacatcatcactataaccaacaacaacattgtatcatgtcggaagatcaacaccattcgatggatcagaccacttcatcggactacttttctttaaatatcgacaatgttcaccatctccgtagctactacacaagtcatggagaagaagacatgaaccctaatctaagtgattacagtaattgcaacaagaaagacacaacagtctatagaagctgtggacactcgtcaaaagcttcggtgtctagaggacattggagaccagctgaagatactaagctcaaagaactagtcgccgtctacggtccacaaaactggaacctcatatctgagaagctccaaggaagatccggtacgttaattctgtcacttgattaagctttttcaagattcacgttcttgatattttgggtgttaatgttgagcagggaaaagctgtaggcttcgatggtttaac

SEQ ID NO: 11512 - DNA, 1255 bp, Arabidopsis thaliana landsberg
gcttggcattcacatcaaaatcaatttaactcgttaataccttttttcaatttagtttctttttaaatatcaaagatagtaacgcgtttgtacttcttcacacatattttctataaaattaatatttgcatataagggagatgtgtgagaacggggaacggattactcctttttaagactactttaaggataaattggaaattaaatataaaaaaagtttagcttaagtgcgaatgtggaaataattaattgagccgccaaagtcaatcaaccgttgaaacaaaaaagctcaagaggaatttagtagtagtcaccgtaaagatataaaattattccgaataaaaacaatgacatcataactcaatatttatatcgtcacgtaatcattctctttagtatgtctctctctatatatacactggcaatggtccttaccataaatcacttcactctacaaaacacactttggttcatcaattgcttcaaaagacactcaactaactgactcaaaagaaaatcaaataagcccccaaaatattttgagaatcatgctaaagatggagattaacggtggggtcgctacacctactgcttccgccgtcgccaaggtgacagaaaccaccactcccgttaactctccttctcccacttcttcacctccgccgcctccttcgccgcaacagccgccacaaccaccggttgtactaagcccttgtgcggcttgcaagattttgcggcggcggtgcgccgataaatgtgttttggcaccgtactttcctcctacggacccggcgaagttcacaatcgctcaccgtgtctttggagctagcaacattattaagttcttgcaggtactaactttcttcttcttctttctctatccgttacacgtgtgtatttcatatgtctatgacaatatgtcattacccacgtgtgtacatgagtagatatttaacatcaaaattataaacgaggacaatttaacacaaaatatcgcttacttacactataaaagaatttaaacaacagaaaatatttagtaatgttttgcagtaattaataccaaggatttataaggatatctaatttaatagatattaagagaatgatgtttttgttctttgtattaaaataatatattttgaaaattttatatggaaaaaaatgaaatctggtttgcataatgtgaaagggaagttaaagtggttaaaagtctagatgctgcccaataatgggttcataactcatgtgagcg

SEQ ID NO: 11513 - DNA, 488 bp, Arabidopsis thaliana landsberg
cttctccaatctaacggatattgagagcattgatctttcgtttaacttgttgcggggaccgatacctcaagatctatccaagttagactatatggttgtattcaatgtgtcctacaacaacctctcaggctccattccaagtcacggaaaattttctacgttggatgaaaccaacttcattggtaatcttcttctctgtggttcagctataaacagaagttgtgatgataacagcactaccgagttccttgaatctgatgatcaaagcggggatgaggaaacaacaatcgatatggaaattttctactggagtcttgctgctacctatggtgtaacatggatcacatttattgtgtttctttgctttgattcaccttggcgccgagtatggtttcactttgttgatgctattatcagtcttttcaagtgtgtttgatttggtgtattttcattggtatttcaactatattccatgttggttcactttg

SEQ ID NO: 11514 - DNA, 584 bp, Arabidopsis thaliana landsberg
taaaatttcattattaataggaagttacataaacaaggagtcacatgtagtaaattgtaaatttataacggagatctcaacttaaacctagaaaggccaaacccttagaaatttttctagtcttttgcacttagcacctcttatttcggttctttttcctttttcgcttacacttacctttgcacagatgacttcccacgtacacattgacggaggggacacactttcccacacggacggtctcgcacgagagggtttttccctcatcttgtgggaggtactgcagggagcaggttacactacacctccccagtacacggtgcagctgttcgaggaacaccgggtacctcgctgtaggtgaggatgactctggagcctcatcccctacagctagggtggcgttcactggactcagaatctttcggtttccgagccgatgacactacagaggccacagccatgcgcgtactgacgactttctgtggaattaccccctggagatgtcgaccaccccatcggcttgttctcgctgagaaggcagatgcctgatgtggaaggactaggttgatacgcccaagatgtgt

SEQ ID NO: 11515 - DNA, 574 bp, Arabidopsis thaliana landsberg
attttttggaaataaaagaactattctcaagattcagatttatctcaagtttgcaaagaattatgatggcataatgagtggagactttggcggaagattttgactttactgaagaatcttggcagaagactttgactagttttattttaaatagactttaagtcaactctatacttaaactcaaagggatcaaggaatctttggcgtagagctttgacaataggccttctcatctattatgtagtttggctaagtttcaagtgtttttttttattcaataccaaaaagactatttaaatccagcgaaaacattttcacaaagagattccaaatatatagtgcacaacaaacttgatttacatagtgtaaatacaaaagaaatgatttaccattgaaaacaccaaatcaaacacatttgagaaaactgacaaacacattaacaaggcgaaaccatgcttggcgccaaggtgaatcaaagcaaagaaacacaataaatgccatccatgttataccgtatgtggcgaagaggctccaataaaatgtctccacatcgattgctggttcgtcatcacca

SEQ ID NO: 11516 - DNA, 827 bp, Arabidopsis thaliana landsberg
acgaatgaggagctgacaatgcatctaacttagacaatgttaaacactaaataaaacaaccaatattaacaaaacaaatacaacttattttttaaagaaacacattttgattcttttaaaagaagtttaaacattataaacatttgaacttttttttttttggacaacacatttgaactttatactacagtttaaatcctaaaattgaaggatttaggtagatattaatacatgattgtatattcgggtgaaattaacaatcaattacacttatacaatcttaaacactagacaaaataaacaatattaacaaaacaaatacaacttaaaattttaaaattttagttacaaattatcgtcttgcggtgtatcatacatttaaattaaacaaaataatagcatatatttatatatcatcttaaaaacaaaaatgtaaattttgaaaataaaaatataggcttgcggtataccgcgagttactatatagtataacacataatcatatatgttaaaaataacaaattttaaaaaacaaatcgtcttgcagtatacggtatacagggtcaatccgtagtttgtctgtacaaaattggttctctatttcctattacaatcatttttttctttctttgggatgaaatataaagattggaggaaattaggaagatgaatatctccttctagatacatattttctacaaggtagtatcctatcactattgtttaaaagaggtgtgtttaaatagggaattgtggtggaacaatagggagtttgccattaaaccaaactatcatcatttataggcaaatatgatttgatttggttt

SEQ ID NO: 11517 - DNA, 427 bp, Arabidopsis thaliana landsberg
tcgactctagagctagaggatccacttcattaatcttatgtattttgcagaagtcagtaagtttctcgtccgtgcctcagtgtttgttatcatccctggagtttgtagagataaaaatcagcagattcggcataatctctcttggaattcgaatagcaaggttctttgtagagaactcagtagttctcaagaaacttgttgtgcattcgagccgtcccatgcgtaagaaaagtttggttgccttcgagaatctccttgcgttaccgaggcgatctagcatgtgtcaaatcatatctgttgttgacggttataaagacttttaggcagctctttgataagaccaaaactagcatttttagatattgggactgggatttagatttttgtgggaactacatttggatgttatgagtgatatttatattta

SEQ ID NO: 11518 - DNA, 1474 bp, Arabidopsis thaliana landsberg
acggttcatcctatagattgtcatgtaatctgcttatgaatttttcatggtgaaatcattgggaaaccggcaggcgatctgatggacacatttcgttttggatgatcatagtttctgagataggagaccaatacaggcctgattatggcaaattcctttagaaacgattttatattcgttttctgtagcggctgccccttgcaactattaaaggttttttttgcaaaattataaacaaaaggtttcctgtagaaaagaagattgtatttcttttgtttactagtcgtcaactttgcaagtataattttgaagggaccaaaccaaatcaaggattttatttgacttttgtttatatatgtattgtaactgtaattgtaattgtatatcaacccaacatgctaatactataacttagatggagttgaagcgggtacgtgtagtagctgtccttttgatcttgcctcgtctatatattgcatgagagaacattttccataagaaagtaatcaaacacatttggtgataatgacacgtctacgccttctttcatggatttcaatcacgagctttgtttgtctcgtttttgctcaagaccaatcaggtaaattggtactcagatgtctctgcttttctaaacacttctatatgttggttattgctaaggtttgtgatttcaatacaggttttattagtatcgattgtgggataccagatgattcaagctacactgatgagaaaacaaacatgaaatacgtttcggatttgggttttgttgagtctggaacaagtcatagcatagtctctgaccttcaaacaacttctcttgaaaggcagttccaaaacgtaagaagcttccctgaaggtaagagaaactgttacgacataaggcctcagcaagggaaaggtttcaagtatctgattagaactcgttttatgtacgggaactatgatggttttaagaaaacacctgagtttgatctctatattggagccaatctttgggaatctgttgttcttatcaatgaaacggctataatgaccaaagaaatcatttatacacctccatcagaccatattcatgtgtgtcttgttgataaaaacagaggaactccttttctctctgtcttggaaataagatttttgaagaacgatacatatgacactccatatgaagcgcttatgcttggtcgaagatgggatttgggcacagcgaccaatcttcaaatcaggtgagaacatgtcttattcttttgttgttatattctccctgctaaatgtaatcgttttgtaggtacaaagatgatttctatgatcgcatatggatgccttataagtctccgtaccagaaaactttgaatacatccctcaccatcgatgaaactaaccacaacggtttcagacctgctagtatagtcatgagatctgcgatagcacctggaaacgaaagcaatccctgaagtttagtgacaccaga

SEQ ID NO: 11519 - DNA, 537 bp, Arabidopsis thaliana landsberg
  unsure (1)..(537): unsure at all n locations
agaaaaccttagtgattggtctgtaccatgaaggaaagttgtattcaagatgcaacttactatatttctattatgtaactgcatattcatgacatagcataaacattcatgtacatgtattatcatgtatagaacacgaggaagaaaccatagtggaggaagaggttgtctcccagactgagaatctccaacggagaacaacttttacttcgatatctatggtgtggaaatagagcctcctgcagcacaaggaaagccccggtgcattatccgttttccttgttgttttaaaaacttttatcaccttatatgatgcattaggtgatcagaattgtgtgataaacagttgatgcatttccttccttggaaaattggttaccatttcttgtttgcctattttattgaaacaagtttctaatgcttaatctgctatagaaaacaaaaggttttgtnttggaaaaggtgatgcttcacatgggatgggaatcttctagaagaaagactgatgatggtggatccatcacggcccgtgatggg

SEQ ID NO: 11520 - DNA, 1321 bp, Arabidopsis thaliana landsberg
ggataggcctaggattagcgatttaccgttttttaatgtacatttcttctataaacactatcttctaataaatagtccaagtttgctaaatatgccaagttggacatgtgttatgtccggattcattccgatattaaaagtcaaccttttacgtgccaagtgatgaacactatttatcgcatttttaatttgaaaaacaattcatttttgattgacaattttgaatttcttgcattttattacgattgcctcacttttgggtataaaaataataatatgacatactggtgggataaaataaatagtacgttttcttacacactataaattaaatatgttcgtaaacttactttgaaccacaatgtcaactaagcttgctaacatcatttttcctctagaacttgtctcccatatatgtttctagcccatttctcgtcttgatagtcaaaggacatttacacatagcacaagtatttctttccaaacttgtatgcaaatattcaaacttttctccctttctcttaattattttccaaaaattgatatgtaaaagaaagacaaatataacttggtgagatagtctttattttttcagctaacaaatacataatgctattaccacttttcacaagtacctaaaacaaaaacaaatctagaggatatgggaaagaagctcctttgaataaatatttcaataaaaataatactactacatctacaaaaacataggaaaaataattgcatttgtcatctttagttttttatttcaccaaattgtcttaaattaattaattccgtaataaataccttgtattagaattgcagttgactaaaccctttattgattcatatataagtataaaccaaacaataaatgagcataaaatttctaacgttccaaacaaaaataaaccccaaaactttcaaaaggttacaaacaaccccctaagtaaagaaaatgacgatcaatttagtccctcttctcctctccctaatcaccatcttcaccatcttcaatccatccgcccttgcagaccagagtcaaatccgcagcacaacaagccaatggctccatttctcggaggacctcagccaatcaactattgaagtctccatccccaccataatcgccgccgttctctcgttcttcgccgcctctatctccagcgccggaggaatcggcggcggtggactcttcctctcgataatgacaatcatcgccggtctcgaaatgaaaacagcttcaagcttctcagcgttcatggtaaccggcgtctctttcgctaacgtgggatgcaatcttttcctgagaaaccctaaa

SEQ ID NO: 11521 - DNA, 1112 bp, Arabidopsis thaliana landsberg
gcaaaaataaataattgttattgacacaaaacttacaacacgaaagttggagccctcctcattgccaccatgctgtttagacaggactagagctccattctccaaaaaaccaaactgaatagacattatgacttcgtcgaaagcaacatatatgtgagagatcttgcgtccctcgtaatcccaactatcgtcacccatcacctcttctccaacaccgtcgtcccaataagtatactcacatgtcgatttttttcccactgatcctgctcttatcatcgctatataagaagcaggcacagagtacaatagttttaagtggaaggagagatatagataggcgaaaggacgattatataggagactgtcttgtccaaaactcgaagagtcgtcataactttcatttatggattccattgggagaaagctaaacaagtttccaggtacattaaacaaaacgctcgaaaattgtgctcaagaagaagactcttcgtttgaccaaaacctcttatgcctttattaataacaaacaccaaattgcgttgcgaattgtaaatatacacagtagacgtagagatttctgcagaaacgtctattagaagaaaaacaatcagcaataaatcaaagaagaggttccttgttggtcacgaaattacagaagaaaatcaaagctcgggctgcatttgctcgcactcttctcgaatcgactggaaaagctgggtcgagaggtaacgttccccgaagctcgggaacacaacctgaaaaccaagattcagcaactcacatatcaaactatacatatgatgaatctgttatattttttactccatactaagctaaaatcctttcactgattccctacgttgggctatagtaattgaataataagctcctctcttgttctttgcaatgactagggtttggtgtggcagagagattaagctcctctcttgttctttgcaatgactagggtttggtgtggcagagagattaaggcaacgtaaacgttcattagacgtataaaccaaaccaactactcaaatacaaaagttaaaataagtagttagactctaaaaggacccagggtcatgattagataacttaagaactctttt

SEQ ID NO: 11522 - DNA, 1098 bp, Arabidopsis thaliana landsberg
catatcccacatagaattgcaaatcattttggtaccatctaaaactctaatttttcaacaaccgatataaataaacacaaggatgtgggaatagtctataagactataacgtaactataaatgtaagagaaaaaaacaaagtacctataatatcaaaataagcgcaaggacaacaataactcagcatatatatacctcaattgaaaatactgagcttacatcacttacatcaaatacatctatagaaacatgtgagtgtgactatacagaaaatgtatacattccgactataacaaaagaaaacgtcataataatgcctaagaaaaatactccattttaagattgaactcgatatttctcgaaccatttataggattgaacacaactcatcagataataaagaaacaaatatactcctatataaacaaacaaaaactcactcttcctatatagtatatagattcaaattaaaaaaaaaaaaaggcaagacatcataataacactgtgtgggcttcacaaacataaaaaggaagagtaaattctccttttcattaccatattctcctatgacttcaatctacctgtaccttgtagggagtaatgggtcctctttctttatgaaataatttacctttcctagatgatgtaaacgtctcaaacgccaccactactctgaaatctcacatttgtcaacgccgttgcaatttaaaaagatgatgagttcctacaatgaatgtatcaatcggattagtcttgatcaagatcaaagtttgacagataaatcaaaggagacagcaaaattcaaatgaattttacttaatcaagaacaagtaacgctcacagtcacagataacaaaaaaggttaaagtttcgagataatacctagttttcttcaaacttagatcttagtagtattcaccgaatgatattgatcactatctttatatatcaaatcatgaggggttttacaaagaaaccctaacagatctctattggcagtatgcccacctcctcttacaaaacacaccgtagatacgtacacttattacacataaatatagagagaggaggtggacagaatgccaaagatactgagag

SEQ ID NO: 11523 - DNA, 1042 bp, Arabidopsis thaliana landsberg
atggaacccattatttaaacccgtttgattcatactattattacgaatcgtttagattggttcgtaaaaaaatgataatatccagtttaaattaaaagtctatcttaccatcattaccaagacagacatgtcccgttcagtacaacagttcaatcactgggatacgaatctaaagacaatgtcagtaactttatcttgacggagacgtgaatgagataaaggctatgggataattaatatccaagacaagtggaaacggaaaagttccgaaatattatccagtgacatacttaactccatggttgcaaacataaagtacctggtccattttctaatctttatttctgaattaaacttgactaatgttgaagattttgctgattcccattatcttttcccctgtttttgtttccaacatcacattatcaaaaaatctggaaccaaaataaaccacacacacaattaaaagtagtgttcactggtattcagatcatacctaacgcatcaatttcttgcaatgaagcttctagattctgttcttttaccttgagctccgactgaaaccgccttacatcggttaaagtatccacaatactctgtttcacctttttaacgtgatcagatattgagcaaggttgcttttgctgcaagtttcccggatcagccctagtgctgcgagatggccctccttcctcagtaacttgagctctcttttcgacccgattatcagtttgttcttcagccagtggtgcttgatccgtcattcggggtttcctatccgcagtcttatggccatcagatgatgctgcttgtttcacctgaacacaattcgttttaaaacaacgatttcacaatagcaaaagccaagaacaaagactgtaactgattttatgttaacttggaacagatcttgagaattggagatggtcctctcgaataactccaatgtgaagggatcacaacattctttacgccattagctacaaagaaatcttgacaacctctaatgtaaaactgatcgcgtcccttgatgttactagat

SEQ ID NO: 11524 - DNA, 825 bp, Arabidopsis thaliana landsberg
gaccataaaatagatatgagaatgaaaccattgcattgtgtaaaaatatttttttgcggactcaacgcgaacataccggaagagtagaccaacctcctagagtgaaaacagagtctactagatcctttgcagacatgacttgataatttacatccgtttcaccattagcatacctacaatttcatcaatgtggacatcaatataagcacaattccaacaaaagttctcaaactcttacaccaaaaccagagtacaataaaatttggtaaatttactcacataagccttgaaaatggtgaaaacaaggatcaacaaagagataaaaagaggcaggcctaactggagatgcggagaccagaggaaagcaggaactgtggaaggtgaagctaatccaaaatccacgagagacgcaaactcaagaactaccaacaactacgccagtagagcagaggtaaaacgtcaccgtttgctataatttacccacaaaaccgatgtaggagaaccggtctgcgtttaacggttggattagctaagagaaccggtctgataatctcttgttaacggtctttgtagaggatgtgaactttatctaagtgtgttcaaaggcttcatattttgagactttatattttgattttcaacttggatacactagctagatgaaaacaatgatgatcctcttctctgccttttacgtgcgctttattatttctgtgctagatgcaaagaacaatatcccctagcaatgaatcttttttaggatatacagaagacagtacgtattgataattattaatggccagcttcatcaaccagcaatgaaga

SEQ ID NO: 11525 - DNA, 1474 bp, Arabidopsis thaliana landsberg
agggaacccatttttcagttaatctacggatattctataggctttttagagaatatacctccacgagtggggctctgagaatggagaacattgtactggaatatacttaccttcaaacctccacatatttctttctcaaacaagtccacctgaatattctccagactgccattaacatagaagacaaaaattatgacagcaaaaatatacagagccgactcttggttgaatgtgaatggctcacctttgcaaagaacatttatactctgtagcctgggaatcgaaaacttgtgtgatattgagtaattctgttgtctttttaatacacttggttacaaaaatgtattctacatcctccaaaaagcgtagcctaaccacaaaataagagaaggttcaggaacatgggcagtggatacaaaaaatatatacaaagccgaaccagaaaaagactaacctcacaaattgaagtcctagaccaactgatacgtcttgtaaatccttgatttcatgggaacacagtacacttaaggtactccctgcagtcacacatcgccattaagaactcagcatcagcaaaatttatgacgtgctagcaaggaagacagctgattagtctaaccttcataatcagtagtcacacccacgagtagcacgtacaacttgtcctggctactcagcagcaacactgcttccctgtattcagaatattgttcgaagtgaaaagaatagatagcatcttgatatgaagtggcttcccaacctagctatgcagttgtatatatataaccaaaatgcacataggattttccacacatcacccactttaaggaagcccaaagcatcttatctaatggtatcgtgtagttctgcaatttaattgtatactattatcaaagcctagccatactagaaaacgatgaaatctcttttccctcagctactcagaatcagatatcataggtaatgtacaaaactttttgtagggactcgcattactatcctttacctataaactacgaccatgcaagtggaacaataactcaccgttgcttgtatgtggaacctttctgtagtataagatcacaattcatgtacgtcctacaagtttcttgagagctggaaactgacagttttgctgaaaaatattcctctactccaagtgttctatcagtccccaaaaatttgatactcctattactactactactacaaacccttgacagggtattctcccaaaaattatcagaaatacacacatcttcaccagaatcactgatatctgcatcactcctgagagatatctctccattggtaatgcaactttcctctttctggaaggaaacaaatctttttataggttttccttttctcaaccaaacggtctgtctggttaacaccatgtttaccattatgcaatccagaggaaaagtagtgggaggttccttcattgattcatctggtctcaaagttttta

SEQ ID NO: 11526 - DNA, 1623 bp, Arabidopsis thaliana landsberg
  unsure (1)..(1623): unsure at all n locations
tattttttttttttaagaaaagaaagtggtgaagtgtttaactagtcataatattatagatccaacttcatttcaatatatcacgagtgcattggcggctgcaaaacatatttttgaaaagagcanaanaaaaaatcaaggatcataaataatataggtcttggctttttaattctaccaatagatttacagtggacaattaaagaaaaaaaatcacgaaattatcatggtttggctaattgagataaaattcatacgttttccatcaataatcgtacatcatccatttcacaacaataattattcctaaaatgtcgttattttcataacattggttagatgttctaataagctactattatatataacttcacgtcaatatatggctgattttggcatctaaaatttctgtaaaatttagatattcgcgtatactttttttgggattttcttcttagccgtattataactgcaactcatatcacatacgtggatgataaaatattcgagtttaatatctcctccgtatgtagatttgatatgatccataatattaaagatgaaaatgaacttgactgattattcagcgcattcattttattttcccttccaggatagcgaaatccgccacgtggcattactacatccattgctttttttaacataaatacttaagtcgcaattcttctaaattttggaggcttatgatattggtagggttctcatattcacttgcaaaagcatcttcttctttctaattatctttctctttttatcttattttcattttattcatatactttttgaaaagaaaagtcgaatcacatactttcttctctctatttctcattctctcttcttcatcatattactcattttatagaacagcaaaaccctagatttcctgttcaagctcaagaccgtacaaaactttggaactcatgtaagaaacagtacacgtttttttttttgtttcttcttcagtccggattataagaattttgtcgattgaagaaaacaggctaaattaaaccctaattttctctcttagacaattcctactttctctccatttttctggattcgctctcgttttaaaaggattcagaaattaactatattatttgaattcttttgccataattcccttatgttttctgctaatggatatacatttggtcttctttctgtattagatataaagatctcgagaatagcattatgaatatcgtctcttggaaagatgcaaacgacgaagttgcaggcggcgctacgacaagacgtgaaagagaagtaaaagaggatcaagaagaaaccgaagtcagagccaccagtggcaaaaccgtaattaaaaagcagcctacatcgatctcttcttcttcttcttcgtggatgaaatccaaggatccgaggattgttagggtttcacgcgcctttggaggcaaagaccgtcacagcaaagtgtgtacgttacgtggactacgtgacagacgcgtgagattatcagtcccaacggctattcagctctacgatcttcaagaacggctcggtgttgaccagcctagcaaagccgttgactggttgcttgatgcagctaaagaggagatcgacgagctgcctccg

SEQ ID NO: 11527 - DNA, 2051 bp, Arabidopsis thaliana landsberg
ttttgttggtttttagggtttagaatacattaactagcttacaagatttggggtttctttgaaaagtttgttttattggattttggtgctccatgatttttagggtttgatgtatattaaagacaaactactaagattatctactttctttacttcttgctgagacattaataagctttatcatgaaccaaagaacaatagctttgttctcgaaatggggtccttggtagaacgcgttttgttatttttctgaatctcaacttttttttggttctgttagttttattgatatatacggtgatgacattccttgatgttcttagatctgttcagatggaaagggatgagtgaatttaattactttaatgtagcaaatcgactgctatttctatgcctctttgagatctatgaatggtaaaagaacaaaagcttaggttttcttaatatagttaattagtcgttgtaatttttgtttacttcgtttaaatcgtaattaaaaataacattactcaatagatgtgtgtgttagtgtaatgactaatatacatgatatgctcaatcgaattatttgacataatcaaaacagtttcctttcttcttttttagtccgtaatagatactcaattactcattaattacttttttggttaagcttactttacagatgtgacttttttcaggattttcgaaacatggactgaacattagggaaattaaacttcaaggattagaaatttctgcacaagttgcactattttaaaactctctgacatgttatatgtttgaataaatgaatggttacctgcttgactatatagtctataagttatatatgtggtatgcatactttggaaaacacattagatatttgagaatgatatagttagaatcataaatcagtggtttagaaaacagagcaatgatagtaatcagttgaattgtgtgattactataattagatatactctctcatagtcatagatatagaaagagctgggaaatgttagatgaatatagaagaggattccggagacaggaaatgtttcctactaattcatgaaaacgtactgctagtagataaacagaaccgaagaggaatttcagtaaatatacatctgttcagacaagcttagaattaattatattttgttctaatacgttttccaatgctgagctttgtttttggagagtttgttatatatgaatatggggaccttcctgcggagagaaaaactaaagctctgtaaataacttcgctttttgtgtttcaaggggaatataatggaaaaggaagatggtggtggtgatgttggcgcgggaggaattggtggtatcggtgcgggaggcggaaaaggcaagggaaagaatgtaccaaatgaactcaaagctgaagcagaagctcgccgtaaagctgaagcagaagctcgccagaagctcgccagaaagctcaacaagatcttccacaagttgatgaacatccactaggggtaaattattatattctaatttatagttcttgtttgtagtttagcttttacattcaccattggcctttgctacatttttattaggtctttggtgacggcagctatcttatcaaggattggcgtcagtcacacagagctttacttagtaaaattatcgagcagatacatggtatgatacgtcaattccaacttgaaacttttgtgcatagttagttatgtgaattccaagtgatggcttgagtgttgtggtttatatatgtatttgaatttaaaatctagagacactgtgatttaggaaattatatttggttaggattgctaagattcaattttattttcaagtgcagctatttgttgggctctagttttgggaaaaatattggagtttacctacaacatgaatcgccctattgctcaacacatgtttctggacatagatagttttgctgaaaaggtcaagttgaaagcagacgagattaatgctcagaagaaagtgataactgaggatatggctgttggttctatgaagaaagcattcgaccatgtatttctcaaaggaatcga

SEQ ID NO: 11528 - DNA, 1064 bp, Arabidopsis thaliana landsberg
cataaacagccttgttcacaacaccaaattggtctaattcataatcacgaactttaagtttaatctcatggactccattcattctgccatatggaaatttcaataagactatgaatcagaaatattagatataactatgccctcttggccattatagactctacaaatcttgatgcctagtccaagtgtcggttaccaaaacaaaaattacaccactaaagaaatgaaattagaaagatctttcggtaccctttgcctccttgctgtttgaaacatgagagaggtttgaaggtctttgtgctccggagaggtaggataagcggtcgactcgaaaaacagggaaacaccacgtgcatagccggagccgctgtgccggtagctttaagcattgcacttcttcgagtgacgcgcgatgctaagatgctcaaaattagtttgacaagtttttgttcggtttgtgaaaataactcacaccattatatattatacttcatgcattttcaatcttaaattttggtggttgaactctttaattgttttttgttttcaatctcaatcaagacggatgcatgtctatcttgtcttttctagaattaaatgagaaaaagtttcagaaaactttaaatttataaataattatatggtttgtttgctaaccagtggtggaggtacatggagaggacggggtcattttacccccataaattttaaattttattttgtttcaagcttatttaattagtaattgaattatttggacaaatacaatgcatatgcacctaaagaagctctaaatgaatgaaaatgcatgaaagctgaagcaaaccaacatatgaatattaacaacttccacgttccaccatgcaaaattttctagcacttactctctgttcatttctccaatacctctgcgactagttccgttcaccttgtattaattttccgtcagctacttttgtgaggggcactcttgatcggcttagacttttagcacttagtccctattctttttcgttcgaatatactaacttgctttgcttgacaccacacttgagtagactttt

SEQ ID NO: 11529 - DNA, 1104 bp, Arabidopsis thaliana landsberg
ccccaattcccaatggttccctcagtcatatggtaagctttcatatatttaattcagatccgttactatgaccagcatgctgcttctttcacacaaatccatgaagtaaatttctaagaatgtctttgttactgtcattaggtgaatgtttcatctatggacctgggagttgtgccggagtcaacaacgagtgacgcaacagtatcaaacccaagatcgcccaaagcggtaacagaccaaccaccttaccctccagctcagatgctcagtccaagggacagagaagctagagtcctgagatacagagagaagaagaagatgaggaaatttgagaagacgataagatatgcttcaaggaaagcgtatgcagagaaaagaccacggatcaagggccggtttgcaaagaagaaagatgtcgatgaagaggcaaaccaagctttctccacaatgataacatttgacaccggatatggaattgttccatcattctgatgctgctatggcaaaactagactgcatgcttgtaaattacttctgttttgaaattcctgcaagttattaccacggttttatgcatatagggtctgtagtttactagttttgcctaactagtacgagttaattagatatacactcatacttagctgctgtaagttaatacaaattttgcccacttggtagaagtcctcttatctatgaaatactgccctacagtctaaattcaaactgatgctacaaagagatatgcattagtatagctagctgtaccaagaacagacaacacgtaactcaccttgcctaagttcaaagttaatgattcctttcttggtgacactttccacatcactttatcacgtagaagataaatgattccacttatgccgccccaaagacaatttcgcacatccctgagaaaagaaagttgtactcaatatgattttataccaaaagtagattacagagacaagtgtaaacatgtaaaactccaataaaatcacacactgaatagtcaggtaacaaataaccaagaatcctgagtgaacaatgctaataggtacaatcacatcaacgcatattcttgtactgattaggtgattagcattg

SEQ ID NO: 11530 - DNA, 970 bp, Arabidopsis thaliana landsberg
caaaatgttttgtctttagacaaatctttggtcgacgtcaggacaagaaaaaaaaaagaaaacaagaattggtttcgtagagatattatcatattcatacgcataaatatatctaaacaattaaagaaacaataatataaatgtaaaacaaaagagagaatcatgtgcgtaagaggaggaagaaggaatgggaatgtgagatttaggtgagatccagccaaacatgacttcctcttttccctggaaattaaaaaagaagttatcactctcatttttaatattaataaaattaagaaaattctctaacgattttaagttattattttatatgaattgatatacctttttacatcttctacataaacatagactatagtcttcataattttgtaaactatcaatagctaagtctaattaattttaggatcatttgcaaaactaaccatatttgataaactattgaagtatataggactatatatttacatgaatttgcaagagattcattaaaatcttcattccaggactctaaaattatagatcatttactaaacataattcttattccacggaacaaaattgaaccaaagacttacaattccaatagtctatagtctaagaactaacctaatctgttactcaacaattgcaggcatcgatcgattaggtacggttagattgaaagatacatcattactccacttttgtagattattgggtcgagtctgtctaaatctagggttggagatttaaaggttttttttaagcttttgacgagccctacttcttgagaaatcagcaaatagtgtatgacaaactacacacatgaaataaaatacagtatagaacagtaaattcttttaaaaagataccctaaagtcgtcactttaactaatcgatcatgaaatcctccttaaaaactttgtaaatccctttaaaacacttgtaaacttttttaaaatcctttaaa

SEQ ID NO: 11531 - DNA, 775 bp, Arabidopsis thaliana landsberg
agccttgtgatcagtatggtaccatggtctactacggaccaccaggtaataaggcatgggtttagaaggagtctttgactattgacgaatcaaaagtcttacaagacacaatccgacagaaacaaattagaaaaagaagaaaaagacaacagagtacgaccgttcgattaatatcatgcatgtacttatacaaccctacacttccagtaatttttggtaactttaccaagtcaaacgcagtataatctcttatgtaactactttgtgatacttgaggttatggatattttcgaatatatatgtctatttgagttaaaataaagctacggcctacgtcacatgtcatttaaaaagaaactaggttgaaattctgtgctatactaaactaaaagatgatacaagaatcatttacttttataagcaaattgaaaatctcaaaatacaagatttcatataccattttaagtgcatataggtagactaatagaaaagcaggtgaaactctatgagcctataatatataaactttgtgattctttatccacaaaatattaattccataggccatagacactttagatagtgtgatacaaaatgagcaaaccctaaatcctattgatttaaggtttctgatcgtacaacttcggtcaagttcatagaaaaactagggaaaagattcgtaaacaataatatttttctctaaaaatcataaacaaattctaaaaaagagagagtattggatcgcactttgtatactttagggttgacagggtca

SEQ ID NO: 11532 - DNA, 1129 bp, Arabidopsis thaliana landsberg
tgtcaaccaagtggatagtgaaaagtgaaaacgatcctatcatcagtatatttgtcaaatggggttatgtggctagttcgaatttgtgagcttccctaaaaagtatcacattcttactgggcttggaggttcaaattgggcctaagtgatttcataggagcccacatataagctatgaatttctctacttaacaaatttcaaataacagagaaaaataaaataaaaaattggaacgagactgttgttgttgtggtctcaatcctatccacagatggttaatgttttttctttatctgctctgtttttcaatggcttctatagttcctcttctccgtactctcttaactttcaaaacctcacgaaatcatgcttttaaacatttcttcttctccaatttctcatcgaattcctcatttcctctctgatttcaacaatcccacttcaaatttccctccgaaatccaaaacccatctcccaaaatctaatctctccactttatcgaaccatagcctctacggcaccaagaacagagctttctataaaaacaagagaaacccttataacagaacacaagctctcggtcgattcgatttcggaagtctcgaatcagttctcgaagcttccgctgttctcactgcgatcatcgtcgtacacgagaccggtcactttttagctgcttctcttcaaggtatccgtgtgagtaaattcgcgatagggtttggtccgattctagctaaattcaattccaacaatgtcgaatactctcttagggcctttccattaggtggatttgttggattccctgataatgatcccgacagtgatatccctgtagacgacataaatcttctcaagaatcgaccgattttggatagagtgagtgttgtttcagctgtaattgtcgctaacgttatcttggcatacgctataatctttactcaagtggtatctgttggatttccagttcaagaatcttttcctggagttcttgttccggatgttaagtctttatgaaaagcatgctcgtgatgaattgcttccgggaaatgttataaaaaaaaaaggatggtgctgagctatcggactccggttctgattcggtttataaaggtgttgctttatggaagg

SEQ ID NO: 11533 - DNA, 751 bp, Arabidopsis thaliana landsberg
  unsure (1)..(751): unsure at all n locations
cagatctaaaaattattataaaacgttagcttttttttctagtccttgtcaatttttagggggagtttaagatatgactcaaactaaaatagaacagctagacaaaattgagagagaaaatgacgaaggaagaagtagaggaggagcctctaagcccgatggctcggttgttccagtcaccggggatagaaaattgcattatcacgatgattggtttcaaagccaagattaatcctgacatcattctagatgacttgaagcataacgtttccaagcatcctcgtttctgtagtaaattggtaattgccacacatacaaattgtacctagttttatttaggatttaacattttttttgtatgcattgtgtaaaattttgaagtcagatgatggtgagagatggatgaagaccaaagtcaatgtaggagaccatgtatttgtaccagacatagacctacaagagattaacaaagatggagatggcttcgtcgatgactatgtctcgcgtctaacattgagtcctctcgataaatcgaaaccattgtgggatattcatatcctcaatgtcaaaacatctgatgcagaagcggtcggtgtaatgagatgtcatcattctttggcagatggaatgtccttgatgtcactcttggtggcatgtacccnaaaaacatcaaatcttgagtcatttgctaccattgctgccataaaaccgcgtgaacaaatgatgtcgcatcgctttgggaacaaaggct

SEQ ID NO: 11534 - DNA, 741 bp, Arabidopsis thaliana landsberg
gtcggttcatatgccactatcgagttaaattttgttttatgatcttctcatttcttttacaaaaataaaaaaacttttcattttcttttaggagctattattagtgggggtgtttgtaacatcctggtttcaagaatatggtaattcatgcatagatgtttaaaagaattgttttgatcatctatgtcaacaaagtacacatatatttccggtcaaatatccaaaaagaactccacaattaaatgtgcttatgctggagcaatttcagaataggtgatattcggagaagtgattgtcagaaccgtgtgagtgaggacaaaatatagagaaagatcatgtagtgatttgtaggttcattaaacaagcctttaaagccttctgatagtggaccggtcgtccgatacggatgagcccacagaccaagagagaatgtgggacccactaagtatgatggtcggggtgttacaatcccaatggaaatgttcgcataagatgctgttaagacaagtatattgtctaaacgatggaagagggtggaaatcccttagtccagtgattaaccaagggttcattaatagttatacactatgtttggggttcgagtttcagagaacgcaatttcttgcaaattaatggtgcaaagcttatcggaggtctagaatatcgcatgcagagccgttcgtagtggtcttaagtgcggggagagcatgtccatcgcagggatgtcgtacatgcagatcc

SEQ ID NO: 11535 - DNA, 849 bp, Arabidopsis thaliana landsberg
gatgcagatttttatgtgatcctccaaaggaaacgcatgaagaattgcttcacacaaaaccaaaaccaacttatcataacatgaatttacttttcataaatagctattgatccggtgaggcatttcatcaaacacgtggttggcatcaacaattacaagctctagattcttcaaaaacactcaactattaattcataaacctggtaatagtagcaaagcacttctaatcattcaaattggaactaatttacctcatagcaaatatgatcacaaaatccaatcgtcacaaacgcttcatatgaattcaacaaagaaagtaaccactgtggagtaaacccatgaacaaattcgtcttctcattgcaattacactttcttagagaaagtgattgaaacaatcacagagacacaaagagagacagagagagacaaagatacaaatagacaaagagagacaacgagaagaacgcaatgtgagagagagaaatcgcaagagagatagagagaaacttgatacactaaggctcagagatgatgaagagattgtgagaagagaaagagatttgcgacagaaagaaaaaaacatgaaaaagagaaaattgttttgtttagtaatccaatggaatcatgccacgtaagcgtaccttacagaccaaaaaacacctaatgcaaggtgcgcaccttgcttaatatctcaattctgctttattttttggtttgttttctttaggattcttttaagaaactcataaggttcccccaatggacttgctcttacacacatgatttatttagatacaactacattaatgtttgattaagttgtgtgactcaccatatactcatcttt

SEQ ID NO: 11536 - DNA, 921 bp, Arabidopsis thaliana landsberg
ttccagagtcactgtcagatgctcattatcttcataatttggttggagacacagagattagaaaaggagaaggaatgcaattagatcagcttattcctaatgcatcacttagtagccgagatacgaatgctcgcatccaaccttttgttcttgatgaacttaaggaggcttttgagcttaatgatacagctcctgttgaattgcctccagtaagaatattgctctctctgtttagattttaacttcctgtaacatctagatcttttactaaccatgataagttgaattacttccaagtatcttgtgatgatagttgagctaggtttgagaatatgagatctcctgttcttatttcaggcagagaagggagctcctaccactgtatcaaaatcaaaaagtgagtcaaaagataaggataggaaacatagaaaacataaagacaagaaggagaaagatagggaacataagaagcacaagcacaagcataaagataggagcaaagataaggataaagacaaggatcgagacaaaaagaaggaaaaaagtggacaccatgataaggtaatagaactgtctgctcttgttggtacctaggccgtctatatatgtatattttggattcttaaattcgatagaattgacgtggtatacgctatcactttactttcagaaaaggaagaacaatgggactgaagatgctgatgacgttcagaggcacaaaaagagtaaggtaatatactaatggcaatggaggcatctccttctttttagtgaagctgaatttagaagtttctggttactcgcacattggtgttgctctgcaaattttatttttgtcggccctaaaattaacttttttgcagcataagagctcaaagcttgatgagatgggagcgatgtaggttggaggctgaagccgtg

SEQ ID NO: 11537 - DNA, 1256 bp, Arabidopsis thaliana landsberg
  unsure (1)..(1256): unsure at all n locations
ccccgcaggattaaagcttttgactcccgcatcaagaagcacaaatgcaaacatgccatccaacatgtcgactaatttttttacatgttcttcgtactacaatattatgaaaatgtaaatcaaactgatagaagtctgaacacagtaactgttcaactaccataaggtaataaagattgaggtgaccttattggacttaaacttacacacaagaaaaagaaacagaaaacacaacatctaaagaagccatgaagtcaaatctactttcacttagtgagtacttacaagatgggcaatcacttcacaatcactcccagtacggaattggtgagacttcaaattttcacgcaaatccttgtggttgtaaatctctccattgacctgaaagcaaggaaagagtccaaacaaaaatactccttattcctaaatcacatgaatcctcataaagtttgaggtttgactcatgatttcttttcatcatgtcaatgatcattgaaaaaggaatcgatattcactaatcccagttgctccaagcaattgagattaggacacaagtagaaaaattaccgtgacagcaatggtcttatcttcgttatagagtggttgatctccagaagtggggtcaacgatagccaaacgctcatgagccaaataacaatcctcataacaatgtagaccactccagtcaggacctgtatgcctcaatctacataacatttcaacagatagcatcatcagtttacccattcaatcaatatttgaccaaaacatctccacaagatagaaatcgagtaaaggctcttcatttaacaaaatcaaatcgttttaaccataaatttggaaacttttctcttccaaaacaatacccaataacctttagaacattgcgcagccaaaaacaaaaccaaggagatcgaaaacaaagaattggatgagagacattaaatgtgtttgatttgagtatacctgcgagagagttcgatgatacgggaacgtttagcttgagagttatcgacgcagcctaacacagcgagaatcccacacatggtggtggtggcggcaataagagaacacaacggcttcagagaaatggatgctgtgaaaactaaaaagatgaactttataagatgggtttccaatattcaatcaggaccgttgattctggcaattaattcatttttattccttaagagaaaaagattctgattntaactttaccctaatttgcctttgacttattaatttccgaaaaagat

SEQ ID NO: 11538 - DNA, 495 bp, Arabidopsis thaliana landsberg
aatccccttggttacttgggacgacgatgaaagcaaggccatgaccttgattagggtttgttttaggagtaatggagaaagtgaaagaggttttaaaagggtaaagagctgaagcattaggcttgaaagtgattggagtggtgaaaatggctcgaccatgagagaaaggaatgttgtctcgagtcaatgcgatggctccggaccggctcttgccatcagtgtcaggaccatactcagcgtctccatggaatgatattggatcggtgccgttaccaaagtaatcgaatttgaatttgtaagcagtggtgacttgagaggtgaagatagctaagaacagagtggtgaaacagagtatttggatcttcattttttagttctgtttttgggaatttgggaagtgaaagtggtgaactttaaaagatgtgagtgttgaaaagatcgagaagacttaaaataattgagagagaagagagacaaagaatttgaattatggca

SEQ ID NO: 11539 - DNA, 885 bp, Arabidopsis thaliana landsberg
acgtcaatgcctatttagagacaatgatcacttggaaataatagccactaacattaagatttaaaacaacatgtttacaggttggtttgagatgaatcaaatgatccagaagctcgtaatctgtcatacgttcaatttccaacaaaatatgtatggaacaaaagttcacgaagttagaataaaataaaaattggtacctcaattggtagaatatataatattcatcctactgcgggcgagttgtattatcttcgaatgataatcaattatataaaaggacccacaagttatgaagatattcttaccgtagatggtataactcatagttcttttaaagatgcatgtgttgcaatgagtctattagaaggagatgaagagtggcatgagacaatgaaagaagcctctctttgggctacagcaaatcagttgcgtaatttatttgtgacgttattagttcattgtgaagttataaatcctttgaaattgtggaattcatattggatagatctaagtgaagacatggtgttcgagcaaagaaagttatttaattttagaagaatgaatttgagtgaagaggaaatgcaaagttacaccttaatggagattgagttgcttcttaggcggtatgaacagtcactgattgattatcctggaatgccaaagttagataatagttttataaccaggttatctaactcaaagataagagaagaaaagagctataatattgaaaaacttaagaatgaccacttcactcagtttgcaactttaaacgaacaacaacatgatatttatgatgctttaattcgttcagtacaaaacaagcaaggcggactgtttttttatatggtcgtggtggaacaggtaaaacatttgtatacacct

SEQ ID NO: 11540 - DNA, 589 bp, Arabidopsis thaliana landsberg
atagttcaccgtagttgggaagtttggaaggaagttatgttgtttaatacatcgcttatgttctccacttcgtacagtaaaaaattctctaaaaatcaactctttctttttttttttttccttcatgcaatcgaactttatcattgggtgatataacttggttgataaactgtagctgtttaagtttggcatgttggaataatcaacaaatgaccgataatagttttaaaaaaatgactcgaactccattacactataacactgcatttcctcatcatttaaattagttaacttcctatgctcgaaaggcatgtcttcgctcagatctttccaatgtgaattccataattgtaaaggatttgtaacttcagagttagctaataatatggcaaataattgacgcaactgatttttgtagcccaaagagaggcttctttcatcgcctcatgccactcttcatctcctactaatagacccattgcaacagatgcatctttgaaagatttatgagttataccatctatagtaagactatcttcataccttcgttggcttttttataattgataacattccaagatatataact

SEQ ID NO: 11541 - DNA, 853 bp, Arabidopsis thaliana landsberg
taattacagagaaagtcctccctattaaccactactggtttcatccggttctgaaaccaaataacttcaagtaatcaacttgccatcacatcagaccggggccatatgtaagaaattaccattttaaggcacatgtgaatgttgaatggtgttgttccaccgaagcgataaaatatttatttaaatacatcaacaaaggggttgacaaagctaccattgttgtagacggcgaagacaaatcattttatctgattctaaacaacatttagacggcgaagaggcgacatcttagcacatctattattgtaacttgacgttaccatctttagaatttcctatattagcctacttctcaaatctttatttcacaagttatttctctttatacattccgtctctttctctggttctgtaataaaccattatcttattactatagtttgagcatcatatattagtgaggaaggagcataactaagtttgaatagcatgacgtttttttggtttttacttatttcctcccataaataaaaaagtatgttcaacagtttctgattccaaaattttattaacaatatcttccaatcaagaaaatcttaaaacagtaaatacataatcaacatattgaaatacaaaattcaaaacaatacatgtaatttgatttaaaaaaaaaaacattattaaaaaaccttcaacacttcgaaacatgtatatatattgtatatgtattaccatctttacatgtacatagcctcatttcgatttcacctactctttcaaaagcttcacgatgaacactggctcacctaaagcacatgtagagttatcacaaggcctcctcatccatttaacg

SEQ ID NO: 11542 - DNA, 539 bp, Arabidopsis thaliana landsberg
  unsure (1)..(539): unsure at all n locations
aaatggggattccctctagctagtacaactttcactgtctcgggatgagcaaatgaaacaaagccaaacatacgcttctgttggtatgggatccgcacatcttggactgttccaaagaggcttcatagacaacaaatcaataatgttattttctcaaatgccacatccatgaattgtcagacatcaattaaccaaagaacaactgattaatcaatactacttatttgccaattcttccatataaatatacaagaacgagcacttgttagacagagatggttgtccagtaatacctgaaatatgtagcaacatcctcatccttaaacgtgctgtcagcgtgggaatgtcaagtaaatctgtctagatgccgaatttgactgatcacctaaatgcattgccagctccatcctctcaagccgtcctgggctgctgctccaaaatctttcatcaccaaaaggcagtccacatctctgcatcgaggaganacattaatacttatagaactaacaatcatacagcccgtcaagaaacggtaccga

SEQ ID NO: 11543 - DNA, 236 bp, Arabidopsis thaliana landsberg
  unsure (1)..(236): unsure at all n locations
nnnnnnnnnnnnnnnnnnnnnnnngcaaacctctttgtcgagtgcccgtgaaaaagtactcggcaaagaaggctttaccgatgcactgtgtccgagccctctatnnnnnnnnnnnnnnnnnnnnnnnnnnnnnnnnnnnnnnnnnnnnnnnnnnnnnnncttcannnnnnnnnnnnnnnnnnnnngggaatgtccaaggaaaaatctcatagtgagaccctagtcagtcacccttg

SEQ ID NO: 11544 - DNA, 676 bp, Arabidopsis thaliana landsberg
taaacaccttttacttgttttgcagaggctatgaatcaggtggatgaagaatccgaagccctgcaagaaaagttcctagagaaggagattgatacagcagcatttgtgcagaaatacaagaagcttcgtactacctatcatcgacgagcattgatccatcttgccgctaaaacgtcaaacatttgagattaaaaagctttacacattgaattcgagactttggttgtgtattatgactcttacccattgttgtaaaaaaaatgctttgctgtttactgtttaggttcatactaaagtgattgacattgacataaaaatgttttccttttcccttaacaaaaaatctacaaagtctgaaactctcagcaatcagataaaaagattacaagaaaacctcaaagaggtatacaagtttctttcttaaaacaatctcaagaaaacagacgacatagtcttttaagatggtttgaacacatgctgtctctcttcctcactcgtccagcaggccagcttcctttaatgcactcttatactcttcctctgagttccacgacttgatctgcagcaaagtttaaaatcgttggatactgttttaacaaacacttgaaagatatatagcagttttcagaaatcttataatacctccttaacatttgcttcaaaatacttctcgatc

SEQ ID NO: 11545 - DNA, 935 bp, Arabidopsis thaliana landsberg
atctccaaaacccatcaacaactcaggtactttcagcagtaatgagagaatatgcattaagtttcaatcactctatgttttcaatggaagttcaagtttcttgattgttctttgagatttagtagttcattgattcttatcactttcaagtttgtgtgagattatgtgttgatcttggtgcaatgttttatatgaagattctgagagtgggaattcattttccttgttaatgagacgacttggctcgattaaaactcagagaagaacttctatccaaaagggttacgtgcaatttttcgatatcaagaccctcgagaaagcgacaggcggttttaaagaaagtagtgtaatcggacaaggcggtttcggatgcgtttacaaggcttgtttggacaataacgttaaagcagcggtcaagaagatcgagaacgttagccaagaagcaaaacgagaatttcaggtataaataacataaaccaagttctgtatttcatgttcagattcttgaatctatattgattcttggagatctcagaatgaagttgacttgttgagcaagatccatcactcgaacgttatatcattgttgggctctgcaagcgaaatcaactcgagtttcatcgtttatgagctcatggagaaaggatccttagatgaacagttacatggtaaaaacatattcttatttgatcttgtttaacccaatgaagtatcttgcatatgaagtattcttaaattataaaatgatagttaggacatgaattaaataactataattgattgtgttatctataattaatgtgttagggccttctcgtggatcagctctaacatggcacatgcgtatgaagattgctcttgatacagctaggtatttaaagaaatagccgacactttttcaactcctagaccggttttctcatcggttaatatcg

SEQ ID NO: 11546 - DNA, 622 bp, Arabidopsis thaliana landsberg
tccgctgcatcaatacggaatttcaaacactgaatttgttctgctgagttagctttgtatctctttttccacagtgaaagttctctgcggcagagaccaagcttatcttggaagccacagtgtacgtctgtttgtcctcgatcccaagctcttttaaccgcgtccgcaaaatcagtggcgtgaatatatcttttatcataccgaaattgtccacgcttagtgcagatttcttctagaatctcgattatcactggcgcatgatcagatcctgcaatggggagaaattctgtttatgaggcgggatacatcgctttccaatcactgttaatgaaaactcgatcaagacatgattctattatttctgtttgtctcttccccacccaactgaaaggatttcctttaaacctcaaatcctgcatattgcaacaattcaccatgttctgaaagtttctgagactgctattactcctctaacgacccgcttttttctatgagacttgtaagatttcattgaaaccccacacatcatccaagggccagttctattagcggaaatacgttggagtttccccataagtggtgtcttctgatggtaatgggttcaatagacgcagacaagtag

SEQ ID NO: 11547 - DNA, 1103 bp, Arabidopsis thaliana landsberg
ctctcagtctataatttttacgaatttgttattttgttaaaattttacggatatactatttttctatatattaaaaaatgttcacatttatgagtcttttttggcttaaatacacattttataagttataacaaataataaattctataaacaaatagaaccgattaatttaaatataataggtaaaacacatgttaaatcgtatttttatattataaatttttttttattcataaaactttagacaaaaattgcaaaatccataaatatcacttagaaaatggcaaaatccgtaattgattccaaaaatatgacaaactttttaatcttttaaccaaaaaaagaaaacagaggtttttataacaagttcagtttacaattttcaacgtgtggtttctctattagaaccaaaagaataatatatatccaaacgtgcacaacgtgtcaatttttttgttacaaaatgtgaagaacaaaaaaaagtgtgaaaagctggttatgagttatggatctgcgcctataaatatacaaacatttctccatccactccatagccaaaccatactctccaaagtccaagctcacaatgaacacttcgtaagtctctctccctctctcaaaatgttctttttgtctgaaatgtaaacacaattttttgttgctctcgttgctcagcccaaaaatggaaatggaaatgaaaatggaaacgaaggcggctcctgaagctggtatgatcaaaaagtccaacgaggagtggcgtacggttctatctcctgaacagtttaagattcttagagagaaatctattgagtaattagatccaaactttttttcttcttcctctcttaaattcattttaggtattttgttttcttaagcctcacggtaggtttgatgacgtttttttaaagttttcgactgatgaatgtagaaagagagggtcaggagaatatgtgaagttgttcgaggaaggaatctactgttgtgttggttgtggaaatccggtttataaatcaaccactaaattcgattccggttgcggttggccggcttttttagatgctattcctggcgccattaaccgaacagtaaacctatcaatc

SEQ ID NO: 11548 - DNA, 1274 bp, Arabidopsis thaliana landsberg
  unsure (1)..(1274): unsure at all n locations
aaaaggagttagaagttcgaaataagaatttgcatgtcgcagttgataattcaaagaggttgttgagtgaaaacaagatattggagcaaaatctcaatattgaaaagaagaaaaaagaggaggtgaattctatgtattagatttattaaagatttcaaattgagaagtagcaaatacttgcgtattgttgacatatcattatttcaggttgaaattcatcaaaagagatatgaacaagaaaaaaaggtgttaaagcttcgagtttctgaacttgaaaataagcttatagtaatagctcaagacttggatagtgcttagtgttgtctgttcagtaaatattataacatgtcatcttgtacagtcatttcctagtacgtcctcatggagttaagagaaatgaaagaggtttcagttctgttattgtcttcatcattatttaattttgtttctgtttgaatgatgataatgtattttcgcgattcaaaattgaagtagacgaatgtgtttacattccaatttcattttcttaggacattgacagaaaaaatgagcaaacagctgccattttgaaaatgcaaggagcccaacttgctgagctagaaatactttataaggaagaacaagttttaaggaaaagatactataataccatagaaggtaacataatgctcaagtatgtacaatgatgttcattgcttttaaaaaagaattttactaacatttttatttgattgtagatatgaaagggaagattagagtttattgtcgaataagacctctaaatgaaaaagagagttcagagagggaaaaacaaatgctgacaactgtggatgagtttactgttgaacatccatggaaagacgacaaaagaaagcaacacatatatgatcgcgtatttgacatgcgtgctagtcaagatgatatctttgaagacacaaaggtattattgatatgtaactgtgttcattcacctttcatcctttgatattttcnnnnnnnnnnnnnnnnnnnnntccttttaacagtatttggtacaggcggctgtatatgggtataacgtttgcatgtttgcatatggtcaaactggttctggaaaaactttcactatatatgggcatgagagcaatactggactcacacctcgagctacaaaggaactgttcaacatattaaagcgagatagcaagagattttcattttctctaaaggtaatttgttatcctaatagatgatgtgataaaagattatgacattaactgactacaaaaagttat

SEQ ID NO: 11549 - DNA, 443 bp, Arabidopsis thaliana landsberg
acatattaaagcgagatagcaagagattttctttttctctaaagagaattagttatcctaatagatgatgtgataaaagattatgacatcaactgactacaaaaagttatgcaggcatatatggtggaactttatcaagacacacttgtagaccttttgttaccaaaaagtgcaagacgcttgaaactagagattaaaaaagattcaaaggtattgagagatatatctattttaactaggttataactagattgtagacacgtaagtttgatcttatgcataaaatattttctcaaggaatggtctttgtagagaatgtgacaactattcctatatcaactttggaggaactgcgaatgattcttgaacggggatcggaacgacgacatgtttctggaacaaatatgaatgaagaaagctcaagatctcacctcatattatca

SEQ ID NO: 11550 - DNA, 1035 bp, Arabidopsis thaliana landsberg
aagcagaccctagttgtgcccatcaacaagacagagatgccaaagaacaaaaaaaagatctttgctttggagaaatcttagaaggaatcagatcaaagtcttgaaatttggggatcacaaagaatccagatggaagaaaggaagaaaatttaggggttttgagagaaaacaaaaaaggaacgaaattggaatccggaatcggaaggagagaagaagatcggtgtgagaatgcggcggaagtctccggtagagattgatgacgtcggtgggagccgaaatggaaagagaaaagagagaatgaatataacgaaagcgatcatgaatgataacttgtttggtttgggattttgtaaaacagagtttgggcagctacagaagctgtagccaatcataatattttattcattaaaaaattgttaatattatttatttatttgcaaattttatttattttttttatctgaaaattttcacattctctcaatttttttttaagtgctttcacaaattatttgtttttctaatcatatctttttaaattttttttttttttcacagacattttttaaatctattatttcaattttattgacttttcaacgctttccttctctactttttattcttccacattagttagaacctacattcctgtcctgagtctactatgcagacagttagaactagcggtcttggcaaatgtgacacttcatagatttatcaatcaaattagaactgactgtctgcgtataactctcatcgctacatagcaactttatatcttcaaactcaacaagggtagatcgtagatgttttattaaatataaaaacaaactcgttgaaatgttttattattttaatgaatgtcaagcataacaaattactacatctgatcaaactaaataaaaaaaaggatgatcaataaaaaatttttttaaaaaaacaaaaacctgaaagcgaaagtcttccatcaaacacgggatggggtaaaatctttcaaccccatccccccacgatttaattgaaagccttgag

SEQ ID NO: 11551 - DNA, 739 bp, Arabidopsis thaliana landsberg
ggtattgaatgatgatgtggaagaaaaagaagatgatgtggagcgttaaaaagtgaaaaagaaggatgcacttttctttagagaagctgtaggcaatcataatattttattcattaaaaaaacgttcatattatttatttacgtacaaatcttaatgtgcacgaaattaataaagggaaactctctttgtatgaaaatttccacatcctctcagtttcctttttaagtgatttcacaaattatttttttttttaatcatattcttaaatctattattctaattttattgacttctcgacgctttccttctctacttttattcctgcactttagttagaacccacattcatgtcctgagtctactacgcagacagttagttctggcggtcttggcaaatgtgagaccaatatatttgcacatttgatatctctttgttgtttaagatgataaaaataagtaacccatgatatgcaggaaattgaagggttatgaattacagctgtttagtaacacgcgtgttgaataaatttgacattgcacatagcctaaatgggtaaccatcgtagataggctaagactatgtacaatggacatgttgaataaaagattcagctgtttaatgtttgcaatggaagtgttgaaaactgaaaatatatatgtggattaataagtgttgaataaattcaaaaaatattgaaagtttgttttttgagtccacatatgccacatgttaccatg

SEQ ID NO: 11552 - DNA, 955 bp, Arabidopsis thaliana landsberg
attcagctacagacctagtagtaaacggatgcttcaaggcgatgaagtgagtgtacttgcttagcctgtctaccactaccaaaatgcaattaaaacccttcgaagtaggcagaccttcgacaaaatcaaggctgatgtcgctccatatctgctgcgataatgaaagaggtgaaaggagacctgcaggtgataaggtagagtacttgttctcttgacaaatctggcagcccttgatgtaattcactgtatctcttctcattccacgccagtacacttcattacacaatctcttaaacgttttcaatgccccttcatgtcctcccatagcactagtatgaaactgctctagtagttttggaaagtgcatcagctaccttgttgtcaactctgggcttgtattcaatgcgatatttcaaccctgtcagcttggaagcccatctttactgagttgttgaaactgacttctgctctagtaagtgcctgagacttctctggtctgtctttatcacaaattctcggctggataaatagtgtttccacttggttacagccctcacaattgctagtaattccctctcatacacagacttgattctaccttggcttgagaaggcttgactgagataagcgataggtctcttgttttgggataacgcagctcttattccaactcgggatgcatccgttttgactgtgaactcttgttgaaaatcaggcaaaacaagcacaagaaggtctgtaactgccctttttaactcttggaaggccatggttgcagattcattccactcaaacccactcttcctcaattgatcagttaaaggccttgctatctgaccgtagttcttcacaatccgtcggtagtaaccggtgcatcccagaaaccctcttagttcagtaaaaaacttaggtagtggacagcacaacatggcatgcaaccgtttggtgtcaggga

SEQ ID NO: 11553 - DNA, 577 bp, Arabidopsis thaliana landsberg
tgatttactgaagatctatgtggtttaaatattaaactatattataaattgattaggatgccccatatgagaaattattctatgaataattaattcaaccttaatcctaattataacttaactagagatcatattttaatctaactataattatggataggttaacttcaattagaggagttaattcattaaacataggctaggcataataaaagtatggggtgtgataaatgttagtggcttactgtatatatgatattattatgaatctaacacaatttgaacggatcaaattggagtaaaaatagagaagatacgaatttccaaagtttttagggaattatttatatgttaaaagtattttctatattcattttatgaatttctgagatttatggaccgtgggtactaatttctaaaagctcggggacaaattccaaattctaggggcttcatttaaatccttcttcactaaaccaggatggcgagttgatttgtgaaaagggcaggggctcatttgtgaaattggctcggcgaaggggtatggttaattctgagccgtgagatctattccgga

SEQ ID NO: 11554 - DNA, 1441 bp, Arabidopsis thaliana landsberg
agtggtaactgtgtcaaaataacatctacgaggatttggtgtacaaattgacaattaatggacggcttgagcactggacaggcgttctaaaaatgtagtgaaccttttaagtaatcaacataaagaaagattctcaacctagtaaatcagcctaaaaggcaactttccagtaaagctacctccaaaaatcagttttaaacagagcaaaagcaaaagatgatgtcacatggttttgacggtgacaaacttggaagaattgtgaaaaatacctcagatgtgttttcttgatgtccagccttgttgtccacgataaatctctcaaactaaaattaaacatgaaaatctacatataaatatgtctaccagagaaactgacatctaaacttaagttaacatgtactaaccgaaaattcagaaccatgtccattatctgagacagaagccctgggttatgaaccctcttcagatccttcgtgaaccggtgatggtggtcgtggtggagcaccataagtaactctcagtttagtttcctcaactagatgtccagcctctttgctaaactgcaaaatttcattacaagaaacaagaaaaatactgcttttaagtacaaccaacaccaaactgctaccatccatatgaaaactgtaaccatccatataataatataccatcataggagtgacttccttggctgtgacaccaggactagctatcacaccctgaagcagaaacttgtccttgcactgcatatcggaaggagcttccttttgagcttgcatggtcactatatcaaaccaaacattaagaattcatcaaattccctaatccaataaccaatttagcaactcgaaattaacataaaaaaacacaaatcgagaacagaccaagaacttcgcaagtagacctcgggagaacaactccagtattatgcctaacacaatactttttcggattcgacgtcttaacctaaatcatcacgagaagcctcagaaacacgaaacaatttttctcgattccaaaattgataaggctaaataagagaattataaccttaaaggcaacattattgtcggtcttgttcgtcaaatagagagagcaagagatctgcttcttcaattcaactacatcaaatcagagaagaagcttaacacatagatctggggcaataagacatgcgaaatattgaaagagttatgaataaagcttacaagggaattgaagatcgagaggctcgacggtgagaagctcgctgttactcatcccgatcagatcgcggttactcatcccaatcagatcgatgttactcatcccgatcagatcgccggagattcaaatcgattttccgagagaaaaaaaaaaacggtttcccggcgattagattcgtcccgtgacgccgtctccggttcagagagagagcagtcgtcgatcgagagagattaga

SEQ ID NO: 11555 - DNA, 595 bp, Arabidopsis thaliana landsberg
agcctgagcccttgtagtactagtcctaccggatacttctccatgctcgtcaacgttaacattcatttgctgtgcagcaccaacttcgacttcgcttgaacgtacaccataagaagtgccagcaattgaacatttcagaaaatccatctgattacaagtcaaagttcccgttttatcagaaaggatagtatccacttgtcctagctcttcgtttagattcgatgtgcgtgcgtgggctggaaccccactctcactatcatacatgtgtagatctttattgatgaaagatgcttgcaacactttcacaacctcaatggagacataaagagagatcggtatcaaatatccgtacagcagcagagcagtgatcagatggacaaatccagcataaacaggattacttggattggttaagttctcaggctcctcaggtcttaagtaccaccatttcggcatgtgaaactttgtctcccaagcaaatcccgatgaacttatgcaagagatcaaaataagtaggacaagaagcgtgtagattatatagtccctcgtcttttcgattctgctcctttttgaggcgattttgttgagttctgca

SEQ ID NO: 11556 - DNA, 1622 bp, Arabidopsis thaliana landsberg
accctctttttgattgtagatataaagttatgataatgtcccattaaaggttctctcaatcagtttcatataattaataagatttaaaaacatatatcttcttgttataaagtaaaagatttcaatgaatcatataaaagacagagaaaacaacatttaaagtttttgtaatatttttctaaagttgttttttcaaacttgagcatttttttcaaaattaatattgatttttgtataaaaagaaattatgccgtatgtgatgggttacttttcaaatgttcttagaagcagacaagatcattgaccaaaggaggacaatttcaatttcttcctatgtgtgtgtgtgtactcattagaaaattcaaattatttgaaacttcagttgttgaataactaaaaaaaggctaatatttaactttgtcttacaatggtgataatgacattaatgtaatgaatctacaaattttacaactaataaaattgaaatattttaaagtgtaaagtactaaggaggattaagaataaattcagatcagataaattggtaattaacaatataacaacaaaaaaaacaattatttactaaaaagacacgcttttgtgtcttcatataagcttgtcttcaacgttcggctaatccttggtccgtgctaagatcttagatcgatttctaaagtcttcgtcttcttcttcttctgataactagctttttcaatcttctgaagctttaattttttcatagccatggctaatcgttatgatccaaatcctttcgctgaggaagaagaagtcaatcctttcgctgtaagcttcttgacttttcgattcaactcgtaaaaactagagattgatctttctccgaattgggtttttcaattttggttgattcgttgaatcttgttaatctttgggttttacttagggttttatttttgttgttgatttgatttgatttctactggcttgtaacttagaaactgaaaatgggtttaaaggactcggaaattatgagagatttgtaattcatggggttgataaagtttctacctttatgttcctaaaacttgggtttgtgatgcttttatctactatttgtcatgaatcttgaagacgtttctcactgaattttgttttttcttaaatgatgtgtaatggttgtgaatctattttacatgatgtagaatgctagaggagttccacctgcgtcgaattcgagactttcgcctttgcctccagagcctgttggtttcgattatggtcgaaccgtagacattcctcttgacagagctggtacacaggttagttagagataatagagtatacttttttattatatgtttttgtgattaggtggatcttggagttacttatggtatctttttgtgttttggaatccaggatttgaagaagaaagagaaggaactccaagccaaagaagctgagctaaaacgacgagagcagggattggctgctataattagttaaattaaagtctggacttatcaactatgaaccgccttcagatagttctttgcaatgggtctatgtgtgcaaacatgaatattattttggtttcttgggtacatgtttaaacctctgcaaattggtattacctagcaacg

SEQ ID NO: 11557 - DNA, 936 bp, Arabidopsis thaliana landsberg
aacacaggaagccagttccaggagggggaacaaccaatgcaaagccttgacacaatcatgcaaatcatctctgaagccacaattcccgctgttcgaaaccgttgcctagacgatttcatgactgacaatcttgatcttgacgatgacatggatgactttgattctgaatctgaaatcgacattgacagtagcggagagatagtttacgctctctaataaaaagccttttttaacaaccaaaacacttctctatctgttgtaagaccagtagtgttctgatcctctggttttaaattctaccaatttttgtattgtctctgtttgtttcttgttttcttcatgcacacatatatcatatatgtaatgtaaaatatcatctgtgtatatatacatatatatatatatcatgtatatattttccaatagcacacaagcaaattagcagttaaaacagttgaagcaagttgaggttatgttctgtttcttcctctgtaatcgttagattcttcatttttggtttcagtcttttccacaaaaacgcagtgtcttcgtcgcatttcactttcagattctctagattcttcacagaatccggtaactcgcatcgataacaatctttcatggaaatcatctcaagcttcttgagctttccaatttctagaggcaggtttttcagttggaagccaccagaaacatcaagaaaccgcaaattgttgagtctgtcaattgtttcaggtagctctaagagactagtacaagacctcagtctcaacatttcaagattccttaagtcacctatttctcctatgagtctgcaaagcttgttacaatttgtgacactaagcttcttcaatgaaacaacttgagagatccaatatggtaattcataaagattgtagcaatagtcaatctcgatttcctgtagactttgtaaag

SEQ ID NO: 11558 - DNA, 493 bp, Arabidopsis thaliana landsberg
agatctaacttcttacttttttcagagtttccttatagctataggcgccattgtgatggcaacattctcaaccgggatcgattcagaatccttcagggttagtttacattcactctcatcttgaaaatcaatatttttcagtcacagacattttagatctttattacagttcgagtttcgtaaagatgaagcgaaagaagaagacgatataccatacagctatggattcttccaccttgtgttctccttaggagcaatgtactttgctatgttgtttatcagctggaacctttcacattccacagagaagtaaggaaaattccaatctgcacattctcatctgaaacaacaatactcagagtcatgactgtgaaattgtattatttatgtaacacatagatggagcatcgatgttggatggacaagcacatgggtgaagatagtgaacgagtggtttgccgcagcgatttaccgtaagttaaaaatgtagaac

SEQ ID NO: 11559 - DNA, 1324 bp, Arabidopsis thaliana landsberg
ggtagagtgtcttgtgccggagaaactttagagaatcggcggagacacacactaaagttgatgagtttgaatgtttgatctctcaatagaacaacaatttgacctaagtgatacaagaatcaaacaatgttacacaacatcgtatgacatattcttaatctttatgtcgtctaagttaatgttttggtgaggtaatatctaacttacaaaattttatgtaattctatttctcttggggattaatccccatccataaaccttaacatacgttttcctaaattctacaagaaataaattacggaaccaaacaaaataaaataatagaaaagaaaaacaattaaggactgattttaagtttcaattttcaaaataggtacttttcgtgtaaagatcttggtaactccgactatgcataagatttggagaaaaaatgtttataggtctatttgtagattttttcttacatggattctatgttttaacatattcacaaaaaaaaaatgagttgtataagtttttgttgttacaacttttgattcatatcttactttgttttgttgaaatgtcaaatttattgcttaacaacagaaataagttcatatagaaatggggaaaatgaattgaatgaaattaataactttcaatctgaaccgttgaattattcaatccctagatgtcttgaagctaccctcaaagttatgtgatgacatgaactcgcgatctctctttgactccatgatccaaatcgcgtctaaaacaaagaacatcacgaaaaaacagataactcttagcatattaactcaaatcaaaatccaaaaagtgctacatctaggtctaagtcttagctataactccataaaatttctttaccaaaaaatgaaaaaaagaaaaaatcagcttgtacatatttaaacataatttaaagaattatttatatttatttattgaaaaatcttataaatatcattttaacaaaaacattctattacccatccttgtttcttttaaacatcaaaacgatgccgtttcttacgactaaaagacggatggcccaattgtgagcggtacaagaatttttctagggtgtacttcaaatgggagccaccggcttaccagagtttggttgggtttttggattttgttcttttggtcttttacagacgcacgagagagaatctcagactttaaacagaagcaaagaaaagtggacgaagtggccctttccgacaaaaacgtttcgcgtccggtcctctcttctactcattccaagtgtcgattggccagtagtccagcatgagctacttaattttgttttgccaacgag

SEQ ID NO: 11560 - DNA, 950 bp, Arabidopsis thaliana landsberg
tcctttggacaactccccgagaagaagtttcttatttccttgcacaatgtcattcccagctacattgacaagggaaaagcgcagtttcttcctaatctttataacttcattgcagttctcaacctttttgaatggcatttttatgggaggtttatttgcgtgtttccagttgaccgagccaggtgaaactttgtcgagaacttcaagaagaacccacctgaataaaatgaggtttagattaaagcagatacaaaaataaaacgtcctcaaacaaaactccatagctcacccattcctaagatcctcaaaaacattattgacataagtggctgtgccaagactgttaatccagaggcggaaacatctttcttctcgtgaagtttccacatcatctgtcatcatctcagcaaatgatgtctttgaatcgtcaacagtcaatccattcctgcaacaaacaaaacagcactagtaatgtagcagaacagaaatcattatcatcattttcttactcatttagaaacttcgtcaagacactatcagagacataacaaatgcaaacattgccacacattatcacgaacatcattgggattttaagataatcaataatccaaacacaactgaaaaaatgcactcaaattgtttaaagcagccagttgctacagacctgtgctgaaatatttgcgccacaaatgcaaggttaagatttgctgagccgtccactatgtctttgggagaaaggtatcgtttacaatccagcttctcagcctgctcaagaacctttttcgctctttctgtggggtctttggtctctaatgccacatgtgtactgtgttctggagcaagggcattaagcaggtacgcatatgcctcaccgtcctaaaaatagaaaagaaagctcatgttatgatcaacaagaaatggccttcataacattcttagttgctaaa

SEQ ID NO: 11561 - DNA, 802 bp, Arabidopsis thaliana landsberg
cactgtccttacatgtccgaccagttggcttgtcagaagcatggtcggaaggatttggagtatcagcattggagatggcaacctcatgcctgcaacttgaagaggtaaaaaaacttatgctgcttgtttcatttttccaagtttttctggaagagttatgtgtgttgtggataactgatttgatcaaatggagaacatatggatgaatagtttgttatgactttgggagctactattgtttgcaaagaacggtagaaactgatgatttaggtgtttactgtggttatcattttatctggtagatggaatgtgatagaaatgtgggagaagctgagaggaaagagattgatgtttgttggagactcgttaaacagaggccaatggatttcaatggtttgtctcttacagtctgtcattccacgtgacaagcagtctatgtctcctaacgctcacctcaccattttcagggctgaggtaataaatacactctgagtttaacaacttttatgccttgagtttgactctttgttgtggttttggtgcaactggttactttggtgtgtatgtacccgcaggactacaatgccacagtggagtttctctgggcaccgttgctcgtggagtcgaattctgatgaccctgttaatcacagattgagcgagcggattatccgacccgattctgttcttaaacatgcatcaaagtggcaacatgctgatattctaatcttcaacacctacttatggtggagacaagactctgtcaagctccggtaattatatatagacatcattttattcat

SEQ ID NO: 11562 - DNA, 1183 bp, Arabidopsis thaliana landsberg
aatctagtgtttactccatttacgttatttttcttttatcaaaaaccaaaaaccgtttttgggggtttttaaaacaaaaatctaacaacaaagtctataactaaaatctaatagtcaaaaactaattaataaccaaatcaaaaactgaatttaaaaacagcatccattcatggccttaaaactatttggaattagaggtaagattctgataattggaacaaaggaagagataggtataaatatttggtaaaggagttagctttagaataaattaaccaaaaggaaagtgagagatagagaaagtgggaacccaccatagacgattgatcggccaacatagtaaagaaagcctttttttttgtatgtctctctctcttcctttttctgttcttacaacacagaggagtaattctaagtgtgtgtgagagggtgttttccatactactatatattcatgtgctcacatggtttccctttgagggagatcaagaagaaagttaccaaagccacttgctttttaagctttcttaccattaggaccattaagagctttccataaaagcatcacaacggctgcaacagttaacaaatacaaggacgagtacagaaactggttcgggagtcatcatgcctcagaactgcatagcaccaaggcctgaagaagatggtggagtcatggttcaaggtttgccagatatgtcagacacgcagagcaagtctgtactagccttccctacgattacttcacaacctggtctccagatgtctatgtatcccataactctcaaggtgtgtgtgtcttgatcacttcttgttttattttctgctgagcttttgagttgtacctgcaacaaatctcatcagaagtatttctttctcttcttcaaatagcttggtagttgattacaagacatgacatcattctaacgatgttttccattcggtttctttgtggttgtacagtttgaggaggttgtgtacaaggttaagatagagcagacaagtcagtgtatgggatcatggaaaagcaaagagaagacgattttgaatgggataacgggaatggtttgtcccggagagtttctagccatgttaggtccatcaggcagtggcaaaaccactcttctatcagctctcgggggccgtctctccaaaactttctcacgtaaagtcatgtacaacg

SEQ ID NO: 11563 - DNA, 1386 bp, Arabidopsis thaliana landsberg
taaatattttcattcctatataattaatgccagtagcatgaaattgtaaataagttcaaatacagaatttatttatttaaacaaaaaacgtttagtaagaataatatttatttaaacaaaaactttgtttaaaaatattgttaacaaatacgtttatgctaattttaagggattgatctgaagtttgtttggattaaatttgcttgataatgtaattgacaatttaaattaagaatttaaagtaaaatgaattattttggaatttatttttaatgctaatggcatggagttgtaaataaattcaactaattcatttgctaaatagtataagacatcataatcttaaatagtataagacaaaaaaaaaaaaaaaactaaatactatattacaactaattcacattcggtcttgcattgggatccgtaaatagcaaagaaaaaccctaaatttagtatcctacaaaacattattacttgtttaacttgatcaatatatagagatagaggttctttgaaataattggatatatgattcaagaatgtattaaatataaactcttgaatcacttagaggaaacgtaatattatataatgttttataaatacatgcgataaatgaaccaacataatcataagtttgccatctttcaattttgcaaataaataacaaagccattagtttagtgcttttactagtctataagataaaacttatgacttgtctaacatgttacatgtatatattaaaaatatatactaatctatacttatgtgaggccaaacagaaagaactacaaatttatttaatacaacataagaattctttaggtttgccaaataaaagtttaggaaagggcatgtgactttaaaagaactcgtgcatgttcgtcattgataaaaatttgtaaacaaacgtagttcattgaaacatcttactcatgacttaatgttaattagggctacttgaaatcgccggctgagccggtggtagtggcggaggaggtcgcttgcgcttctttttttcatagctgatcccacgtgctttagcctgcgagtcacgtacttcccttaggtagagtcgaacggctcgtgcaccaaaagggttcgtctctggtgaaccaccgttctcttcaaaagcagctctaagacggccaatgagtgcgtccagactaccccacgcttgtcggagtggacaggcacatggtgctggtgggtttgggtgtccgaagaacggacataggtgtgtgtgaacctagagatacaaagatcaaagtggcgttttaacttcagcattttcaatctatatagatattatgtgcttgtaatgtatgaaaaacatttttgagtatatacaacaatagtatatcatcatcacagtaagaatca

SEQ ID NO: 11564 - DNA, 628 bp, Arabidopsis thaliana landsberg
gaccttatcaccattagctatctcaaactaagcaggcaatatcgaatcaacttgttaaaggcaataccctctctacacagccaataccttggggtagaggcgagtatatatggaattaacagatccgacattccatcgaacaccttttgagcgcgggaatgtctagattcatattccaattgatctgaaaggaacaagcaataagcgtaactaatgtagaagtgattctagtattctaaactcaaccacctaaaacgaccaagtaaaccacaacaactctatcccatcctcagaaatacggttcactactcagacataatcaaagacaatagcaaaacaacgattgaaaacatgataacagaaatgatataggattaaaacgaaaactgaatatcaaatacttgaaagtgaatacaaagtcgcaggagaaatactacggctacgaaagttgcgaaagataaaagttggatggttaatcgatgccctagggagaacccttagaggctacttatataacaaaaatgaacgcatatggacagtttgcgatagtagtcttacatagggacttgcgatcgagtactcatttgcactgatggctgaatgggatcctagtatgctttgcactgat

SEQ ID NO: 11565 - DNA, 1369 bp, Arabidopsis thaliana landsberg
  unsure (1)..(1369): unsure at all n locations
ataacctgtaaccaatcagatgaatcaaaccataggtgtgttttcaagttgatatacctgagaccagaaggaccagaggccggttctcagagttgagagacgcgattgcattagcggatacactaatgtagccgctagtccaaccgttgcacttattcccctgcctataccgatgatatatgtaggtataccttcccactgcaatgtagccgtcatcaatgttccaaagctgtgtcaaggtggtaaataaaacaacaatgatccacataatcggtaggatatgcatgttcatctgaggactcttaaacatatagataaagagaaaaggaacctgaggacggtgaagaacaagagagctagagaaaccccggggaggacaacttcttgattgaaataaattctccatgcgccaacaaaagaggacttggatattctatccagtatcaccaagattccggttctagacggagggtttccagtataaccctcctctgttcccggaacaatagaaacagaaacaggtgcatctcttccttctacttgctttgtccgggaacgcaagatccgtctctcattgcttcgtgttattgtaggaacaccgctatacacagaaatgaagagccaatattcaacccaagctgttatagtagcccaagctgcaaaagtgatcgctgaagccttaagtgagacaaaactgatgatcagaccagtaatgactggagacagtagcttggagctcaaatcaatgcctctaatgacagaattcatttttgtcaatactgctggtggatgaccttcagacataaccacagccctgttggttgccaaaagagccaaaagaaacacatgttgcaaatatgacactatacataagattgcattcatgtgttgcaaatatatacagtctagacatttaccagtctcgttcgatcagaatggtgccagcaagagtcgaaagaactccaatggcgccagcaagattcgttaacacaatcaagattgcaaacaccgggagattccgggacttaagatcagaaactagcaacaacttgatgactgcaccaccagcaatagtgtaggagaggttctggaacaggagccagagtctaagaactttaacgtagtccattccctcgacccattgccccacaatgggaccaaagattgcagtagaaccagattctatagccccataaatggcagcgagaagcagagagtttggcacaagtggatcatatacaatgcaacagagaattcccatgttctgcatcacaaaaccaagaaagaaagtagtccatcatcttaaaacgtctaacactatacactatgaataaagtntatatcttcatacataaaaaaaaaaaaagag

SEQ ID NO: 11566 - DNA, 1187 bp, Arabidopsis thaliana landsberg
ctctacgatgggtgaaagtgaatcttgagttcatgaagccacttttccaatgttgtattgtctctatatagtgtttgagtcgaatattattgatgttcgcattgataacgtggttgatgattttgttatcatcttcgaatattagagagcggtatcctagtccccatgaaacctatattgcccaaataagagccgtgcttcctccactgtgttacgtccttcgaatacagtgtttttcttcttatagaaactaacacgtttatcaactaagccggaaatatatttatattattctttacagcaacatatgtatatttctgttttgtaaaaaagattatgataaatgtcagcaaaaaaacgttaccttaggaaatgatagtggaatatagactttttggtgccgtgatggattgactaacgatatctaaaaaaattcagaaatcgtacctaatattaaaatctggcacctatctatttctataggatatgcaattattgcaatttttactttagtttcttttttacaagttaatcaacaaacttcctaaatatctttctttagaagaaacttcctatacagtgtatcatattattttgttgtttcggttcctactccacattgtataaaactaaggttggttggctacctaaattcattagcaacttatcagacaataatatctcaaaacgcgttttaaatctaatcaaaaccaatttaacattacataatctgtttctcaagtcaaccaaaaccaaccatataatatataaccactaatattttctaaactggtttaacattttaaaaatacattttgtaaccaagcctctgttagtctgtttaatgcataaaaatttaaaagtaaagatacactttttaacattttttcttttaattacttatttttgaaaatgaaaataaaattaagatataacctctatttgatatgtaagatcaggaaaaaaaagatagatattagccttagattgaaagattcttactaaacattgtggtactggttgaaagatcttgtttcaagatcgtttacattataactgatgtataaacctgttttcaccattgttaatctctctacttagcattataaacactgaatgattgtgaaagctacacaaaagagggacttatataaacaagaaaggggtaatcgtgttttgagatcata

SEQ ID NO: 11567 - DNA, 1575 bp, Arabidopsis thaliana landsberg
  unsure (1)..(1575): unsure at all n locations
taatatatctattaccagttcaggacatctgtagccaaaatcatgtgtgaatgattttgttgttgtttataactgaaatcttatgtattgtttggttcaagtgtcaccaagaaggtcttattggtcagaacctagttaggaagtgctcaatagatcatgaaatatgagagaatatgtatagtagtgagtatcgatgataaaaaatggggatttatgataacacgctttctttttatgtttaaaagtttggcagaagcttgaagaagagaatcgggagtttttcaaagcttactatcttaggctaatggttaaacaccatataatggaattcaacaagttgcttgagcagcaggttcaccacatgcgtcagatgcatccaactggtgttgcttctgtccaaaacacaaatggttctcatcttcaatcaagtaagattcgtttggagtgagatggattttaatttctgcattttagggtctctttattgcttgtatacttttgctatgaattgttgttcaagtgttgtagtaaacagtcctcatatgcattgtcttggtttctggcttccacttttgctgccttagttcttttcaaggtttcctttttcctctgaacattatgtgtttgttggtttccttagattagtcattcattcaagtcgctaactgatgagtattaaatagctaatctatgtgattttcttaacagtgaatcagaaacaattatgctatccgtctgagcacactgaccaatctttgaagtctgaaagtgcacatcatccaatggcttctagtctgtctaatgcattcctcaatggctcttccacactcaatacaaacgtgccctcttctataaacatatcaacccatgctaggagagttgatgcttctccaaatatgctctcatcgcagaccacaaacatgcctatgatgcaaggaatgaatggaggaatgatcaagtctgagactgcctttacaaaccctgcttcattcatgtatggtggcgaacggaatgccctcgaaggacattcggcagttggggatacttcgattcctaattccagtaacgagtccaacaaccaacccctcagtgatccgcttcttgaagcagaagcttctacttttgggttcttaggtcaaattcctcgtaactttagcctctctgatttgactgctgatttttctcagagctcaggtctttctccatctcaatatctcatatactcctttctctctcgttgttctgacgtcttagcatgcgtataacaccaagtagttattagtggttttctagtacaagagccagtaaacagctaataggataaattatttgtcgtaaccataagtttcctggttgatttcagagattctggagagctacgatagatcacccttccttgtgccgaatgctgaaaacttcctggactcccgtgacagaggagaatatcaaggtgagagagctctaggaatctttcttactttctgtaatatatcgcaagtaatcgggtttcntattcgtcaaggagcagaagactagaacgctagtttagagaaagtagaagtattaggcacagca

SEQ ID NO: 11568 - DNA, 900 bp, Arabidopsis thaliana landsberg
gtttagacttatgccctgtgaggttgcagaatcaattagcttgaataaacatcaacttagcaagcatatatactacaccccttaaacaaggggattcccaaaaaaaagaacgaaaaacacataaacgaggataagcatcacttggaaataatgaaaaagaatttttacttgttgaaatttaattcctgattcagatatataagattcagtgtgcatcttctagtttgtatatcaatgaagagaaacaataccaagagtcttaaacaagccaaatgattttcaaagtcactcactaataatctagatgaagtgtcttcatcaaaaacacacacaaaacagtggaattggatcttcaaggtgttgaaattgtgtataacccagaccgagcagcttcctgatcaatactttctctgctttttgcgataatgggaaactagaaaaggctttgaaaatgtttaaggtcatgcgggagagtaacatggatatggatacagctggttataacatcatcatccatggactgtgcaaggctggtaagtttgacgaagcagggaatatattcactaatctcctcatcagtggattgcaacctgatgttaaaatttacaatatgatgatcagattcagctcgttaggtagggctgaaaaattatatgcagagatgatccgtagaggtctagtccccgatactataacctataactcaatgacccatggactctgcaagcagaacaaactagctcaggcgagaaaggtatccaagagctgctcaacgtttaatacactcattaatggttactgtaaagcaacaagggttaaagatgggatgaatcttttctgcgagatgtatcgaagaggaatagttgctaatgtaattacttacaccactttgattcatgg

SEQ ID NO: 11569 - DNA, 894 bp, Arabidopsis thaliana landsberg
atgcgggataataaactggagattgaagatattgaaccatagtagattaaaaagattttgtgtgaatataaggacatttttgaggaaccaacagagcttccacctttcaggaaacatcatgaccataaaatccaacttaaagaaggatctaatccggtgaatcaaaggccatacaggtactctattcatcagaaaaatgagatagataaaattgttgaagacatgttggtcagtggaacagttcaaaacagttctagttcttatgcttcaccggtggttttggttaagaagaaggatggttcgtggcggttgtgtgttgattacagggaactcaatgggatgacagtgaaggatcgattcccaattcctttaattgaagacttgatggatgaattagggggttcaatcatttattctaagattgatctcagggcggggtaccatcaagtacgaatgaatgaagctgacattcataagacaacgtttaagactcatagcggccactatgagtatcttgtgatgccttttggtcttacgaacgcgccggctacatttcaagggtggatgaatgcagtttttaagaagtttctgcggaagtttgtactcatcttctttgatgatatacttgtgtacagtaagtcattagaagaacatgtggtgcacttacaattggtttttgaagctatgaggcagaacaagttgtttgccaagtggagtaaatgtgaatttgcagtacagaaggtggagtacctaggccattttataagtggttcaggcatctctacagatccagctaagatcaacgctgtgaaggaatggcctactcccaacaatcttaaacaacttcgtgggtttttgggttaacgggtaatacaggcggtttgtcagaacttt

SEQ ID NO: 11570 - DNA, 976 bp, Arabidopsis thaliana landsberg
gagaatctcataagggagtggcagttccgtgaattaatgggtttttgttgggtataacaggaagagcaaatggcaataaggaaagataaaaaagaaggagagagtctcacttgggaagatacaaagaagatgccattaacttatagagtaatccaagagacattaagagctgctacaatcttatctttcacatttagagaagctgtcgaagatgtcgaatacgaaggtatgtacaaatataacgatactttagatcaatatgttacatatgtaataagctaaagtcttaatcatttttttaactatttttacaggatttttgataccaaaaggatggaaagtattgccactattcagaaatattcatcacaatgctgatatattttcggatccggggaaattcgatccgtcgagattcgaagttgcgccgaaaccgaatacattcatgccttttggtagtgggattcattcttgtccaggcaatgagttagctaaacttgaaatctccgttctaatccatcatctcaccactaagtacaggttggtacacttttacaatgataatacttctgttggaattgacattattttgagaagtgtttctgataaggggtgttttggtaatttacagatggtcaattgtagggcctagcgatggaattcagtatgggccgttcgctcttcctcagaatggattgcctattgccttggaacgaaaaccatagaattacgagaataccatttacctttcttaaattagaaagtagaaagtgaggaatttttttttttctatttaagagaaaatctaattctttttttataatagagatgaaaagaaagtagaagaaaaaaaaatcccaaatgggacccccaagtgtatataagttttagtttattaaatgtagagaattaaattttcggagaaaaaagagaattagttatataaatgttccatgtgtatgtaacttggttcatg

SEQ ID NO: 11571 - DNA, 562 bp, Arabidopsis thaliana landsberg
tcccaacgttctagaagccgttactgtttgtacatatacggacacgtatttgtcgtcttttggtaatataaaaaacagagaagtggcagtttcgtagttttgtttgtgttcttatgggtagttttggtattttaaacaggaagaacaaatggcaataaggaaagacaaagaagaaggagagtctctaacttggggagatacaaagaagatgccattaacttcaagagttattcaagaaacattaagagtcgcttcaatcttatctttcacattcagagaagctgtcgaagatgtcgaatacgaaggtactaaacatacacaattaaaccgataaatgatgacgatctcgagtcgaaattcgaactaatattctatggttttacaggatatctgatacctaaaggatggaaagtgttacccctattcagaaacattcatcatagtgctgatatttcttctaatccggcgaaatttgatccatcaagattcgaggtcattatcatttgtttgatagtttgtagaactgtttttatgtttcggagatgatgtatattaacatgat

SEQ ID NO: 11572 - DNA, 487 bp, Arabidopsis thaliana landsberg
  unsure (1)..(487): unsure at all n locations
cgaaactcaaagaaacttggaattgaaagaatctttgaaaaatcttcaaaataaatgtttggagttctgtactcgatgcattcatcagctaaagcaagtgttccattttgtttgagccagtagtgaagagtttactccttcggccgacgatctgcctggtgccttcgagcacattgaaggtgaagttaatgatcttgacgaagttatagctggacatagcgacttttgtgccctggtagcttctcggggcacagctgttgcttttttgaagtctggctgtgaacacgacaagattgttaatagacctaacttcagcctgtcaccgacagacttagatgatgttccgaatctggctcgaagtattnnnnnnnnnnnnnnnnnnnnnnnnnnnnnnnnnnnnnnnnnnnnnnnnnnnngtgacaaagctcggagccacctcaagctggtaacaaaatcataccttatgttacctgttcttttgaatttt

SEQ ID NO: 11573 - DNA, 1326 bp, Arabidopsis thaliana landsberg
aggcacacgtaatggttgtagattttagttttgttatcacacaatttacatatacttatagtgtcaactttatcttataattgttgaaagtaaaattatctgagatttgttttacaggtgaaaagagatttggggtcattcaacaaatacatttgggggtttatgaaacacaaaccggtcaccacaaaatacacatcatgccaaaagataccggttaagacatcgaaatcggagactataagcaaagacatggttcgtcgtgggtttagattcgttggtccgacggttatacattcgttaatgcaagccgccggtttaaccaacgaccacttgatcacatgtccgaggcatctcgagtgtacggccatggcggctttataggcaaaaggatcatgttgtaattgttgttgtagtcacattggctttaatttatatgtaaataaataatattttgtgttattattttagtactatagcttttctttttgtcaacattgtagtactatatctaccatgtgatatttaggtttgaggtcctaactttaggtattgatatttgtacaaaagctttttgtgtctgtgtttgtgattctgctttaaatttaatatatgtgtgtgtgtttatttatttttgtttaatgtgtttttgaggttaaatagtttgtgggatatggggaataatgtaaagaagagagatcccacagagcatgtgctaaagttgggaagcaatgtcatgtggtagataatcaatggaacttttttttatgttcttctttttttagttgataacaaaaaaaatttagcttttgagttggaagaaattcatgtaaattaagaagctttgtttgttagttacaaaatgatgcaattcttagttttcatattaaagctttccgatggtatttttgcgctagaaataaaaccgatcgatctcattcgcatcggatttggatcatgcattgttcgatatgtccatttgaaccctaataaagatcgtcttgaatgaaatatatgcaaattgcatgatggcattcttttaaagaaaaacactcaagtcatgggggataatgatcatgacacataattacgtatttcatcatttatatatccataaagttaagttaaaatcaacattaatcattggagatctaatccgattacggagggtatatcggacacatttttaaaccacattttacgcttttcgaaacaatctggtagataaaatagaaaaaatgatttggttatggattgcatgtgctgtctattttttagttggttgtcgaataatcgaaactccaaaggtggcaactggcaaggatctta

SEQ ID NO: 11574 - DNA, 1242 bp, Arabidopsis thaliana landsberg
cttaccaaaaagcattagttagtagacaaccactctgttgcgtcaacatttacctactcatcactcttaagtttactttctttgctaattcacaaaaatttcatcacctaatataatcataaccatattataaatagtttaatcattgtacaattcacatctttagtatttcttgaagcaattccaaaataaagttcttttggcttcctcctcccacattcttatttggttgaggagaatgagatcatcaagaacacaaagtgttcatttcttaattttatctcctcttttcctaataatataaaatttgaaatcacatttgtaacactaattttcaaatcctaaacatgaaaccttcatcaccaatttcactcactagttcttcaattgctagaaaagctcgtttttctccttacctcttcacactcttagccttcattcttttcgtctctgtcctctatggtgaagattttatgtgcatctttggacagctcgagcctaacttcgtcctcccgccttctcgaacacccggtaatattttgtttattcactaaacttgtggtttgaatacgcgttgacaatgaggaattgagtttgtgttttggttttcaatttcttggattcttaagaaaagaataagaaatcggagaagcttgcgtttgctattggtaaaacagaggaaagctgtgacgttttcagcgggaaatgggtgagagatgaagtctcccgtccactgtatgaggaatgggagtgtccgtacattcaacctcagcttacatgtcaagaacacggccgtcccgacaaagactaccagttttggcggtggcagcctaatcactgcgatcttccctcgtaagctcactctaaacgctctgttttctctgtttcatgggttactctgttttctctgtttcatgtgttgctctgttttctctgtttcataggttcaacgcgtcactgatgctggagacattaagagggtagaggatgatgtatgtaggagactcgttaaaccgtggaatgtttgtatcaatgatttgtcttcttcatcgtcttattcctgaagatcaaaaatcaattaaaaccaatggttccctctctgtcttcactgccaaggttaaccaatcaacttaaacttattcaatattctcaccttttattagagcttattatatctttgtacaggagtataacgcgacaatagagttatattcggcaccccttcttctaaaatctgaaatc

SEQ ID NO: 11575 - DNA, 981 bp, Arabidopsis thaliana landsberg
tccatgcaaaatttgatattatatagattaaaaataaaataatgtttatgtcggagataaatttacaattggaagaaagaaaaatagtaaaggacaaatagaaaaatgggggatcacatggggacaagaagtaaataaatcccgccaatgtatgataaaagccttcttggttgttgttgttacgtttaataacgtctccatcactcttgtattataataaaaaacctctaaaacccctcaaaaattaattaacaaatccgagacaagttagagaagagaagagcttgacgacgatgaatatgatggaccctttaaataaccttctcttctcgtcaacgcgtttccttcttcttctttcctcgtttttctcttctcttccaactccaccacctcctctcctgttcatggtggatgggagtcggagatcctcttccacttccgccggaaaagaaccgtcgggaggttaataaaccgccggatattgcgtcgacttcctcctcctccgcttcggcggtgaataatgctcggttgtccgatgctccgattcttttgtttgtttatttccataaggctttccgtgcgcagctagcggagctccagtttctggccggtgatacggtccggtccggttctgatctggccgtggagctccgctctaagtttgagtttcttaagcttgtatataagtatcattccgcagctgaagatgaggttagatcttgagctaataaaagtcactaaagaacttaacatggagattaaaaaaaaacaaaaaatcgttttagtaaaacataggatatactctctaattcaccagtttctagcgagtattgtcggaaataatacaaaacggttaacttttgttgctgtagaaattagcaaaaaaaatgcattttaggtactgatgattcatattaggacaataaagagttaaatagatgtaatcttttttgctagtagattacattctggaaattctct

SEQ ID NO: 11576 - DNA, 1799 bp, Arabidopsis thaliana landsberg
ttaactttaactttaaatcagttttatttgctcaaattttcttattattaattggtttttcattttggttagtactcttccttttaccactgtatgagtagcttaaaaaggaacgaaacgaaaataaacaattatctgttcttgaatcttgtttttaattattggacagcatcatcaagaagatctgaaaaaattggggaaaattttgacggaagcagcgacggaggataagacggtgataataaccaccttaaacaaggcttggtctgagccgaactccacgtttgatttgtttctccacagttttcatgtcggaaaagggactaagccattactccgccaccttgtggtggcgtgcctcgacgaggaggcctattctcggtgctcagaggtccatccccatcgctgttatttcatgaaaacgccaggaattgatttcgctggcgataagatgttcatgacgccggactatctcaagatgatgtggcgtcgtatagagcttttgggtactttgtaaaagctgagatataactttatcttcacggtacctatctctcactctatttgtacttcatctttaatatgtcgttgattttggtttgtcaacatttgcatattgttgattagtgtgacaaaaccagatgatatatataggctttgaatcaaattaggaggattattgtgtaaccccgtgggtaatattaaaatcattagtagttgatgacttcatctaattatggttagggaagtagggttcttcaagtctctgtgacaatgattttaatattggttggtcactgttaacgttcattaaatggaaatatacatgcgtcttttatagaccctaggtagcaattagtcaaaatttggtgcaagtaaacacgaatgaattggtagaagatgtagaatttgatgattcataatgttttattaacatatggttaatgtgtgtaggacatagatataatgtggtttcgagatccatttcctcgtctatctaaagaagtcgatttccaaatcgcttgtgatcgttatagtggagatgataaagacatccacaacgctgtcaacggtggtttcacttttgttaaagccaatcaacgaaccatcgatttctacaactattggtacatgtcgaggctgcgatatccggatcggcacgatcaagacgtgctggatcaaattaaaggtggtgggtaccctgcaaaaattggactcaaaatgaggtttctcgacacaaagtacttcggaggattttgtgagccaagtcgggacttggataaagtttgtacaatgcatgccaattgttgtgtaggattagagaataaaattaaggatttgagacaagtgattgtggactgggagaattatgtgtctgcagcgaagacaactgatggtcaaataatgacatggcgagatccggagaattgcatgaagcaatggtggtggaaaaaccaaaacaaaacaagtattggggtgaaaaatcaaaagaacactatataaatattatgttgtttatcaaaaacttatatcattctaaatttttgttactatgaataacataagaaagttttttcttttttggtagtatttacgtaaataggtggaattggtaaaaggttagagaaacacctatacacatttttaccactttttgaggactagatgagcccatccctactagaatcatctttgaattttctagagttaccaccacttaacgatattgttttatcatctttcatggtatactttagttcatcagtacttgatttatatcctatgatcatatttaattt

SEQ ID NO: 11577 - DNA, 670 bp, Arabidopsis thaliana landsberg
tcctaataccctctactgagtacagcatattgatagggttggtggactatatgcattttaacagcgaccatatagctattagctgcaatagttacctaaatacgcaaattatacctgcatagcatttagactttcccacgggatcttctcagtcaccagctcccatagtattactccaaagctgtaaacgtcagacctgtagtttaaagagtaggaggaacattttcagagatgaacggtagaacagtagttaggtaacccaagcagaaaatggggaatatacttttcatcagcagcctcatttcggagaacttccggtgccatccattgaggctgcaacacaggtaaaaaagcaatgggatttcaccctaggaagaaataaaatcataaaaatagaggaatcaattcgttaaagtctatctctagtaccgttccccttcccgtctttgtagtgaggtacgtctcatgcttgatacgcgaaagaccaaagtcagcaacctgttagagatgacacggtaagtcaactatgacaagcgaagccttttttatggtgaatatttaaatctagttccattgtggacagtattttctaccgaatataactatcttgcttttagctctattgggattaccaaaggcatggtgaaaagtttgtttttttttgtttagg

SEQ ID NO: 11578 - DNA, 501 bp, Arabidopsis thaliana landsberg
tggacaaaatggatttaatcccatagttgaaagaagatcaaaagatgaaagagattactttgaaaagagatttaaaagagaatcggaagcaattaggtcaagaaaatgaagatgaagaaactcagatttcactcacgaacacgagttgaagaatcgcgagggagatgccatgcatcagacagcaattggcagagacgaatgatgacgatttcgagtgaagagcagatcatgatcggagaagctctgataccatataaggattcggtctgcgcgataacgaacgcggagctgacatggcaaggcgtctagagaagagaggaagtaaaaataacagaataggaatattccccattaagtgtataatgcgtacattgtaaagtatttatactcaaatgcacttttacctgaagagtcaaatactcaatcatatggatacgtgtaatttcgaagagtgcatcattatcctaattatatgtaatgagatcaatcgaccaaatgaat

SEQ ID NO: 11579 - DNA, 688 bp, Arabidopsis thaliana landsberg
agaagcagtctcttaaaagaccatcacaaaagcatttattctctcaccttggtcatttcttgcagtaaagattatgattccagtctcatcaccaactaaacattcggcaatccgcatctgacgtgactgaggacccatgggacgacctcctcctctctgcatcaccatcttcgtgttgacaactttcacattcagagagtggccattggttcctggtctcaactcattaacctttgtgaacacaggcttcctcaaagcagacgttgcctcagccatttttataacaaccctacaaaaattagccataaacaacaacatctgctgtgatcagcacctaacaacaatttcaatatctgattagacaatcaaaacctcaaatgcgatcaaacaggtttaagctatcctcatttctcacataagaaacgttttaacaattcaacaaaacaatttcattctccatacacaacaaattcaataaaacgcagcaacatagataatgaaagctaaattacacaaaagatcatatactttgatcccagaaattcacggaatctcagatcggagaaatgaaattgacgtgaagaaaagtgtagctaacgttaggaagatggaattgaaacaagaaaaaagctagctagggtttttggaaactcacgtacttttttgattttgagaagaagagacgacg

SEQ ID NO: 11580 - DNA, 930 bp, Arabidopsis thaliana landsberg
taaagataaccatgcttaggttcgagaccaacttacaaaaatctccatactcccgcatccggtacaacattaaactttgtgcttcgcaaggataatcaccagatcgttgggttccatggaaaatccagtaacatgcttcatcaacttggggtccacgttatacccaacggttttaaatttatttaataacgatctcttactttttcttttaataagtcatgttttaatgacatcacatcttcaactatcacaatataattttgttctcctaaaatttaagctcagttacttctcagcaagtgttgattttcttacccaaaatgcaaaaacacattgtcccaaattcgtcttacggtttggttccataatttacatttatgagctaaatctatatacacacatacatgtagaaattttggcaatgcgtgttatacagtacaaagtaatttagtacgtttctacttagaaaatttagtgttactgttttaatataattccaaacattgttttttttccatatttggaagcatcttctactttttagaccacatcaaccaactgcatttcagaatactgataacaagtggttagattgatagaaaaaaaacaaaaataaaaaaaacaattgcaagattgctcatttaatttttcaatcttggcgattgcaatttctcacataataataaacaaataaagtaataaactataaagagttggaaaaaaaaagcaatgtataatccatttctattttattaatccggcaggcgtaaattattgtctcgccccatgacataaccgatcaacaaagactaggaggtaatggtccatgagatatactttataaaatatgagtatatgactctgatttggtctaaaattgcatgataaaaaataattatattttttttgggcaaaatcaaaatcgttatt

SEQ ID NO: 11581 - DNA, 310 bp, Arabidopsis thaliana landsberg
agttggatccgcttgaacgtatcacatcagtggagggtacttatgatgataaaatcggaggtataaccatgcttaggttcaagaccaacaaaaaagactctccgtactttggattcggtacattaccaagcttcgtgcttcacaaggataatcaccagatcgatgggttccatggaaaatccagtaacatgcttcatcaccttggggtccatgttctacccaatggttttaaatttgtttcttaaggatttcgtacccttttttttttttttactctacgacatgtgttttctcatattaatgtgtggct

SEQ ID NO: 11582 - DNA, 1248 bp, Arabidopsis thaliana landsberg
atcccataactagtttgttttattcataggctgattgtaaaatggacaaatcttggataacaaaacattttttttctcaagactacataagtggagtgaaagactttctggattttgcctttggtaatagtaagattatcatgataaaatatccttgtcagcgttgttgtcttactaaacacaagctcagagtcgaggttgaaggtgatttagtctgttatgggtttctaccttcatatacaaattggtattttcatggtgaggaactagattttcaggatcagacaacaagagtagaacaagaatctaatgtagatcattttgaaaacccaactatgaatatgcttggagatatttttccaagtatgagtaatagttttagtgaagctcctaatagtcctagggaggatcattccaagtaaaatgaggcatttgatgatttgttattagactgtcatgaacctctgtacgaagggtgtcacacgttcagcaaattatctttcatgatcaagttgtttcacatcaaatgcatatcaaggataagtgacaaagggatgtttatgataattgatctcttgaaagaagcatttgagcatgcaaagctgctaaattcgtttaatgatatgaagaagttaggatttaactatgagattattcgtgtgtgtcccaatgactgcatgttttattgggatgatgatgcatctagacacacatgcaaagtctgtgaaagttcaagatgaaaaacacaagctgctgatgaaaaacacaagttcaagttcaagaaaaagaaacgaaagccacaagctgctaaagtgcttagatattttccattgaaaccaaggttgcagcgtcttttcatgtcatcaaaaactgctaaatctatgaggtggcatgctaattctaagaataaagatggtttgctaaggcatcctagagatggaaaagcttggaaaatatttaatgaacaatttccagagtttgcaacagatccaaggaatatcagactaggattggcaactgatgggtttaatccgtttggttctatgagtacaaactatagtgtatggcatgtgctattatttccttacaatcttccgccttggatgtcaatgaagcaaacatcaatgattctgcattgataatccttggaaaacacatgccgggtaatgatattgatatctatcttcaaacccttatactagaactaaaagaagtatggtatgatggtgttttaacctttgatgcctc

SEQ ID NO: 11583 - DNA, 1216 bp, Arabidopsis thaliana landsberg
actcatggttgattaaattagcctttgagattaatacgtcttagtgggagctgtattatcttcaatggccatgagtccctttattccaccacaacagctgtgtccaataacaagaatgttctccacctgataatgacagcattacattatttacaaggctcaattatttttttggtgaacacttttagggacctcctttttagggttagaactaggtcacatcaactttttactaagaatcttatgtcgaccatgtacaattagtacgtacatgtacaaatcatctctaatgatcgatcatatatgttaacgtagaggtatattaactaattagtacgtacgttgaggactgtaattggatattcaagggccgcaccaacattagagtgctttgtctgcaagtttccagagacaaaagcttctgttagttagttgttttataacaaaattttggtatgtttatgtaaggttaatgagagagattttgaaacatcatttttgttagacgaaccttgtcataaggtggcaccatgtttgcaatgtttctaacgatgaaggcttccccaagttggaaattcaagatgcgagatggactaactcgtgaatccgcacaagcaaacaccaaaaactgcaagaagaaaaaaaaatcacattgaaataaatgtatatctttcaagtcttaaccctcgtttctaattttagggtttctttcttgcttgcttataaagttaccatattcattactaaatcaaaagctttttcccttgtttcatacccatttgggggcaattagagaatcttcaaactagataagccaaaggtctaagaggagactaaagaatgatgtaaattggcagaatcaaaaccttggggctctggctcttggcaagtgaattgtacaaagtaggattcttcctggaaattgatgcaaccaaataatataatgaccaaacatcatattcaaaacttaacactcgaataatttaaccaagatgtaaaacaatccataattatattcataagaaaaaacattttctgtcttatgctccctttgattgagtaactagattaaataagtttgtataactttataagcacaattaagatatgagtaggtcaaaaaggcggatcatttataccgatataaaaacatcaaagattcgaatatggaatataactttacgtactcataattattagtcctgaaatggagaaa

SEQ ID NO: 11584 - DNA, 597 bp, Arabidopsis thaliana landsberg
tgactatgcatcacaaaatgccatagcagtacgtgacttcgatatgagatttacatttatcatcactggttggctggggttcgttcacaatacttgagtactacatgacactcttatcacttaggacaataggttctacatccatcgaaaagtaataccatattaattatttagttaaatatgtataaatattatattgtgtacttcttttgaacaacaagatttgtaatacagataaatactatcctgttgattccaattaccccaactggaagggataccttgcaccatacaaaggacaaaagtaccacatatccgaatggcggcatggaagacaacatgttggtgcgaaagaagtattcaactatgcgcactcgttgctaagaaatgtcatatagcgatcatttggagtgctgaagatgaagtggcgaatcctgcttagtttaccttcttttttgttgcggaacgatcgaagattattatccttgtatgccttacatactttattagaatagtgcataccgatcatgctttgatcagtgcggaactccaagcattaggccactacagttgtcttgtcacggcctcggacacatg

SEQ ID NO: 11585 - DNA, 1270 bp, Arabidopsis thaliana landsberg
aaaaactttcagtccgtgatatgactccataagacgaaaccttcggggtttggtttttttacaaattaaataggcccattactacacgaggcctttgaaggcccattacaacaattgggtacgacttctagaatacatatatgaagtcaaaagtgagtgattaaatggcgaaaaaaaaaaaacaaaaagtgagtgattaaatagaaaaagatgtagtcaaaagtcaaaaatacgtaaatccttatatgtaaacacaatcgtttcattaatatggtacaaagtttgaggcccaaatattacaagtttcgtaaattatcttgcaaacgaaaaacagtctttttttcttctgtattttatttggaaaaaggtcaagccagattatacataggcttctctcccaatacaacaatgattgttgctacaaggcttcacaacacaaacgttacaatttgaaacgaacagttttgtcttacaccggaaccacttctggtagtctaccattacccgccggagtcaagctctcatagtaatccaccagaactttccatccacctgggcacataaaaccgtctggcgggttttcgttgttctttgccaatgtgcgcatctagaataatcgaaaaacatttagaggtttgttttataaacaaactatgaagaattttaacaatgtaggactggtatattaccttagtgccggagatgaacaagaaatcttgaggcctcgagggatcgaagaaagccatcttgccttgcgtcttgtcatatgcagcaacctgcagttacaccaaggaattagatctctacattgtcaaacaaaaagtgtgaatcttttcgaattgtatataccctgaaaggaaggatgttgagtcgttcgagtcctggtgccatgcttagtactttctttccatgatcagcatcgtaaagatcacgtttctctactggatgacccatcccagcaggatcacgacccacaatgtaaaagttagcaccagcattgattctagcctttgcgtgccactgcacttcggttggaccagcgtaatgccataggtgacgggaatatcgaaaccactgtagtctccggatcgagaacaccatcctctagaacctgttttacattcataaacacatttagcatttcaagatacacacactcacactcaagagacacacaacaatcaataacttttttataccttaaaagtgttgcttcatcctccaatctaaaggaacatcatcagcctttgtaacccacctaacgaatgaa

SEQ ID NO: 11586 - DNA, 200 bp, Arabidopsis thaliana landsberg
atttggatttgatggaaaccagtgtaagcatctaggaacgacaataggtcgcacccggaggtagaatccacgatttgatctatacgtggaagtggatatgggtccttgggacaggccttgttcaggctggtgtagtcgatgcacatctgaaccttcccattctctttggggacgatgactggggtgtccagccatagtag

SEQ ID NO: 11587 - DNA, 1049 bp, Arabidopsis thaliana landsberg
ccctcgtttgaaaattggtaagaaccatcgcgcgtcataacatggaacggacaaagaaacaaagtaattcggttgttcagccttctttgtaacgagactggatataaaaacattgtttttgtcatagagacctccaagatcattggcattgaagtagatcaatttttttaaaaaaaatcctatattgtcttcggcgagaactgtgatatacccaaatccaaaagaattgctttgtttcccaaagaaactattttcttccatttgtttcccttcgatgaacccaacttgtagatttcaaagttccatattcgtgacttacttggacgttgactcttaacaattacgacatctccacctacagtgacaactaaattatccctatagtgagtcctttggacttccaggaagtctcatacaaaatctggatactatttatatgcatctacgtacacttattttgaaaacttttgcttgaatttctccagaaaaaacaaaaaatttgagtttatcaaagttgagacaataaagcttgtgatattgtatacagtgtcaaaacattcctcgatacctgagatctgaggaatttgtttcttagagttgtctcctttcttgaaagaaacaacatgttctaatttcttcatcaacaattcctataactagataatctatggatttctcctctatgtggctaattaaactgttgaaatataggtaactaattcttcggtgaaccgatcaattaactgacaaattgttttataagtcgactagtccatatattttgtgacctttaattggaacatgtaaacttgataagcgtattttgctttcatttttgttcctttaacctttacggcgttttatccaaaattcctagctaataataataataaaagaattaacattttattttaaaagtaatatatcaaaatgctatattacataaataaatatgtgtgagtttatatagaagaaaatatattttagatagagatttaatttcaaacaaaatcgttgatcttacatgaagaccaggaaaaaaagcatgt

SEQ ID NO: 11588 - DNA, 550 bp, Arabidopsis thaliana landsberg
gttacaggtagaaaaccggtggagtctccatcggaaaaccaagtcttgatcttgagagactatgtgagggatttgttggagactggttcagcttctgattgttttgacagaaggttgagagagtttgaagagaatgagctgattcaagtcatgaagttaggactcctttgtacgtccgagaatccactgaagagaccgagcatggctgaggttgtgcaggttcttgaatcaatcagaaatggatttggatcatgatgaagctttttccctttttttgagcaaagattgcataggaaatgtgcagataagtttattcttttgggattttccagttttagatttacgtttgttcaatgaaattgttactctggtttacacaataccacaccgagaatactactattaaggatgagggaaaatagatcaggattacaaagttcattctacaggcgagatcaaactcctatagttatcataaactcatactttgtcacaaacacatttaaaatgttgagtttaaaatatcaaattgtgatcatctctctggact

SEQ ID NO: 11589 - DNA, 624 bp, Arabidopsis thaliana landsberg
aggcgattctcgacgtcggtcagggtcttgacgatgctcgctcttctccatcacttcttcttagggagagaggtcgattcactcccagccgttactttgttgaggaagttatcactggttacgatgagactgatcttcatagatcctgggttaaggtgttaataataataatcatgatcaaaaacagagtgttttgtgatttgtgatcgattcatgttatgagtttatttctttggttaggctgttgctacgaggagtccacaagagaggaacacgaggttagagaatatgtgttggaggatctggaatcttgctcgtcaaaagaagcaggtccttttttctactttttgcaacatcttttgatgcgaatttaaaacacactgttctactcagttgtctattattcctctttttgctcttaactttaaaaagttggtttcagagaattcatcaagacggatgcttgactttttatataaattgttgactctcaagtcaaaaaatttaattgttttttggtcttctctaatttgaaccttttcaaagtttgcatttttttaaaagtacatacgtaagatgaacaattagaaaaagtgggagaaaatgttacttttggttgtagct

SEQ ID NO: 11590 - DNA, 551 bp, Arabidopsis thaliana landsberg
catactcattgtatagaaaattagggaagcaggatgacaaattagtcaaaactaatatgacactcagcggcattggaagcgatagttcgatcaaggccaagggagtcatgtctgttgaattaaccatcgggacaaagactcttgttggtgctttcttcgtcgtcaacatagaaggaaattatagtataatcttaggtagatattggattcttgcaaatcaatgtataccttctactttacatcaaatgttattacaatgggtaggagataaggtagaacaggtacatgtcgatgcatcagcttgcattgccataaccgatgcccctgtactctagacctatgagacttccacctatctcataggagtcgatttttctgattaccagttcataagcatagatataagagggttcatccctgtaatgctagagtcggctaaatcataaataaggttaaaatgataaacacactaataaatagtgactgtcgggacgtggacggtccgacccctaaggctggacggtcaaggtgcaccagagaatggcgtagag

SEQ ID NO: 11591 - DNA, 740 bp, Arabidopsis thaliana landsberg
tcaagaacatgacggcgagcacgagtatttgtgtcataaactgtaaaaccatgtctaagacgagcagcagtttcccgacgaagtactgctggcttgcgctggattttgtttgaagatgttcttctttccgccagacgaaccttccgcagtaagactcggggtttccaatatctgcagataaagaaaggttaatatatatacacatcctcacagtgaaaagtgtgaattatttaactaccttaagaacaagctcttcaaaacattgctcaacgttgacccgagtctttgcactacactccagaaacaaacatccgtactcccgagcaaagtctatgccttcttttttagaaacagctctttcactctcctggaaattacatatagatcaattgctatgcaacattatagacactcaacatggaggacggagagacgagatgatcttaccttatcgactttattcccgacaagcatcttaatgcaatcctgattagtcgagtataggtcgatttccttagcccatatatctgataggtttgtgaacgtgtctctccgtgtcacatcatatactacacaattggagaattccaggtcacttaaagggatcacggatgacaaagtactgtgttcattaagagtgagacatacccataattataccctgagctcctctgtaatacgaacttgttagcgtcctaaatctctcttgcccagctgagtgatcataaacacccaaaaac

SEQ ID NO: 11592 - DNA, 513 bp, Arabidopsis thaliana landsberg
caaaatgattaaatattcaaattcgcaacttgaatttatcaatattaggccaaaattaacattgattttaatagtgttagtcaaccgttaatttcttatgactaagcatatattattgcgatgatgtgacgttatacgagcaaacgtggcaaaaacctccaaaaatttgaaaaattgtgacaaacaggattcaaaccttcaacctcaagctgagaatattttacttttgaccactcagatctagcaagttttgatgttactctgaatgaaattcaaatttggttttacgagaatgagttctcgggaatagtcaaatgcaaattagactgtataacaccacatcatcgcagcaatatatgcttagctataaaaaatcaacggcagactaacactgttaaagtcaatgttgcttctggcctaatatagataagtgcaggttgcgaattggaatatttaatcattttggataggaaacgaccatattattagagcgtgggtataaaaacaccgcat

SEQ ID NO: 11593 - DNA, 1499 bp, Arabidopsis thaliana landsberg
tacaggctcaacaacacagcaacaagccaatatccatagcacacagtgatagtacatcttgctcaaaacataaatctgtgctttggcattgtacaaggtgatccatatccggtcgaaacacaaacccagaagtacagagttagaaacaatcatcactagtgagttaatgggacacggagtgtaggcaccaaacgcaccatccggtgttttttcccaaaatccttctgcaattggcttgcagtaccaattcaatgcctcaaaacccatcctttttcaatcaaacctcgaatacccaaactggaaaacaaaaggcatttgcttaaatactttttaaaaggctatgcaacatacagtttcatgccccacatctataaccctaacaaaggcaaccatggtgagcagaaaattcacaacttttacaaattgtacaagcaaaaaatttgcatatacttgataatccactcaacgtagtcaaagagattctaaggttccaaaagcattgaactcatttccccaaagctaaaacctttactaaagtacattaacaacaatttggtttagtgatcctaaaagacccaaatcgttgaccaaccaagaaaaaatgaacttgtacagagaaaaggagagatcggcttttaggggaagaagcaaaccattacccttttgattagcgattgttcctaaaaattgaatctttgccagtgatctctataatgcataaatgcgacgtcattctcttgttatataaatgtggaaagtgagcctccattttagctttttcaaagtttcaaactttcttcatgggttcctcttcaatgtaactgtattgctagtcaattttgtttactaaaaattaatatatttttgattacttacaaaaatcatttatatagatgaaaaaacaaactaatcttctgtaagcaaatttatttatacatatcattcttattgaagtttatatccattagtctctggtaaatgatatagattaatgtatttagttcttaacaataaaaaaacttgagttaatttttctttcacttttaaatgtgtttcatataaaatttatgacaacaaatatttaggtaatcctatagaatgttattaattaaatgttggataacaaaacttaatctttagtaatatttaaaaatctaattttggttaatttctgtaatttatggtcatttgtcatcatccatcttaaacgatgaagcttgcgtgtgggataaatgactgaaacacatgacatatttgattgattacaaactaaaaaatatacgtgtaatctataaattgatgtgtaaaatagttaataaatctagttgtatgatttgagaaattaataacgagtaccttgattctaaagttttatacttttttttcttgtaatttttttctattgactagaagatatgttgtgtcattcaatctacgttagaagacattattgtatccctacataatctagaaacagacatagatatatacaaattaaa

SEQ ID NO: 11594 - DNA, 493 bp, Arabidopsis thaliana landsberg
cttgtaatgtcgtgttatgattgttatttcacatttatagactattaattatttatataatgcaatattagctttcaaggtgcaactcgcgggccggtattgagtcgagtcgagcctccttttacagctcgttgagtaggcgagccaagctaagctcggccactgagcgagccacaccaagccgagtgtttccagccctagtacaaccaatacaatagcacacacaagcccaagggataagaggtgtctaatatctcatttctaatcactcatactaaacctagagcaaacactaatggatgcggtctaactaatctaagtattttgcagagtacctatgctaatcaccaagtgatatttgagcatattggtgtctagagctactagaaattagtgttaactcacttgcgatgtttctcagcacccacactcataaaatggctctgtggggtggtatatatagccaaagtccaaaactagtcattgaaagtgg

SEQ ID NO: 11595 - DNA, 613 bp, Arabidopsis thaliana landsberg
cgacgtcagtaatcctctgcgttttactctgtttttgagcttgtctttgttccagttctctgtttcgatgttcttttatctttatttatcatcatcagctaaagaagttctcaagactcatgacctagagacatgcactcgacctaagatggtcacgaccggtttgttttcttacaacttcaaagacattggtttcactcaatatggagaggaatggggagagatgaaaaagcttatagggcttgagctctttagtccaaaaacgcaaaagtcttttaggtatatcagagaggaagagagtgacttgctggtcaagaaaatttcaaaatctgctcaaacacaaaccctagtggatttgggaaaacccttttctccttcactgccggtattatatttagacttgcgtttggacagaacttccgtaagtgcgattttatcgatagggagagagtcgaagagctggtggtagagtcagagaccaacgtaggcaccttggcattttctgacttcttcccacgggtctcggatggcttatagccggctctctggtcaaagttcgaggatgaacaaagtcttttcagactcaccaatttatttgaacatgtgattgatg

SEQ ID NO: 11596 - DNA, 422 bp, Arabidopsis thaliana landsberg
  unsure (1)..(422): unsure at all n locations
gcctggcctcctaaaggcggcagaccgctggtaggagcgctgtagagagccgaggcaggagtgggtgcctcattcgctatggtgagctcctcaaggagaagctcgttccgcacggcgtggaaggtggggaagggcacgctccgcttgatgagagccttcaggtggccgtagcgagggctgaggccatgcaggaggttcagcaccagggtacgatcggcaannnnnnnnnnnnnnnnnnnnnnnnnnnnnnnnnnnnnnnnnnnnnnnnnnnnnnnnnntcccacggagaggtccccctgagagaacaggtggaactaggcgtcgaggtggagcgccgcgcatcccgattcccgaggaactggtcctcgagagcgagccacgcctggggcgcagtgtccgcctggtcgcggatgatgtcttga

SEQ ID NO: 11597 - DNA, 955 bp, Arabidopsis thaliana landsberg
ctatcacatcccacctaccaacaatgatacccgtaactgtctctcttatccgccaccgtctccggcacttacgccaccgcattcgattcaaatccacctctatttctcctttccatttaccactcaaccaccctacctacttaatttggtcagccaacacttctctcggcaaaaccctcgtctctacaggcatcgccgcctctttcctcctccagcaaccttcatcttccgccacaaaactcctctatttgaaacctattcagaccggcttcccttccgattccgattctcgtttcgtcttctccaagctcgattccctctccctccgtcgccaaatccctatttcaatctccaactctgtcctccattcttcactccccgccgcaaaatctctgggattgaatgttgaagtcagcgagagtgggatgtgctctttgaatttccgggatgagaaaaccgtcactggagcaccggaacttttatgcaagacgttgtatgcttgggaagcagctatatctccgcatttagctgcggagagagaaaacgcgacgtcgaggactccgtcgtgttacagatgattgaaaagtgtttgaagatagagatggaatgtggagttaaaagcgagaaatcggatttactatgtttggtggagactgccggtggagttgctagtcctggtccgtcgggaactcttcaatgcgacctctacaggtaacacttatcttctacttggatatcgaatttgatttatctcttacttatggttgtgtattgtatatctgtaatcaggccttttagattacgtggaattcttgttggagatgggcggcttggtggtatctcagggactattgcagcttacgagagtttaaaacttcgaggatatgatattgctgctgttgtttttgaagatcatggccttgttaatgaagttccattaacttcatatctaagg

SEQ ID NO: 11598 - DNA, 1113 bp, Arabidopsis thaliana landsberg
tttcacctgcttccttcgcttcctctgacacctcctgcacagagaaactactataatcctccaagatcttctcaagctccaccagtaaatgctcttgacctttagaagcaattgtaagtccgtagttcaacatctcgttagtgtttttccctccatctccgtcttcttcgtcgcttgaatcatgtgagatctctttggtaggacgaagcgtgaagaagtaatgagactcatcgaccttgacagagttctcatcctttgtcaacggccattgaatctcatcggagacactagcgagaacagcgacaacattctctccttgaacaatacggatgatctcaagatcgccgcaagcgagctcgacgctgtaagatttgtcgattaaatgaagaatcgcgccggagattttcaaaattacttcctccgtcgcagcgggaggagctgaaaccggaatagaactcgtctctggttgttcagggaagagattacgagcgagatcattcatatcgagagaaggatagagattgttagtagaagatgatgagctagggtttataggagcttcgggattggatgtgtcaacagtagggtaaagagaagaagtttgcttgtcgccggaggattccattttcgccggcgattcaaatcggagacgatcaatgaagaatgattgacttggtttggttctgaattgattaaagatatttatatttgaagaagaagaaggaaagggaccaagttaagtatctctgtatctgtcagatttgggaagacgtggatgttacgcgtaaatgacgcgtgtaaaacggtataaaccggttcggttataactcaccttgtcgacatctttcccgcgctgttacacggttaattgttctcatgtcggtcggtcgcttttttcgtctcggaaattgcattaaactcaaaaaaagagtgtacttaaagataatttattatgcagttgcgtatcactaaaactttatattatttaactgaaataaagaaatgatagcttcttttgtttgtttttgagtaaaaaaaaaaaagaaggtagtaacgttttttcttttctgataaaaggtactaattatttactctacataacatgctattaca

SEQ ID NO: 11599 - DNA, 1395 bp, Arabidopsis thaliana landsberg
ctttaaccgttacccttagaaagtatatctttttggatgcaaatctttggtgacactctattcctggattcagcatgccattaaactgaggaggttaaatatggaggaatgcactaagctagagagtattccaactcatgtcagattgaaatctctggagtacctcaatctcagaggatgcatccacttgagaaatgtccctcagatttcattctacaattcatccggtttcttttggtcggaattaacatcaaccatcacttatcttgagcagtaagacttctgaggaaaggaacgtaaagtctctctacactctctctatgtttttactgattgactatagcgtgcttcctgttgagaattgttatcacttctctctaccgtctctcagggcgtcttcttcttctcctagtccaaaatacgatgctatgacgagcttccatggaccagatgtccccaaaacattcgacagccatctttataaggagcttaatcgcaaatcgatcactttattctatgatcaagaaatcgagagatcccagacaatcagccctttacttgcatcggctataagtacatcgacggtctcaatagtcgtcttctctaaaaactatgctgcttccatgtggtgcttggatgaattggtgcagatccacaaacgttctaagaacatgggtctaaacgtgttcgcgatttactatgacgtgtctccttgggaagttcgaaaacagacggggagatttggcaagatctttaagaaaacctgcgagcgcgcaacagaagatgaaaaagaaaggtggatgcatgctctctcagaagtagcaggtctaactggagaacatcttcagaactggtaatcttgtttttaaattccagatgtgtgtgtgctgggtttttccttgtcattagttatttcagaacttgaatttctttgagtagacttcgattgtgcattcagtgatgctctttaatgacactattgactaattgttattaggcataatgaacaagccttggttggaaaggtagttgacaatatttcgagaaaacttatagcaccatccaatcgttttggcgaattggtccgacttgaagctcatataggcaatgaatttgatatcaggaagagagggtggtagggattgtgggaccttcagggtttggtaagactataatagtacattttcaacctctacttcttcgtatgttattaaagaaccaaccagggcgactatgaaatcaattcgtaatcgggaaacacaatttctgttagaaatttatttgtcaaaaaaggacataaagatagagtaactaggttttgttgaagaaaatgctaaagcacaagaaagttctgaggatgatgatgttgttacaaagtccattgataataaaaaa

SEQ ID NO: 11600 - DNA, 777 bp, Arabidopsis thaliana landsberg
acaagaacgggatcaaaagcaaccgtttctcgaacatcattcaccattaagctaactaaccaagaaagccctatttcctaagtaacgtaaccaactcaaattaaaaaacaaaaaaaaaccctagacaggacaagagaaaataccagtttctatcaaatttcagaccaaatcaagacatggtacatgaacatgataaaaaccaaggttttgtatctaacatgaattaccagtttaccactagatcaagaaaactgaaaaccctaagtaaagtaatcaaatcaaatagaagaagaaaccctagagaggagaagaagagaaaagtaccagtttcttggattcattggcgtctttgaccttctcgttccaaacttcgagggtatggcaagcaatcacttctccttcaccggccatttttattatttgttcttaagcttttaagagttttgtttgattgatgagtttttttggtgaatgaaagaattattcttgttgggatcagcttttataggcaagacttgaccacctatacctctacctcttctcggtctttttttttaattattttcctaaaatgagttcgagcttgacgcgtaggagtgtgaagggatccaacggtttatattaaacgattaaagaataggcatgagtctaggtcaacggcgtgatgatggtaacgagtaacgacagttctagatgaagaagacacgcatgttttgtgtgcacgatatatgagtttatccgttcttttctcgtccttgcagatataaaaaagtaacg

SEQ ID NO: 11601 - DNA, 502 bp, Arabidopsis thaliana landsberg
tttcttctatttcttcatgcaaataagtgtacacttaaaatactactaacaattatcgttccacacatactaaagtgaaataaacatttctagtatgaaaacgatggaagtagtgaatagtgattgtgttcatttttagaattataaaatcatacgcattttaaaatattgtcatggggttcgattttggttacacgtatacatcggaatctctaaaatcatacacgaatcgccaaatcgcatcaatattacaacaataaatcgtaaggttcaaaacatgatttagaaaataaataagtgggttgtcttcgaccttggatgaacggacgatggcaaacaagctcgagcgtgtgtctaggcgaagggttggatggggttcgggcacatcttcggtgaggcacgacggcgagcggtggtgctgctgcgcgtgcgggcaatgggttcttgacatcggacggggctccacgaggtggtgcatagacggagctcggcatggaacgcg

SEQ ID NO: 11602 - DNA, 1084 bp, Arabidopsis thaliana landsberg
gaactaaatataatatgatcactaattattacagccatatagaaccttcttcttcctaactcttcttatatacgtactaaacgtaacactctctctatatctctatctctcaatatatctcacacatcagacatcactcatatctttagattcacattaatgcttttcaactaaatcctcttcgtttgattctccgatgacgtccatcagttcctccgatcacccccttccggtgagcaagaaacgattaaagccattgatattacgagatttccttctcgatgatctcagctcttgctcatccaacggcttcaaatctttccctcgtctcctcaacgctgagatccaacggtcaggaatgttccaccacaatcgccgtattacctgcggattagcgtttagtcacgccgttcataaagcttcgacggcgttactcaccgccgttaaactcttgcccttcccttcctccgttaaatctcagtctcgtgatagagataacaagaaaggacttttctcaagaagcttctggaagaaactttcccgacgtgaacttaacgtcgacgtcggagagaaggaacggagaacggatgatcgtgaagaggagatccaacggtgtagatcattcgcggagtttcttcaagagagtcaagatcaactgtctgatcagatttattatatttctccgacggatttattttccggtgaagtaacattgtcaaaggacgccgtcggtgactcgtcgagttttagtagcgaggactcggaggtgactcagtcatcaagcggagtagtagtagttatgaggagtggggattgtgtagggtcacatgttagtgacggatcgtctttcaacgacaacacagaggttagtaaattactttacaaactttcaatgattcgaaatctttcgggctcgggcaaattcagtgaccatcccgcacgtcaatttctcaatgcaccaccaaccatttaaatcacaagttattccaccagcgaaccattaggtgaactaatactagaaattacgtgtaaattgatatgatgctgtttaagacttaagctgagggagttggacatttttgaa

SEQ ID NO: 11603 - DNA, 993 bp, Arabidopsis thaliana landsberg
tcaagatcaatccctataaaatgattaaaccttaaagttaatgtgattattcatttcatcattaaagtacaattatctaaatggtagataacattttatgaagtttaaaattaccatgagttcaatgcaacagaagacgatgaaagttgtgaaatgagtgaggaaagagtcagcgataaaaccaccaaaaagagtgagtaaaaacgatgttcccatgaaattagtgaccatgtttgctgctgtggctggtgtataatgcattgatcccataaagtatttcacgaaattgaatccattagctatgaacactatgttctccatcatcaccacaactacatttaccacaccatatattaagacattgaaaatggaacaaaataaaaatatgaagttttgagttttaaatatttaccacaaacaatagatgcagctctgatcccaccatgtttccctgggattgcctctttacctttccaatcttcaaacttctcttccatatcattctccatagctttgttatatgaaatgatatttctatgtgtatatgtgctttcgatgtatcttatgaacacgataaatctaacacattatatagtagtgaacaagtatttatatgtagctaatatcaatctaaatctgacatagtgacatgtgacatttgttaaacatgctggccaatttagacctccttttagtgaaaaaggaaaaatatataaatatattattaacttgttgataaatatacaaataattattttgtaatataaaaaattaaaaattaatcttacaaaagttataatgacttttacatttattagagattttaaaaaagtatatatatggtttaagatatcttgaattcatatatgtaattaaatgaacaatatattttacacaatatcttaaattatatatgataaaacttgtttactcatatgcaaagactttcgatatagattagttagaaaattatttcagtggttctgttcacat

SEQ ID NO: 11604 - DNA, 541 bp, Arabidopsis thaliana landsberg
  unsure (1)..(541): unsure at all n locations
agtgatatgaaccgttcgtatgatatgattagtgttgctccaaattattgttcatatatgtttttagaacaaaatatagagcatcattggagtgatttttcaccaaatataaagtttggaacaagatattgaataccataggagatgctctaaactcgcatacatgtcgcacagacgtgtcccggttcatcaacaaggtcgagcgtcacgaaaagcatcacatgctgttccgctatgccttttgcatctctatctctccagttgagcccgcatatataagattataagcctcgcaatgcgctatagactggagagtgaaaggcagagtttcgaacctcgatggtctactatctagatgtaatgtaatgctcgatccctgattaataattgtatagttccttcatcggtttaaattaatgcatgtagaaattagtttaagaattatattttttttaaacaaaaatatagatttactgacaatataaaaaatangaaatanaacaaataatanaacgaatggagagnatatagactcatgaat

SEQ ID NO: 11605 - DNA, 1143 bp, Arabidopsis thaliana landsberg
tagaaataaattctaggaaactttttgtaagcttcaccccatcattttgtaattaagttcaccaagagaatagaaagaaaggttcaaataaaagagtattcttcataagttctctaattctctctaaaaacttttaaagtattttttaagtgttcttccatatttttcttcagatttaagagagtttctcgggtattacggtaatgagctagtgttaagatttctttactagtccaacaccgtaatatatgagaaacccgatataaatcaagatgagaaaccctcttaaatatgaaaaaactatggaagaacatttagaaaatacttgaaggaatttttgacagaattagagagcttttgaagaacactcttaattgaactttctttttgttcacttgttcaattttatatagacaatgtatcaaaaactatgttgaaaatgagtataataatgaaaacaaatatccttttatttttcacacatctttatttcattatccaatgctatttttcttgattgtgttcctgataattaaggaattacgcacaaattataatgtggacttgtggcataggactactacaatcagttgacagagacgacgatctggttaatggcatggccactgagtttgatagcttccttggagatggcatgacgatcatagaaaccttttagtctgtcaaatatttcttgtaccactgattcgtcggttcctatcgatatcctcacccaattctctgcccctagagccactcctaaaaatttcaacacaaaataaatataaataagtaaataaaaaaagattgatcataattaacgatgcaaatttataaattaaaatcatatgtaagaagatgattatgggagccccaagttcttaagatgttgtatattgttaaagagatcaatacctggtataaggataagactctcctcactaactagcttcgtgcagaaatcaaaatcatttttgatattattcaacattgatgtgtcaagcttcaactgtaaaataaatcggttaagctaatcatttattattataagcaaataatatggagccatcccaattgcaaaaaaaaaaatcttagaattacccaaataattccatgtaaaaaaggaaattataaggtcccccc

SEQ ID NO: 11606 - DNA, 1511 bp, Arabidopsis thaliana landsberg
atatgaattataaacaaacttacatcagttggcttcatgacgtccaatgctttgcggtaaaagaccacatcattttttgctgtaggaccattatgcttaccgttccacttaagcacaaatgggaactgatcatggatgggctcacgattcagctttggcctgccaatgtttaagtgatagtaactccaacactacaggaaacagaagataaggaaagaagattaagtcaatgtattcaatgctgaaactagcagagacattctggataggttcggtaataatatcctcttggatcaacagtttaaagaacaggaaatgaaaaaccttaagtacctgtaatagcgtcaagcaaccacatatcgtgctttgggatttaacagaagcattcccaagtgctctatacaagaaagccaaagcagcagcaccccaagcaaatgttccagcatcatcaaaatcctcaaacagcggaagatacataacaggcaccttgtttccagaggttgttgagaagatggtactccctactaagtacaaaaggtaagcccgtgtacggcgctcaacttcttcaaaagatgcatcataaggacattcagagaaattatttttcaaccagctaagcttaaccattccaacactagcggaattagatgctggtgacttttctaagtacctcttacataccgcaaaacaagttgtatacgttaatccaatgacaggtttaccatcaatccccaatcccagtaacaaggcaatgtcctcaagagtcacagtcatttccccaacagtgaagtgaaaagtgttggtctctctcctccatcgctcaaccaacgcagagataagagggttatcaagactaatagcagggatccgtctcaaaaacccaaaaccagctctctccaccaattctatctgctttggtttaagcttccactcacccaactttgatgtatgctcatgacacctcaacgcacctcgctcctaaaccacataaacaaaatgcaaaatacataaacaacaacactaagcaaaagcatccaattaatgtcacagcttcaacaaatcgattataactatagagaagagccataagagttaaaacctggccatcccaaacagcagatgaaacatgtttctcttgatcatataacacaatgtccttaagtggacctggattcgctaagacatccatcagaatcaacactcacctgcacaaaaccaaacttgaatcaaaaaattactccaaagcttcaaactttaccaaaaaaaacaataattttgataaaaaaaattgtgccctgaagcaaattatagattgaattccatgaaatcgaagaaaccctaataaaaaatatccaatctttcaagacaaatgtaaaagacactacgaattcgattaacagagaaaaaggttagatttttattatcattgttgggttacagaaaagagcaatatagaatcagagagacaaagacgttaaacaacgaaacgacgccggagaagggagagacta

SEQ ID NO: 11607 - DNA, 991 bp, Arabidopsis thaliana landsberg
  unsure (1)..(991): unsure at all n locations
acgaatgatagggatttatttagtgttcgttcatttggctttcaaattttagagcgaaatataacgtttgtatatggggttgggatgagttttcagcgattccgacctgagcttatgttattttctccaacctgtcccgggaagagtccgaaagatatacatatggttgtaaatcatttgtatatatatatatataaataattacatacaaaataaaccaaattaaatgtggttacctgtaaacatgaccacgaatccagaagcatagcatttctttgaatttaaacagaatctaaaagatgaattttcaactgagtaagaaaaatttaagatctcaatgtagttattatatacttatattctttcattaaatagaggtgtcgagggccaatattaggtttctaattaggacccgcatttgtttccctgcctataaatttcccaaacaaagcccgtcaaacacatgtaacagaaaaacacacaaacacgtctacgagataacacgaaacgcaagaacaatccttgttcattgtccaacattctcacgcctatacacaaacacatacaaacacgcaaaaagtcattaatatatggatcaaggaggtcgaggtgtcggtgccgagcatggaaagtaccggggagttcggagacgaccttggggaaaatatgcagcagagatacgagattcgaggaagcacggtgaacgtgtgtggcttggaacgttcgatacggcagaggaagcggctagagcctatgaccaagctgcttactccatgagaggccaagcagcaatccttaacttccctcatgagtataacatggggagtggtgtctcttcttccaccgccatggctggatcttcctccgcctccgcctccgcttcttcttcttctaggcaagtttttgaatttgagtacttggatgatagtgttttggaggagctcctngaggaaggagatgaacctaacangggcaagaagaaatgagcgag

SEQ ID NO: 11608 - DNA, 538 bp, Arabidopsis thaliana landsberg
tatcacgatgaggcacagactctctccaatctagttttataactatgtttttccctttctgaaacccttgtcttaagtcatctccaaatgatttatcgattaacaccgatgggattgttagcttctctatgaaaccatccgcatctttgctctcctctggtgaatccattgtcaacaatggctcgtctacattatccgccacaagaactgcagccgcgcctgcttgctgcgcgtgccacgcttttaaggcaaagtagcaacctaaaaacatccaataatggagcaaagattacttgagagattaaacttttaatctttctttgtaaaaaaaatatatctttctgctcaaaatgtatttttgcagcataacccataaagtcctattggctaataacatagcagactaaagtttaaatctttgaactcaaacaaaacaacagtaaatggacaaaacagaggttttaacttttaaagatgtttttaacttttttacctccacgatcaagaagcagaatagtgggacgaggaaacttgggct

SEQ ID NO: 11609 - DNA, 820 bp, Arabidopsis thaliana landsberg
ccccagacccataaaaagttgcttgttcctatttttccaagaaaccatacaatccaagggaaatttgacttgtctcattgctaatattttcattgccctcatggagaaaacatatttgaaattctcaaggtcgatgcatccaaaaccttcaggaggaacaagaatgttagagagtgcccacacttgtcgagcataaggacaaagaaacagaatgtggttaactgtttcctccactgcaccacataagagacatccatcatagttatgaattccacgtgtctgtaatctttctgaaactataattgcccccttaatgcttttccacagaaaaacctgaatttttggagatgttttgagtttccaacagtctaccgaaatcggaaacaatgatggagaaagagatggtgcaacaaacttctctttattttccaaatgatagatcagctcataaccggatttaacagaatacacaccattccgatttccagcccaacagtaagagtcctgtctcgctaataaaggttttgtagaaagaatgcgactcacatcatcaggatgtaacaactcaccaagaagccaaatattccacaaactagagtgaagatgtataacatcagatactctaaggcgaatgttcataagagattgaatactctgttatctctagcagaatcatcaaaaatccatttatcaatccatacccatatccttgccattaccaatgacacgtttaagccctttgagaagtagattcctgccaaagaaaatgcttcgcccaccatatgaaggacgagaacccaatttaccttgcaaaagcatg

SEQ ID NO: 11610 - DNA, 716 bp, Arabidopsis thaliana landsberg
aactcaagctcgcagctgtataacagcaagctacaaggtgatcttgatgaagctcacgagtctataaaacgcggtgagaaagaacggactgccattattgaaaatattggcaacttgaagggtcagttttcagcattacaggaacaacttgctgcttctaaggtgattgatgctctatcaatagtagtaaatgtttatagttttggtcagaatgtgatttggtgtcttgtttttttttcttgctaggcttctcaagaagatatcatgaagcagaaaggtgaattggtaaatgaaattgcgagtctcaaggtagagcttcagcaagtcaaagatgaccgtgatcgccatttagtggaagttaaaaccttacaaaccgaggcaaccaagtacaatgacttcaaagacgccataaccgagcttgaggtttcctatccttttataacttctttcaaaggaattctctgtcaaattaatttctcttaagataatgtaaattattttggtccagactacatgttcgtcccagagtacccagatacgacagttgcaggatcgactagtaaactctgagaggagactgcaggtttcatcacatttttgagttacacatacaacaaatgactttactagatttcacaagttcttgataccattcttgattgtttatggtctaggtgtctgatctatctacctttgagaaaatgaatgagtatgaa

SEQ ID NO: 11611 - DNA, 1103 bp, Arabidopsis thaliana landsberg
tgtcacatcttcacacacctaactacactaacttagtaatgtccaccaaacttaaactatttctttaggtctatcatattctttttgtgaccacaaaagagactaaaatgaatgaaaagaaacaaagcactacaagattcgtatattagataatgaaatactatttaaaattgtataaacttttaagtgtaaatataaaaaatgttaatacatttatttgtgacaaaaataggcattcgttttaaatcctttgaactatttatcttgggtccttctgattcaatgtatgggtgtgttggaattaaacaaaacaaaagtagtatattcttttcattttcaaaacaaaatggcctcataaaaagaagtacacattcattctctaaacaacattcaccgtaacaactttatgttagtgggaatgccgttgcttcttgggaataggttaaaacttaaaatcttgccagatatttttggatgtattaacgtgaacaaagactttcaaatgagagagagagcacttaggttactttgtgccaataagaccacagtgcttaaacataaagcaaacatctataagtacttgaaacgagaaagagagagagagaaagtgaatgagcgagacattctaaccaaactcttcgtaactacggcggcgactgaagcgttttcagattccgatgagtgagaagcttgtgttcagaagcactagtggtggtgactactacggtgcaccatatggagagtatatggagaagagacagttgtttctcagaagctaccagttttcaagaaaacagagtttcgctgagaaagtttcaagatctgttacgagagtgaaacgagttgtgttgacaagattaagatcagctccgaaattgaaacgcgtcgtttggtcacgactcagatcggctttttactaccgtcggagacgtttttttcgacttcttcacttacacgaaccttgttattggttctaaaaggttttggattagtgtttgtttcgtctttaattggtgttatgcttaaataatcactgataatctcgttgttggtctgataataacgcttaatgaagtttagacttgcttactactattttacgt

SEQ ID NO: 11612 - DNA, 1513 bp, Arabidopsis thaliana landsberg
  unsure (1)..(1513): unsure at all n locations
aatatgacacatcattataaaagtctaagagctcatttgtttcaaatttggaaaaccatatacatcatttatattcaacatcctatatattgtttaaaactttaaactcattcttttttttcaattttttattttttataattcgaatgatctggttcaacagattttatgatctctgaaccagagtacgaagatttctttttctagctggttcttgggtcaatggaccatgnnnnnnnnnnnnnnnnnnnnnnnnnnnaagccatgtgaaaacctctaacactcacacatttgtggagtagtttttagggtagatcaaactttgaatagctcattacaactttttttagtctgatcactaccactagaccaagcttgtgtgggcaaaaagacttcgttctcaagggcggacctagtaaagaagaagggggtcacttgacccaagttaaatagtcaaattttattttttgcataaaattttgtttagaattagcagaacaattggtaaattccaaggtgttgacacccccaaaacatgagttcaaatctctataatgacacttttactcttttctcctcaatttagttttaaataaatgttttttttgtcttatatatttctttacttttttcaaaataacagcaattaatataccatttttatttccttatgaaattgattttatttttgtgagtttgtataaatattataagaaagttagttataaaatactgtttataaattttttttgaccccggtaaaatttatttatgggtccgctcctgctcgttcttgcttataaatgtaaattttgtttctatttgagtatgcagaaaaatacaagtactatatatataaaacactcgttttttaagtcatgtaaattatcattaatgaatgaaggaatttgtaagttaccaaaaaattgcttaaccagccaagaggataaaccttgccaaaaaagaataaagaacaaggatatattttgcatgtcagagattaggtattaccgtattagcaagccaaagctgcattagggaaatcccaataaggtttttacgttcatgatttcttgcacgactatgatctcgtcaatatggaattatacaacgtctgctatttgaatatggctgccttaggctctctcaaatcttatctatactgcatattcgattggacgaaatggaactatgattatttgccaattttgtccatacatcaatattttcaaagtattccctggaattgtttcttattggtgttaagattttgtcattgttgaagtacttttgatgttatttttatacgtaattaatttaaatgaagtgaaaaacaagaaatgaaacttttttgtttttattcaattgtttcttttgttagtttttctatttctaaaatcttatttttcatactttggaatattttttagtttttttgttcatcaaatatcctataatttatttaaactttttaacctaatgtaataatacaaaataaattagacggtatgct

SEQ ID NO: 11613 - DNA, 428 bp, Arabidopsis thaliana landsberg
  unsure (1)..(428): unsure at all n locations
ccaagcgtctgcagaactccaagtaatagtttactctgctctgcacggctgcaggacgcctaccgttgcattcaccaccattgatcttcctagtggtggctccaaagccttggtccaagactggacgaacatttaggttccagaaccacatggcacactgaaaggcaacttgggggctacgagccaccatgtctggatcagtcaagagagggagtccgaggaacnnnnnnnnnnnnnnnnnnntgtagttccatgtgatttggattggaccgcggccgtaatagtcttttcccggtgtacaagggtacgctgtgctcggtgagcagtatttccctctagctatttcttctttgtagcaaaaaccttgcataacgtaaaagaatcgttatttaaaatagagaatgaatatgtatgaattttagggtacg

SEQ ID NO: 11614 - DNA, 798 bp, Arabidopsis thaliana landsberg
tttttttaatcaattttttgtacttcattgtaggaatatgatcactaataacatttccattatttcaataactgattaatttttgctatgtgatattaatgatgtaatctaaaaattgttgtactagtgagtagtgatgatttatcaatcaaaacaccaactcaacacccaagctataatatatacaaaaaaaaaaaaaaatctaaacagacaggcaattaaatatcctccttaattaaagacaaaaccccaaataattctgattttatatatcactagctattatgtaccaactaccatcgatcgcccatgcattacatgagcaatatgcagcatcaaaatttcaataaaagtctaattctgttattaaaaaagggagaaattacattctcacgctctataaataacatgagctgcaagaaccataacaaaccttatttcaaatggctaaaaccaaaaatgttatttctttcaaactttctctcatcttccttcttaatattttcatcgtagccaccatcgcagccgcagcggccgtttacgccggtaccaaaggtttggattctcggccgtccaaaaccaggcgtccctggcctttcaagaagctcaacaaaccggtggttttaatgatctcttgcgacggtttccggtttggttaccaatttaaaacggacacaccaaacatcgaccttctcatatctggaggaactgaggccaaacacggtttaatcccggttttccccaccatgacattcccaaaccactactctatcgcaaccggactctacccggcttacc

SEQ ID NO: 11615 - DNA, 775 bp, Arabidopsis thaliana landsberg
aaaaattttatccacatccaaatgttgacatcaccaaaagaggtctaaagcacaaagtcggtagagattaaagatttgaataatgggtttgagagtaaataaactaattgtatggatttggagaaatgaattgaagatgaacagaatgcaaaagttgaagtgatggtgaaattttagagttattccatcttcttatatgatagattcaaagttcagaaaaaggaaaataaaatatatttaaaagtatatttttcactaatagatgttttcagatttttacccctttattttactatattctattttatgataaagctcttagtggtttaaattttgatattatagaaaacaaaatattttctttccttttttaaataaattggcataatgaaatattttagaaattgactttgactagaaacttatataataaaatggtaaaatgaagaaaatgtaatttcttattggacttgtataataatatggttgaataaattaagaaagaatcttcttctttttttaacaattaagataaaaattctttagattatgcgaaatctatgaacattcatgtaacacaattaatgatgattagatattttccctattccaaagatttgttttcttagtattcaacaattctattctacaaatcaaatttttttttacattttcttttattatatatatatatatattctttttttcatcacttttattagattctaatgttgataaatcacatttaatagtttttaaagttaaatgttctata

SEQ ID NO: 11616 - DNA, 962 bp, Arabidopsis thaliana landsberg
agcttgatgaagcaatgtcgtttgatctcacccaatgcacttgagcaggccacactatccggtgagctttgtttggttttgatggcaatgtggttaataactcagaaggttgaggtgaagtcaaagagttgaccggtcttgtgttaagcggtggtggaagaatccggtaagttctgacaagaccatgttgccgaccttgtcgtctcatctcaaccgtcgaatattaaagaaagaatgaaagagagagagagatttttcgaatttggaagttagcttgaatgatatataagccaagaagagctttaatggagtcaaaacgtaacatccaacaacaagagtagtttgtgggttaagtcaatgagttgttatagataacgtgcaggtcttaaataattgaagacttctttatctttgccattacagaaaagaaaaaaaaaacagaacatatatgaatttagaatttgaggttacattattgtttatacttagtactcacaatttaaaaaaacttttattcaatttcttaaaccttttttttttttaatatctgaaagttcaaacctaaaaatcatatatcttctctacatcaggttaaattcaactctttgggagaagagatcccttccacctcgaactcagcacctctaccaaaaaaatttaccactgaccaacagtacattggtaatttcttggtaatttcttaaacttattgtgatgaagaaatcgataaaataacacataattctcaccactgaaagaggactttgataacagagagaagattatgctgcaggaaaataaaatgattaaccctgctttggtcaataaattagaaccattttgacacaagtcactaagacctgaatacagatgtaacaatatacaaataagttacaaccaaaatgacaacttcaattggcaaatctaataagttaaaactgaagactgattcttaaaaaagt

SEQ ID NO: 11617 - DNA, 506 bp, Arabidopsis thaliana landsberg
cgttaattgtgattatcagtttccttttctttgcttataaataaataattagtgagagtctcaacgcttcttctaaaacattcgacaaatcaaaactctctatctctcgcttcttcttattcttcaaccctagttctcttctcaagacaattttgtcttcaaagaggagactacaaagaggaggatatagccaagagaggggagagctttatggtggtggatgatgtcacgagagggctaccaaagaccgacgggctcaaatctgactttggaatgggctttgctctatgggccctttttgctactaaatccaacaaggtattacttttttcattctttttttttttgttttatttaccttcaaaattatttttaagtaaaactaattagtttcaccataacatttatataactaaaatgtttatatattttcattagtttaagtgtaaaatgtttttacacctatattttattataactttagattttttttatatagataagtg

SEQ ID NO: 11618 - DNA, 510 bp, Arabidopsis thaliana landsberg
atcctagtgcaagtcaacttctgtgccagaagtgccactgtgcggtaaagagcaccagcactgaaaaccacccgccctcgaatactagtcatactactgataaaaatgtcagtatagaagcagatcaagaatcactcgcaagcccgcgtctcattcgcattgtgaagtgtaatagcggtgatagcggtgaagctgtcattgtcatgaaacaagaagtctctccaagcaattatagtggaaaaggtgatgcagatgaacagataagagcgaatccaacttccagtgaaaaatttgatttctcgttgagctcaaagaatagcctaggggactatagcagcagcacaagcatgagtgaggagagcaatctgagcaggtttagctgtggcaataaacctcacatgtctatggatgtgagatgggaagcagttaagcatgtaaagttgcagtatggctctttaggattgcgacatttcaaccttttgaaaaagcttggttgtggagatattggaa

SEQ ID NO: 11619 - DNA, 804 bp, Arabidopsis thaliana landsberg
gaatatatgtcggatgatggatccgaacatgatgatgtgacaaagatatatgtactaggttgtactaaaggcatagaatttctcaagtttggctatgtcaaggccggaaaattgttagatggatcattccatggttattcagacacaggtttcacacagatggtatgacttggaaatatgcttattaaaattccctttattcgtgttcatgtggatacctttgaccatttttttcttttctctaaccaatgttttcgcagtttgagattgatcatcgaaaaaatgaacatcttttatctgtcgagggttactttgattactataacgatataatgtatgcgattcaattcaaaaccaacttgaagatctctgaaataatgggctatgaatattctggtcacaagtttacgctagcaatggagggcaaaaagatcattgggtttcacggttttgctgatgttaacctcagagctcttggagcatatgttacttggataactcctgcaagaatggaagccaaagggggcaaaggaggcaatgaatgggatgatggaggtgactatgaggctgtaacaaagattcatggacgaagtgatcataaaggaataaaagacatcatattcgattatgttgacaaggatggacatcccaaaagtgaaactcatggtcctacctcgggtcagggttacgtacttgagccggtatgtgtgactaggaaataaaaataaatctcccaagatatttgagtccacaaaatattttttaaatggttgttgatgtattgtttttacgtgttgtgttgta

SEQ ID NO: 11620 - DNA, 649 bp, Arabidopsis thaliana landsberg
ataagaatttatttgacaacttctctcgtatatataagtctcgagattatcctacttgaatccaaaacgacatgtatagacgcgatcaagacgtgagttactaaaaacggcgattagattctaccataaccggagatttcccaaaccctaaaggcgagggttgttctacagtcgtcctatccgactctgctgtgaagaagttttcagacaatgtcgtctacagattgtacaccaagggtttggtggtggaaggtaaggaaaagaccgtgaaggctggattggagttgcgatttgcgatgagaaggagaatttgttgtatgagattaaagaatcactaagcgacactaagattagctgcatagaagtagagagcatggcactgattcgtgggttaagagaatccttcgatttggggatcagacaagtcgtggtttattgcgatgaccaactgctttaccaatatgtaagtgttttctcttctttgttattgctttagtttagttcttgaagtgtggaaatagttagaggccagattggtgattttgcatgttagaatatactttgaattctttggaatgatgatataatgtcttggttttaatgagagtgaattctgatttacattacagattgttggtcgagggaagat

SEQ ID NO: 11621 - DNA, 856 bp, Arabidopsis thaliana landsberg
tttgtaatagctctgtttttttttcctttaagtatatgcttcattatgatttatgaaacctttttaagtttggtaatgtttgtttcgaaatgtctttggttttgcagaagaacactccgtggctatcagtgccacagtttggtgattgggaccaaaaaggaggaggaacaatgcctgattactctatggatttcactaagattagagagatgaggaaacaaaacaagagagacccttctcgagccagtttaggcaatgaggaagagctcattaagccacccgagtcagcaacatcaactgctgagcttaccacggtccaaagtgaaaaccaacgagagttctctcccagccaccatcatcaaccacattctccttctgtaagattcttcaccattatttggtttatatcatattattccttaattatatttgcattactatcattaagacatttagaggcatattactatattagcacatggttttgtaatcttgcaatctatatacagtattaaaattttgaatagttgtatttgagctggtagtgattatcactgtggaatagatgagaatttggtgtggttgttttttttgacagacgaggagaagtatgttcagctgcttcaactgctgcgttaaagcttgaagatttcttcttgagcaaagtagcagcattattattgactcgcgatttgactgtcgaaatgtgttaatgtcatgacactttattatatgctccaatccatttttctttttctttgggaaccatttaagctctattacaaggaaaagatcatgggggaaattaagtatccactaaaacatacttctctctattagtaccctctctgcttta

SEQ ID NO: 11622 - DNA, 1177 bp, Arabidopsis thaliana landsberg
  unsure (1)..(1177): unsure at all n locations
gtcgactctagaggatcccctcttgcgtttcttgagaagcatatgggagctaattttgaacctcgtcctgaaccatgggttacaaatgttacaactgatcaaatccagtctggtgacctcttagctatttcaaagattcgtgggcggtggggtggttttgagactcttgagaaatgggtgagtggggcatatgctggtcattccgccgttgccttgagagactctgaagggaaactttgggttggtgagtcaggaaatgaaaatgataaggtaacaacaacacttcaaagtgctgccctaaagttaagttacaagattttttttgatgaagtttttttttttcttgtcatagggagaagatgtaatagcaatcttaccatgggaggagtggtgggcatttgaacaaacaaaggatgactcgaatcctcagattgcactgctacctttgcatcccgatgttcgtgctaaatttgatgttgctgctgcttggaaatatgctcgcagcatggagggtaaaccatatggttatcacaacttgatttttagttggattgataccgttagtgaaaactacccgcctcctctagatgcccatcttgtaagtttttgtttttcatttctcacaatatagttcttgatgaatgaatacactttcaaatcgttttaacttcgggcttctctttctttcaggttgcatctttcatgactgtttggagccnnnnnnnnnnnnnnnnnnnnnctaacatgtggaatgaagccttgaacaagcgactgggaacagaggtattaacatcttcatgattcatagatgatttttttaattaatgcttatcctcattagagatggtcctaatatctgattcttctgtactatcgtatcctcatgttgtatacgattctacatttttctctgctcttataatttgactctgttccttgttcttcgtttttcttctcttcttctctaacatggttaaaattgcagggtcttgatctttctgatgtactggtagaagtagagaagcgtggatcctcatttgacaaattactggcagtacctgaactagacgattggatatacagcgatggtaaatcaacctcatgcatcgctttcattctcgaaatgtacaaagaagctggcctattcggtccacttgctagttctattcaagtcacg

SEQ ID NO: 11623 - DNA, 451 bp, Arabidopsis thaliana landsberg
ccaacgttatttgtcatcctaggtgaagttttacctagacggttatatatctatatatattatttgtcacctacaactacgagagaattggttcatcacctggacctacgatctaaccgcaccaagcgagcaatcggctgcgatcggtggaacgaaccaccagaccaaggggacggatcagggaccgtgcgtggtggggttctatttgggtgatatgtttttcacgtccattttttaggtggacccattttatgtattttagggcatgtttggtttgttatctaacttatcacattttgactaacttttcttactaaggttagtttttcaattcggacgactaaccttagtcaaagtgtggcacaatagccacaaactaaacatgcccttaatacgggtttcaatcattccacttacttttattacagctttagtcatttcggggtacgag

SEQ ID NO: 11624 - DNA, 1090 bp, Arabidopsis thaliana landsberg
ctgtgagaaaatggtttaggagattcccaacagcacgcaccagttcaatttgcaatgaggagacattggagacactgcagaactttgaaactcggatagatttaccagcaccacgcaaagtcctaagaggtgaagagaccagcttcatcactctgcacacaagactctttcttatgttaagctgtctcacacatggctggcttgatagcttctgaaagcaatcaaaataaacagagagatgttaggcatgaaaataaatactcaaacaagaggcaacaagaagctttctcaatatcttaggcatgaaaatgaaatcatcaaaatgatcatcacgtattaaccatgaatcatcaaaaggttcagattttatcttgtcatgaatgaaatttcagaatttcagaaaacaaaaacaatcacaattatagtttcttcccaaagacaaagaatcacaagaatcgagaagaggaaaagaaaacaaaccctagaacatcgaaaaaaggaggtggcagaagaagctttcgagatggtttgcatatctctctatggatcgatgttcaaagagaattatctctctatggatcgacgaatttctcttcccctctcaatctctcagagaattctctcttggatcaaaacgatcttcgaagagaattgacggagaaagagcgtcagcgagaagaagaagaagccgtacagagagagagcaatgtgtcgcctcctagaacatcctaaaccggaacgaaccggaccgggacaagtggtgccgaatactaaaccaaaatattaaacagcgaggcatctctgaatttaggtaagacgtgttttcacgactacaaaatgtgcatcaaaattttaatttaattaaacttttgatttatttcaaattttttttaatgaaaatgaaacttaatattgtttttttatggtaggaatgaaaatgaacttaattggtgtgcttaaatacaagatttgatcatattatttaaactttgccgacaaaaggcactttttcatgtaattttaaaaatcaaattgacttgatgatttaataatgttcaatttttttacattcacctgaatttactataga

SEQ ID NO: 11625 - DNA, 1002 bp, Arabidopsis thaliana landsberg
gtattgctaagtttatataattactaatttattatattgttgggacatatatcaaattatgttaaatattacaattatccaaggtggggatgaagaaatttattaatatatagtggttgttaatttatcgaatattaatttatagagattttacagtataggtaaaacatgcaaattttgaaagctttgaatctgttctaaaagccttgaaatttggtaacttagaaacttaaatactaatagaggctaaaaaaaaacaaaaagtctatacaaacagttaatatataacactgctcaaaatatgtgcacattaaagttttgtatgcttagtgatgaggtggatcttaatatctcacatatgcttttataaacatcatatgcatccaaattatcattttttgaaattattgatatctaattgtctacaatagcaacatagattatcatcttgtaatcgaaactcaatagatatattgctaggtgcttaaaacacgacttaaggtgttccatttttaaactgtcgtagccgaacatcactacgagaagaatgatgtcctctatgcctgaaaactatttagaggtggttaaaacatcaagggcatgtttccactcttgtacaattttcttggaagccattgtctcaccaatgacgatgagtgccagagggagaccacaacacctatcagcaacacttgatgcgaggttgagaatctatgcatcactttgaagagttcattctccgactttctttcgaaacaactcaaaagccttgtttagtgtcaagcattggacatggatagggtctcactcttatgcggccacaaacatccaaaaagcaagtgttgaaagctatctgcattagttttctgtggtgggaacatgaactccgatctccgctagatcaactttggtccaaatgtcatttagaaatagaacaaatcttattgtcctcagaagattgtaaatcagaagtatttctttatttcctctctagagcggcac

SEQ ID NO: 11626 - DNA, 1425 bp, Arabidopsis thaliana landsberg
  unsure (1)..(1425): unsure at all n locations
acctcggtttttcagcttgaaatgctatagccttgatttataaaaattgagtacttttctgtagattttgttgaccaggccaactgtacatataccaccaacaaacaagcatggacagttccacaatctactggtcacatttgctgaaagagtaaaagtattccacacaacctcaatactgtctcagatagacacagttcataaagaactttcaacctaatacttaccaatcgtcggcaaacttatccaacctgcagactgtaaatgattatccttcggctaggaacagttcacagcctgtgtaaagagggtatatatatccaagaacacctgaaacagatcagttatgtacagccaaaaagaaaacacagcacaatttaaattatgaattttgaggaagaaggggcattgtgttttgcaccattcagttaacctcatgcatcagagtaagatctctagaagcaagcaagatctgcagtcacccaacatggctacagttttcctgaaaaatgtaaggtaagttcaataatccatcactgatgaggagaagacaaatgactcgacttatccagaagcttaaacacaataaactaaagtatatatatgaagaaaagacatgactcatcttagaacacagatactgtaacttttgtttaagtttaatcatccggaaagtacaacaaagaaaattagactataagaagaaaacatcacaaagaggatttgaaattttcagtcagagatatttcccttctgctgtctatacaatcattttaacaatcctccggtaacagaacaatatacaacagttgattccacattgcagggaagtatggccaacacctgaagataagactgtcaaggatcaaaaagatataatagatactaacaaaattaactgtgggtaccggcagacttgagatttcttagctccatcaaatgttcatcatttgatatattaagagaaagtcggagatcagttagggatgcttcctgatcccaacttagggagccagaagcaaataacttcgtcagtgtactacggtaagtgtaaagtnnnnnnnnnnnnnnnnnnaccactgatccattacctgataatgaatgttttcgcctagcttcatctctgcatccagatgcttcttttgaagattcagcatcactactacaagagtcggcaccatctagaaaagaagttggtttgtcactctcatcataactaatagggctacaactaccaactgaggatgcatcagtatcataacaactattagagactgagtttcctgtaccaacacattcactaaacctttttgatcttaccctgaccatttgacggaaaccacttttattctcgttacacgaagctttcacgtacaattcaacacccctacgttcagaactatncatatataccttctgtgctga

SEQ ID NO: 11627 - DNA, 922 bp, Arabidopsis thaliana landsberg
attgtcaagtatgatgtttataccattgttgaatacctactcagcatgatgactctggtaaacaattgtgattgatgttttttgctacacagattgcaggatgtggtgcacagcgagaaacgtttgtatctggtttttgagtatcttgacttggatctcaaaaagcacatggattctactcctgatttctccaaggatctacatatgatcaaagtgagtgctaagaaactttaggcattgttttatatatgtgcttaaactcaatactcaatataagctgatcagagctgttcatccactattttcagacatatctttaccagattctccgtggaattgcgtattgccactctcatagggttctccatcgtgatctgaagccacagaatttgttgattgatcgccgcacaaactcactgaagcttgctgattttggactggccagagcattcggtatccctgtcaggacatttactcatgaggtaccaaagagctttattccttgttcatatgttcctgttatgaaatcttttggctggctgcattccttatgagtgtaatgtaaattaagtattataccacttatgtgtctgataaatgtgatgaaaaggactaagccatttcacatagacggttgaagtaagctagttcaagatactgtaaaatatttcaatgctacatccagatttcagatctcttcctggttattcacacaatttttgcatattgttccttttaggttgttactctctggtaccgagcaccagagatactcctaggatctcatcattactctacacctgttgatatttggtctgtggggtgcatatttgctgagatgatcagccaaaagcccttatttcctggagactccgagattgatcaactcttcaagattttcaggtttaattgttaacttccc

SEQ ID NO: 11628 - DNA, 423 bp, Arabidopsis thaliana landsberg
tgaataacgaaatgggttggagtagataaatctaatttaacccacctcctgtttaacaacccgggcacacatttctccttaccactaccataacacttacatctaaccctcttttcacagatgacttcacccacccccattaatggaggagacactcgtttcagttttgactacctttcccacgagggttttccctccatcttgtgggaggtgctctgctccgcaggttaccctacaccccctctgtacacggtgcagctatatgaggatcatcggttgccacgttgcaggggttgacgaccctggagtctcaccctctgcagccgggacggtctcccttgactccaagactatcgggttcagggcggacgacaccaccaaggccgcaacactaaaagccctgacaatcttctgcggatatca

SEQ ID NO: 11629 - DNA, 1074 bp, Arabidopsis thaliana landsberg
gaagaagctttggtaaacttcacactacatatagcttttatatatgacttaacattgtaggccggaattttttctcctcggattaagacgtgaaacaaaataatactactctcatttcgtctatattaagaaaagatttaatataatttgaaattaatatggataaattaggaatttgtctttctaggaacaatgaacacaaataataatgtcattcacatcaaacagttctatatgctattcaaaagagaatcatttggtcgagttaggcaatgcaaggatggtgtggatccctgaaagatgtcgaacgatttgtaacttggctcaaaaccaaaaggacaagccctgaaagatcctctttaactatttgaagattagttcttaaaccaatgaaatcgcaggccagtcacaaccaacagaaaattagcatttagaacactccccagaccgcgaaacgcaaaaatgcagttgtgttttgaagcgacaacaggttagacgaatggattttttttttacgaacagtaaagaccttacgagatggattaacaatgatacagatatttacaacagacttcaaaccccccaaaaaaagaccctaacaaaagtctcagattatcacaagtttaatttcttctctccataaagatgaaattttcgttttctctgcaagactgctaactcaaacttctcagcttatttagtatttgctcctcttaatagttctatctcttttgaccattcggtcgtcaccgaagcctcagatacatggtactgaggatctttccaccagtcgcttctccatgtttgcaccgttatacccaaatgtccagaagaccttaagtatggtgaaggcaaagtatgttcttgttggaaatgaaaggttgagagagcttcaatggcagagtgcttccccgtatgctacccattgtttgaagctatctgggaaatcatcgcgaatctttgtgtgtacagaaagttcggtctccactggttcttttccctgccgaaggaaataaatccggtggaagttcaagtgaagaaccaaatgacagtatacgcctttcaaaatatcga

SEQ ID NO: 11630 - DNA, 1411 bp, Arabidopsis thaliana landsberg
tagggttaatgtcttctaactaattatatatatgtatgtagttatttcatatcagtttttctttattttcagtatcatcttgtgtatttcgggcattcggacaatacatatattaataaaatgtaaagcgaaagaacttcaaatttaaaatatatgtatacgagagctccccacctgcacaacaccaccaccaccacccactaacattaatcacatgaactttaaaacatgcacaataagataaagctaaattcctaatctaaagactcaaccaaactcctcctctctcctccattcaactaattaagcaaaaagaagcagttgaattaaggctttcattacttcaacttcaattatcatatttaaatatttttcccatttacaaaaagaaagaaaggaaaacgtacacaaaaccaaataaatatatacaaatgtggaccatgatctaatatttccttcccaaaaatacaaaaatctttgacctaacattgatctaaccctgctttctaactctcatatgtcacaattaaagagttaggaaccttacataaatgcatccactactacctttctacttcttagataacccaatccaaacttgccaaatcgaaacccgaatctcaggttaattaacaatgttgaggacgagccaatggtaagaaatgtcgttgaacctcaatatcctcagcgatcttcttggcatcaatggctgcaccaagcaatccaagctttgtgaaaccgactgcatacaatccgctttcgcctttccaaccgttaggaaatggtttatgcggaaatccatctttctcagaaaacatgttcactccctaaaaaaaaacagttcaaagtcaaaccaagttaattcaactattgaaacgtaaaatgggttgtgatgtgtcaatatcaaggaattaagaataatgaagatgtagacgcatcatcgctcatggtacacacctttagccacatgggtacgttgcttttgtaacccgtggcgagtataatggcgtcgaagttatctactctcccatcaacaaactctgccgaataatgcattacccgtttcaactccggatacacctaaaagtcaagaaaaaacaaaaaaaaacaaatcaatataccataagctcacggttttgtaatcaagattgtattaaaaatacttaattataattaatgaaccttgatgtgtccacttcggattttggcaagagtgccaacgtccaaaacaggagtctttccgcatttgatcttgcgttcaagagggccaagttttggtcgaactaaccctaaccgatccgtgtcaccaagaactaaccgagacatacgtaacatgaaccggtccaccacttgcactggaaaccacttgagcaggctcgtggatattccgaaagtcgatatacctagcatt

SEQ ID NO: 11631 - DNA, 705 bp, Arabidopsis thaliana landsberg
tttatggtctaggataacaaaccaccacaaattactaaaaatcaaaacaatttttttatctgacctaattaattaagccgatatttttttttatgaaaggcagtttaattgagatcagactagatttttgatgttttgttttcaaatgtaagaaaaattacgaataatatatacaggacaccagattaaataatattacaaactaatgaactaatgataaaaatgagtaaaaaataaaataaaaacttgaaatggaccaattccaacctcggagtctctcggtaagtcggtttcacgtaattaataaacaaaattataatgttgatgattcggttacatatatcagattataggtcgtttaatccacttaaataaagataagtgagcttgcaataattgaggaacacttttatgcatgaatgaaaaatgataactaaagatacgtgaaagatttgtctaaacagattgttgctctatatgtaaattaacaacaagaaaaaagtaagatacgtatggccattggccattactatttaaaattcgcctaaaaaggaagttcacaaaaaagtattaaaaataaaataaggcagctgtcctgaataaacgaagatcgaaaaatgaatattgaaagtgtatatgataaggcaatgatcacgacagcgatgatgattgattttgcttgcattcattttgcaaagtcttttg

SEQ ID NO: 11632 - DNA, 1149 bp, Arabidopsis thaliana landsberg
atacatttcagaatagcttaataaattatcggataaatacccatattttagggtaaatactttggattttagagtaaaaatttggatattcgaataaaatattaagatatttttgggtttagattttcgagtagaggagtttaggatccaataaaataaatctaaattttggttgtgtttagaatctaattttttggattggttcggttcagatattctgatccaatttttttcccagccctagaacaaatcataagtgcataacaataatgagcagtaaggtactttgtagtttgcatatatggacgaaagaaaatatttgtatcaagtgtggcacaattattgggcccacgaatattcagtagtcagttttgtacaagcccatgtgatccttgcaggccaattgacaattttaaatatatttatagcaacaatacaaatatatatgtttcagtcaaatttgaaaattgcaaccaaaactagagagtggagatcaacaactggatcaaaattttgaaattttatataaatctatagaattaagaaaatataatatgttaaaactgaatttactccaaacatatattgtacaaagctgattagaattagtaatcaatttagttccacacttctagcttttaagaggctattcggggcaactataactggccctatttggctcatcagtggcccattaaagatatatatatgagttacattcataattttaacgaaaagaaatagttggtgtatgctcctcgtaatatcatcttatctataacaactacaagaagcttacattgctgctactaaaatacaaaattgttggaagtcatttttcaagatatcaaaatggagtgttcgctgcagaaacagcttttcaacaacggagataagctctttagttgtaagctctaacactttcctccctcatattcacatctattagtgcaaatcaagaataactaaaaccaatcaattacaattcctccatttctttactttcagctcgacataaccgacgggtttcgatagaacaattccatgtaatagattctcttcccgcaaactcgataaacctgtttcataaacctatatgttctccaatatcatccatcatcacttcaagaagagcaaaagccattttag

SEQ ID NO: 11633 - DNA, 495 bp, Arabidopsis thaliana landsberg
tttgggttacacgtaaatgtgataaacaaatctgggaaaccaaaatgcttacaaatggccatagcatcgtaataggtttgaagcatatacctagggccaccagtgaaagaagatggaataaggacttgatttccttcttcactcatagttgtagatccagatgatgcagattctttaatagagttgaagttctcacatctcagcttagattgattgaatttgatataagcaagtctgtttgattcaatagttgtatatgcatcacatagaaactgttgaaacaacctttttgattggagcagagtatgagactcatcttccctctcgagaattctgaatgcataccactgtctcatgactgatacacttttgttgcatggtgcacccgacttataacacttctcaattccaggagtgtaccatcttcaccatagcaataaattcatgggtactgtagtgccatataggatatacgaatcagacttatcctcttga

SEQ ID NO: 11634 - DNA, 1480 bp, Arabidopsis thaliana landsberg
aaaacgtgatttatggatcaaatgtgcattggtggagcagttatggtcatgtaagacccacaccgtgttccctctatctaacgccgttaatcctcttctttcccccaaatcataccgttaattctctttgagtgctaaaatatcaccccggtctatgagattaaaatagtagactaattaatagtgctaaaaatacataaattaatgccaagagattcatcttaaaaaaaaggatatatgaccccactaaatggtataactgaaagactatcataatcaaatttcatctgaacattgatttgtttgaactaattaattttaggattttacgttttcataattttttattttatttgaacatcttgtaagggtaaaatggtaaaaacaggagtagtaagagggtgaaatggttatttcaagtgtgaagcgtggggacgtgggtgacggtggtgatctgaaacagtggtctgccgttaaaatattaaattaaaacacgtgttttaaatgtctctatgttaattaatactataagagtatattttactaatttccgtatctgcaaccagcgaagaaaaagtaataaagaggtcctccatttcttcctcgtgacaaaacgcacttggcagagaaagataaacaagaaccctaagtttttttataagattcgagaaaattcaacaactcaggaaggaagatccttttgctccaatttctcaatcgaaacgatttcaatttcggtttcaacgatgtcgagtttttctgccgagtgttgggacttctctggtcgtaaaccgagcttttcacaaacatgtactcgattgagtcgttacctgaaggagaagggtagttttggagatctgagcttagggatgacatgcaagcccgacgttaatggtaatcaacctttctcttttagatctgttcatttcgtttctgcgaattttgagtttcctgttgcgaattacgaattaggaatcgattacatgttgtctggaaattgaatcgttgtagagaatcgatgattaatggattttgaatcaatttctatttatgtatgtatgtgtatgaatttgtggagatggttctgtgtttggtttaagcataatcctctaaagccataggcctggtttagtcattaagtagattttgttttgcagttgtttgagagattggtgaatgataataatctttacttttggatcaattttcgcaggaggttcacgtcagcctacaatgatgaatctgttcccttgtgaagcttcaggaatggattcttctgctggtcaagaagacattaaacctaacactatgtttccgagacaatcaagcttttcttcttcctcttcctctgggaccaaagaagatgtacagatgatcaaagagactactaagtatgtgtttatatgtatatagagaaaagaatcgcctcatatagtaagctatgtttcatcagtttaactaatttttgagtgattttgaa

SEQ ID NO: 11635 - DNA, 708 bp, Arabidopsis thaliana landsberg
atttggcttcttttaagaatctctatttctctttttaataataagactagtgaagcgtttctcgttctttgaacattggtaggttttgcttaatttttctttttaggttttatttaaattgtactggatttatttagttaacgaaatgtgaaaatcatttctcttttaataattctactatcttacatcttttagattatctccgatgtataagcaccataatacaaaatctaaataaagagataactagattatattcgaatatgttgttaaaaacaattttgatatttgttctcgctaaaaaaaaaagaaaagaaatactaagttagttagggatcttctgatatccgtcgatttttaaattttagcagaaacaaaaaatcagattaggtataaaatatacaaaaatataccatatttaagaatataaacaaaaaaagaaaaaaaagaaaaggagagtaaaaatataaagtaggctcgagaatcataaccttatccctccataaattactaattttcacaaatttttatttttgtcttatatactaaaacacaacaacaaaagataattttaaaactaattttgaatactttcgtccatattttgtaaagcagatggtttctactaaattattaactatcaccccaagagaaagaaaaaaaatgtttgaacatattttcctcatatttatcccacaataaaagtta

SEQ ID NO: 11636 - DNA, 575 bp, Arabidopsis thaliana landsberg
gatcacgataggagctgaaagattcaggtgccataaggttcatttccagccgtctttgattggaatgaaagcttctggtattcatgagaagacttacgattcaatcatgaagtgtgatgatgatataaggaaggatttgtatggaaacattgtgttgagtggtgggacgacgatgttccgagggattgaagagaggatgaccaaagagatcaatgcgcttgcagccgctaatatgaggattaaaattgttgctcccccggaaaggaaatatagtgtttggattggaggctccattttggcttctctaagcacatatgaacaggtaaataagataatactaattgtattattaatttaacgtgcgtatctcttttgggatgttgtaatgtcaagttgttgtgatgtatatatatgcagatgtggattactaaagctgagtatgaagaaaatggaccggccattgttcacacgaaatgcttttgagttcttttaatgctttgttctgatgaaataaattcttttgagggattttcatttcataaatctgatttctttctttcatatttctttgtttg

SEQ ID NO: 11637 - DNA, 1000 bp, Arabidopsis thaliana landsberg
agtgcttttgtggatctgtatggttcaccttgagatggctctagtgttctcacgactaactcatgaagaagaagaccgtgaatccgcaggtaacaatcatcactgtttacttcatctgctcacgggtttccagatttttaccagggagaattccttcatctgttagttttccttgatttcttgtgtaaggttgcaccatctaaatttgacaaagagttgggatttggtatttggttagggaaagcagcgcacgatggagggacagattgtggggaacaattttccgttggaatgaaaggtgcagagttttgcattggcattagtccaggatggttaagaaaccttagcatatctgctgaatcattaatcccaggcaagccagctcctagaacatgtgcaggcagaaactgttgttcgcccatttgcattcccacacccattgctagacccatctgagagtagttcggcccaaaaggcatcatcattgatggtgtaacaaatctgttacccatcgtcatcatctaccatccaacatttatacaggttaggacaaagaatctttagattgaatctgtttttgatgtgaaaaagtgtttgaagtatttgtttattatacctgaacttgaagttgaaggtttgtcatataattgattgcttcatccaacatcgattcgttgtcgtcctatggacaatattgagtatttagggaaatgtaagtatagactctttaaaaagcttttgatctctttcgaaataaatgaaaaagttggttcttatgataaaccttgtgagagttaggtagtagattttgcaaagtacgcattttcttgttgatatcatttctttgattctgtgttgcacaataccattataccgttgtatcagattcagtgttcactatgctttgtatcttaaagagattacttactctctcaggtgaattatacgcttctgcatttcgttttcttttgaccaaagcttttcttgtttcggctatatt

SEQ ID NO: 11638 - DNA, 432 bp, Arabidopsis thaliana landsberg
tctggaaggctaatcttgcctccagtcctgtggtgcacaggacagtccggtgacaactggactatcactgtacctgtctggtgcacgattgccttccaccaaagccgtaatcgaccattggtgcttcgggcccgatagcgccctggacagtccgatgtacctgccgctcgttcatgctcgacatacgtcgccaacgaattgtgcaccgaccgtatcgctcaccggaaagtccggtacagcagtgaacagtcccgtgagttattgtcatactccactgaccggttaccgcgatcggcagtgtcactagtgaccagcctggcggaccggacactgtacgggaccaactggatagttcggtgtacttagattgagctgaatttcggcagcgccgaaaaatgtctttttgagtactttcgttcgcctgtctcactc

SEQ ID NO: 11639 - DNA, 864 bp, Arabidopsis thaliana landsberg
gccatgtcatattgtggagttaagtgggctttaaataattttatagagcccatataatatggacaacgacggcccataaaaagggtactgaatcatagtgaattacgcacgatgaacgaatcatgagctttagctgcttctccaagtaaaaaaaaaaaacataagccctctttaaatccctagctagcttccaccgagaagttgttcaatctgggaaaaatcaaaatctgctattacggatctttaatcggaaaatgggtttgacgaatttcatattgacggtggccggagtaggcgccgtggtgatgctactgaggagcgacgtgaagcaatctgtgaccgtcctcaggcgtaacgtcaagcacatccgccactggctcgaagaagaatcctccgccgcctcttccaagtaaatcatctctctcttgattccttctaatttcccctttcgcgaagatgttcctttggttatttgatttcgtaaaccggtttagtcttctatttaccgagttttctttcacttggtgatattttgatcctgtgtcaattatctgcagctgctagtttcaaagtaattggaattatagagagttaaccaattatataagaagttctctaattctctttgattgaatttgtatcctagtatctaaccaatatacaatgtttatatgtggagattctagaagatagttgaaacgattttgttgtagtttctattgtgatcatcagttgtattttaggatcactgagatttggtaacttagagaaatcagaaaagattgatgatgtggtttgggttggtacaactatgttatcgttcaatgtttgcgttattgatagatttgtagaaacatcaagtag

SEQ ID NO: 11640 - DNA, 1046 bp, Arabidopsis thaliana landsberg
tatgagaatagaagtaaaaaagtttgagagagagagagagggaaaataatgagtgagtctgcaaactctgaaaacttctgcactctctgcgactcttccctttcacagctctcactcactcccatacacacccatcactcatgccacatctctttctccctcttttatttttgttttcttttgaatttttctaaattattttatatttctcaaaagaaaaaaaaactgtgattattttaattatcttttttctttgttaaagattattttaattctcaaaatttaaaattttgttcatgcctatgtaaataattcatttgaagtcggtcatcaaatgaagttagacccaatgcattaacagatggtgggggtttgtgaaaaaacctcagaaacttacacttcataaaaacatgatttattttcttaggaaaacctctaatactaaaaatacatctaaattgatcatataaatcatgttttttatccaaaaatatataaggttgataaattaactatatttaaaaagactatatttgagacgtaacgatttaaaaatatttaggcagttttttttgaaagattagaaacgattatgttgaagttataaataaaaggtgtttcacataatacatactcataaataaagttaatagcatcttaatcgtcttcaatttctcttttatatatgagaccgattaatttccatgtaaagattatttaatattgacgggaagcaaaacataaagaacactaagcacattaacgatgttacttaaaattttaaaagggaacataaacaaactgttttatttgggtaattatgattactttttttttcatttatttatatagaattaaaatacttacggagtcggaacctctaggaatagcaatcactatgcctaaacatgaatcaagttcgcaagcgtcgaatttgaaagattgaaactttggaaatccattggaaatccaccagattagagaaaaattctctgcttttattaattaaaatgataaaacgtgtcgagcaaaaaacttagggtctt

SEQ ID NO: 11641 - DNA, 1014 bp, Arabidopsis thaliana landsberg
ttgttgagtagttggtttaacagtaatctcggtagcgatatttttgtttttgaaatccgagttacactcgcaattatccacacttagtccaccatactgaaccgggacatgttcgggtgatatgtacctatataaccaaagacaagagagacacttaacacttccaatagttaatctaaacaattccaaaaaaaggattttggtaattacttgagaagggtttctgcagatcttgaaggacctgcgaaaactagtttgctctttgacctttgtgacataaaaggactaataattctatagaacgcaaggtaccaccatggaacattgatgaatatctgatcaaacattcaacattcaacaacatcagatctgagcaatcataaagtcattggtcagtgtaataaagattcatacctgtttagagacaaactcagggtaattgtcttgaagaagatgaagagcttgcttagtagctaacctaagctcagtcttaccaggtgcctggagaattcttaagatcatttacttgacatatcgtggaaacaccaccagctacaaaatcaagattcctgatactcttttcaagaaactgaatcctccatctcaagaaccgttctctcttctcttcatctgaaaacgttttctgataaagatctttgttctgaaactcaccgtagacattgtaacagacaggatgattctccttgtcttgtccttgcatgaacacaactttgtctaaatcgtcaccgaggttttcgtctagaagctcttcgatgttgaagtcgattctccatttgagtgtcttgtttagcattgagtaagcttcttgaggtttaaagtctcttgctcttagaaactttaacaaaacgacgtcggttctgtcgtctttgagaagtggcacaccccatatagaggttttgcttgaatcttgtgatacttgaagaaggtgacgaagctcttgaagtgcgtttaactctgtttctgaaagatcggagattttgtttgtttcttctt

SEQ ID NO: 11642 - DNA, 884 bp, Arabidopsis thaliana landsberg
caggcatatgcacaatgaacgcatattgcatgtcgactgcaacgcctgccacacacaagtatgcctctgctggatcataacaaacataacaaggtcatggctaatgtcactagtgagttatactaccacctatgtgaactagaagaatacagagaccgagtcaatttctttgctttcagttagcaggaccataacagattatcaacattcttgatcaattattgatttagtgacattaatgaaagattccaacctaaacccaataaattcctataccctaccaaacaaatgaatctcacacggtagacttttcaaattcactgacccacaaaattcacagcaaactttttcagtacttaatagttaagtcccaagcaaaaacagagaaagatcaattgggtaaaaaacagagtcacctgatcgccgaagaaaatggcccaagccagaggcttactaaacaaaactcttcctttcatcaaacccaccacgcaacgaaccggctgaaccaaagaataacccgcggctatgccattgacgaccaccaaaagcctgaactcagagaacgattgttactaaagctgcgaactttacacaaaagccataaaactgaggaatctttgccatgaagcttacacaagcgccttcatgtcggtgaatttggctttcttctgaatcatgaaaatgtctctcacttgaacattctgagcaatgagaatcgcagcgacgagagcaaggacacaaaccaaacacctcagaatcgactccgtgactcttacttttcgatcaatcagctttattttggtagtactttcggagacgatttcgggactaactccgactcccaaataacttatttctggccgtaacttgatttttattaaaag

SEQ ID NO: 11643 - DNA, 807 bp, Arabidopsis thaliana landsberg
ttaataaagttactaattttcctagttacaaaccatataataatctcgaccaatcttttttcacctttcagagtacagagcacaagtggtggtgctgacggaacgcttagtaggtgctggcggatacattctggttcagcatttagttaattatctaaatagtagtcaatattgtaaactatagctttaccatgggaactcaaactggttgttgatgaataaatagtagtatagttgtgtatatatagtatatacaacattaattgttgatggttctaaactcgttgagacatctttacattggagatggtcttagggtcctaatcataatcccaattaccaactcttggcctattaaagaaaagatttaccaaatcttgacccaaatatcgatccttttgttttcggcttcttaccctgtccggtttttacaggttttgtgtctttaccgctactctctcccggggtaaaacccgagagcctgctcactttttcatggtacacagccggaggtgcaagccttaatcgaggcaagctctctatctgtaccaatctctgatctttctgaaggttggttaagatttcaaactgcaacgttgaacagtgtatttttttttagttaattgcaaagaggttttcagttttagaattataaacatcttacccgtgatatttgttggttatgagaatgatcgctcatttcattctcgtgtgagtaaggcgaagcacgttgtgaagactcggcgtttgacgaaactgtgcttatcagtccataatctcggtagaacgatttaccttttaaagagc

SEQ ID NO: 11644 - DNA, 713 bp, Arabidopsis thaliana landsberg
actccaacatacattttattcacatttctttagatgctgattctaacatcaccatatttcgcagtttgtacaagtcctcaggcgtgaattagaaaaagtggagacagaaaaggaagaattcatcagcgacttctcagaagtaaaaacatttctcacaactaattcatttgagcaaaacacctgtttgttgtgttctcatattgatcacaaaatcttattattacaggaggattacaatgacattgttggaggatggtcggcaaagcttgaaaggactgcatctggtgaacagaaatggggattattcatagccgacaagaagtaaaatccatgtttttatcccaaaactctggtgattcatttcccttcaataaaaccgttcctttggaggacaatatctgcttgtttactatcatggaactgcaaatcaaaagataaactcatgtgttgtttcgattcttactcgagtcgttgtgccacataaaacctgcattgctttgattttccattaaatatctgcataacattcaagggtaatcgatgttttttgttcttagtgtattcaagaacaaagttacatttatgacatgggctaattgataatgactggagcaaacagagcagtaaatggctaagtaaaactcaactggttccatctctttgtttacgagcttgtgactcccagaacagtctaacagtggaataaatcagag

SEQ ID NO: 11645 - DNA, 509 bp, Arabidopsis thaliana landsberg
aaagtgactatatatacacaatatgtattacgtttattttttgggtccatttaatttgtattttgaaaaaggtaaaatcaaaatataacaattccatttaagttcaatgcttacgtcgatttacatgatccaccacttctcttaacatgtgtttacccttcacgttgttcgaactcaatcgttttggacatcctcatggaatatcatagaaaacaaacaacagataaatatatatatatatatatatatatatatatatatatatatattaaaatcttcacataaacacagaatctacaaaattattaaaacacattggttgtgaatgaaatcatggtgcaaccacggttcaaagacaaagcggacgtgctgtttttatgtttcaccattcacgttaatttttatagcgagcagattatttcaattttaaattaaaaaataatattgtttagaggtatagttaaagcggagagagatttgtcatgacatatttggatatgtctactaca

SEQ ID NO: 11646 - DNA, 911 bp, Arabidopsis thaliana landsberg
ttctatttttacaaaaaaaaaaaaaaacaagagtgaaggaatactaacgattgcaagaacacgataccgcagaagctgtaaataagaaccaagctctttatcattctctccatgaagattgtgaggaagagtatggctatgaacatggccatgaacctgtacgtgccctatctcttggtcaggagtctcaacggatgctacgtcagcacgtagatctttccttcctgacttggtgaagacgctggtggtaatagagtcaaccatgagcgtgaacacggcagacatcatggctacaaagccggcgaaaggaaacttgtgccaggggttatcgttaagacaaggagatgaaagcatgtcgaaagaatcaggcaagacatgcatgaaaccagtggaaaggatgattccggaggcgaaagattttacgatgaggaagtgagatttctcgggttggaaagcgggaattgatcgggcaaagaacgggaggcaaacaccgattagactagtgatgagaattgagaagattgataagagtttgagatctaatgctttgtttttgtctatacatgagttgttggattttgattggcaatctttgttggattgagagagagctcccgggaaatgcgagatggagagtaggagaaagagagcgatggaggcagagaaaatgacatgagatttagtcatctttctatttgtttcttgtggagttttttgagtttgatacaaagtacattatgtcttaatcttcttatataagacaagacttgaagccttgacctcaatcaaagtaagtgtcgacattactaattaatcaattgtcaacatgttttgtttagaagatattgaaatactcaaaaaaagtttaaactaattctaggctttcacacacatataaaattcttgaatat

SEQ ID NO: 11647 - DNA, 1033 bp, Arabidopsis thaliana landsberg
tgggtctgcccatggtccttcaccttctcgccagtcacataatgcgtatctcgactggagatgttattcccgggggcgaaacaaagcgttttgtggatctgcgagctccctttatagagcctttaacggcgcttaccgctacggtcacgactacgtcgatgggggtcgtgccgccttggcgagatctgcgtccgtctgaaggtatgcgtctgactccttgggggtcgtgggtggcggagatacgcgtaccgaatgagagatctgggatctggttaggttcttatgcgacgcctgaagcggccgcgagagcttacgacactgctgttttttacctgcgtcgtccttccgcgaggcttaattttccggagcttttggctggacttactgtttctaacggcggaggaagaggtggtgatttatcggcggcgtatattaggagaaaagcggcggaggttggtgctcaggttgatgcgcttggagcgacggtggttgtgaataccggcggcgagaatcgcggtgattacgagaagattgagaattgtcgtaagagcggtaacgggtcattggaacgggtcgatttgaataaattacccgacccggaaaattcggatggtgatgatgacgaatgtgtgaaaagaagatagaaaaaataaaaagtagttgtagaaggagagacgagaatgtttgtctttaagatgcgctgttgccgctaacatgcgctttcgattttagtgttaaacatgcgcctccattgtttttgggttttgttttcgtcgtcgataatcaaagattttaaaacacaattctcaaatttttcacttgttacaaactagatttgcatgatctttgtattaacgaataacgattaagtcctactcatgacgtgttattcaaatatatgtcctaataacgttttatgataacgaacaaacatggtttgattcttgaaaaaaaaaagcctaagaaagttctgatttactactacttccactgtttccctttcccttctttgttcaagtacaaatgtcaaaat

SEQ ID NO: 11648 - DNA, 1506 bp, Arabidopsis thaliana landsberg
gttttattaaacaaagagtgtttttgaaagaaagaagaagagaggagatgtgtatgtggagatgaaaaatcgtgagctttaatggtaatcctaaaagaagaagaaaaaataaataaagataagtggggtgcaccatcaagacaaatgatagagttagtattcaaagatattgagaaagagaggcggtagtgagaataagaggagttttttgaaagaatggtatgatgaaaggggccaacgagatcaaataactgtatcatattttactaggaataattaataaatttattcttttctgaatatatcggcaattcgttgatgtaatcacaacaagattcagaggaatattttacattttcctgaataataaaagtggaggtaataattgcttgaattttttgttgacataatttgttgttgtcgtaattgcttaaattttatcttgtttttgttgccggacttttttgttgacgtaatttttgttgtcttcttgtttttttcttctgaatcttcttctctcgtgtcttctcatgatttcttgatttatcacaaaccatgaagataacaattgcataattgttgtttagataattgtttatttttctttttctttaagagaacttaaagatgtatctcaaaattaaccaaaattacaaaaaaccagaaaacatttgtcaaatgaggagagacaagtgatttttggtgttttactagagaagagtattgatggaaagttggcaaaaactataacaagagaagtttgtaatattttttggtgcttatagcaatggtataaaagatttggaaattaactagataaaaaacagctaatagtgtgaatgtcaatgtatctcatcggaggactggaaattatggtcctaaaagaatctcatttgagccaactcaaattgctaaaattctattaagcaagagaacatccttgaggtcgatgtctatgggtatgaacgtgagtcttacaacattatttaaacgaaaagtagaagcaattttccgacgtcgtactaatagcgtcaaccacatttgaaggaagccaatatgaaaggtagggtacaaaatgtacaacatagttcgcatcaatgaaaaatggttctacatgacgaagaagatgataaatattatgtacttcaagagcaaaaaagatccacatcggacaaatcaaagtaagaattacatctgaaaagtaatgtttctagcagagatggcttgtcaaaggtttgacgagtaaggaaatgagatattttgtggaaattttagaatattttcatttgttactatgcagccaaagaagagtcggagtaaaaacagagatactggaacaatagaattaaaagcataaacttctgttaagagagaagatataaaaacatgattgaatgaaaaagttctaccaattacactaaagaaatgaccatgggaaaattgagaaaagattatctttattcaacaagataatgcaagaacacatattgtgtatggagatcaaga

SEQ ID NO: 11649 - DNA, 1515 bp, Arabidopsis thaliana landsberg
actcgtgcgcgatgatcaggaactaatccacgatatgttatgatgtctatggatcatgatgaatgcagtaatgaagactcgaatttgagtactaaagaagttcatctactcagttttatggttcagtatccgagcacaatcatacaacatacaatcaaaaacaataactgatgttcaaagtctaaagcatgactcttgcgggttatattacataaacctcttatacaccatcaaataatataaccggaaactcaatgagagaacaagaatttgagacggagatatatatcataacagccaagtgacttccctccttagtatggttccccgccgagtgccttatgtttataatgtttttattttactctcctcttgtcccatccgacaagccattaataccatattttcttgataatcaagatcaaacaaaatcaaaacgaaaaattctatcaaaacacattcacactcacaattgtatgcaattcgttgatgatcaagatcatacaagaacatttgttcctaaaggccacttctacaagacaaaatcaagcaaaatttttattaatatgaattgctttactttcatctaatcaaaatacaaaaaaaaaatgacattaccacccacagttgttatacaacgactcgtcaaacttgggaaaccaaggcaccatatcgcatttacttattgaaaatataagaaaataaacagagataaatatcatccttcttggcaatagtaattataggtagcataagaattaacttacataatcgtgaacaatatgagaaagataattcttgggttttatgaccatggatgcaccaccagcgaagcccaagttaacttcaggaaacctgtccgcaacactgccatatggatcatatttttagcagttaaatattatagacttgagaattaatagacacacaatatgtattattatgtagactcgcttgttgggaacttatcccatatgtgatattatagcagtagagattctcatagggaatgggaaacccatacagggaaacatcatttgaaatctgcagattgaaatgctttatgaatcttctatttctgtaaagatctatcttaaattgtatgaatagagaaactcataggttggatgagtgtatcataagcttcagctggaaagcaaacaagtattgtccatgaatcaattatcgtcccataaccactagttacttagaaagccgagggatcaatccgtatgatcttatgattatacactttatcttattgatgatatttgaatttcaaaaagtagtcaacttacttttctgtatttaatttggtaattttattaaaaccaaattttaatcttacacattccaatttgctatacaatttaactatctatttcatcataataaatccaattttgaatcttctacattattttaatggatcagtgtttaactttaaaccaatatatatatatatatatatattaataacatattaaatctattagttcatttcaaaataattac

SEQ ID NO: 11650 - DNA, 909 bp, Arabidopsis thaliana landsberg
agactaagtcatttcctcaacctcagcctgcggcgattctaagttcaaacgcgcctcctccgtttctgagcaagacctatgatatggttgatgatcacaatacagattcgattgtctcttggagtgctaataacaacagttttatcgtttggaaaccaccggagttcgctcgcgatcttcttcctaagaactttaagcataataatttctccagcttcgttagacagcttaatacctatgtaatcttcttccctttcccttcgctttttttttttacttcatcatttctcgattttatggattttgttccattaatgttgttcccatggttgctttatgtttctgagcagaggagttttgtatccattagaatcgatagttagtttcatgagtatgctttttagagactactttatttgcaatacttgatatcttgtgattgtttagtttagaacctcacggctttgaaatgatagatatgtgagagcgttgatgaagctgactgtacatacaaacttagggggatgagaatagagatgtatacccttttttttttgtctttgttgtctgtttgactctctgtaatcaggtttagtaatagtcgtaagatagtaataaaccttcctgaattttctcagcattcattataaaggagaagaaagaagaaatttggaataagagagcaagtctcatgttgatcatgacctgagtgcaaggttatcaactttctgttttactaatctatcattttgttgtagatgagtcaaggtttagtggagatatctcacgtctttgaaaaccttaaaaggcctatgtgatcaggagtgcctggaatagaaactagaacttaagtagaaatctgggtgtttagcgtcggaatatctatattgtttttgtgtgactttaaat

SEQ ID NO: 11651 - DNA, 736 bp, Arabidopsis thaliana landsberg
acatagataagcttgtccatacattggttgatgatttcgacagggatggagatcgtgagatcgatgaggctgaattcttgattgggatcaaaaaatggctgaatcagtacaaattcagcttcgataccaccgtgccaccaagagaggaccaagctgtaagtgcataacaatcttctcaattcattttttcttacatgtttgatcagattaataaatatcaaaaacatgttgattaattgcaggagggagtaccaattctgaaggtagaaaagccagagcagagtcttgttaagaagctgctctcatggagaaccttgagagcttcccttgaagtcattttagggatgctagttgtcatctatcttgcaagacctttcatgatgaacatccaacttttgtcggaatcagctggagttccttctttctatgttgtctttgtagtcattcctttggcaagaaacctaaagaacaccttgtcagctcacttctgtcgcaagaaagacaaagcgaaaatcacatctgacacattttctgaggttagttaggtttcttgaaactccattaaatcggtattgatgatactcaaaaaactaaattcttttttcttaaaattcttttcttcttatgtagatctacaaggatgttacaatgaacaatctcatgggaatttcaattatattggcaattgtgtacgcaagagaactagtttgggattacacaacagaagttctcatta

SEQ ID NO: 11652 - DNA, 407 bp, Arabidopsis thaliana landsberg
ctccacacaacccaaattttgcctaatctgttagaatcataattggataggaaagaccaatcacgaaaaacagactttacaatactctctgctttactctgcttaaccctcgtctccaaaatacaaccaaactgcaacttttcttttaaaacccagtttctaaccacggaatgctttgaatccttattaaacccacgaacattccagaagaagcttgacattaaaattaatggtgagagggccgtgagccctgagctttagatagatccctagcagattgagttgacgaagttgaaaccactttatacgtactctttgtaccacggggtaaagatggacgtggtggtgcatttgtcttagaccctcggccttgctttcctctatttgtattagtttgcaggtcttct

SEQ ID NO: 11653 - DNA, 547 bp, Arabidopsis thaliana landsberg
  unsure (1)..(547): unsure at all n locations
cgaccccagcctaaaaaaaccataacactgttgatagtctgcaatccacttttcatttactagaacccgttccaactttttacaaataagctcatttccttctcgcttattacaccaagtaaacaaagggccatgatatttcatatcacttagtgagcagtactggaccacttcctgaaaatctcgcatccccattgggatagttgggttaatatcgaagcttgagtgctcatttccctttaagatctcattaaaatcaccgtaaatcatccatggcttatccttaaacattggagaatcatgatgacttctcaaatcctcccnnnnnnnnnnnnnnnnnnnnnnnnnnnnnnnnnnnnnnnnnnnnnnnnnnnnnnnnnnnnnnnnnnnnnnnnnnnnnnnnnnnnnnnnnnnnnnnnnnnnnnnnnnnnnnnnnnnnnnnnnnnnnnnnnnnnnnnnncttcacacaacccaaattttgcctaatctgttagaatcataattggataggaaagaccaatcacgaaaaacagaccttacaatactc

SEQ ID NO: 11654 - DNA, 595 bp, Arabidopsis thaliana landsberg
  unsure (1)..(595): unsure at all n locations
tggacctaaagtcggtgaagagcgaggatggcaaacctttagtgaaaatgtcagcgaactgagatgtcgttggaacatgaaggacacaaacatccccaacagcgaccttgtcgaaacgaagtgaagatcaatctcaatatgcttggtacgctggtgttgaaacgagttagaggacatgtagacgacactaacattgtcacaatagaccgagctgctgcgagtcaaacgggaatgtagttccatcaagtgctgtcgcaaccaggaagcttctgcaacannnnnnnnnnnnnnnnnnnnnnnnnnnncgacactcgagcgagagactgtggtctgacacttggaggaccacgatacaagattgttacacaggaagactgcaaagcctgaagtagacaggcgagtgtcaaggcagcctgcccaatcagcatcagtgtatacgatgagcacagtcgtagcggaatggtgaaaatgaaggcaaaattcagagtaccctgcaagtaccaaaggatgcgcttgagacaatcaagtgaggcttacgtgggtcatgcatatgaaggcatcattgctggactgcataagagatatatggatgagt

SEQ ID NO: 11655 - DNA, 972 bp, Arabidopsis thaliana landsberg
taccagttgatgaggcaaaagtcacaatgaaaggccgtctaggacctggaatgatgattgctgttgaccttgtgaatggccaggtttgttgatgagcaatccaaatcttttttgaacaaaaatcttaaagtttctgtagtgatagtaccatccgatccgagatataactttgtagctgactcatagctcgtcaaacttacaggtatatgagaatacagaggtcaagaagagaatatcttcatttaatccatatggaaaatggattaaagaaaactcccggttcttgaagcctgtgaatttcaaatcctcaactgtcatggaaaatgaagaaatcctaagaagccaacagtaaattttcctgaaactttcatctttttgtttagatatgcctcttgtttctttaataatccggaaggctataaatcacatcttatcagagcatttggttattcaagtgaggatgtgcaaatggttattgagtctatggcttctcaaggaaaggaaccaaccttctgcatgggcgacgatattccgctggcaggattgtctcaaagaccgcatatgctttatgattatttcaaacaaagatttgcacaggtgcatatggctctcttttctaacattcttttagtcaaattttgatcctcaactaaagcacatgtcctggtttcaggttacaaaccctgccattgacccccttagggaaggtttggttatgtctcttgaagtaaatattggaaaacgtggaaatatattggagcttggacctgagaatgcctcgcaggtttttgactctttagtacatttcctctgttttcacccattttgtttcacactatctgtttatgtatggttttgttttacatgaaccaggttattctgtctaaccctgagattaaatgaaggagcgttagaggagttaatgaaggatcaatacttaaaaccaaaggttctgtccacatatttcgatat

SEQ ID NO: 11656 - DNA, 751 bp, Arabidopsis thaliana landsberg
aatcaataggtctcataacaaatccatccatattatcatcttgtagaaaagggtcttgtaggggctccaatgccgttagcctacacgtcacgttagctaaacacttctcaacaaactcacgaacctcaggatccttcactaagtaaaaagcttcaggctttttcccctgaaatgaagaatgtaagtaaaacaagacttgacctcaaattagcttcaagaacaagcaagtccaagataatttaccgaggtaactttcttgtagatttgtgccgggtgagtacattcactgtaaggataatcaaaagtaaccatctccaacacacacatgccaaaagcatatacatcaaccaactcattatattcctcatcatacacttctggagccataaactcaggggttcctttaacaacacataaacatagtaaaggtaggtccaaagttgtaaaaaacataattaaagcaataaagttccaatgatgtgaaggttttgaagtaccaacgcaacgaacggcatgtgatttacgaagaatcgcagcgagtccaaggtcaccgatcttgacttcaccttggtttccattgatgaaaatgttatcacatttgagatctctatgtataattggtggagaacgactatgtaaataaagaagcccttttaaaatctgcttgcaccattgcttcactgctctaatattcactcttctatgtctcaacctatacctaacaaaacaacagagcaaaaaactaaaaatc

SEQ ID NO: 11657 - DNA, 1306 bp, Arabidopsis thaliana landsberg
  unsure (1)..(1306): unsure at all n locations
tatttattcattaactttaatgaatccatgccacacatggcaataatagcataaattattgcaattgaatgttaaaatacaatttttatacctattatcaatcaataatttaaattagtattatttcattttttgatgcaacaaactttttattttgtagtgaaaacattaacttgatgatgtatttgaggatcctctgtttactttggaaggtctattacaaatacttggagtcttgtatggtcatttggccaaggctgtgtgttttatgatactaatttaaatcgcatgaaactaaaacaacactgacaataagattggggctaggggatgccgccggctccaggtgaatgccctgagttactggctccaactccaatctttctcactttcattatcttatgatcccaaaccccttctcttgctcctttcccaatattgcaataacaacaagaactgattagttatgaatattcataagcaaaagaaaattcatgtagtttgtcagtgttataaacttacttgtctttggagatatgtatggtggatgggccaaaactctgtttggtgttgcagagaatattagaaataacaatgtaattaaccaaaccaacgctttattcatttttcccttaatctgtattaggaatttcttaacgtaactctgtatatatagggaggaaggtgataccttctttattgtatcagtaaaaattgtcaatacagatggttcaacatatatttgacaacatagggtggcttaagaattgtcaataaaggcggtatgacgtatcaccaaagacagttccacgcttgaggcgttctaaaatttgtcttaactggtcttttcgtttctctttgaagttcagttgtggtgtttttacttttacgagaaacttaagatatgatttctattgtaccttgccacttatgatcaataaagaatcatctttcaataactaaccatattctcttaaaaaaaagatggagcgactagtaattgattcggttttcagttaatttttaacatcgtttttttttacattaacaattttaatactattatcaattgtcaataccttaactcacaaaaattcataaacaaaatttcgnnnnnnnnnnnnnnnnnnnnnnntgggaagagactattttaaagaccatggcttctggcctaaaagaatatacagacattgacccaaaaaagaaaaagaatgtatattatttccatattggtggttttagacaaaaaaaaaatggcttcaccaaatctattcccaaacaaaaaaattttttatcaccatttcag

SEQ ID NO: 11658 - DNA, 648 bp, Arabidopsis thaliana landsberg
gagacacgttaaagtgagtttgttcagtttacaaaaaaaaaaacgaagcgagtttgacctttgatatggttttttagtcaattaaattcctaatgcactaataaccacatggagtaatgaattaactaatcgagaatacacaagtacataatataaggttaacaagagtttgattctgttcttgtaatacaaacttaactaaaccaagcaattaatatcttcttttttttttgtgcacaccacgcagttaaaatcaaacaatacgaatcaaagcaaaagaaatctgtatgcataaaactaacacaattcaaaatcaaacaaagtggtttaaaaaatagacaaaaggcgaattcccgggttaaggtaaatgataaagtttacagtttacagattttggttacctgagagaagttagttttatttgcatgtgtggagacaaaaaggccaactaaaaagtataacttcaaaagtgtgactgtgtttaaactctcacagtcacatgattatgcagggacgacctgaaatgaaggaaatgctaattactataattatagattcttttggttcgggcaaacattatcaacaagctatagttttacctttgtgtctctttaaaatataaaaaattgctttaaaggaatttttttt

SEQ ID NO: 11659 - DNA, 492 bp, Arabidopsis thaliana landsberg
catacgtaatgagtaactaataacgttaaatcttgtttgttttagtctaaccgtaatcagatatcacactaaaacttgatactagcctattcaaacttgttaccgccggtaatcgaacgtaaatcattactattatgatttgcgttacatttttttttaaccaaacagcaacgggcccatcggagtgtcaacgagctcaagcacagcaaatatctcccgtcgtccgggtcgctcagcaaaaccccatccaattccaaacaactcttctcgccatttcaccaccgcctccgcccccatcctctccccctcccgtcgcgccagtcaacagcctgtctgcctcttccctcgccacccatggccaccgtagcgcgcaccctcgtcgccgcatgcccggcacgctctctcctccgcttccggtctcggcgcctcccgtcctcctcttccatccgtcccgcgcggcaacgtgccggcgtcgggtctgtccgctgcatg

SEQ ID NO: 11660 - DNA, 951 bp, Arabidopsis thaliana landsberg
tgggttttaatggaacacaccaagaacttcataagttagtagtatatgttagagatataggctgtaacttttaaggatgaagctatttatgttagagaaatataatctgcaacataccaagaacttcataagttagtttagaagatacaaatgaaacacttcaaaagcaaagcagtcctcgaaggatagtaagcgggaatataaaaagataataaaccaaaagatcacaagggttagattgatctgtgatactctacttgtatttgacagccaaaaacaatatagaacacacctaaaccaaacgagctactgctatttctctctgttttgtggctctccttttcttcaaccatgtcacagtttcttgcgccttaagaatacgctcctttatcgacaatgcctcaaccttcagctcttgaaatttctttccgtaagagtcattgcaatcatcaccctcaccaaaatccttgttccttttttcgtttacctcattggatttcaaagtttcatcactctcgaggacattatcatgaagcaaacagccttgtccttgatttccttcccctacagctacagtgatgtgaatgtttgactcttcttgcttctcagcttcactactgcagaaattctcatctgagctcgtcttttctcctgctatgctaccatcttcatggagcaaacagtctggctccttgctgccatcattgattatatcttcattgctttcatatacattaagctcatcatgacaggtttttcttgtctctcgtggagacacaacagtgtcattagcaccaaaaggaggatctgaaaagttgttttcatcaaatgggctcagaaccgtattattccctcctttgcttccagcttcttcttcaccattctcttcgcacctttgctcatgtccctgacttccttccgctacagcgatgtgaatgtttgactcatcag

SEQ ID NO: 11661 - DNA, 691 bp, Arabidopsis thaliana landsberg
cgctcgctcgacattaatccacatcacgctgccttctctgtttatcaagtttgcatcctccacaccaacctgagaaatctctctgataattcttcatctctcgaaaagttgagctacaatgagaaagagagggcgaatatgaaatcccatgaaatggttcatgaaactttcattggctgatgaaaatatctttaccttctacaccacaaaatcaagttggctcggtgtccagaagttgtagctctagcaccatggcgatgacgtccacgatgaagaatggcgtgaccaggtacatgagagtaatcataaacttcctacaaaagaacaagttataaataaaagacctttgtggttgagacaatgagtgcttgatggttgggtttcacaagtaccttttcagtgctatcggaattcacatgcttatcacatctcacccctcgaaaatacagctccccgccagagaattgtttacccaagcagacatttaaactaacttctgagtcatccacatgaaaccctaaaatcaagaagcaagtttttagatgtgttccacaagtccaaatctaactactaccaagaagagaccactcccaatacttaccaagatcaacatccctatcttttccatattcaacaatatagccatggtgagaatctaaagaggttccacagactttcgggaacagaactg

SEQ ID NO: 11662 - DNA, 1027 bp, Arabidopsis thaliana landsberg
  unsure (1)..(1027): unsure at all n locations
ttgtcttaggcacagctctagacaaccactgcgtcgagtctggaaaatagactataagtggttgaatggattgcaaaacctacaaagacagaaaaaataaaggactaagtgtagataacaatccagacatacgtttcagaaataaaaatagaggcagaattgcaggcatccacagtataggaataaaagaacattcaagatctttaaaaaaatttggtaaaaatttcaatgttatggtgctagaacttggtcacacatttcagcataccaagtaaaacccaatgaaaaggacccatagataggaaaatgttaaataaggctactggctaaacagagcacaacgtcttgttgtatatagatatattaacagttaaattaactaataaattcaaactaaaataaaaagttatgagcatttgctattgctggagcatcatcttctcaaacatggaaatttaaatatacatgtacatctatagctgaaacaaacaaatgagtaaagccaacaagaaaagtcagtgtaacttccaaatatacctcatttaaagcttccatagcaatgtagccatcaactgcctgcatatccaaatcgtacttcaggtctttcactgcgtaataaaatagatattacttagctacatttaaatatgatgtcaagcgtcttcatacatagcaagtaattctctagattcataagtatcacacattaacgatcggaatattatgaagcaattataccatctaaccagtggatgggtaacatctggggctgctctgctggctttttctcacttccctctgatgttttatcatcaccgtattcgaatatgacagcaacacggttcccaatcacctcatataccttncacgttgtccactagacaatggcctgaaagtatgtatacactccggttaaaatctcagaacttttcgagttcgatatatgttgcaaaaggtgcacagagaatggtattccccatttttcaggcagtcgaattacanaaaccacagatggcatactgtcatt

SEQ ID NO: 11663 - DNA, 1001 bp, Arabidopsis thaliana landsberg
agacacttgatcgatttcagctcctaatacagcaattggaatttttacctctgcttcaatcatatactgagagtgataatcacaacaaatgagagagaactatcaagtaaggagtggccatatcaaagatctaaatacccttgatatcatccaccgtaacgcgagcaggatgtaacaaaacagtagcgtcaacaagcttttccttagctagttccaccgcaacttttgctaaagaataagaaacaaaaagtcttgtgttaactatatatacatggttgacttattatacagatcatggaaaacattttcataaaactgtgggtgatgatgggaacaagaaaaccaaactcaccaccccaacagaaccctgctgctcctatactagttatgcctttgttcttcaaggcctccactattggctttgactcctcaaaccctttctcctacaaaatacatagtctggtttcagatacattgacacagaacaggacaaaacactgtcttaaccttagctttgcaatcaacaataaggagtgataggattttggcattaagaataagggattattaggatactttgactatttcaagctggggaacaaaaactcatttatgtttttgagaaaaaaattgaggatggaacatttaataaggaaaataaactaactagttcatgatctttcatccaaataggaaacggacgatcctggttctcgggattataaggatctccatggaagaaatcaggaaccaccgcgtagaatccagcttctgcaaccttgtcagcaagtttcctatcaagggaagaacaatatccatgacaagttacaacaagaatgaaacatctttcgagtgactataaaaggtgatataaactataactcattataacaaagaatctgaagtaaaagactgtctaacaatcaacaaaagacaagctgattcagtagggattctctgttacagcacctcaggtttggagtttcatgtcctgcaaaaga

SEQ ID NO: 11664 - DNA, 945 bp, Arabidopsis thaliana landsberg
atggctcctctgcttagttcttgtcgaaaacaggttctcctttgatgatgaatctgtatccttactatgtttatatgctgaacaaaggtgtggttccgctcgataactgtttgtttgagccattgacaccgtctaaagaaatggtggatccgaacactttgttgcattacacgaatgttcttgatgctatggttgatgctgcttatgtctcgatgaaaaacttaaatgtgtctgatgtggctgtgcttgtgactgagagtggctggccttcgaaaggtgactcgaaagagccttatgctactatcgacaatgctgatacgtacaactcgaatttgatcaagcatgtgtttgatagaactggtactcctttgcaccctgagatgacttcaagtgtctacatttatgagttgtttaatgaggatttgagggctcctccggttagtgaagctagttgggggttattctatgggaactctacaccggtttatttgcttcatgtatctggaagtggaacgttcttagcgaatgatacaacaaaccagacttactgcattgctatggatggtgtggatgcgaagacgcttcaagctgcattggattgggcttgtggacctgggagatctaactgtagtgagattcaacctggggagagttgttaccagccgaataatgtgaagggacatgcttcgtttgcttttaatagttattaccagaaggaaggaagagcttctggttcatgtgacttcaaaggtgtggctatgatcactactactgacccaagtaagctctttttttcttcttcttttttcttgatagggttatagtttgaagatctagagttaaagacttatgaaaatcaacaaacaccctctgagtctgttagtttttagattcttagttgcgagagtctatatgagccttaacatgaaaatattatcaagatca

SEQ ID NO: 11665 - DNA, 1094 bp, Arabidopsis thaliana landsberg
tacgttcaacgtcgaaaatacacattctaagtaatcgaaaaatacctattaatattcccatccatgttgaagaaaatataagaaaagctaagaaactcaaaaagaagaaataaaaacaccatagaaaccggaagtgtctaaaattccaccacaaatctctaagtgactttctcaaaaataaagacttcgtcaacacaaactttcttttgatagaccacaaaaatttcttatgttgtctattcttggtatgctttgatacaaacctctcttcttcaacactcgctctctctctttctttcctttttttttcctctatcatttcatccatctcagattatcttcgtttttcttcatctccagagactctccttccatctacccttagagggcgcgcctcccgtgcgccttcttaactggttatggaatccaaatgtctcatgttcgtttccattgtatctgtcttcttcatggttgttcatggcgtatcagagaccgaaactctcttgaaattcaagaattctcttgttattgggagagcaaatgctttggagagctggaatagaaggaatcctccatgcaaatggactggtgtcttgtgtgatagaggctttgtttgggggttacgactagagaatcttgagctctctggctctatcgacatcgaggcgttgatgggtttgaagtctctaaggtctcttagtttcataaacaacaaatttaaaggtctatttccagagttcaagaaacttgttgctttgaaatcactttacttgtcaaacaatcaattcgacctagagatacctaaggatgcatttgatggcatggggtggttgaaaaaacttcatctggagcaaaataattttattggtgaaattccaacgtccttggtcaaaagtccaaagcttatagagcttagacttgacggaaaccggttcaccggacaaataccagaattcacacatcatccaaacatgttaaacctttcaaacaatgcattggcaggtcaaatcccaaatagtttcagtacaatggatccaaaattgtttgaaggtgcactaatttttttcacttttgttataactctagaaaaacca

SEQ ID NO: 11666 - DNA, 1111 bp, Arabidopsis thaliana landsberg
gttcttgagttggtttcaggaaaagaagcgttttctgctgagagaggtgagatgctggtgcatatatctgctccacttatgaatgagattttggattcgagtgtagacatttcagaggacaaggtcagacagttcttggacccgaggttgttaagggatagtcttgatatcgatgaggtcaagacaatgttgagtgttgctgcggtctgtatcagtagcaagctatctctaagaccttcggctgctcaagtagcggatactcttataaaggaaataccatcattgagtttcctcggttgcggtaaaggagtgtgagttatcggtgtcgatggtttttgttgtagtgtggtaaggctgcgtgaacgacactgtaaagttggtgtgcatttaggagtttcttggaaaaccagcaagaagaataaccatgtaaatactcttgttttgttttgtgaatagaagcaggaaataacattttgtctaattatcattcatcaacatttcctaggaaatgtaattttgattgttgttttgtcttgaaatcttaaaaagaaagagaagttctgttcatgtcaatgtaatgtaaagtaaagcttaaagcagaagcatgtcattgtgaatatgaagcaaagcttatgtgacttgtagtgcaatttcaaaggttctgattctcaattccttcaagatacagtaacacagcaatcaaaggcctttcttggagaaataactgtaataagctaaaaaaaactgaagtttgaaactaaagtcaggaagagaaagcccaaaacaccattgtgaagtttccttgaaagtgagcttatgggcttcttttccctttttttttttttgaatgaatgaatgtatgggcttcttgttgacaaaaaaaaaaggaagatatgggcttgtttaaaagagttgcgctcttcagtttcctttgaacatggtgctttgtctatcttgaagggaggatatgactatatgacactatcttgaagattatagtgtctactctagggtgttaaatccgcagaaagcgatatgattcgaatcaaaccaaactatatattgatatggttcagatgaagatgtttatctcaattcgaatcacagaatt

SEQ ID NO: 11667 - DNA, 690 bp, Arabidopsis thaliana landsberg
gcaacggattctactgtgattattttactccaaataaaccgtataagccaactatgtggacagaggtttggagtggctggtaaaaacaaatactttctttgcaaaactgtaatgttattagagacacaaaatgtttactgattgtgtttgttgtccactatgatggtgaaaaggttcacagagtttggtggaactgttcctaaacgacctgtagaggatctagcatttggagtagctcgtttcattcaaaagggcggttcgtatataaactactacatggtaattagtccttgcacgaacattcgaaaaactgttttcggtttcggtttcattctgatgcttgttgggtggtgatgtgacagtaccatggaggaacaaactttggacgcaccgcaggaggtccatttatcaccactagttatgactatgatgctcctatcgatgaatacggtacaattttcttacagtcagttgtgcaaaatgttgtttagccttttacaattttacgaaaaaagtctgttttttcgatgatgcagggttggtccaagagcccaagtacagtcatcttaagcagcttcatcaggcaatcaagcaatgtgaagctgccttagtttcttctgatccacatagaaactaaactaggaaactacgaggaggctcatgtgttcacagcaggcagaggaagttgtg

SEQ ID NO: 11668 - DNA, 1107 bp, Arabidopsis thaliana landsberg
atcaattagttgatgtacatacttcttattttatcaggaatacaacatggatatgctaaataaggagtaaaagcttattgtgagagaatacgaagcaggtcagcaccacatgacatttgtaagaaaaaaaatggcaatgcggtgtgcaaagagaagtgttggacaatagaaaaatatcaaaatggacgatgtctaatacttccaaagacgacaaaattggattgctactgctaccattttgaccaatgctgagtctaaacccataagtcatgcaacatattgagtagttttttttttcttcatattctacgtcattttttgtcttccatgggtcactccggaatgttggcacacctttcttccgaatgaaactttgcgcgagctcatgacgttccactccatatgtgtattccccgggagaaggatcatcaaagcttctccaagatttcaaaactctatttatgtttgatttggcatcccagccaaatttcataccggaaactaaagcatctgtcggaaaaccaaagcccagctgataagtcgtcgttgttgaagtatctcaatacaaagtttccggtgtctagaagctctccagtcactagccctttcatcagatttgtgctggtcacattggtccaccagacacgggtaccgtgttgatcaaggagaacgaggttgttatccatgatttttagggttccaatgggctcggagagtgggttgcctctattcgcaacccataccacttcctgaggaaacctatggtgccatacgccgagataccaatgcgaagtggaggacggtttaaaaaaaccaagcacagagactttcgtcggggacaaaatgtttcttcgagtagttatcttaaacggctctgtcgatacaagtttcgattcatatttagaagaaagctgaagaactaagacgaagagaaaaagtaccctcatctctctttcgattaagaccaaaataaaagtttcgtttcgtatttcacatgcatttatatactctgttcagtcgacaatcaaattagaatttccacattgctttgacttttcacctcgaggttaatgatcttcatcataaatgatatagttgttttcatgt

SEQ ID NO: 11669 - DNA, 463 bp, Arabidopsis thaliana landsberg
tgttctcttttttcttcactttagttcaaaaatcggtaatgctttattacattacattttgaaaacaagagactgattacaatagtatagctctttgggttattaaaaaatcccagaactaaaatatacacaagtattgtaaaatatagtatttcaaccttaacctataaaaaatgaagttatattaactctttgataaaaaaaaagctcaaagagttattgtgtatcatcaaatcatcaccaggcgtggacaaaccgttctctttctagaaccggttcacccggaccggttttcctctcctgaaactcgtggatcattttaattagagcacttgcctttttcccacctcccaactctccgttacttgacgccgtgtaaagcgaccccatgatagacggattcttagccagagacccaacgacgtcacttccgccgttatgacacagattcaaaagcagagca

SEQ ID NO: 11670 - DNA, 413 bp, Arabidopsis thaliana landsberg
aaagagtttggatttcaatgatttgttactcacttgacgcagctctttttgttctcgcagccacaggcacaagacgggcaaggagttatggtgtcgttgtagaaagaagagaaggagacacaacagcttggatgctttcttgctaaaaactgtgagtatgtgcaggtaacattccatgtcactgcagaaacataagtttgaaattgatgtttagatttcgatgatggaacaagttaaggtttttgattgattgcttactcaaagcttgtgtttttcgccgtttgtcagttgtgagaaaaacggtagagggcacgattttggcaggaccgcaagtgtaaccaggggccgggaccaagcaaagtgaagttcttaggaagcttgacagtcttgtttgtagttccagctaaaccagc

SEQ ID NO: 11671 - DNA, 529 bp, Arabidopsis thaliana landsberg
  unsure (1)..(529): unsure at all n locations
cccctctgctaagctgaaggtagggtgaaacagacgaagctccttcaacaccctttgctgccgatgtagcagaaattttaaaggtaatgactgactctctgcccatcaagctgctaagtccttaagggccgaaactgacaaaatttttacagaagaaagaacaaccattggctgcaaaggagaaagctgaagggcaaaagaaacaaagaatagtcaacgtgatgcaagccattgagcgaacaccgccttcggcctcaacgggcaaaatgataactactgcaagtgtcgaagccgaagctgctgccgaagctgcaaaactcgcaaccacaatgtcaagaattgacaagcttatatcagatatggttgctgaagagacagctacggctgcagatgaaagcatggccgcaacgcctgataaagggaaaaaagttgttgatacttcttcgggagagaaagattttgaccttcggcacctgggtggccaggaactgtccgaggcagacaaggangagctgtaagaatatgggat

SEQ ID NO: 11672 - DNA, 1062 bp, Arabidopsis thaliana landsberg
aggatatatccggttatttttatatcttccttcagctgctaatatctctccttttaactcctactttagaaatgctccatcaagaccaataataggcctacaacatcttttccattagtttctcataatcgcaaaattgacataaaacttatcaaatcgtagcttaccataagcctgaggaatgatgacaatctatgtatgtgtttcacaagaagaagaagaatgtgaagaatgtgaaatgtgaaagccctcatctaagctttagtaatttgtcttatcatgttggcatgttttgactctatttctataatgctcgaattttaaaatctgattatccaaagttgaaaaaagttttcgtttttaatttagtttttttttgaatttttcgatgataataatttaatgtggttgacttgacctttttcaagttgataaatcatattttcgaccaatttctaataacatctaaaaaacgttgtactaacattaattgataattgtaaagtctataactcgtcggtccaacaaatttctgacgccctttattatctatcaaaaaaaatttccaaaattttgaaataattataggacaattgtccgaccatctttattttgtccaaaaattatgaccaatttcaactaatattccttctatcaaaatgtggctgaaaaatttgtcacatttttctaacaattactttcatctgaataatgttaggaatttggaatgacttcttgtagtaaactttatctaattcccattgatacaattttttttttatttttttttgttgacatctacctagattaactcaagcaagttaatgatgagggaaattgttgacataagtgatatgatgcagatgggtacgaattcttcgtagaagtaaggataaagaaaaaaaaccaaactcttccatgtcgctctgtatcgccttcagggatgttgagaaagctagtcactcttacgagaatgacaccattttcaccagatctgaacaatctgtaaggaaaacaattttttgtttgtcttgaccgatcatacatcgcactgacacaaat

SEQ ID NO: 11673 - DNA, 1132 bp, Arabidopsis thaliana landsberg
atggatacttatggaagataagaatctaaggtgagaagacaacctatgttgaagtacgattggttcgacataaaccggagttaacattaaaaacagccggcctttaataactgggcgaaagtaaggctcataaacagaggaaactcgggtttctggagcattgagcctgtttaacttattctgttaacttgaaaaaagaagctacaacctaaagccgtatccacagatccatgtttaggagattagtgactttgcagggtcatgatgaagcatggcgatgcagaacatacttgaccacttcgtagaaggaaaccactatccctaccgatggtcctgcacgtgccactcgtggacccattcccatgaacagtcctctcatccctccatccctgtgtgtgcaagtatttcttgttatgttttgtttcaaaacaaacatagagcttttaacaaatgaaaaatggaatctttcaaatatgcatatacatacctccaaacctctattagtgtctgtcgtgtcgtcatcatcaatgccctaccagggtccttctgaattaatggaagggagaaacatgagatggtgacacaagtaaacaaacatgtttctggaggaaagcaaacaaacctctatctgtcttcttgttcttgcaacgtcaagaggacaagtagcagcagcagcgatacttccagctataaatccagcagaaaaggttgcaccgaaaacaccaacaagatttgtatcattgcccgcaactccaaggagcctcttttttatctgtatcataagggaaggtcaaagcaattcacttactgtatttggcaaaactgccttaaaataaaccttctgcatcgtaaaacgcttaaacatgttaaagatcttactggctcgagggtcgaccagcagattgctgagaatggaacatcacgggcaagctgtgcacccaagcttctccagagaccacgatagttgtgcactgtcctaagaaagatgtatatcaaggactaaataaacgagaacccgggctcttggtgtcaatgtacacacgcacgcatcttggggcgtgatcgctaactaagcggtatgctctacttgattatacatgcgttggagagctacaaattcgggatattaata

SEQ ID NO: 11674 - DNA, 1352 bp, Arabidopsis thaliana landsberg
tagcatcattaggaaaaggatcaagttcctgccattagaatgggtagccagtgcaaattcctgcctccataacaagtctaaagtggcacttgtttggatagattcaccagaaattcatacatgcataactgaagccattcacaaataaaaaactgccaatgcagaactgaagccattcacaaataaaaaactgccaaagcagaactagataaaaccaaagccatgcaataacaggaaaacaaatgtctcaatacgaagaaatggtggtcctggggttaactacaaagcaataagaaaacctaactgaatttatcattgaaacacaaaaaatctagtccagagataacaacgtaactgcagcttgaatctacaacgattaataaaaatcataagcctcataagacaagtttgctttgaaattggttcagtatacaaatagaagataacaagtatacaatgaaaaatgagcgtttgaaggtaaatactgagtacaaatattcctccaaattcacaattgagggtgatgtttgcctagaatcataacaagccaacttttctctgaatcaccattgagcatcctgtgggaacaactcagaaatgaagcctagaaaaagttacaatacaattatatcaaattcaagaatacagactgacctagatcataatgaaatagaagcccctccaattatctaatgacaaacagaagagtcatggaaacctgttatgagatgccccagcaggaaatgaattggagcttcagctactgcgtctgcatatatataagcaagtagccaagttctgcattcagccattcactggtacagagaatcagttgtatggaatgttattgtcttgttgtctggtacaagttatcaaatagtggaagaagactagtctaggaaagcatcattcgaaaaattatgttcattaaggcatacaagtatgtttttctaccattttagggtacttaaacttagggcactgctcgataaaagcaggtggtctttcataagtcacagatgcagctctgatcaaaatcccagcagttaaaccccatatcatataatccttatctcctgttctgtagtcaaagtaatggatcaaatacttttcacccatccactctctctcttcagatcttcgattctcatcctgaaacaaaaaacaaaaggttcaagtaatgatgcttgagaagggaaaaaacacaactacagctaaagtaacttggtaagaaaacaagagcaaccttaaggaacatttccaagggtgcatcaaacacagcttccacttccccaggatttggtatcggattgaatttatttttgtccctcaaggatgcctatcacaggaat

SEQ ID NO: 11675 - DNA, 1103 bp, Arabidopsis thaliana landsberg
atatacagacatttgaaaacttcaaacatattgttggatcatgactataaacctaagctctcagattttggacttgcaaagtttggtccaagtgatgatatgtctcatgtctctactagagttatgggaactcatgggtattgtgcaccagagtacgcgaacaccgggaagttgacgctgaaatctgatatttatagctttggagttgtgctgctggagcttatcagtggacgcaaagctcttatgccctcatccgaatgcgttggtaatcaaagtcgctatcttgtgcattgggtaatcctctcaaccttattttgcttaaggatggattagttttttccttatgaccatttataggctttgcttcttttagactatataaccagattatatctatctaaattccaattttgcttaagagaaaaattgttttgatggtgaccttttggtcgattttgcataattataccgtttacgatttagggtttagggtttagattaatcaattaaccattaaaccatatgctatcaattttgatttttcgtaaaaatggtagtggttttactattgacctttaaccatatataggttttgattttggttatgctgatgaaaaagtgtttcgtgttatggcccttaatgatgtgtggatacgtattagactaatgaatgttccgattttgatgacgacaatgttcatgtgtttcttttttttcttcttaacaggcacgaccgttgttcttgaatggcagaataaggcagattgtagatccaaggttagcaagaaaaggcggtttttcgaatatacttctttatagaggtattgaagtggcctttctgtgcctagcagaagaagcaaacgctagaccatcgatcagccaagtcgtggagtgtcttaagtatatcattgatcacacaattaggaaggaaaggagaactaggcgtagactactaggaggaaataaggatggggcggggacatcgaggtcaccggatgagacaatgatgaggatgttagaagaagaagaagaatacgtaactagtgaagaagctattgagaaaaggagggtaatcgtggatgatgctcgtacttgggccggta

SEQ ID NO: 11676 - DNA, 1235 bp, Arabidopsis thaliana landsberg
ggttttgtatttttttttaaaagattaggaggatttacaaaaatcacttaccctgggtaacttgtttttttttttttgaactttcttagacattttccccagaacttgacatatccaaaaaaggctgtaaagcacgtaaaagttccggggaatgttaataagattcttgaaagttctgatcttgttaaatatggatcatttcttgaggagcagtcttttccagaaattttgatgaaggccatgtccttggggaaacctatagttgcaccagacctcttcaacattagaaaatatgtatgctccttcttcccttgcatgtggcttgacggaaatgtgttgttgcatgttctctgtccatttgactttcactgactgtatttgcaatattaaataggttgacgacagggttactgggtatctcttccccaagcagaatcttaaagttctatcgcaagttgtgcttgaagtgataacagaagggaagatatctccattggctcagaagattgccatgatggggaaaacaactgttaaaaatatgatggctcgggaaaccatagaaggttatgcagctctactagagaatatgctcaagttttcttcggaagttgcttctcctaaggatgtacaaaaagttcctccagaactgagagaagagtggagttggcatccgtttgaagcttttatggatacatcgcctaataatagaatagcaagaagttatgagttcttagcgaaggttgaggggcattggaattataccccaggagaagctatgaaatttggagctgttaatgatgattcgttcgtgtatgaaatttgggaagaagagagatatcttcaaatgatgaatagtaaaaaaagacgagaagacgaggaggtaaggtttagatgcgaatttttgaaatgacgttctcatctccatttcctacatgccaatttgatttgttttatgttattacgcagctgaaaagcagagtcttgcagtatcgtgggacatgggaagatgtatataaaagcgccaaaagggcagaccgaagtaagaatgatctacatgagagggatgaaggggagctgctaagaaccggtcaacctttatgcatatatgaaccctattttggtgaaggaacctgggtcgtttctacatcaagatcccctctatcgtggggttggcctggtgagtttccatgtgcaatatagtgttttttgcaccataagatggtccacaggagaga

SEQ ID NO: 11677 - DNA, 597 bp, Arabidopsis thaliana landsberg
tttataaaagagttgttagggtttagattttataattaaggaaatgttccactataagacacttttagagaatcattttccgaagcactttttacactaattcttatattttggaatttttttactcttaattcaaagaaatgtgattggcttagttgtgttgcaaaaattattaaattatattgttcatcacctcttcttgtaaaacactgtgactctctctctctctccgaaataggaatatccatttttctcaaattaaacttaaaataatgtgggtgattgaattggtgaaagaccaaatcgccgtaaacatcccgcccacagtcgtcggttttggttctggccagatctaatatggtggcttcattcttcctcctgatctcttaatttgaatcggttactaggcttttgctagtggcaatggaagtgagcgatgggtcgtctcaagttttaaattcgatgaagcatgttgcgtctctgcgcgccgatgaagacccgacgagacatccgtctactttctctacgctcacgatttggttgtgttaggccgagctggtatgtatgtgtcgagtgtgatgtggacaatacaagagg

SEQ ID NO: 11678 - DNA, 1107 bp, Arabidopsis thaliana landsberg
ccaactccggttaacgtgcgcatgcgtcgagtacaacacagtcacaccatcctcctccatcctcctcaatattgccatcgccgcttccactttccccgccctacacgcgccgagcacaagcgcgtcgtagctacgcgaatccggcgaattcccgtcttcttcaatcttacgcatcacctcgctagccgattccaattcgccgtcgtaacaatgcgaagtaaggaagtaattgtacgccgtcacatccatcgaaaccgatttggatctcatcgattcaacaactctccaagcttcttcgattttgtacttcctcgtgagcgagcacaagatcgggtgatatgtcgacggcgttaagcctaatctcccgttagacatgtctccgataacgattaaagcgtcgtcgatgcgtccgagcttacagagacgagagattaaaatgtcgtaagcgtttttccgcgagaaaccgccgtcgatctgaggcaaaacgcggcggagatcttctaaataggaggagtatgaagcggtgttggtgaggaatttgaatgtgtcgctcgtgttgaaagatccgagaactatacggttgtttaggagacggcgtacggtctcgaaatcgccggagctgccagcttcgttgataagtttgtcgaattcggtggttttgcgacgacctggaggaatcttcacggtggagaaggatcgctcggcgaggatttgaaggaatgttatgcaattaactgattgtttcacgaatcgtcgccggagaagagacattgagtttcccaaattgatttttcttgttcgttagggtttaagccaagaacgttattaagaaaatgggcctatgagatgacatgggcttttattttgtacttttaggcctgttattgaaactctgacccattatgtttctaaattaaagacaatgtcatccaagtgtgtgtgaaagagttataatttttagtttgttagtatatatgtgtaagtgagtgtagctcactagaaggattcagagactataactaaatggataatatttttttgctcaagaaagtattattagggaaaatttaggtaattaaggatgatgaaaccataaaaaggattatg

SEQ ID NO: 11679 - DNA, 157 bp, Arabidopsis thaliana landsberg
ggcatgctaattataggtgtcctccaatcaatcgcctcggctgtattgttagccgaactaatcaaggagacgttcctggtatatccggacggtccggcctcctggcgcggacggtccgagcctatcgcggactgtccggatagatagcctatcggca

SEQ ID NO: 11680 - DNA, 570 bp, Arabidopsis thaliana landsberg
  unsure (1)..(570): unsure at all n locations
cggatgcagctggtgaccatgtactcatcactgggttgcttgaggcatttgaggctgaagccagacttggccttggctcctgtaactgagtttggatgtattatgggatgtagggtgaacaatatgaagatgtactaaacnnnnnnnnnnnnnnnnnnnnnnnnnnnnnnnnnnnnnnnnnnnnttnnnnnnnnnnnnnnnnnnnnnnnnnnnnnnnnatagtgtggcctttgtccacaccacaacacaaatagaatggcttccttggaggcgcaccaaatctgccactagagctttgtcatccgcttgctctcagagcaggtggtcggaatgtgctttgcgaagattgctattgagagcttgccatttgtcctaattgatcctatgactgggtcattctttcctcaccttgtgatgggttatggatgcttcggacatgccttggatggaatcttccttcgaagttcatggcgactttggtgtatgtgtggaacttttctctccttgacggaaaacattgtcagaccttatgcattcatcgattttctgcaataacttttcaagggaatg

SEQ ID NO: 11681 - DNA, 935 bp, Arabidopsis thaliana landsberg
  unsure (1)..(935): unsure at all n locations
tatatttaaaaaaatctaaattactcgtattaagactaggtttgacaataaaattgtaaaccagtctgtagtagatgtggtctgtgcgcaactgtgagaaacgaatacttgagatgtgttagttggacggtggagattaatcatcttatgggccgcgcctgtttggtttatttctttggccgtaagaaacgcattctaattgaagctaaaccaagtaattactaggtcttttaatacgaacaataataacgaaacatatagactagggtatactttaagtttttaactaccaaataacagttgcctgaattttggtcaatacttttgttgattatacatatcaaatccaatttggttttaggaaaagcaattgtatcctatcatttgctcatttgttttcatatcgtaatgtaaattttataataaagtttctgattaagtattcgactaaaaaaactatccaaatattagtttctttttatccttctacaatgtaggtctttctagtctctccctctatccttaagccaacgatcatttttagccaactaaaatcaacttaagatcgaggtctctactctctacctaactttaggccaccgattgttttagccaactaaaattaacctaagagttattttctgaacgctaaagacgatggaacattacaaggacatccttcttcttatggtttagtttcagcatacactagtttaattcgggatctatattacatttcgtgatcctattaacacggcatgcggcaataaatgcgttgtgtttaaaacaaacatcacatttttctgaattgttgccatgcatgtgattgtgaatgtgaatgtgattatcatcccatcaaaatatttacttacgatattattggtcaatntcttcttcgttttatccttcacttgtcacgtttcccactcatgttt

SEQ ID NO: 11682 - DNA, 551 bp, Arabidopsis thaliana landsberg
caaatagactataagaatgaatgcaacgatgtaacaacattcacaagatttgatgcctctcttgcaagtaccttgtacaatcgttgactttctctttctgagtacaagaaaaataaccacaatgacaactgatgcaacaattgccacaggaactgatgcaacaattgccacaggaattttctccttaggtcgtttaataagccttgggtttccttcaaggctacaacaaaataagggttgttctcaaacgcatcattaagattgataaacgttcaaaagctatgtggaaagtttcttactatagctttagtcttttctttcgaagagcttgcggtattgaaccattaagattgttcccgcttaagtttctgtgaaaaacaactatgatctgagcaggtggaatttgaaaaagcattagaagatatatattgagagaagcttacatgaccgacaacgatttcattttgccaagaaactctggcacccctccagttaagttattattggacaagtctctcatgttatcgatagagaattaacacttgaaggtt

SEQ ID NO: 11683 - DNA, 1023 bp, Arabidopsis thaliana landsberg
cttttttccatgttaagaaagtagtttcacactttctaatgtgctattgtttttgcaattatacataaagaaaacagcgatttgctcaccatcactactttaaacaattacgaaagacaaccattttatctgtttctggatttggtattttacaaattcttataataaatcgtgtactgtattagtgtattatattcgtggtgaatttatcaactttatccatttcatgactcacatgtagcaatatcttaatatattttttccgactcgaaagttacaaataccattttttccgaagcagatacgagtcagctaatagggcgaggtatgagtgctaggctgctagctatggaggagattaattattttatttggttgtatagttttcaactaatataaattccattaaactaaagaattaggaaaaagaaaagaaaaaacaatggcctcctctttataaccttaccttataattccacctgaatttctttgatgcgaaccaactaaaaaacatataatttggttatagcaagaagaagaagatgaagatgaagacagttcttgtaatcataaactgtatattcttggccattggaaactgtggaggccctctaatgatgcgtctctacttccaaaatggtggcgaaaggatctggtttccaagcttccttcaaaccgttggttgtccactcattttcttccctcttctcttatctttcctccgccgacgtcgttgccttgaagaacaagaaacgactccatttttcctcatgaaacctcctctctttatcgccgctatcgttgttggtttgctcgtgggatttgacaattacctctactcttacgggttagcttatatccctgtttctactgcgtctttgatcatctccgcgcaattaggcttcactgctctctttgcattttttatggtgaagcaaaagttcacacctttcactataaacgctatcgttttgctcactggtggtgccgtaatccttgcccttactctgatagtgacaagct

SEQ ID NO: 11684 - DNA, 615 bp, Arabidopsis thaliana landsberg
  unsure (1)..(615): unsure at all n locations
actcctttcttggaaccaactaaaaatctttctcatcaacgtataatataatcatatattcactacttccaacacatggtatcaaataaactaaaagttgagaaaacactttaataaactatatggataaaaaaaaattgtcctcaatctaaaggcattcaagttgggtcctcgtttcctcaattattggtctatgacataaataattcctcaatagcatagatgaataattgtcctcaatttgaattagccctttttccaaatactcaacacgaatcccaatagaaagagcaaacatccgtttgaaagagcaacattaaaaaaatacttaagtgttggcaaatctgaaaataaaccataaattatatatggttcgattagattacaaaaaacaaagtagtgcatattttcaattttgattataaaccccttaggtctaacataatcactacttattataactctaaaacttaatcacttatccttgtcatcctccttcttctcgatatccttcttgttcttgttattcttctttttccaaaccaccagaaccaacctcctcttcctccatacccttaactatangcctagcagtttccaaaccacaagcaccaa

SEQ ID NO: 11685 - DNA, 1236 bp, Arabidopsis thaliana landsberg
gcccaagcggagtagctaatgtggccagggtctgcatgaagcatgttataaacaacaggatcaacctaccatcaacataaaaaaccacattattatcaagagaaatacactacaagagtataactataacagaaccgaacacatgtccaaatcgaacttacttctcggggaagggctcgcataattgttagtgttgtcatatcgagaacaactcgagttcccgaggttagcttttccttatccactttgcttcggcaacccaccacataacgtggaccactgctcgctttcacaatcactaaaacacaaaacattcaaaatttaaccaagggtccaatgagcaaaaatctcaaaagataaaaaagaagggtattaggtcgaggaaaaatgattacatctttcattatccaggggtcgaagcacttctccaataatctgcccaacactttgaagagacttgagatcatcctcggttttgttgaattcctttttagctcctcttaagttctccctagctacagtaacacaacaaaactcagtgttctaatcacaagtcgagtcatatgctcatatgaaactccatcacagtgaaaaatcaaaacttcaccaatcgatttcactaattcgagagaacactcttcttctctaagaaaaagcgaacactttaagcaattgagagaaaaccctagaatcgattcacacaaaaacagcttaatttacgaaatccacatagaaaaaaaggagccctagattcaagtcattcaaagccattcgaactaagtaaagatgaggcactggcaacattgatgcaattgaatctttgaaagaggaatcgaacctgttcgaacacgggattcgagttccttatgttggaggagctttttccggtactcggaaacggcggctgtacggcgtctaacggattcatcgacgtcggtcatcgtttctgaattctgtatctgcttcttctacagatagatctcagattatcctgaaaagccaagcaagcgatcttttctcgaaacaaatttgtctgaagttttcttgagcaatgggtttagtctttctctccagaaattggactaaaatacagattgctttccgagaggactcagcgaactgaaacgccgtcgtttttaactactgtttttttacttttcacattttatatatatttttttttaatactgtttttactttttagttcttttattcagaacctgaaaaatggaatct

SEQ ID NO: 11686 - DNA, 746 bp, Arabidopsis thaliana landsberg
aaaaccaaaattttctgttgtttctctgtttgtgtagggttgaaccttcccacaaaaggatgcttgttgaagccctacagaaccaaaacgaagtggtaattccctggtcactaagttgtcatcattacccatcttctttttgtctgtgtttcagttcacatgcattcttattttgtattcatggctttgtttcaacttttaagtttctaatagttttacttattagagaagaaaagttcttgcctctaactgtagcacttatgaaccttattctcctaggtggcaatgactggtgatggcgttaatgatgcccctgcattgaagaaagctgacattgggattgccatgggttctggaacagctgtagcaaaggtatatacttagtgtttgttttcagtaagcttcatgtattcgtgtcactttaatttaatttgtaccattcaaatttatcatcattttcaaataatagctagccattatctcctgtccatctgctttttttatcttgatctcttcctctcgttcagacatggtaatcagttgacatggtgatccaattatgaggtccttccgcggtcgttttcttttatccctaatgttgcaattgaaaacaaagcatatagtgaaaaaacaaatctggttattgcttgtggtatagaagtgatacagtgtaatgtgactgctatacaaaattcttcagagctagcacactagttatgctactaagactggactgttactgatcc

SEQ ID NO: 11687 - DNA, 948 bp, Arabidopsis thaliana landsberg
attggtaatacatatatacaccacaaggtttgtatcttgttattctattttctaaaacttttaacttaggaaacatttgaaatttgaccttttcatcggccatccccatttctcgccgagaatacccaaactcctctctcttgtctgttacagacaaaaacaaaacatgtcttccacaaactgcaataatcaatcgaatttgtataagggtcactagaaaagattatcctttagagataaatagttgatctagttactaatatgagaccagtaagctgaaatccttccgagtcttcttataaaaaaaatctcaatctcaacgcttcaaaaaagaaaaaaagaaagaaaaaacctctggaaaaggaatcaaaatccaaaacaatgtactcttcatattctctatcaaaacgcctcatttatgtccctatcctggccatccaattcctcctcgtacgcagcgtttcatcactaaaccttaccaatgagtatcttaaccacaaatgcttcgtcagtgaagggaaatataagcatggtgataagtacgagaataacctcaacgttctcaacaagaatgtcctttcttatgatcttactagcggttttctacacgtttctcatggcgagggtcctgattccgtcaccatcatattacaatgtcgtggcgactccttcgggtcgaattgccgctcttgctataccaccgccatcgacggggtaatgtcactccaacatgtaaacgttaattagtaatgccatcgaaatatatgcatatatttttgggtatgataatttgatttaatttttatatttctacttttatttgatttttagaaaatggtaaaatgattgaataatattcaaatttcatattaaggaatattttcatatgataaaaataaaaaaggaaaattgaatcattttttaatgtaaaacaactatgtatatgac

SEQ ID NO: 11688 - DNA, 969 bp, Arabidopsis thaliana landsberg
atatacatttccgcgcgcattctctcttctcatctcatctcatcttcgtcctcctcatttccttggatttcttattctttgtttttttttcttttgtgtatttgtctcgattttgattttagttacgtgacgagatttctctcccaggaatctattaccaaaaagatggagcaatctgataattgtgattgcataatccactggtaaacgtcacaaaccaatagggtaagcataaggacgttgatggagccttagggcttctccgtcttagctattgccactggctctcatattccattgccttgcggagcggcgttgctgcttttaccgtttgggacctgccatgagatctatattcctttcttattctcaaaagttctctgttcttttggttttcaatttttctaattagggtttagtagccgatgtggatatcagattataaaagaacaccatctttcgggactgattgacttcttttgaagttttgctgatacttctgcaattctgaggctttctttatttgtttggttacttgtggtttgattagaagtagaggctgtgatgattgagaatgtcatgcaccactctgattttttgtgctgataatcatctctaacccatattttatctgagccttttctgaattgttatatgacttttggttctgaatggttattactacccttttagatgtgttgtctgaattagattgattcattgtggtgcacttatgaattatatttgtgtgaatggttttctactaattgttcacattggttggctttgttcgtaatggttatgctgatgggagcttatgcggagggttcggaggttgtctcatacgttgattgcttggttgcggaaagttctgaagattctgcccgaatgttgactttttggtttcggaaggttctgaagattcagtccgaatgtcatatggctaagagcgtagtgaagatattgcta

SEQ ID NO: 11689 - DNA, 1062 bp, Arabidopsis thaliana landsberg
cattttaaaaactttattaaggaatttttttattagactttcttaattaattttgtttttttattaaaatttaaattgataatgttaaaataaatcagtcaaaagttgaagatttttttcactaaaatccgtagaaactattgattgattgatacacaccaaaaaaaagaaaacactacaatcaatccgagccgtcgaatcgtaagctcaacacatccattagatctagggctcaagagatcacctcaatatataaacactacaatctatctggccgactcttactgacctcagagctcagcaaaaatggttcaacgtcttgtttaccgatcacgtcactcttacgccaccaagtccaaccaacaccgcatcgtcaaaactcctggtaatgtactaaaagctctctaatgtctctttgtagtgactcttgaaagatcattgaaattttgggatctaagtttttgttgaaaatttggggttatttggcttaaaggtggaaaattgacttaccagacgacgaacaagagagctagtggacctaagtgccctgttactggcaagagaatccaaggggtaatcttttcttttccattttcattctcttatctgtttcaagaaattttgtgaattttggtgttagggttcgtgttctgaatttagttagattcccctgttgcaagaaagtttttgcattttggtgttaagagtttgtgtttgagtttagttggattctcagtttcaagtttggttcatgtttcttgatgtgtatttgtgtgttagctgttttgtctagtaatttggaaaaaagtttgtgaatttttgtataagggttcgtgtttatgtgtagtggtgagcaacaatgtgtctgatttttttgctatctaagttctgattcatttagcattgagacaaaatctggaactagacttggaatctagacattgtagagattaaagtgtttgtcttagcttggtaaaatagcgaaaaggtccatactttagatattaggattgatatgacttgtcgtaatagatttatacttcatgtccatttcagccagtt

SEQ ID NO: 11690 - DNA, 1252 bp, Arabidopsis thaliana landsberg
caaagtaaccttaagatcagaatatgaagaccactgagaacacgaaatccccgatttatttcatagataatttggtacttatggtaattgtatcaaaacgatcagatccaaacacgaaatcagaaaacacacaacacaaagatcctcacacacaatagttacataacatagtgcaatctcagaagagagacctaagagacaacacggccaacgacaggatacttagcttcaaatttggtctcccaatcattaagagtattgatctctttctcagtgagaccttcaagagaaggagacacatcttcttcgttcttactcatcttacccaaagctctgctcgcgtcttttccggcgaacatcgagtaatcgcctccggagccgtagaaggattttccggtggtgacatcgaacacacggcctttgattgcgacgtagatcggctttgattcgtcggtgccgttgtattggcttagctgctctgcggtgaattccatctttttctttaaagctctgatcaattgtttctggaaagaaccaaataaaagatagtgtgagatatataacagaggatttttttaaaaaattatagctgaataacttttttttaataagtggaacaactttttttgtgtcggtaataagtggagtaaactttattcttcagatttttacaaggaatatcaaaaaatattttatttttctctaattaaagtcgataaaaattccagaaatgcttaatctttcaaggagcttaatttaagctgcttaaacaacttcgtcgggtttaaaggacggctttgggaaaagacaatttaattttttaccagactacatttacgtttgggttttgttacgtattgtatttggattttcatttttatgcttccttcaattattgtaacactaattgttattcaattctatagaggtcaactgaatcgctttaagagttaagttttgattacttgaagactgttgactatatggtgtggcaaatacaacatgattactaccggagcttcacctagtcaacagtctccacttttggacctacagatgcactatctccggatagaaagcttctccactcttggaccgacagatgcaccatctccgggtagaaagcttttactggactgtatttgtgaccttaaggttcttttgctcaaccccaattttagtacgtaacctaacctcaaaattggccttacttttcgacgatatttagctcaactctgatctgccactcatt

SEQ ID NO: 11691 - DNA, 684 bp, Arabidopsis thaliana landsberg
ttacaaatacaccggcttttgtcataggctgctcagcacattcccagactatacatatacatttggcaatcaaagcattgtaaaagcctaaaagaaaaaaacagaagattagcataccttttttcgttgtgttctgttcgtctcaatttatagcctaatcagtgtctcttgggttgagtcatgtaagaatgcgtacatatgaatcacgccgaaaccagaagaacatgtcgtaattggctgaaacagagtagcaacgaaccactagtgtgagtaacaacagcaacaattgagtccaaatagaatgcaaaatatttcataacaaagggctgatattacagtgtagacattgatagagtttgtttataacttcgagccagtctacaaacagataaaacacctaaacatggcttctgactgtttcaagtatcttcaacgaggttccagatctgtaatggttacatcattgatagtttgggaagtgggcctgtttgcagactggctcgacctccaaagctggctgtacataatttaatcatcaaatcatgaacacacatatttaccaaagcttataaataaggacacaacagattagtgatagaggtctatcaaattgatgcagtattatcccatgtttgctctcttaccccaaataagcatcggctttagagcacaaagctcgagcat

SEQ ID NO: 11692 - DNA, 659 bp, Arabidopsis thaliana landsberg
cctttagcccatcagagacaatcctctcctttctcacctctgcttccattctggtcacccgagattcggcttgtgttttcgattcattagctagtttaagctcccttttcatcgcttccaacttcatctcaacttcttgaaaacaaactctagattcttgatattgatctttaattacgtcaaaagatatctttagctcagctttctcagcttccatcttctccaactcatcttccatctcaattttgtcaccaactacagcttcgagttctaagctgaatctcttctctgcttctttacaacaaataacttcactgtcaagctcatccttttctgcttgtagcttctccaactttgtgtcaacttcttgaaaacaaactcttgactcttgatatttatctttgagcacgtcaaaagatgtctttagctcagctttctcagcttccaccctctttaacatatcttccaactccattttgtcaccaacaactgcttcaatctctaagctcaatctcttttccgcttctctacaacatttaacttctctttcaagatcatccttttctgcttgtatcttctccaacttctccattaagctcaattcatatccatccttggagtttttagcctgtgtctcagtaggaagagccacaagacgt

SEQ ID NO: 11693 - DNA, 663 bp, Arabidopsis thaliana landsberg
gaagacttgtattgccgcctttttcattcttgattcgatctaactcagaaataaatgctgacgatgcccatgaatcagagcaactcccctcaactctctcccttcctccatctgaatgactatccacagattgattagacgatagcgatgatgatgttttagccaaaatcctaagcttcctgcactcagcttcgagtttcgccaacttctttatgatgtctaaatgctgcttactagcagtttctgctgcttgagtgctcaagtccctctcaatcatcacaatctcaaggtcttcacgctgtgtaagaaactcgcgtctcagcatcatgttttcagatttagcagcttctgcttctttctggagctcaagaactcgcttctctagaccagtgttagcagaatgcaactccttggtgctctcagtcacagctgcttgaatattcttctcttgttcatctataaactgccttagttgtctcacacactccttaagcgccccatcaagatgacttaccctatcttccaagacaatgttcttatcagccgcatcctcgagcttttgcttcagatcaaccgcttccgtttcaactttctcccactcctgaaaaaaaaccgcaagagaaaaagctttcactatgaaatgttaattccagaagccggatc

SEQ ID NO: 11694 - DNA, 1017 bp, Arabidopsis thaliana landsberg
attatctagatgctcagtactatggtgagatcgccattggtactccacctcagaagttcactgtggtttttgacactgggagctctaacctctgggtgccatcatcaaaatgctatttctcagtaagcaacatttggactattgttgttagctgtggttgagatacttttgagtagaaaactaattgtgttctatctcttttgcagcttgcatgtctcttgcatcccaaatacaagtcgtctcgttcaagcacatatgagaagaatggtttgttctctctcttaacttgaaattttttgcagttggatttcccagttggtagatactttacagttcactcaatgtagcctctagaattcatgttaatgtgcagaaaaccattgttaaaagatgcaacatcactactgatagcagctgctaggttataactaacttgctcatctttgatgcaggaaaagctgccgcaattcattacggcactggagcaattgctggtttttttagtaatgatgctgtcacagttggcgatttagttgtcaaggatcaggtaaactatatgtccgaccctaatcagtactcttacaacatacacatcaatgacctccttcttaacatttgtctatctcatcaggagtttatcgaggcaaccaaggagcctggtataacatttgttgtagctaaatttgatggtatccttggtcttggattccaagagatctctgttggaaaagctgctcctgtttggtatgcctgcacattcttctcttgtttggactgagttactacattcctgtagtgttaatgctaatatgtcttgttttttacaggtacaacatgctcaagcaaggccttatcaaggagccggttttttcattttggcttaaccgtaatgcagatgaagaagaaggtggtgaacttgtatttggaggtgttgatccaaatcatttcaagggcaaacatacatatgttcctgtgacacaaaagggctactggcaggtttgtgatacatcacttcct

SEQ ID NO: 11695 - DNA, 1526 bp, Arabidopsis thaliana landsberg
tagtagtcaagaagactgtaaagtaacggagttgatggctttggaacagtttgagtttgaaaatatctcggaaggattgtctggaagtgatcaggatggtttcaagtttgaaaagattgggagacgctccacacagctgatatcgaagacaggaaacttattacctgttaataagtcaaaacgacttgtagacatcaaagataatgaagatgagcttgttaagaataatgtgaatgaggtatctatggatcagagaaggtcaataaggcttaaagctagagctgcaaaccaatcaatgggaggtgagtcatccgatggtagacccttatgctctgttaaggaaactaaagaagaaataaagattaagcagtcaaaaagatctacggtggtcagtagtcaaaaagagcttgttgagagaaaagcaaaggagcctttagtagatagcaaagttcctaggcgttcgaaacgtcttgcgaacgatgtaaatgtgctactggataagagacccgttaaggctgtgaaacctgattatctgaaagtcaaaaaggctccaaaacagtctaggcgacttgagaagagtctcagtgaactcctaatagatggccaagctcaaaagggtgataaacagcgaacttttggaaatggtcgtgagggtaaaaagcttctacgaagttcgaaacacactgcatcaaataatatgttgggtcaagcactgagtaattcactgaaacgttgttcagttattgacggtgaacgagctggagtctctgttggtgatgtgaagaagtcaaatgtgaataatgaaatgcagatccgtgttagagttactaggaactcttcgaggcatcattcatttaaggctccaatagagtttgaaaggaatcttattgaaaagaagtcggatgaaacttttgtcaaatcatctaaaagaggtactaggaggatgaagcggggcagatcagcagagccagggaaggacatagaaactcagagcaatctaacgtcaaaaaaacttttgaatgagtatactcagtttgagcaagaagaagcatgtgacgctaatgtggaagttagaggctcctccaagaaggcaaagacgatgaatcaagaatgcgttaaggatataccacaagtaatgactgagaactcaccttcttcatccgaaaccatagctgcggaatctgttatgattgttgagaatgttttggattcttcaccggaaaaatcagttgatagttctcaaagaacaaacactcaagagttgaattcggaagttatggaaggaaaacatgaagagaaacttgagggagacacagttttgatggttgcgattgaggaggaaaaaaaggaagtatcatcaagctctgtacttcttagtgagcgtttatcacctacttcagtacaatttgcagtaagcaactctaaagctgagctagttgtccctaccggccatatccttcttaatgattttgctgaggaaaatagcataaccaaggaggaaggccttattttcactcctgtatctg

SEQ ID NO: 11696 - DNA, 988 bp, Arabidopsis thaliana landsberg
catctttcttctttttggacggaacaacgtacttatggtactcctcaagctccttctccagcttctctatgaactcacttgtatgttcaagcgattgctcataccgatatttctccaaagcctgacgttttcattcacttttgtcaagacaagaaacaaccagccaaacattaagtatctagattcaacaatataccttatctttagagagggtatcaacaggagacatcacttctggtctcacatagtttttcccacggtacaacacaatggtgttgttaggtttgacatcaatcacaatgcccttacttaaccgagcaagctggttcagcatactcatgaacctgcccaggtttgttgcagggcttgcaaataactttaacagtctcatgctttttccaatgaaggtgcaaattcaaaaccacacctccaaacactcctcgtctcccgacaagtacaaagttctttctcttctcacctgtacgttttaagtaatgctgctcttcctctgtcaaactttctggatcatacggctccgctggtgatttcgggacatcgtatttcctcagtttctcaatcaaccattcttctttcctcttagcctacacaatcaaccacaccaataaattttgaataaactccaatgttacattgactaatacaatgtagagtaactaaaagatgtaaccttttcaagcttgtaacgaatcctaacttcagggtttggagaattcatcttctttttagccttaagacgataaaaccttaactcattcactttagcctttcttgacaatttagcccgtttccatttcttctcttttcttgtaggtacaacattgttaccactactagagacattgttgaaagcaaacctaacaacattatcatctgttcttagctctattgtggaattactcaagtaacgtctactaaacaaatcatcatacgcaaatagattccatctctgagctggtaaaacatcaaa

SEQ ID NO: 11697 - DNA, 887 bp, Arabidopsis thaliana landsberg
  unsure (1)..(887): unsure at all n locations
cgagtaatttcttccaggtgctttggggaggagtctttctttgccgcttgtgactattgattttttttattacagccttggtgcttcggctattgggtttgggtccatcatctttcgtttagggtctctggtttgctgctttgtggttttagggtctttgtttccctttctttagggctttctttccggggatattttctttttcctccggctttgactctgaggactgtaactgtatatgtcggctttagtttaccttgtttgggcattgcgtacttccttggtttcacatcaaggtaacgaatataatcctaatttagtgacaaaaaaaatgaaagtcaatataataaaaatataacaaaaatacaataagaacacataacataacccataaagccttaggccacctctattgcataacaaattgtgagtgtctttagattttaatgaataaaataaaaaggtaaatgtctttaaattaatgcagaaaagagaattgtgtctcttgggagacatcaaagacatttgttttgagacatcttaacttatgcggcacaatgtcattggttcttattttttcttttattttatttgtaattaaagacatttccttatgttgtgcaatgtagatgctcttagggaatcatggttttacttggttgtggccttgtggggaaaaactgtaagctataaattatttggtttggttaaaaccgaatgtttcgttattgattaaaactaaggataaaattatatatatttcgtttttgatatataaccgaaaaacaataggcgtatccctaattttactnttaaatcttattagaaggtagtttctcgttgaatccttctcaatcttcaaagccctaacctaaagctaaactaat

SEQ ID NO: 11698 - DNA, 773 bp, Arabidopsis thaliana landsberg
cttattcttgtcatagagaccattttaaaattctaaaaaccaagatcttcatgatatatagtttgtctcttcatttgattttcttttttctatatggtaaagagtttaatttgaaggaattttgagttttgaccttcttccataaaattagatacgtgttgtctgtattttgaaccaattggttctacaaaaaaagaagcagatatataaataggcccaaaagggcccattataagtttatagggtatatgtggcctataggccttgtcttagacccatttagttcttctctatagaccgtctctctttcggcgtctcgtataaaaatctcatttgcttttctacaaatcactcccaaaattctctccatcaatctctcttacacactacacaaattcaacaactgaaaccaactcagagcaaaagcttgatttgacactatggcgagcattagcaacgagcccgagcgtgagaacagagacgaagaagagactggagccaacgaagatgaagacaccggtgctcaggttgctcctatcgtcaggcttgaagaagtcgccgtcaccaccggtgaagaagacgaagacaccatcctcgatctgtatgtatctcccttcgtttaatctaattgcactggatctgatcgttttccgtagtagttcctcaagttctagggttttagtttcgattcggagcttgattgttgttgtgcgaaaatctgtaggaaatcgaagttgtatcgatttgataaagatggaagtcagtggaaggag

SEQ ID NO: 11699 - DNA, 1288 bp, Arabidopsis thaliana landsberg
tgggtgctgtaaaacatatgattcataaaaaataggaatttttaccagaggaagaacacaatggaatcaagggggttgttcaccaaccttaacaacaagtttagcagcaagatcggcagataaaccacgacaagctttggcagccacatcagaagacagtatatcccatataccatctgaagctatgatgagtctccctccagcatcaggaagctgaacgtacagataaaaatactttttgatcaatgtcaaatataagaattaatgaaaaatgtaccaagggaaagggagcttactttcacttgcttaacgtgtggtatagggacaataaattctcccacatccgtatcaccaatggacctcgaaagacataaaccaccaggcgagcatcgtagggggccgacctattgcattggcataatcaaagcacattaatatcattgaaaatccaaggacttcttacacattacaaacccaccacagccaaaacacaatgaaacagtaacttaaattcactggaaatgatcatacctcattgccaccaaatacattgagtcttccgacctcacctccactagcagttatgcgttctctttcttcaacattctcttctagcctgtgatcaacagtcagtagagaaaccacaccaccttgggtgtccaatatgcagcgcgagtcaccaacagaagcaacagtaatagtccaaccatcaattataacaaaagtcacggttgttcctgaagtttcccctgtaagcacaacagatcttaacggttagagcatgcttgaaaaacaagaatagaaagcaaatagcctttaaaaaataagcataagctaagacctttctgctgaaattcaatgtcagttttcacaaagccagcaactaaagccctaggaagagcttgaagccactcatccctgcttgcgccttgaggaattgcactcaccacgttttccagaagatgttccttagtatatatggcagctgaattaccattgtgtccgtcaaatatctgaagacaaaacagaaaaagggtaagctattcgtcactaaaacagagaatccttaaagggaagaatgcctcaattaccccgaaaactgaaaaagccgatgatggatcaccaggtactctctcacagtcagttttgatcagaaagtagtcctctcctttcttagcgagagcagcttgaccatacttgacaaaaggcttctctactttctcgctcctcagctccctaccaatcagggtcgcaagaggaacgagcgaatgttgcgtcctcgatgctt

SEQ ID NO: 11700 - DNA, 870 bp, Arabidopsis thaliana landsberg
ctccatctctctctcgttcttcacgagatatattataaattttatttatttagataattatttttatgaagcttcccatcaattatctagtttttccaaatacaagatctcttgttcactcgtgagtgatccacaaccgaagtcccacttatcttcatttattttagtgataacacaatcaaagtctagcgttttttatttttattttacttattgactattacttgttcgtttacctttaatcattacacaaaccattatacatgccaagattcaaacatttctcatcagaaactgactaaaaaggcttgtcgctgcagaagtcgcagaagcacttaagaccgtcgcattttccacctttcgcgcccttgtaagaacgacaatttcgataacacaacgacggataaatcctagccatacaatagcttaaaggcgcatcaatgtatccttttagacattccttatctttcgcttctatctcagatatttctgctcacatatcatgtatatacaaataaattagttttggcaaataaaattcacatataaagaaacttgcagcaatcaccaacagaaataattaaatcctctatggatcgtatgaatcacaaattttaataagtatgtgagaagtacggagttaaaatttaccagaggtgaccaaaaagaggattaaaaagattgcgaagttagaaactgacttcattgccatgcccatcttctctgtctctgtagtctctaatcttcttgttatgaattgctatttaactttatagttgttgtggtgctatatatatatgcttttatctttatcgtttggacaaaaacttatcacgagaaccacaactctagctgtcattactgattaaa

SEQ ID NO: 11701 - DNA, 565 bp, Arabidopsis thaliana landsberg
aacaactaaaaatgttgttgtgtttggttttttttttgtgtttttttttggtttgtttcacatcttttaatcgtggtttaattcaaagcttcgtttacctctctaagagcaaaaaccaacgaacatcatcatgaggatgtaagagacttttaagaagatatgttcattttacttggaacttccaagttctacactttgatcatcgtctgtctcttgtccagatagagcgagtatagacatcctcttccctacacattattttatcgcaaccgcaagactcttaccatactggtcggtcaaagttatttttggtatttgtattacaacgtaagcctgggcggtgggatagtcggatcggatttggatcaggttttttgggtctggtattttggatgtagaaatcgaagatccgttcgttcgggtattttaagacttcgggtttggatcgggttcagaccaagtttttcgggtttgaattcatgtttatccggagtatccaaaattcaagatttatatcaaaatatattcaagtcacttcaatatacgcaaaatttctaaaaaggac

SEQ ID NO: 11702 - DNA, 763 bp, Arabidopsis thaliana landsberg
ctcatacaatgaacaaagtctctcatgaggttgcaaaccggtggtctgattgtggttgcaagacttgtgtttcttggatcaacactgataaacttaacgtgatcgtcaagcaaccttcaatatcaggtaaagagtaatataagttaatttgttgggttatgttttgttttaacatctcatttattttattttccttttaatcagatttgtcgataagcaacaaaccggtagagaacgttattttcgtacacggatttttggcatcttcatcgttttggaccaacacagtgttcaaatatctaccagagaccaccgagggaactaactacagattctttgctatcgatcttcttggatttggagacagcccgaaaccaagagccagtcagtattcgttgaaagaacatgtcgaaatgatcgaaaaatcggttattttaccaaataatttgacttcattccatgttgtcgcacactccatgggatgcatcattggaatagccttagctgcaaaattctccgacagcgtcaagtctgtcgcattagtagctcccgtgagttttctcttaaaaacaatttttttaaacacacaaatttaaacaaggtttgttctgcaatgattttgttttatcattttggttttatagccgtattttgctgattcaaaaggaggagcaagttgtgctgctcttgatgtggtcgctaagaagaaactttggccaccagcttcgtttttcacggcgatgatgtgttggtatgaacacat

SEQ ID NO: 11703 - DNA, 915 bp, Arabidopsis thaliana landsberg
acatgtaagacacttgtttgtatttgtgatagaacacactctgcgcaaccacccaggtgcaaatttgattaaagaaaaatgtggaatcggataagtgaatgggatggattcattgccctaatcactaaaaagactcaaggattcttaaacgtttagatgataacaaacaaaatttgagagctaaagacaagaaattgacaagtgggtctttcacaacggattctaggaacaggacaagaatgcattaaacacgtaaagaaactatctttcgagtttaaaagagttttctttcgttgtagagggaaattaccagacaaactgtggtccgacagtagcgagcgctgtctgccagccatcgacccacatctgaggtccttcaacagcaatggcaaagggagtgaggatcaatagggacagcattgagagacaggcgtagtagttcatcccgctcacagactttcccttcattcccttcttcgagaagatgttacggaacacgaaagccaagttcgaaatcatagctcccatgaaacctgaaaagtaaggagcagcagatttgaagccaaaatcaaacatgcaaagccatttcaaatctcaatcccaattacacctcaatgtatctaacaaataagatgaagatatatgttaccaatcatgttgaagttaagctcggtaagggcagacagagcgcaaccaccaatgattggaatgagagacaagtaaaccgaagtagggaaggtttcacccaaaataaacctcgagacaagcacactaaacgcaggttcaccactcttgatgatgtgagtgaaagaaacagcaacctttgacatactcaccgttgcagccacatgaccaattgtgtgtgccacagcaacctatatgcaattcaacataaaccactttcagtacaacaaa

SEQ ID NO: 11704 - DNA, 975 bp, Arabidopsis thaliana landsberg
  unsure (1)..(975): unsure at all n locations
ttgctggctatgttgttgggttcttttactgaagcagggtctcgagatgacctcactgtcaatgtagtttttttatatgttgtggtcactcggatgcttaaaaacttggagatgagtagactaattaatttcagtttttgaattcgttagacttgcgatttatgaaatcaaaatcatctttcttgacttatcgttatnnnnnnnnnnnnnnnnnnnnnnnnnnnnctcgtgctccttgtttcttttcttaaaacatttttatacgtttttcatttagaatgttcatcaaaatacaaacaaatctttgagggaactatgagaattcgaaaaagattttagaaagactagtgaaacattatctagtgaaatttgtaagttcaaaactctaagaaacaaaaatttaatagttttccttccaaaaagcgttctattctacataggtataattttaggtattcttcgttaataaatttgaaggaaataactaataacgcacaaaaaccctaaatcaaaaacctaagaagacgtttaccaaaaacaaaaaacctaagaagacaatgacgacgaaagagaagaagaaatcatcagactctccacctccgacgtcgttttcttcgttaccggacgacatcgttctcaactgtttggctcgtgtctctagattccattatccaactctatccctagtctgcaagggtttccgatcactcctagactcccgtgagctccacgcaacacgatcttgcataggaaaaaccgagagtttcctctatgtctgcttagacctgcataggaattgctatccagactgtcctccacgatggttcatagtttccccgattaccaaacagaaactgaaacctatcccttcgattacttgtcaatcctcaaccgctggatcaatcggttcaaagatttacataatcggaggcttcgttgatggacatagtagcaggagattgatagtactcgatt

SEQ ID NO: 11705 - DNA, 685 bp, Arabidopsis thaliana landsberg
tgaagtggttcaaggattcttcagtttaattctgagctttttagtgatctttgatgcttttggatggactctgcgtctcttgttgttgttgctatcagactgttcgacttcaatccagtttaaaaccccgagaatcagagattgcggaaccttcttaacgtctgcatcatcagggcctctagatttcttcatacctttctccagagctatttcgatgaactccatgaaccagtttgcagcttcatcctcgatctcctttgctaacctaatcgtgttgcttataccgccagaagctgggttcttgttctcatcatttgatctcactgtcttcccttcgctctgctgcttcaggacaatccgtctctttgatctccttttctcctgatcaatagaattataagcgatttcatgcaggatcgaagaagacccttcttctgttggtttctgattttcggttcttgcgtttatgttctgtgacttgttctcagcatctggagtagcagctacttcaatggaagtgagttcgccaatggtttgtgccatctgctggtgaaactccatgaacttctcaaagcacaccgcagggcaatcagcttttgctgatttactcagattggtgaacgtcctgtcccaacaaaaccacatcaacacattacattccaactcaaatccgactaataaaaaa

SEQ ID NO: 11706 - DNA, 567 bp, Arabidopsis thaliana landsberg
aacttccacctggtacttggcccccctgggaggtaggctcgacgtgtcgaggctggataccagtataccaaagaaaaaattggtggccggccctagtacctagtctctacagtttgagactacctacctctggactgcgacctggacctgcacacagctttggctttgaagttttaggagtacacccgtagtacccaccatctggtatctttcatcctttgattcatgcaacaggacctgcaggatttagcctgggaagccaagtcgtatgcccggacccacaggatcatagttccaaataccaagggacccgttgcagagttggtgagcatgcaggcttagggtacggaaccatgctaagcagctacaaagctccggaccactctaggagacgagtgcccattctatagaactggacccaggttgccggacccctgtagcagtagaggggtctgaactacaagcctggctactcgattcggatgtcatcataccatcaagggtgggaaactgtatgggtgggctagataaaaataaaccatacaaaagacatctttgggtaaatat

SEQ ID NO: 11707 - DNA, 1364 bp, Arabidopsis thaliana landsberg
ggaactgacccacactgtagaaaagtaggaagaaaagagtcaaattcttcttcataccttaatttctggtttaggagcagaagtcaccatgctaggcagttcgttcttagctgtaggcaatgaaatatgcttctcaaacgcaaacctgagagcttcttgtagttgtagggactgtgttttgtcttccattttctctgaaggtgtctttgaaaccatccattgcatgggtggaaatggcggtggtaagggctcagcaggattttggagatatgagaggtttacggcgacgcaagaactttctgatttgatccctagaggggaagcttcagcattgttatcaacatgcctactttcgtggaaagaatcatatagttcttgctcttttcttccatggctgtcactggattcttcccacggctcagaatttgacaaggagtgattatcgctaagataatcggtatctgacatgtaaggagatgatctacaaaaagtgtcgtcgtcagaataagaatcaggaagggaagttccagtctctggaagcaactggaaggaggaaaaggtattgtaagtgttgtctccatctgaaaatttaagcttcagtctcgaagcctgaagagtgtcagcgggattgagagatattttcatgtgttgaagaggcggagacgaagtgatccaatcaataggagcttcgtctctgaaggggtccataaaggttttctcattaatatcttggtcacaaaacctcctcctctctgtagtcacttcatcgttctctggaatcgttgctggtacagtctttctatcatgtgcaaatgaatcctttctgcggaaaccactagtaagaaacttgtggctgagtccaaaaactccagaagaagtctcatgggactctctttggtctacaatacccatgactatgccatttgaactacctggattttgggttcctggcgttgctaagcttgaattattcagaacatgtctatgtgaagcattttcaactagatcatctgctttatctttttcagcttctgcaaaaccaactgtcctttcctcggtcttgcaatctggacttaaagaacttggcattgccaagactggaggtttcgatggtttcagtcccaatagaccaccattagtccatattttaaaggcttcgagatccccagaagattcagcttctgtttcttgattttcctgtaggccatgatgaatcaaggggtttgatgaatcaactaagctgttctctagacctggcacaaatgtaaatgtgatggtatcttttccaccagaatcattacgcatatcattgtttgcacaaagatcatttttttgtaagcgggttgatatctgaacccgcctgt

SEQ ID NO: 11708 - DNA, 1041 bp, Arabidopsis thaliana landsberg
  unsure (1)..(1041): unsure at all n locations
tacattttttgggggttttttaccactttgaatacacttggttcacatccggtttatttctggtattcatttttcaccataggttcgctttctctatttggtcgttggatttgttatctcgaattctctttctcttttcaggctagaaaccacattaaattatggtctcgaaagagtttgggccttgggttacatcaaaagttttcgccggtgagtttttgtacttttaatacttaatgcttattagaattttgatcaaaaagtagatgttctctattggtagaatttttgtttctgtcattattgtagctagttttcctctgaaattgacgatttggagagataagggcgtttagagtggctaggagttttttagggatcagtgttagcaccttattaaactgatcatacgggaccatcaacaacgaatgtgtttgctttacagggttgtgattggatatgatgaaggaaccatcatggttaaacttggacgagaaattcctgtcgctagcatggacagtagcggaaaaatcatatgggctaagcataatgaaattcaaaccgcaaacatcaaaagtattggtgcaggttacgaggtctacctcctaattgtaactcttgtattctggcatgggaaaacctgcgtgactcagctatttatttgtactgcctgatgattttaagctttcatctctctaccttaggctactgatggagaaagacttcccttgtctgttaaagagttggggacctgtgatctttatccacaagtgagcgttactatccagcacctttgaaactttcctgttgtgttgaattatcattggatcttttggggtaaacactttcggtgcatgtcccacttaaatgagtgtgatggacttgtgcattgaagttgcggtgggtatcactagagcatgcttcagctaaatctgnggnttttatggttacttaaaacaatattatatttgaaatgaagcgtaatagatgataaaatgaaactctgtttatatggaagcccagagggggcccagatattat

SEQ ID NO: 11709 - DNA, 579 bp, Arabidopsis thaliana landsberg
aagcatccatcttgagtccgtccccataagccacactcgcttccgagtatctccccgaactaaaaagctcgtttcctcgggtacgagctttcgccacattcttcacattgtttaagaccgatactacctcgggactattgctatgatcaatcgtcatggctctctccacctttacaatcgcattctcaaatctgcaacaaacctaacatctctactcactcacccaagaaccaaacaagactactaataaagaatcaaaaacaccattcgaagtttaagcatttcgaagctcaccttcctaacgccatatcaacttgagcttgaacacagagcacataagcatcacatactataccaaatagtttctcaggtggttgagtatggtgatgatccaatctcggaatgctggatatacacaaatctgaatcctttatctgatgaagccgcaaaaaggcttcagctttacaagctacaagctgcacaagatcaaacctcattgtttaaaagataaagtcttttcgctgataattgagcacaaaagaggcaatcaatgccacattttgatctctacctgaggag

SEQ ID NO: 11710 - DNA, 626 bp, Arabidopsis thaliana landsberg
cgcggcttatcgatacccataactttgaggcacttgccaatcataccagcaacgcagaaaatgtttttcccatatgaactatataataagccacaacatcataaaatcattggaccgagtgctgtagtaacactcacttgtggataaagatcacaggtccccaactctttaacactcaagggcaacctttctccatcagtaacctaagttacagaacaaaaacttatcatcaggcaaaaaacaaaaaacaaataggtcatcctatgccacagtataagagttacaagtatggcgtgtacctcgtaatctgcaccaatacttttgatgtttgcagtttgaatttcattatgcttagcccatatgatttttccggtattgtccatgctagcgacaggaatttctcgtccaagtttaaccatgatggttccttcatcatatccgatcacaaccctgtgaaatgagaatgtggacaaggtaaggttttgcagcacaactcaatggagtactagaaccaggtagacctctcatatcatttctccaaatctaagatccaaggtttacaaatcgcaaagttcaatgatggtattcactatcaatgagagggacatcaactcccgataacagtc

SEQ ID NO: 11711 - DNA, 993 bp, Arabidopsis thaliana landsberg
tcttttgatttctgtgcttatctttgcatcatcatgtgctggctttctgattgttaatgttacttctatatcgtgagtatgctggtctctgtttaatttgtagacagattctcttgttgcttaagttaagtccatacccttagtgagtccctggtatgtggttttgatgtagctagaatctgtgctgggacatggaatgttggagggagagttccttcatctgacttggatattgatggttggctagacactcttgaacctgctgacatttatgttcttgggtatgtttttttttcttctgaatcttttgtaactaccttggtgaatgagttctgtattcagtgtttatgattcatttcgtttcagtcttcaggaaatcgttcccttaaatgctggaaacatttttggtatggaggatgaccagcctgctttggaatgggagaacttgatacgtgatgccttaaaccgagttcaacctagaaagctgaagattaaaagtcacagtgatcccccttctccatcaaagtttaagcaacccgaagaggttccttatagtgtagaagatatgtttgttgaaaccagtcatgatgcttgcgatggaattagttcaatggataacacactcaactctgttgaaagcacggacgtaccaatcgtaagcgaagattcacttactaatatagacgttttgggttctaccaatgacaatgcgtcttgcttaccaatacaagaatatctacagagacaattttcaacaccaaatacgccagaccgctctctgtcgatgcagattaatagtgattccaaaagggaagaaagatttagttacactgaaagggtaggtttgagctggccagagcctccattaaggctcctaaatcaatatgtttccgaaagacgtggttccttcaagtcagtgaatctgactatcacgaatctgagaaaaccatcgtatgttcggattgtgagcaaacagatggttggagtgtttct

SEQ ID NO: 11712 - DNA, 993 bp, Arabidopsis thaliana landsberg
catatggtgcaaatttgagtggagtgtttgagaagataatcaaaatcagccacctgataagtcttaatcctaactccattgtcactctcagagaacttagcaccatccacattaattcccgagacataagctttcgaattgtcgtcccccaagctcccaatgcttctcatcataaagattaaacaaagatcaatatattagtttatatacttacttcattgaattgtaagaaccatcaaattaacatcaatactttaaaatataatatagtttcactactcttatattaggatttgaaagaaaaaaaaatatgttttgatttacctgatcccgtgaccggggccgcaagttaaatcaaagatttgaagattttgcgttccatcctcaatggatatacaatcatcacctatatagaagcaaaccaagaacattctgattatttacgaatcaataaatgatagctaacatccttagtttagccttagcatgcatttgttatacatatatacaccactaagttaacaatatatgaatcattacctgttccgatatctgagttggagactcgaatgttttgagtattagtgatatggataccatctgtgttgggactatcgcccggagcagtgatctcaacattactaacttcaactttgttgcatttctcaattgaaatctgaatctgctgcgcatttttcaccctcagattcttcacattcaaattctttaaattgtataaagtaagagcctgcgtttgcataaacacacccacttgcaaatatcaatatcaaacgttcacgtagtttagatgtgaagaaattaatcaatcaatacatatacatggagatgtgtttacttaccgttggagcttttgtgcatggctgcatacaaaaataaaatgtaaccaattaatattaatatgatgacaaagaaaatttgactaattaacattgtgacaattacttaggtactatttaaataaactatatgtat

SEQ ID NO: 11713 - DNA, 1517 bp, Arabidopsis thaliana landsberg
  unsure (1)..(1517): unsure at all n locations
cggattatattgacgtttatgtattattactaaaataaataaaaattaatattttgctttccagttcgtatttgaagaaaatcattgggtaatatgaagttagacaagtatatgcggtccataccttattacactatgttaaaaaaacgtaaacagttttttttttggaaaaatacgaattacattagaaacatgggattggagacttaacgcgttttccaaaaacacaattgatttccgcacttataatgtttccattcaaggcctaattcaattcttactttaggcttatgattcttaaatattgaaaactcaccaaaaatagaaacactagataagttatttctaataactactaatattaatgcgagacaagcggttatagaaatacggtttgagtaatgcgggacaagcggttatagaagtgtggtttgggtaatgcgggacaagcggttataaaagtgcggtgtggtttcaattggtgcagtttagagaaacgcatctagcggaacaagtacgattactccaaaataatttagtaattgtctctgtttatcccaccacagatgaggtcctccaccagcaaatccaaatagaagtcaccgcttggcggtaccaggcgggctatggccttcgaagacgacgacgacccatttgtctccgccaaatcatccgctgagacgctctttgatccgccagcaagtcccagtatccctgaatttaatcgggatagacttcgcaagaggctttaccaaattgaaaagttaccattttggaacatgaggtagttgcatttatcacaaacaaacgaacaaatgtaactaccaaactaaagcgaatcaccacaattccacacaatcaattttacctcgtccagagtaaatgtccctttcttcaacaacaactcctaaattccccagatttccagttgtattcagttctataaaacctctttcttctggtacattaatagagtaactaaagtgtctaaccctactatattaccattttaaaaataaatatccacttatcaaccaattgaaaacggaaagcatttattactgaacagtttctgcttctttgcgccgaaccaacctgtcaccatctgagacacagtacctgacccacacaaagggtattttcatcctcaaaattccacgtgcactcgaattgttgtacattgtgtaagaggaagctttgtgtggtagggattgtaagagaactccaaaaaagtggtacattttacaagatatatataccaaaccgctttttgtactttttaccattcaaacatttgtatcttaccgcatctttttcaccattcataaattatatacactactagatccgcttgatccacacattttttgcatactgcgttttttcttaacatactgcagttaaaccgcaccacaatttgtatatccaattgatctgcaccgctcaatccgctgtcaccattcggaacctctaagtgacgtatactaaccacacactgaatntctttgcaaacatga

SEQ ID NO: 11714 - DNA, 1814 bp, Arabidopsis thaliana landsberg
ttgaatctcacgggtgcacggcagatattagtaaatgcgattgggaaagctccaaaagataaggtaagcctgacaacggttaatctggaaattgtttacattattgctcatgttttacttaccgcggttattttttctttcaagcaaaatagatattcaagaaatacattgagatcgaactccagttgagaaatatagataggtgtagaaaattatatgagcggtatcttgaatggtctcctgggaattgctatgcttggagaaaatatgctgagttcgagatgtctcttgctgaaacagagcgaactagagctatctttgaacttgcaatatctcagcctgctctagacatgcccgagctgctatggaaggtaaattttttcagtctaatgcatccaaagaagtgaagatttctcagacttttgaaccgattgatcattaaattctctatattttttgtggcagacgtacattgattttgagatatcagaaggggaattagagaggacacgggctttatatgagagactcttggaccgtacaaagcattgcaaggtgtgggttgactttgcaaagtttgaagcgtctgctgcggaacacaaagaagacgaggaagaagaagatgctattgaacgcaaaaaagatggcatcaaacgcgccagaggttcgaagctactgctatatttattgtgcgtcttgacgattccttgtgacaagttttaactgttctgtatttcctttctttttctcagagatattcgacagagccaacacatactacaaagactccacaccagagctgaaagaagagcgtgctatgcttttggaggattggcttaacatggagacgggctttggtaagctcggggatgttagagtcgttcaatctaagctcccgaagaaggtcaagaagagaaatctgagcagtagagaagatggctgtacagagtacgcattgcatacatataatttcctgatttgttatctttggaatgtgagaatcgaaatgtgaaagtattatttgaatgttttggcaggtatgaagaatacactgattatttgttccccgaagaatcagagacaacgagtcttaagattcttgaagctgctcataaatggaagaagcagaaggttaaagctggggaatgcgtctagtgtggttaacataatgttgttatgcaatactcttccagcttaaaaaatagcataatgtacttacataggtgattatgtcgcttgcggtgttgatattaatgatatttgtagatttagttatacattagatttatataaaaagcttatgcatatggctttaatgctttatatcccagattcctgcttagctcttattcatctttcaaaattggaaatagtggagatagctatatgaacttctttggtcattttcttgtttcgatcttgttatcaaagatggcaaatgcttattttcttgcgaaggcaaaagtatgcacagagacggtagccgaatgccatggcaagcagaacccacagttcttgtaagccgccattcaagtttatcgtgtcaaaggacgatgagctttgcagtgtcctgcagccgcctttgctcccacattcgaaaagttggtcagctgagtattgaactttcaaaagtagcctgaagccgtagtgcatgaatgacaagtacttcaaccactgcatgaattttggtatgtgctgcatttcaagttcaaaagcgtgcgtcactttttgttatgattcattagaaacagtaatccatccaaatcataagttttgtggtacctggacatagtaacctccggttagtagaaaca

SEQ ID NO: 11715 - DNA, 1126 bp, Arabidopsis thaliana landsberg
cgaagccacttggttcttgacctattctatgtcttcatgttaaataacactttttctcaggtatccaaactagttctagttttcagattctacgctatatcagccgaattccccgagttcagattctacgctatatcaaagccataaatggacgaacaaaaaacactaatgatcaaatcatgaaaagatcagcttctcaagcattgtgcacaaaaaacatgtacatgcttcaagacgtgttgaataaaacttccacatgtgtccgaactctaaatgagcgtgaacatagaaagttactcgaaaaagaaagataatctatatattagtctttgacagggagaaataactgtgaatcaatacagaaacataggattcattaaagcaaaatcaagatagaaatttataattataataaatggtaaacatagatgaccaagtcctgattctttccgaggctcaaattattcataaaatcaaacaaaccgagaacttcattaaatagcacaaacaaaaccaactagtgacaagtcttgtatctcaacttctcaaggatcatatacaagaacctgtacatcccctgaaatactctgtaacatcatggctccatcatctgccaactccttttgactttctgccatactactatccatgtaaagctccactctttccagcataggcccatgctcgcgtccaggccaacgcccacgtcccgactgaatcaataacttcaaaacatttagctcgtcaaagcgaccagtgaagatcctcacgaccacaaccttaagtgtcttaggaagagacttataagtaaggttttttttccaatatgatcgtggaccgacgccataatatgacttattgtactgcaatatatcaaacgaaaaatttagagctctcgggacaatcatacatagtaatgtaactattatgctcaaatttactactactatatagcaatcttaccgagaaaagactttgactgaagatatcgaaagttaacgtttctaggttagggcaattatgaggaggagcttaattcccttaaattccatcccagcaacctgttccagcacaaaagaaagtttccatcggacgaagcaaatgaatggatgtcacattcgggatg

SEQ ID NO: 11716 - DNA, 1139 bp, Arabidopsis thaliana landsberg
  unsure (1)..(1139): unsure at all n locations
atcctcagcatgacgacaatagaccaatgagagaaactcgattttattttgaactcaccatgtgcgtatatcctagaagataaccaagtcaaagcaatctggtcaagcgctctgattaaaaatatatattataaagggagcaagtgaatcaccgagatttggagattagaagaaagctgacctccttatccttctctgtaagcgttgggagatcaatgtgaacttgagaggcgtgtaaagtgaacaaagaaccagccagagtagcagcattccttgaaaggcaaatgacatcatctcctttaacttcatcaacctacacatataaaaatcaaaactttaacatagagataccaccaaattcccattagacagcttcatatattttacctcgagccaaactgaagttgtttcactaccagtgaataggtattgcccaacgaagatagtgtctcctttcttcactgcctgaaaacatcaaacaagaacacccatcacacgtctatattagtaaacagtaaaccattgtttacatatataatgtcatctcattatacaaaggtcatagagaaccttggcaagtccattgaaattaatgggaagaacttcagaagaagcttcttgatcttgattcggtgtcaaagttacaaggccatcagctttcaaagtaatagctttctcagatttgttaataacttgtagctcaggtccaacagtatcaagcataacctgatcaaacgcagaagaaatctcaaatcaaatacatatagcacataaaaaaaagatccatcagattaaaaaaataagagaagagaaaacatacagcacaaagcttcttagtgctcctcacagcaactttcaaattatcaagtgtctcctggtgataatcagcatctccccacgagaaatcaaatcgagccactaaatgacagaacatgaacagttatcagtgagaccgaacacaaatcaagttagcaaaccccaaaaaaaaaagagaagtaaatcgttagtaccagacatgccggctttgagacagccggagagagcctcgacggatcgggatttaggacctagagttccgacgatcttagtcaatgccgggaagaaactctgagaaaatacatcanaaagagatcagagaa

SEQ ID NO: 11717 - DNA, 1255 bp, Arabidopsis thaliana landsberg
ttgctttcgtaaacatgtgacggcgaccgtccgattatctatgaattgggcctgttcgtttgcctgtcggccacttccctttccttccttgcatacaagccactttccccacttatctaaaagtgaccgaccgatgaggatttttctcgtcttcactttcaattcatattcgactcaccaccagactgtgattatattttcgcgacaaacttttttttttttttttgtcatctgctaacaaacttctatattggataacacacaaaaaaatatcgtttcattatagaatgaatagtaatgctcattttgtaatgaaaggacaaatgatcctttttgttctttttttttgttgttaaaagatattcaattttataaataaatttatttatttccggatattgggtattgggttatttccggatttagacttataaaaaaaaaagagaaaaagaaaaactagaccaaaattaaaactcacagtgcgaataaatcaatcaagaaacttgtgagagacaaagagcatgggaagagatactctatggcatgtcaggaggaggaggaagaacaagggcaaaggaaaggattccatttataccccgcctgaaagaccaaatactgatgtcatcgtctttttccaatacgttagcctcaacgatatcgttccacccgcagataatagcgtaattcaagctttctttccctgaatctttcttcatcttccgtttcttcaaaaaaacaccccactttacctcacatggatccactagagtcgctccaactccctccgtgtcatcttcttctagtaggattctcgactcaacaggcgtcaaaaagtcgttacgaattagggtgttgaaaggcattaagagacggctctggactggattcactaccattagcactacactttctcttgctgtttgtatgagaattagggtttggtgggtttgtcatctcggtgttgtactcaacaagtaaagttgaagaagaaggaggggtttgtgggtttttcatcttgtaatcagcagtgatcttgtaatctccaagaaacgatgaagaagaagaagaataaagcccttgaagttcgttacgtgggtcagaagaatcaccggggatcgtgttaaggtcgaggagcgatgaagaagtagaagtcctagaaagattttgttggttttgttcacggctcttacagtaacaaccgaagttcttctttaaataaggaagagatggaagaatctcttgtcactctcccttt

SEQ ID NO: 11718 - DNA, 780 bp, Arabidopsis thaliana landsberg
taattggagaattgcttctcatctaaaatgtgaacactaactttgttattgctttcgaaaaaacgtaaagaaacacaaatatgtcttcgcatggatcttcattatgagtaagacaaaagcctcatttgcacaaatatcaaggtggggaataagcggaccattgcggaacattaaaactatcacagaatttcagaagagttggtttcataattgaatataaacatttttttcgtaaacgagggtaacaacttctttctgaactcctaatattgtctaattacagaagtataatgctgtatatatcatttcccttagaccgaccattagcaagcaatagatgccatgagattagtctacttgcaaaagtataaaggtgtatcattacaatacataagttaaaagttaggaggttccagaaagtggggtttggtaaatatagtcaaaggttgaaatatttttgagaatttctttttttggtataatgttgagatatttttgagaattgattgagacatagaagtgtgatttctctgttctgtccacgtcatcttgggtacgcatgtgatttgattctttatgttattatttatgttcgtctgtatttctttgaaagcgtgttatatataaaaaatctcattgacataaacacttgaggtagatacaaattaagaaaatgaagttcgtttacactcccagcgaagcagcagaggagggcgtccacggaccctcggaccttccaaagctgatcgacaaggctatgtcactcgctcgggctccggt

SEQ ID NO: 11719 - DNA, 741 bp, Arabidopsis thaliana landsberg
cctttgatggtatccacttgatgaagtagctcatgcctaaatccactcttcacgcttgtttgtttgttttttccccccagaaagtaggtaatgtccacaacgaagtcgtcaaagctatgatttatcttcttagtgaagaaggcaaaccgcaacactcatgagcttgttccatgaaatgaagatcgaatcgtgagaaaatttcaccaaaatttgcgggattggacatgtgtaaaaatatgccatttggatactacttgattaattaagttagaataactcttacaaaaagaaaaaaggaatcaccgttgtttttttttttgtgtgaaatagatgaggtttttatataaccaattatgaataaaatcgtaatggaaagattcaagccacgttcttgcaccccgcataaagatccaactctaaaatagtaaaatgattgccgttagctcagctgtcccttaggagaaaaaaaataaccagctatagctagactaataaaaaagggtctatgaaactgttaactgtattgagatatgtgacgatgagctggtagtgtcggtaaggtcaatgagtatcatcaatcaagagaaattaggtaatattaaagtagtatatgacctggcatcaggtcactggttacattattcgtgtatgacctaaatacataaaaggagtccgagttaccaaaggaagtctgagaaaaatacaaacttgtgttttttggttttcacttaccaaacataa

SEQ ID NO: 11720 - DNA, 871 bp, Arabidopsis thaliana landsberg
ctatgccgccattctggaccaaatacgtcaactactcaaatgatttcattaagttctgtcacatattggagtaggaaaaccgaaactttgagatgatcatgaaggtaagagttacaggtgtagatcatgaaggtggttacaggtgtaaaagaggagaagtagtaaaaaagacaaggcagtctgcagatattacactcagtctaaagaaggaagaatcagaaatttagtttgccacatacataagcgaaacttggttgcagcgaagggaaggttgcataagagaaagagagagagagagataaagattcattctttctgtaaaataaaaggttaccctttttttgaaattcttttggagaatccaattcttgaatctttttataagaatggggaaagaaagattgggtttataattcttttttggttattaagagagagagggagaggttatgaccagaaaagccagttgttgataaattgaggaacacacttatacacttgttttgttgctatttgctccacatttcttattaatatcatcatttcagttcctaatcttttcgagctgtgattttgaatgtaatctctacaaagatcgttgatgattaacctaacaaacaaaaatctccaatagcttttgaatgtacaaataaaaatgagatcatatcaatgtacagagagcatttggtaatataattattatttttaaaaggaatttaaaaggtagagcattttaattggcgtagagatgggaagaagaagaagaagaacaaggacataaaaaggatttggggaacattttggctgcaatttattctcaaaccttatgagtgagatctctcttaatcattctctctttcttctctcctct

SEQ ID NO: 11721 - DNA, 510 bp, Arabidopsis thaliana landsberg
  unsure (1)..(510): unsure at all n locations
tgaaacatctccaccatcctctgctaatcgaccaagcaagccacccgctctgcactcatcctcgcctgcaactccacacgttccctcctctcttcttctagatgggtctgtaatattttatcccaatgttatgataatgcaaagataatatatataatactcaatgaatgacgaatacaaaagaactaacttggagttcttgtatccgatattgtgagatgtcctgcggaggtcgtatagtcgggctcgcgctcgtgcttgttgcttgaacatgagatagagttagagtggaggacgagtagactgcatcgtcgacaatctagtatcagtcgtgtctcttgcctccgccaaccctcatgaggacttctctgtcaatatcctcggtccttggatcatactctggcccatgaacgccccttgccatcacgatgtactcaccgaggcgagtgtggacggtggggttgttgtatgctcaggcncgttgtcagggttgtagctgacgtgggtacg

SEQ ID NO: 11722 - DNA, 564 bp, Arabidopsis thaliana landsberg
gttctcctaccttcgaagaccttgtattgtacataaccagccaagattcaactcgatcatgtgcttttgctatgatagagttacctttgaagaagattccagtggtctgtgagtatgcagatgttgttcctaatgaattaccaggaatgccaccagactgggatattgaattcgacatcgagttgcaaccgggaacgacatttatttccaagaggccttactagatgccacccgctgagttggcagagctaaagaagcaattgcaagaattgttggacaaggtttcatccgcccaagtacttcgccttggggatgtccagccttgttcgtgaagaagaaagatgaaagcttgaggttgtgcatagattaccgcccacttaatggggtgactatcaagaataagtatcctttgcctcgtattgatgttcttttcgatcaattggtcggagccaaagtgttttccaagatagacctacgctccggctattatcagatcaagatacgagcaagtgatatccgaagactgccttctaaccagatatgggctatatgaatatctggtga

SEQ ID NO: 11723 - DNA, 655 bp, Arabidopsis thaliana landsberg
taccttcccaacctgattgccgagctctcttctcccacaaagaagtaattttcctctccttgatcaacaaagcttcagctctctctctagctgattcacaaatctcagtggcggcattgcacttctcagcctccttttgatactgagatgcaacccttttagcttctgcaagggtaacattcatatgacggctatgctcatctgcaactgcttcttgcagcttcagctcctcagtcagaaggtccacaaattgcttctccatctcttgtttaagctctggatcgtcgcttccacaatctgttcacaacacaagacagaattcattttccggtatcaaataccaaatgggaaaccaatcttacaaaataaaagcttctcaataactgtcaaaccatattgcaacatgatagaaaaccaataaaggaaacaacacaagcatagcagctaaaacaaagtcaagctcagaatcgagatctaacctgtaatagagagatttgcgagccctgcaaacaaaacaaaaattcaacttgttaaacaatatacaagtcgagattgtttcttactgaaattaaacctaaaagagacagctttgattgaaagatccaatattgaaaaaatcagatgcttcagagcaaagatcccaataaactagagc

SEQ ID NO: 11724 - DNA, 895 bp, Arabidopsis thaliana landsberg
aaaacccgctaattattgattcaatcatttgatatatcacctcttaacctcagagcacaacttctcattgtatttctcatcatccaatcatttgaattatcagtctgttacattactcatcgacgattatagtctacttctctgcagtattttcatttacatcaacctcaaaatcatcacaaattgcactcgacttcatgtggttttctttgcagttctatcatcctcttcactcttttgctctgtttttatcgaagcaactttttgacaaggccctgaatcatcctatctaccacttgcaatcttatggttataatataatacacagtcgcttttgtaacacctatatacactttgacttgaaaacttctcacatttctagaaacactaaaactgcagttaacaacttaagctccattgcagtaaacttatattcatttcttacgagcaaacttacaggcgtgtatctgtgtgtaactatgtattcccgcaaactttagtcagaacacttgctacttttttggttcgaatcaaaaacttgtgttttcatattgtgctaaacaaatatacaatttgctccaacttaagagttagataagctatgttaaaaaggtacattagcttatgaaaactgaaaatgtaataccgaatatattgatgttgactaacgcctaaatgtggattgtggctctgtaaccattttgaaccattgtctgtaaagtgcaaacagaaccaacctaacaagaccccacggtttcgttagttacaagaaccatgctgttccatttaatgatgaatctatctctataaggaaactctgatatgcaactcgcctagaaacaaataccaaagttcaaaagataatacaaatgaaacacttaaaagtaaagcagtc

SEQ ID NO: 11725 - DNA, 582 bp, Arabidopsis thaliana landsberg
tgtcgactctataatatctactccatctgttccaattttttttcttaaacgcgcaggagagctgcggatcattaaattaagagaagaaaacagtccaaaatggaccaaagtacaatgccaaaatatgcaaaactatgccatccgttccaaattataagctgttttgccttctagcagacacacatggacattgtgaaaacaacaacactcattgacaagcataccagtacaataaaacctttaatatgtcggatcttatcaacattgtccaataggaatgagtcctagggtaaaaatcccttattcacaaagtagtggttttcaatccttgcaaatgcctgaaaaatcatagaaccttgcatcagaaaatataagagaaaatgtaatttgaccacataaatcataaaagtgtcgactaaaaaatgtcttatcaaaattatgttgctctttgtagctttaggcatgttatctgtgggaagtgattcaataagagaagtaattcgatgattgaaagcgtttcaataggataaattatatgtagaaagtgattatgtgacggagtgaaagagaagctactttttt

SEQ ID NO: 11726 - DNA, 509 bp, Arabidopsis thaliana landsberg
  unsure (1)..(509): unsure at all n locations
ctagaggcattcaacttttctattctaccatttaaatcattatttgcatttttaggctagaaatagtagcatgacatgaagataaatcacacacaagcctttcattcttatctacttctaaagcaatagatgtttcgatttctacaactttatcatgttcctcataaagcaaatcttcttgcttttctatcaacctatccttttaattaaaggcatcaaataattcattaatttnnnnnnnnnnnnnnnnnnnnnnnnnnnnaaaagattgttataatctacatcatcatcatattcctcgtcacttgaagtgtacttaggagtgtcacgtgtacgtaccttcttttcgttagccataaggcatgtgtgtcgctcgttggggaagagagaagacttgttgaaggcagaggtggcaagtccttcgtcgttggagtcggatgaagtgcagtccaagtctcattccttgccaatgtgcgcctcgtccatcttctttctatagaacttcttct

SEQ ID NO: 11727 - DNA, 931 bp, Arabidopsis thaliana landsberg
  unsure (1)..(931): unsure at all n locations
ctgccaaagtatgttgttcggccttcaaggactgtgcttgcccattcgcggaagttcttaacgatgaaaagacagattgtgcctccacaatgtttagctacatcaatctctacggtcgttatcctcctggaatattcgctaacatgtgcaaagaaggcaaagaaggtctcgattgcaccgacgtcacccctacatcatcttcccatgcatcgatccctcttgtttccacacacgttttgctaatcaccgtttccatcttgtttcacctcttctaaagacttgtaaatgttacaatatgagttatatattgcattccattgttagttgctttgtgagcatagatgtaaatgtttgatttttgtttgcactctcattaacatcattcgttatgcccggtgtcgataactctaccagtcgaccttaaggaactcaagggattgcatgactaagttccgagttccaatcctaggcaatgaataataattctagaacatgtgtgtttggtacacatcataacactagcattcctaacatgttttgtggatcaagaacatgtgtgtttggtcattaatgggctgagctaatctcttaggccatatagagtcactagtttatttatgaagacatgtttggtaaaccaaatagaagaaacatgaacctcataaatcatgcctcttgtcttggtggtacactttaagccgaagttacaatagtgatgtgaaagaaagaaaaaaaacgaaacttaaaatcagtaaatctttgtagttaatcaaatggggtaaacaataagaacccttacaaatcagaacaatgcaaatgttatcggtgagcagtaacaagcgtctcgatgaatcgtaacccatcaaaccttggagcanacttctcatctgccccatcttgcgacgaacccttcttcttcctctgtttttcc

SEQ ID NO: 11728 - DNA, 934 bp, Arabidopsis thaliana landsberg
gaaaattccctcttattattatacctcctttggttttgaaatcatttggtaacctcttgactcgttttgcagcaatttatttcattcatagagtaacggctaatactggtccagaatctccttataccatcggtattgtcccaggttagttgttattatccagatatatgtgtaatttgaaacaatttgttgcagcactaaaatctcaaactgttatttttttcagattcttctgaaaatgtgtgtatccaagaatctagtatcaacatggggtatgatgccatttctcttaaaagtggttgggatgaatacggtttatcgtatgcaagacctactgctaatgtccagataagaaatgtttaccttagagcagcttctggttcctccatttcctttggtagtgaaatgtctggtggtatatctgatgttgaggtcagtgatgctcacatacacaactcgttatccgggattgcctttagaacaacaaatggaagaggtggttatattaaggagattgatatttccaacatccatatggttaatgttggtactgcatttctagccaacggtagcttcggtactcatccggattctggtttcgatgaaaatgcttacccgcttgtgagtcacatcaggttacatgacattgttggagaaaacataagcactgctggatatttctttggaacgaaagagtctcctttcacttcgattttgttatcgaatatctctctgtcgattaaaaactcggcttctcctgctgattcttggcaatgctcatatgttgacgggtcttcggaattcgtagtccctgaaccgtgccttgagctgaagagttttgatagttactatggtagagctgaggccttatgaaaccaaacttcattaggaatgatgattcatatttgtttaagagagagctttagagcgcatg

SEQ ID NO: 11729 - DNA, 591 bp, Arabidopsis thaliana landsberg
tggcttccgcatcagctcctgtctccaggttcctgccctgtgtaagtttctgtcctgacttcctttggcgatgaacagggggggggaagtggaagctgaataaaccctttcttctccaacttgcttcttagtcatgatgttttgtgcaggaataccaaccctgaataagacacccacaatgtctaggatctgccagcattattaaacttctctgctaagaatacgaacagcatcatgatgattatggttcagtcctctcattatctggcctttcctgactgaaccccatatgcagagccctctccctggggtccttcactgcctctactctgtgttattcgacgcgttctcacgaccggtcaggaagaacacaacaaccagaatcttctacggcaaagctttattgcttacatcttatggggccagagtgtaagaagcaagagagagcgaagcaagagagagagaaaacgaaacccctttcctctttaaagagaacaacaattgcctaggacgcatcactccctgattggctgcagcccatggccgagctgacgttcacgggaaaaacagagtacaagtagtcgtaaaata

SEQ ID NO: 11730 - DNA, 589 bp, Arabidopsis thaliana landsberg
  unsure (1)..(589): unsure at all n locations
cattatcttccaagctcctacacaacattctatatatttcttaacaccgaatggatcttctgggcaagggttcaaattacttccacagtccttcccaaaacatggtcaggttgtcacaggaataccccactctgctggtaccaatttgtcttaatcagggtttctattcctgcacaaacatcatgaccaagaagcaagttggggaggaaagggtttatttggcttacacttccatgctgctgttcatcgccaaaggaagtcaggactggaactcaagcaggtcatgaagcaggagctgatgcaaaggccatggagggatgttctgtactggcttgcctcacctggcttgctcagcctgctctcttatagaacccaagactaccagcccagagatggttccacccacaaggggcctttcccccttgatcactaattgagaaaatgccttacagttggatctcatggaggcatttcctcaactgaagatcctttctctgtgataactccagctgtgtcaagttgacacanaactagccagtacagagactgaccatacacttgtatgtcttaactatctttaacaatgtac

SEQ ID NO: 11731 - DNA, 866 bp, Arabidopsis thaliana landsberg
cccccaaaagaaaaaaagcaacatcacatacactctgaataaagaaagagagtttaccctagaaaacttttttttttcttcaccattgttgggggatggatgagaaagcttattcacacttcatttctttgcttttggtgagagaatgaaacagagaagaagagatgaagaaaattaaagttctttccttttctcttttggatctaatttcgtcttgagattttctcatagcttgatactaaagctacataaaaaacaattaggtgaaatgaaagtttgtgtgttttgataagttttcagagattttcggttgcatgttgttatcttgctcttgaagtctatcgaacccttttagattctgattttgttctcttcttatccctcctcctataagttagccatttagggtccccatcgaattttactaagttaaagtcagagtctttttggttaagctatggatcgaagagacgcaatggcgttatccgggtcgggttcttactatatccaaagaggaatccccggttctggtcctcctcctcctcaaactcaaccaacgtttcacggatcacaaggatttcatcatttcaccaattccatctctccttttgggtcaaacccaaacccaaatccaaaccctggaggtgtctctactggattcgtgtctcctcctttacccgttgactcttctccggctgattcgtcagcggcggcggcgggagctttggttgctcctccttcaggtgacacgtctgtgaagcggaagagaggacggcctagaaaatatggacaagatggtggttctgtttcgttggcattgtctccttctatctccaacgtttccccgaactctaacaaacgtggcc

SEQ ID NO: 11732 - DNA, 918 bp, Arabidopsis thaliana landsberg
  unsure (1)..(918): unsure at all n locations
atatatatatatattcccttttaaatgtatcaacaaactatagattatacaaggaatttgatgtagtactatacaatggacatgcaaacagatgtagtactatttgatgacaaaaaaaaaaaaaaaaagatgtagtactattttgtcttttcagcgggggggtggggcatgaagctattaattgcttttaatgaaaatttattataacagttgttgccacactgtcgaaatactaacgcctaacggctagttaaataattaacgcgcggtgagaagtgagtgagttacacnaaccactaagaatctaatataggaagataagataagcatttcacacgtgtggtgtggacaatttaacagtgttaacacgcgcatggcatgtgatctagaaattagaacattaattttagcgttttgactttgacctttgaatcactaggcgtaggtatcgacacgtgtaataatttaaattttttcaatatgtgatgatcatgggccaacgtttgtgggtaaaggtgtggtgttcgatcatgatccacttaaatttactgaattttagaattataacagcagaaggatataagtaatataccaaacttaactataatctacctctccttgtctatgtatactaagtgtctaacaggtaacacaaagctgtacaaaatttttaattctcaaattttttggaataatgcaaatctgtaaaaatagttgtacgagaaaactgtacaataaagctgagaataaaaaaaattttgtaacgtttttgataaaagttttgtaaatgtataaccatcaaaactgtacaacttccagctttgataatgaattaccattcaaagctagagttttcgaatttgttcattgtatacaaccatttgaacacaactcttttcaattatgccatacatacat

SEQ ID NO: 11733 - DNA, 791 bp, Arabidopsis thaliana landsberg
  unsure (1)..(791): unsure at all n locations
gttagctttcttagtaaccaccaaaatccttaggaaagctctttaactgatgtccacaaatactctttttgcttctgcaacttcacctggtgactctaaaagccttgaaaaaagaaaaaaaaaacgatgagccaaaatagttagaggaatatataagcaatgggctttgatcaaaccaacggggaatagtttcttattaccttgacctgttccagtagatttttggcacgctcgttggttttaaagtgatcgcgaacaggctgagacataacagtaacaataagaagcatatcattcatatacataaaactaatgactcggacatcaagtaaagattgaaaagagacgagtttcatgttccatgatgattgtactgatgccagaaacttagagaagaagacgctttttaataaggattgcttgctcattgtttgttgcagagtatcgtcatttatagatggaaatgtacttactnnnnnnnnnnnnnnnnnnnnnnnnnnnnnnnnnnnnnnnngatcctcgggatgtagctcgccggtctcgtagtcggcaacaatatcttcaaagctgttgaaggtcctgacagttaaaaagaatttcaaagatcagtctcagaagtggttatgcagataccaaatgtgatgcagaaatccaaaagttgcaagacttcattcgaactactcacttattgccgccattcttttcactttcaaccttgaactcattgaatcgtggtagaacaatgtatttgacatactcgagacatggaaagcctaccacagttttcggag

SEQ ID NO: 11734 - DNA, 932 bp, Arabidopsis thaliana landsberg
gaccgtcttacacattgtagtttaatatttttcttcctcgtttgttgcttaaatttattatcagaaacctttcttattaataatcaatctaatgccatgatatgattattatgtaacagggatgtgagcaataacccgttggcgttatcaccggttccatcatggatccctttcttaaactctttgtcaacattgtatgagcattcctctctctttttagatatatatatagatttgtgagcatacataatgagaaaaaatggtcttcaacttggcagaaggttggaagatatccaacttgatggtccagtaccaacctccctttttagccctcttcaattgcaaactgtgtgagtcaaataagtcatgatcatgaatgttcaattggaaagtcaactcaaagatttgtgaaacatgtactgattgggatggtttttcttgacttgcagttccctaaagcacaatcttataaacacaacattggaccttggtaccaactatagcaaacaattggattttgtggatttacgagacaacttcataactggttataaatcaccagctaataaccccgtcaatgtaatgtatgtattcatctttgaccaatatgtaacatctttgaagaataacttacgtatgtgtgttgatatatccataggttggcagataatcaagtgtgccaagacccggcgaatcagctgagtggctactgcaatgcagtccaaccaaattccacattttctaccctaacaaaatgtggtaatcattgtggtaaaggtaaggaaccgaatcaaggctgccactgtgtgtatccacttacaggagtattcaccttaaggtctccttcattctccggattttcaaacaacagtaacttcctaaagtttggggagagtttgatgactttctttaagaatggcaagtatcctgta

SEQ ID NO: 11735 - DNA, 813 bp, Arabidopsis thaliana landsberg
ctcctaatgattgctgatacagtgaacacatgatgagattattgaaaactaatatgcaactctttatatagtgttaatgataatcacatgataattagcttatatagatttatacatgatagggtttcagagagaaaaaaatacgacttatgaaaatatagccatacccacaagaagtgtaacccaaattcaaagattactacattgaaataagtttccccaaaaacgaatccaaaatcaggttttacgaaatccgtagaaatcaatcacacaaaaaaaactgaagcaagaaaccagatctgtagctcaacgaaccttagtcgattcgaccaagttttgaacgccaacgtggtttcttgcaaacacaagcggtgggcaagtgagaacgcgcgacatattttctctgatccaatcgaaggatttaggtctcgattctaacaatccaattaacccaagattagcttcagattcaagcaacctaaaaaggaataatcgagacaaccccgtgagctcgatttcgctaacccaaatccggagataaaccctaaaaaatctcgacctagagcagacagtgagggggagaagatagctaagcgcgtgtggtgaataaaaaaaaaagtgaagggtaaggtccatatttatagacgcttgagagttgagatccaccgactcgggaaagtcggtcacattgaaggtgttttcgtaagttcacattcgagaaaaggaaaacactaatcaaatatcgtggaaggtatattagtaaattacatagacgactactggctcggtccgagtgtccgatatttatacggt

SEQ ID NO: 11736 - DNA, 1270 bp, Arabidopsis thaliana landsberg
gatttctacataacacatagagcacacaactttaaaagttactacaaaataccgaattgactatatatatcatattatcagtataaacatgattagattgatcatgtttatcagtaatcatgaaagacaaagattgtgactattgtaaaccaaattttagaataaaataaataatttatcatactatatacagtattttgttaagtatatgtcatccaatagtaacattatcatttaaactgaaaaatgtttcagctactttaaggaattatagctttattaaaagtatatacttttaggtcacgtgtttagaggtgaagaacaataataattactcaataagttcaccagtcacactccaacatcttattcaaattccttttaaaagctttttaaccgtggctgtttgatgaccatttgacaaaatttagtatattagaaaaaaacaataggatagggataatataggacattagactattagaaggacaaaatgaagtattatttaattttccaatgtaccaaccaataagaaagaagtgacgcacagtaaacgacaaaaagctcaagcataaaaacccaaaccttctctgctttctaaacatttcaagaaccttgagaacatcaaaaactaacacagaaagaaaaaaaacagttcctgttctattagattgttttctaaattgtctgaaaatcatggaagtaacttcccaatctaccctccctccagggttcagatttcatcctaccgacgaagaactcatcgtttactatcttcgaaaccagaccatgtctaaaccatgccctgtctccatcatcccagaagttgatatctacaaattcgacccatggcaattacccggttagacccggtttatctctcaatgataacctattcttctagatgttcatgtttagagctactttccttatttgctttgttcgttttgtatttacagagaaaacagagtttggagaaaatgagtggtatttcttcagccctagagaaagaaaatatccaaacggagtcagaccaaaccgggcagctgtttccggttattggaaagcaaccggtacagacaaagccattcacagcggttcaagtaacgtaggtgtcaagaaagctctagtcttctacaaaggtagacctcctaaaggaatcaaaactgactggatcatgcatgagtatcgtctccatgattcacgtaaagcatcaacgaaaccgtacggttccatgagggtaccgtagcagaggaaacaagttatagct

SEQ ID NO: 11737 - DNA, 818 bp, Arabidopsis thaliana landsberg
atgagtgaaaattaactaaccttattccctttagctaagccacacacttcattttgcaaatcatttatcctgttgatcaatatcgcttgttgtgcttcaagcttttgtacatgagcgtctctagcttgaaggaacgctcgcttggtagcagtaacccctctgcccattcctctcactcttccttacttgccttttcctaacacttgacttacagcatcgttgctaatgctaatagtatctgaagatgccatttcactatcaatatatttgatttgttcctgatacagttatttcaaaacaattagaataacatagataatctaatcaaagcgattctacattatttgttcttgatgatcccatttcacttacaatagtatgtgcaaattcatgtctaacaggtcgcccatctgaataagtatgtcttgctacccatattttactcctagtcactttactaggctcagaactcttgatcctctacaagcagcaaacattgtttaatatttgaaataaccaaatataaattgtaaatcacacgtaccatctcatgaccaagtctcatcattccttttctgctggtggtgtgtggaatttgtgatatgtctataatttgcatgatttaggcattcattcttcaccactttgtcattgtttcatccacatttcatctcattaggagtcgttttaatgtgttttacatacttacgacgattttgcattaggattacatgtgcatggcatattcggttattttcaggtactttggatgcttttggagttcaaacagaggaaaaacagaacctgaagtcagaacg

SEQ ID NO: 11738 - DNA, 717 bp, Arabidopsis thaliana landsberg
  unsure (1)..(717): unsure at all n locations
aaaagatcatctgttttggattttcctggatggggatttaaattttcaagttatttgaatcagtcacaacggggaaagggtttgtgatatacaatgtcaagtccatatctcacccgcctggaactgtccaatggccttgtaaacaagaggctcaacctcgactgtgttcacatannnnnnnnnnnnnnnnnnnnnnnnntcaaactataaagagggaaatgtgtgagattataagtcttctgcccaggattaaacacatgttatccactttgacaagtgtaaaactttaaggatgaaattaatacctttattttatttggaggaatacactccacatttccaacttttaaagtacaacaaccaacagtgtcggcctcatcatcatcctaccaaatcaaaaaaaatgaaaatatgagatttcttcagaaattttgttgtttgcgagccatttatctgttagaaatcatttgcttttacattaaacttgcaatatactagttcaaaaactaccttctcatttccagccctaagcgccaatttatcaatgagatatgtcgccacagcaatttgcctcattttaacatccttggcagtaaaattcttggtgtatgttgttcttatattatctatatgatcctgcagtcaaaacaaatcgattgctaaaaacgagaaacaatgaaagagtaagcatgattcataaaaatgaaagctgcttac

SEQ ID NO: 11739 - DNA, 1158 bp, Arabidopsis thaliana landsberg
tcaaccaacaacaagaagatatagaagtaagcactacactgcccaccatttctttgagtttaggatagcacagattctgagtgtatctgctgttctttatgtttattagggactaagacagacgctctacacaacaagggctggtatgcaatttatgcagaagaaatttcaagaagagttctcttctcttggtattcagatctttcttctcttactttctaagaaagttttttttggatatccaagaatttgacactaatgaatctatatctgtctacaggtatgcacgttcatggccttgctcatgctgcttctggctatcaccgagttcttgaagaaaaccgaaaactttataatcaagtgcaggatctcaagggtagcatccgtgtttattgtcgggtgcggccatttttgcctggacaatccagcttttctagtacaattgggaacatggaggatgataccatagggatcaatactgcatctagacatggaaaatcactcaaatccttcactttcaacaaagtctttggcccatctgcaactcaaggtaatgtaattgaaatgccttgctgttattctctagtgattgaatttaacctgaaggatctatcttgctctttgtagaagaggtattttctgatatgcagccattgatccgttctgttcttgatggatacaatgtctgcatatttgcatatggtcaaactggatcaggaaaaacattcacaatggtaagattagagttgaataaattttgaagactgttacatttgaagctagagaattttcattgttcccatttttgtagattttatagagtggacctagagatctaacggagaagagccaggtagttaattacagagcacttggtgatcggtttcttcttgctgaacacagagaagacgcattccgctccgatagtacagttcagatgattgaggttcccactgagcaagttagagaccctttggttactgatggcagcaataagccatatcctttttcatgagatggacatacttcttaatgttttgattagatagagagagagagatcgttttcatgtttcagtttcatattccttaacattttttggtacgttagggagcacgaggtagggtctaagtgtaccggaggcaagtcatgtccagt

SEQ ID NO: 11740 - DNA, 676 bp, Arabidopsis thaliana landsberg
cctctctgcactgctcgagaaacctcctcgtgcaatttaaggattacaatatgaagtttaagcttcaatgtttgtaattgacattcttactcatttgattgtataatccttgttctagtttgaatacaacagaggttttcagctctgtttcacttgataacttaattcgggactatttgtatcaattcgaaacattgaaagtggccaaaaaggcattttagcgattgctgaacgacattgatgagaattttaatataagcataaacatcattttacgttgcagaaccaatggttcactaccaaaagcccctgaataagccaaaagcttgttcagaaactacaatacctctggtcaagctatcttgaattcgtgaacttataacaccattttctcaggtgaagatgtcatcatctactctagtaaaaaggagactagacttacctaacgaagattcaaaacaaaaccaacccaaatgagttagcttttcaagttggtacaagggacatgatttgagtcttgatccgtcccatgcacgtttggatttctctgtagatcggtaggttctgtgggcatcgtggctgcaagcttgtgactgctgcgtctataagctgtgcgacatcagctggagggtactgtctctccgtgcacatctgcaagtcacgaggagtaaagttc

SEQ ID NO: 11741 - DNA, 944 bp, Arabidopsis thaliana landsberg
caaaatagcgggactcaaagcaaaccagagtatcaaactcaattgtttcgggtttaaataatattttgggctgcttgatgtaagaaaaaaaaactttattgaacccatttaaggcccaattataagtgatagggaaaatgagaaatgagactcattggttcgtgtctcgcgccagaatcaagcctccttcacgctcaagattccacccatgttgtggagaaccggtgtactctaggctgattaaaacaacatattcgatggtccaagagaccaaagcaacttcaacatattggcctataagatactccatttaatcaatgtaaatcatatagttcttatattaacattctagacaacaatttaaatacgaattcgaccaagtatatatattacaaggagaaacatatggctaactatagatctcttacggtccaaataaacaaacatacgataaaaataacttcattctcgttttatcactgacgaggcagaaccactggttcccggcgatggctgagctggcatttgcccaccgtgaataaactcacgcgccagtgcttggagctcaccgcctccgcccatactggacgatgacgggacgccgaagagatgatcagacggtcgtggttgttgctgcatggcccaagtggaggacatgaccggctcgaagatggaggagaggtcgtacaccgacggcgatattgttgggaggtccgttatggaaagagcctgtagagatcctgaagacgacaccggaacctgtggtggttgaggttgtggcagctctagagttgctaagtgtgcttgtagatatgaaagctcagtttgcaaacttaccacctgttttttttataacgaaattgaaatggataataatgccaacaaatatgaaagagtgataagaatctagataaaatgatttttcagcatctttaatattggaa

SEQ ID NO: 11742 - DNA, 1437 bp, Arabidopsis thaliana landsberg
agaccctacgaaaccttgaagacgaacgtcaacattttcaagattatccagcttggcctcactttctccgatgaacaaggcaacctccctacctgtggcactgacaagtattgcatctggcaattcaatttccgagaattcgatctcgattccgatatcttcgctctcgattccatcgagcttctcaagcaatcaggcatcgaccttgccaaaaacacgctagacgggatcgattccaagagattcgcagagctcttaatgtcctccgggatcgtcttgaacgaaaacgtgcattgggttacattccacagtgggtacgatttcggatacttgctaaagctcttgacttgccaaaacctgccggattcgcaaacagacttcttcaagctcatcaacgtttattttccgaccgtgtacgacattaaacacctgatgaagttctgcaacagccttcacggtggtctcaacaagcttgcggagttgctggaagtggagagagttgggatctgtcaccaagctggttcggatagtttactcacgtcttgtactttcagaaagctcaaggagaatttcttcgttggtccgttgcacaaatattctggtgttttgtatggattaggtgttgaaaatggtcaggttgctatctagcaaaaaattaaataaaaaatttcctgaaaactattttctctctttttccattataagaatgcatcatcagacacttataactccacaaaatttaggatctaaattcaaaataatttaatgaaacatgaaaatgaagaggtatgatcacaattgtctgaaagttgaactgttttgtgtctgaaaataaagaggcgaatgggaaaaatgttagttaccgtatggatatggttgcgtgggcctaatataaggcccactgttgctattggatagggccattaaattgcaatcagcgtttagttggtattattgaatctcaagcctcttcttcgcgcaagcttcggtcatcatcatctgaggttagtgacttgacactcttcttctccgacgattctgaggttcattttcgtgacatacggggtttctatgtgattactgagaactttgcctttcgcgccggttctcgttgattttttttttcgatttaggtatttccatgtgagactaacatttgtggctcgtttactcgcagatcaaagggacagagaacgtgtctgggtaagttttaatggtgtttctgggttattgctcttatttcctagttgcgaatctgctgatttggtgaaggatatagcgttctaggtttttttaacttggtgtctgtgatagtaaacgcatttactagttattgtcaagattttgattacttacatcgttgtgaccatcatttcgattggtcttcatatgtgcttttgcctgttcatttatctacagggtctctttgttttgttt

SEQ ID NO: 11743 - DNA, 727 bp, Arabidopsis thaliana landsberg
atcaactacaagggtctcgaacttgatctcggtcatgaagaggatcatgaagttacgaagatgatgagaaccaccgcaaagagcttcgacagtgattacttcatctgcccaattcaagattctgtcggaaagacagagtttcttcatcagagatctagcgtggtccccacacaactcctccagattccaataacttgggaacctttgtcccccgtggacgacaaagatcacaataagtacctggatccggatttctcggaaccagacccggaacttttgacggagtcttttccgtcgccgagaataaccttcaggaaatcgaaggaaaccgaatttgccgacatgaaaatagattcaccagcagcgaggttcactagtcctctgccgcagaacgatgagagacactctgactcagaaggagggttaggaggagagtcttatgatgagatcatgggatcagaggttgaagaaagcagtgacttgagtagcaagaaagaggttgattgggatgaaggtgaaagaacgaatctgtggaagaagggtcttaatggatttggagctatatgttcatttggtgttgcagctgctgcagccaccatatgtgtcttcttccttggacacaacagtagcatccaaggtggtcggaacaagaaccagatcctcaggttccagatttactctgatgataataaggtaaaaaatttaaaatatgattcttgttagaagt

SEQ ID NO: 11744 - DNA, 1191 bp, Arabidopsis thaliana landsberg
acacggaagttccgaatatttctgacgcataatcttattatttgactttaacgtatgaaaaattttcatgcggcaattctaccgtgtgagcccttcctttaatgggcacttacgtggtccatcagccattcccggcaccgccggagggtctaaaactgttggtcgttggctgaaggaccggcgagagaagaaacgagaagagacgcgtgctcaaaatgcacagcttcacgcggctgtatctgtagctggtgtggctgccgcggtggctgctattgctgcagccacagcctctcagtcgagttccggaactgacgagcaagtggccaaaaatgactccgcggtggcttctgccgcgactttggtggcggcgcagtgtgtggaagctgcagagattatgggagctgatcgtgagcacttggcctccgttgttagttctgcggttaacgttcgttctgccggagatatcatgactttgaccgccgctgctgccacaggtatgtttctcccgttacgtgatcatgtcattagtgaaacgctaaaaattgccacgttcataaaaacttatgtatatgaatccgttttttagattatgtcataatattcctttatttacccaagaaagactaaaaacttgatccctctattttaaaaacattcaattatgaaccataatataaaagtgtagtagttcttcataaacctatataatagtccgtcaatttaaatgtaacaatggccaaccatgatttaaaatcttttccaaactttggcctaggcctaaacaaccgcttgaacactatgaattagttagaagtcttagataatggttaatcacttaacctattttcgttttgtgatgtagctttgagaggagctgcgcaattaaaggcaagagcattgaaggaggtatggaacattgcggctgtgattcctgtggataagggtacaccaagaggcggtggtggtggttatagaggtggcgagttagcccctgtagataattttcttgggatttgcagtaaagaattgctagctaaaggttgcgaattgcttaaacgcacccgcaaaggtttgataatgtcttatagtttttccagtttagttcattttgagtaatttttgaatacaccatatcataatttttgttagtcctttttaaaaatactcattccatatttttcaggtgatctt

SEQ ID NO: 11745 - DNA, 806 bp, Arabidopsis thaliana landsberg
agaggcaaacataattcaaaactgcgaccaattcttattatcaaagatttatgaaacaccaattagctattaatagtaaaaatcaagtgacactttccctatactaaattgttaattgttcggatttataggcttagctagttaagtataaatattaatccacactcttcacactaattcaattttatccctaataaaaaacttgaatctatatatgtgtatcaatatatgtgtatgaatattaaaggggtttgtagtctattgaaataaataaaagattccattatccatgatttttaataagttacttcgtagcattactaaacctatttacatcatcaacaatacaactgatttaatttcaactaactaaaaaattaccaatttatttatcataaattcataatctaatatctggtcaaaagaatctaaaaatagtttcatgtgtctatttatagtaataagattgatatcttagtaatgaccaaatcaatagccgcaaattttgctctgaaaaattagttgttcgtctttactctaatcaaaaacataaataaaaaatcacaatttttatccaaagtaaatgttaaatcaatttattaaattttagctctttagacctcattagttatattattagaaattaattagatttgtgtgcttataagccttaagagcatgcattttttatgaataaataaatttaatgttgctttcgatatagaaaaacaaattgcacatgcctcatagtgtaactaaaataaaccttttgtataaaaaaagaaataaggcaaactatttaaact

SEQ ID NO: 11746 - DNA, 721 bp, Arabidopsis thaliana landsberg
caaaggcccggatgatctctgatatatgctcctgttatggccctattattcattatctattccattcatagtctcctccgtagttaggcgaagcgttgttcacacggcttgtctcttctggtttgatggagtttgcaaatgcatgccagcctataaggtaaggcaagacaaacttgcaatatagaagaaaaaaaggagtttagtaatgtttctttgaaagttcatgccggtaatgttaaagatgagatattttctgatcttacattgaatgcagagataagaacagcaaactctgctcgagtaattggtatgtaaatgctctcatccacattcacaagcttgttttgaacacctaatatatacacggagatcgttagagactatcctttttgacaagaatcaagaagaagattaaatttacttacttaggttgaagaaatgaccagaaccatctgggagaggctcaactttcaacactttccttacttttccctcatcactacatacaacaaacaaaccgatcaggagcaatataataagaatacaaccaatattatcagtgtaatgatgctttttaccttttccccttgaatggatcatggaagaattcacaagattccctcgggcctaggctaactagagttccaatttctgtaacagacaatgagaacacctgcaattttgacatgaagctttaccaaattcataatagaaaaaagac

SEQ ID NO: 11747 - DNA, 944 bp, Arabidopsis thaliana landsberg
gtgggcgatagtgtagatctcaacgccatcgaagaagaaattgccaagcagtgcaaaagccttcctagaggagagtttgcttcaaaagcactaagtcacagtttcacagtgtttgctcgagatatgattgaggtacccatctctttacggttcacctttactgttactatctcaaaacaacatctgtaacatcatcactgtttgttctttaattctccaggcaatatctttctcaaatctatatgcacccgaacatttgatcatcaatgtcaaagacgctgagaaatgggagggactgattgagaacgcaggctcggttttcataggaccatggactccagagagtgttggggattatgcgagcgggacaagccacgttcttccaacatatggatatgcaagaatgtacaggggcgtctctctcgactctttcctaaagttcatggctgtacaatctttgacagaggaaggtctgagaaacccgggcccttatgtagcaactatggctgaaatcgaaggtttagatgcacacaagagagccgttactctcagactcaaggatatcgaagccaaacagcttgcataatccaattgagatttatattcagacaaaagaggcaaaaattctttttgtattgtatgaacatatttggtttcctgagatggaatagcaataaaataagagatgttggaaaactcttaccataatcttgtttttcattctttaaatctaaatccttccgtatgtttgaaccaaagagtaagttaattgtgctaactttcccgaaacacaatgggattccaaatatatcttgttctttacaaatgacagcgccttcaaagattatacagaaagcttcagagagcaacaaagaaaaaacgcgtaaaagaatgataaagtcgtattgctgatcagtgtggtctagctcaagacggaaaaggtt

SEQ ID NO: 11748 - DNA, 1299 bp, Arabidopsis thaliana landsberg
ttcataggatcattataaagtatccttcattatttcttcagtcgattcatcgggaaaaacaattttttatcaagaaacccaaagatcgatttcagatggaatacacaacaagaagagcgatttagagacgtgtaccttgagtctcggtgataagagagaagaaaactcggtgaaaaaagagaatgatcttcagcttcttgcttctttggcgctatgatctcacaggacaatttgaaagagagaaacaacgactcatggttattaatgggcttttaataacaaaaaagggacaacattaatgggctttgggcccattcgtaatattggtgatttttttttctttctttcaattcggcactgcagcttccttagggaagcatatagcagaaaggagattaactatcaagggttaataaatggtcaggtttttacctgaggaagaggaccaagggaacaaaacttgagtcttatgggtttcatgtgtccttgacgacgagaatactcctacaaggggggagatctcaaacccgtgggcgtgaatcacacgcataagaagctgctaatactccatcttgttgaattgcaattccatagacattgtgactgtaaactacttgcaaaagcagcttctactccacaatctccatgctttgtcaaagcttgttaacccgaggtatttcccatatgggtggaaagcaacacgtgcaacacaattcaaataacctttaaaactttgttggagtgttccatcagttttccacagctctgcagttcgatcagcagaagcagttgctcttccttcctcttgctgatgcttttgatcaaaggagctttttcagttttcctctgtaccaaatcttcttttactgatatcaaatcattgtaagcttctcaaatcattttattacatcagggagcatgtcgaaacacagcatgtagtctttattatttggtctgcaacatctatgcagaagctgtctttgggcacaaagtgaatagctctttatgctaaaccattataccatagtattacataaagttctgctcctagtcaatatccagatcccgtaaacaagtagaaaactgaggatttgtgttttcttgcatataagaggggagtgatagagaggcatgcataggaatcaacttaaatcgatttaaaggttaaagaaaagaggaagaaaaatgagttggcagaataaatatcagaaagatctcgaaagcataccaagtcacctaatgttttgaagcaagataaaaaactcctaaaaaggtaagcatatataatcatccattgct

SEQ ID NO: 11749 - DNA, 586 bp, Arabidopsis thaliana landsberg
  unsure (1)..(586): unsure at all n locations
aaggtctcttcctnnnnnnnnnnnnnnnnnnnnnnnnnnnnnnnnnnnnnnnnnnnntgtccaactgtaagacctgctccacgcctattgacaatcaggcgactctctaaggacgacgagcccccggtcaccgacgcgacgtcctaccggagcctgattggtgccctctagtacatgaccctcctctaggcccgacatcacctacaccgaccaacaggtgtgcctgcatatgcacaccccacgggagccccatcttaccgctctcaagcggatcctgcgctatctttgcggctccctcgactacggccttctactctgaccctccccgacgtcggagctcgtggtctacactgacgctgactaggctagatgtcccaacatgcgccggtccacttccggttatgccgtgttcttgggcgccaacctcgtctcctgggccgccaagccgagcccgtcatctcccgctcagcgtggaggccggttaccgcgctgtggccaacggcgtggcagaggcctcctagctgcgccagttctccatgagctcacagcccctctagcgtgctacctcgtctatacgacacgtgac

SEQ ID NO: 11750 - DNA, 530 bp, Arabidopsis thaliana landsberg
  unsure (1)..(530): unsure at all n locations
cagagagactcaagcgtcctcgcccacacacctacagttgagctctgcccgtaggtcgtcatccctctnnnnnnnnnnnnnnnnnnnnnnnnnnnnnnnnnnnnnnnnnnnnnnnnnnnnnnnnnnntcagtccatgcacccctcactgatggtgagcgcacagatgccgacgcctcgcgttgacgccggaatgatcgaggcctggacctggccgagccaggatgggccatgccgaggagacagtcaacatctttacgccactacctcatggcctccggtgaggccgtggaacttggagggttacgtagcaactccctggctgcagacaacgccccaccaggagcagcccttgacgcaatcctggatgtctgcacgggcatatgctgctgtgnnnnnnnnnnnnnnnnnnnnnnnggcgcagggcagttggagcctcgtgctacagaagatgctgcaccttctccatcgagaagtccacggaaggcaagttgaggtgcttgacgatctgaaccatctgggtacgagctcg

SEQ ID NO: 11751 - DNA, 1265 bp, Arabidopsis thaliana landsberg
ttttttatacccgcggatgataagcaggtgagctgatttaacaactttttcctcatgttcagggctagggacagtactatggaaatttggattaaggaataaacaaaagtaccttttatatgcccaatcccagttataagaaaatggcgagaattgtctatcaaagggcctctcgcgagcaatcacgacacatgcatcaaaacccagcaattttggagacggacaaatttggggtaagtcaatcgttaaggactttcctttatctatatgatcaaagtaactgggcacctcggttccaggaaagaaagcgaatcccagtgactcctattcgaggacaacaacgaaaagaaaaaaagatggagaatgatcaagttcaggttgtttgcagtggagtaatggaagaataagctggaaacatacctcttcgttttctccctcgttgagaaactgagcgatcagatgttcatcccgttttaaaccgaaacaatgactaagatcaaggtgttttacagaatggttcaaaggaagggaaacagtttccaagatttcacagccatgggcgtagagagacttgaggcacaacggaagcccttcaatcgatttgagtttcttgcacttattaaggcagagagttctcaaagaggaaagcacttcgatgctggatggcaatttctcaaattcatggctgctaagatctaaatatgatagcttgataaaatgtctaagctgatctaaaattgatcgaatgctcttgcagccatcaacccaaagctcaagccattggaatctgccacagtcttgttcagcataagaaagttccaacaatgattggaggtttatacagccagagagtttgattgtctccaactgaaccagcgctggcaatgctttgagtctgcaacagttacgaaagctggcatatttcaacctgggaagttgattcatggtttctggtaaagtctcaaaatcattgccactccagtccagtttctctaggaatttcaagccgcacacgtcatctgggatcactttaatgtttaggttgattagaattaactctttcacgcaggggaacatcgaaaggctaaaacagaggaaacttgcaccatcactgctgtacctgaacctgctgatgtctactgaagtaaatccatggaacttggatgtgggttgagattttccctgtgctttcttaaaagattcaaaaccatgaaactctggcaagaactgaagtgcctgccgtgtccttgtagaaaattaaagag

SEQ ID NO: 11752 - DNA, 745 bp, Arabidopsis thaliana landsberg
ttgcaactatagatgactctaagacttggtcagtatgaagacttttctgtttgtttttatgtggttagttggtgtcataatgctgatgaaagtttttggggatttaggcgcaaaatttatgatgaatataatgacgaggacgttgagctgactaaagaggagagcaagatcgttcagagaatactcaaaggggaagctccacatgcggactttgatccatatgcagtacgtatctgttttatgtgtagccgttttctactaatgttatgcaaatctcttcaatttgtgaccttttgattgattctcttgggaccagccttatgttgagtggttcaaacatgatgatgcaatacatccactctcaagcgcaccagagcccaagcgaagattcatcccttcaaaatgggaggccaaaaaggttgttaagattgttagagcaatacgtaaggggtggatcaagtttgataagcctgaagaagagcccaatgtataccttttatggggtgatgattcgacatctgatcaaaagagcaagcatttaacttatattcctccacccaagcttaaattgccaggtgaaaacttttcgctgactttctgttgtttctcttcctctcttgggaattccgttttcaaacttttaatttgtactatttggctttccaggacacgatgaatcatacaatccttctttggaatatattccaacagaggaggagaaagcctcatatgagttgatgtttga

SEQ ID NO: 11753 - DNA, 579 bp, Arabidopsis thaliana landsberg
catgtcactatatgaaatttggagctaatcgccctgcaaatcggtctgtcaggcgctctgaataggcctccaatggtacagtgccacacaaatatcaacaggttcagggaatatcgccaccggtgaccttacgccgcgattgacgacggcgatgtgattcgtgctcactggtgcccagataacgcctcggagtgaaaatatcttcactccggatgagcttgaaacgctattccatcctatgtcgtgcccacttgcgccggcgacatggccaagtggcgtcaccggaacttgcaccattcaccgtggttgcgccacgcctcaggccatttaccacgtcgcactgagctattttagatagctgggtcgtcgctggtaagcttgccacggtgaaggccacggtatcacctgcgccagtaactttccttctcttcggtcgccaccgcgccatctccaattcatgggccaccgcctcgaaccctataaattgagcgtgcaatcggctccgctatgtatttaagcatccagcgcacccactcgtgtctcggattattactagagctcccaatttgggattcccca

SEQ ID NO: 11754 - DNA, 1022 bp, Arabidopsis thaliana landsberg
ccctgacttgcttccgctacagcgatgtgaaatattgacttttcagatgggctcagaaccacactgtcatatgcgctgcttgtttcatctcctttagtgcctccagaagcatgctgttgatgagagactggttcattgttgttaatcataatgtcatcatcaacaatatcatcttcctttgcagcttcactaccgcacaatttctcatctgaacttgccttttctcctgctatgataccatcttcgtggagcaaacactttggttgcttgctgccatcattgatcatatcagcattacttttacttgcatcaagctcaccatcacaggttttccttgtctctgggggggacacaacattcttacctgctttgcttccagtttcatcagtggcttcattctttttctctatttctgatggcggtacagtttcatttccatcataacttgtcgaagcaagcttttgacaagggcccgaatcattgttatccacctcaactctacattttttaccaagcggttcagaggtatctcgtccaccattcttaacatcactatatttcttcttactaggtcccatcatttgagcaatggtgagtctaccatctacttcatcattgtctaaaggaacctgtgtatgacaacaacccatagtaatctcatcgttctcacgagctcgcttcatgtacttgggtctcttgtttatcgaatcctcatatttcttcattccatcctcgcttgttctgttcgtcatagagccagaagtagtgaaactattatcatcacctatgagggttctttctttgaatgtttcagctgattcaacaaccacaatctctttagaagaaaacttgaatccagttaacgacttcttccaccactcgcagaacattggagtaacacaaggtagtgcacgccgggaaggaatgtataatgtcaaatcatcaataggcttattgtactcattccaagcttgcttctgtgagagacttttctggtttgcaggacaaggaacatcctgaag

SEQ ID NO: 11755 - DNA, 913 bp, Arabidopsis thaliana landsberg
aaaagttgttctccttacaattttttcatgcagctttttttcatcgagctacaaaagggctactcccagagatgttcttagctttattcaacaccataacgatttgcatgttactaacctcttcaacaacatgttaactggaatatttccctattggcttttgtagaaatatccaaatcttcggcttttgcttttgcagaacaactctttaaccatgcttgaattgccaagactacttaatcatactctacccattttggatttatcagccaataattttgatcaaccgcttccacacaacattgaaaaggttcttccaaatataaggcacttgaatctttccaacaatgggtttcaatggatactaccatcgtcattcggtgagatgaaagatattaagttcttggacttatctcataataatttctctggaagtctaccaatgaagtttcttattggttgttcttcattgcacactttgaagctttcatacaacaaattctttggtcaaattttcccaaaacagacaaactttgggagtttggtcgtgttgattgcgaataacaatctatttactgggatcgcagatgggttgcgtaacgtgcaatctcttggagtgctcgacttgtcgaataactatctacaaggtgtcattccaagttggttcggcggctttttctttgcctatctttttctctccaacaatcttttagaaggtaccttgccaagcacgctttttagtaaacctacatttaaaattttggacctctctggaaacaagctctcggggaacttaccttagcacttcactgggatggatatgagtctattgtatctcaacgacaatgagatcagtgggacaattcccagtacattgataaaagatgttttggcacttgatctgcgaaataac

SEQ ID NO: 11756 - DNA, 1376 bp, Arabidopsis thaliana landsberg
gacttctagcgaatcgaaattcttaaccagacgacattaatagaaaaccccttataaactagtagtgtcttcaacatgaaagattgattccaggagtaaccccaagcttcttgcagaagtccaagtaatggttaaccctgctctgcactgcagctggacgcccaccattacattcaccaccgttgatcctcctcgtggtagcaccaaacccttggctcaaaaccggacgcacattcttgttccaaaaccacatggcacactggaaagccacagttgggctacgagccaccatatctgggtccttcaagagaggaagtccaaggaactttccggctgcaccatagttgtagttccatgtgatttggatcggaccgcgaccgtagtagttctttccgggttgacacggatatgttgtgcttggtgagcagtaccttcctctggctatttcttctttgtaacaaaaacctttgcataaccaaagagataaactttacttcaaagttcaaacttgttttagacacattctcaaaacattatggtaatatatatataactagcaaatccttatttcttatgaggagaagattcctgtctctatctttttcttcaattatcaaaataaagtttttgatgcaaactcataaatcagatatttatataaattttaaaacatgataatactctaataactcatttctagacattttctgatacataaaaagaagaagagaatgtagtaaacggtgaacttacttccagattcgtgagagaactgagccaacatggcggcaatctcacgcttagcaacagttcctttgtaggctgcgaacgattcagcggctgcgatgaaagcctggcgagtgtaaaaccctttggctgggcaaccgcttccgactttactcatgatgctgttgaagaacgctggtgtaataacgcttgctatggtaccacgaggaccagcatttagaccgccactaccgcttggagtcggagtaggtttaggtttagagttgcaaggtccactctgtcacccagtgccacagtaggcttttgtggtaccacaatatccccacctgctgcagcacatgttgcctttacacccgtttgtaccgcagttttgtgaaaacgcggttcctgtcatgatggttagagtgaagaggaaaatgatgagagcatttttcagaatcgcattttgtgtcgccatttttttttttcctttgatggaatgttttggagggagggttgtgtgaagaaacgaggaggatatgtggccgtatttatggtgtaaaattgataatactaaattatgtttggtcaaatcttagttaatgttttataagaaagtgatgacccattccttttcttgtagttgtgat

SEQ ID NO: 11757 - DNA, 749 bp, Arabidopsis thaliana landsberg
agattttttagttctaagtattctcattctacttctctctgggattgtatcttcagctccttcagctaattctcctgcaagtaagcataatcacatttttttaactctctcttctcttcgattctttgtttaattgttttcaaatcttactccttttgcagagattcttaatgggtttatctcaaatcatggctcttcattaatgaaatggttatggtcactcaaaaccacaaccaaaacaagttcgaatcctcttccattttctgatcataaagtttgcttttttatctttttctaacgaataaaggtttctctttttttatgaatcagctattgcaacgagatcgatggtgaaattcgaaaatgggtatagtgtagagactgtgtttgatggaagtaaacttggtattgaaccgtattctattgaagtcttaccaaacggagagttacttattcttgattctgagaacagtaacatctacaagatctcatcttctctttcactttgtaagtacaaattttgtggtttattgattcttgaagagattgtgatgatgttgagaccacgattgtgcttttggcatcacttaaaactgaatgcacatggggactatagtacaaaaagatgctgcatatggaaaaattgatggaattttttggtacttcaaattgaaaattctaaagtctgagctttattactattttatggagattttgctgtatctctgtcgtttctggagtgagtttgt

SEQ ID NO: 11758 - DNA, 623 bp, Arabidopsis thaliana landsberg
gtacccatggcttctcctaaagtggttgactccttgagtgatgtgttggctaaagcattgctgatcttgacttgctccgagaagagaacttgaaccaccactctcaatggcaacctctcgttctgagccgcgtgcatacatgcgtccattgatagtttttgacaatccatcactcggcatagccgtttcctctcatgctccgataatgtcggatgcgcctatcacaacaaaattaagccaaaaaaatgttgaaaactattctacgaatttaccaaaaagacccttcaatatatatataccttgagatatgaatcaatggctctgtatagtccatcgtcacaagtcctagcagattccggtaacgcctcagccaaaacctgaaactttgtcaacggcaaattccgatctctagcaacttcggtgagataactatccacaagcctcgccactctcattttcgcattctgattattaccacaccaccaccaccattgttgttatccctctcgggatatcggcgtacatagactgcgacggcgacggcgacattcgactcggactcgatcattccgctgttcttgacaagaaaatgttccacaatctctgacaagatcacatcgggg

SEQ ID NO: 11759 - DNA, 1055 bp, Arabidopsis thaliana landsberg
aaccgaactccatcagctcctctgggttttgagatacctgaacttatctatcacaggaagggaaccagattacagtcacgtgaaaagatttggttgccttgtatattatcatgttgaacagggcaaactaaaaccaagagcaaagaagggagtatttatgggatatccacaaggagttaaaggatacaggatttggagtattgaggacaagaaatgcgttgtaagtagagatgtgaagttcagagaagatgttctgtacaaagacattggaaaaatgtcagaagcagaaaaagatgtatcgaaactgaatggaaggaacataaccattgtggtacctggtaatactgtagatggagctactttggaaagtcaaggagaaacctcttctcaggatcatactcaaccagctgaagctggagatggagttattgaggtacctgaaacagcagaagaagaggcagtatcagatgatgagtccactcatgaattggataattatctgctagcaagggacagagataggaggaccaatatcagaccgcctagcaggtatgatcttgggtatgtagcaatgtatgctctgacaatgtgcacatgttatagatctggaggaacctcagaactatcaagaagcgatgaactgcagagaaaacgagaaatggaagttagcggctcatgatgagatgatatcattagacaagaatcatacttggattctggtagaaagaccaaaacacaggaaggtaattggatgcaagtggattttcaagattaaagatggtatacctggtattgaaagtccaagattcaaggccagacttgttgctaagggattttctcagataaaagggattgattatcagcaagagtatctggagaaggtgttgaggaactttaacatgctggatagcagaccagtgttgacgcctatggggtctcacttcaagctgtcaagcataaaaccagatgacaaggctgaatgtgaagcagagatgaaagatacgccttatgcaagtgcagttgggagtttgatgtactccatggttggaactcga

SEQ ID NO: 11760 - DNA, 972 bp, Arabidopsis thaliana landsberg
acacataatccgtttagataacttggccttgcagtttgttttcccgattttctcagtactggaactgctggggtgggtgaggtctcttcttgttgcaggtccccatactacgtatcttcttcatcctcatggttaccactgtcattatcatctgcgtcattaccgttctgccctgtttcatcttctttgtcctcatcggttccaagccttcgaagttgtactgtgaacgatcctggttcattgtgagcttctccatctgttatgttccaagaccaacttctgctttcatcaaacaccacgtccctgctcacagtgattcttcgatttgttggatcgaggagtctatacgcttttgagccgggttctattccaaggtatacaaccatctttgatctgtcatccaatttctttaggtgttgagcttcgattttcgcaaaactgacacaaccaaaaacccttaaatgatcaacgtttggctttttattcttcaaagcttcatagggtgtttgattcttcagtgtttttgttcccactctgtttattaagtaagtcgaatgcctaattgcctctccccacagataattcggtacattcatatgcttcatgatgcttctagtcatctcaagtaaggtcatgtggcgcctctcgactactccgttgtgctgaggtgtatatggtgcagtaagatgtctattaactccttatttttcacaaaaatcttgaaactcttgagacatgaattctcctcctctatctgttctcagtgtcttgattttagctccagtttcttgttctaccaaagttttgaaacctttaaacttttcaaatgcttcgcttttctctctcaaaagcagtaaccacatgtacctggaacaatcatcaatgagcacaaatatgtaccttcttcttgcagctgtagaatgagagataggtccgcacagatccccatggattagctcccatatagacgag

SEQ ID NO: 11761 - DNA, 1090 bp, Arabidopsis thaliana landsberg
agaaagaaataatcagtaacaacaataggtttgatttttccccattgacattgacacagatggattatctgtatctagaatagagacaaccaaactgataaagaacaaagaaaaaaatacaaagaaaatgtgggaatcatataataaaatatatatgtgtgattactgatgatgagacataacaacaataccattagctgtcactctttttatttatttatttcataatattaaaatttagagttgcagaaaaaataacaatttacttccctttgttcagacgtttctttattcttcttccttccttcttctccttcttcttgatcgtgttcagaaatcatattcatcacctctctctctctatgtctctatatttggattctttataacatgtgagatcgatctatttttgatcagagacagagagaagactagaagaagcaaagaatatttcaagaatgatgaagatgaatacaggaacatcgccgtcggtcatcggcggcgggactagtggtaatgagtgggagtctcgacctggaggaatggttgtcaacgtcggacagatcagaactccgatgtgccacgtgtcattcgtgttcgggttaaatacgggtcggtttatcacgagatcaacatcaattcccaatcttccttcggtacaattttctgcttggccaatttggtaatctatatataaccaaaagattagttttttcctttctttcttaaattggattattgtaaacaggagagttgaagaagatgttgtctgatcaagtgggacttcaccatgaagacatgaaggttttgtacaaagacaaagagagagattcaaagatgtttcttgatctttgtggagttaaagatcggtcaaagcttgttgttaaagaagatccaatttctcaggagaaacgtctccttgcaaaaaggaaaaacgccgccattgaaaaagcttctaaatctatctctgatattagtttcgaagtcgacagactcgccggacaggtacttcaaaaaaaaaaaaacagagcttttttactctgtttctcaaagtcggaatctttggatttcaatgttctgaatatttttc

SEQ ID NO: 11762 - DNA, 641 bp, Arabidopsis thaliana landsberg
  unsure (1)..(641): unsure at all n locations
accacgagagacgcaactggatgccatgagtgagaaagaaagagcgggaagcgtgattgtcgaactcgcggccattgtcacactgcagggcacggaccgggcggtgaaactgggtggagacctaggcgaagaagtgtgcgagggtggtgaacatgtcggacttcaatcaaagaggaaacgtccaaagaaaatgagaaaagtcatccaaaatcaccaaatagtactgataaccagaaagactgagtacaggagaggtccagagatcacaatgaaccaggtcaaaagctttctcagctcgagaagaagaggtggtgaatgggagacgagtatgccggcttaacnnnnnnnnnnnnnnnnnnnnnnnnnnnnnnnnnnnnnnnnnnnnnnnnnnnaggctactggtaaacttggtcatgacgtcaggtccggnnnnnnnnnnnnnnnnnnnnnnnnnnnnngaggaggtggtggagacagggcaggaggcggagcgcaccagaggtggatggccggagcgtgtagaggggctcgagctgtcacagcgggcgaggggagtcttggtggtcagatcgtcacagagaaactagaggggtcaactccatggacaggagttgcagtggtgaatgacgacagaaagagat

SEQ ID NO: 11763 - DNA, 785 bp, Arabidopsis thaliana landsberg
acctacgcctacacagcccataaatccaccaccaaatccaccactccaaaatgaacaccttatgagaactcgagccaagaaccaaataaccaaacccaagaccaaaatgaacctacttgcaacaaaggatattgatccttatcggatcccgacgacggtggccgaagctctcaaatatgctcattggcgagaagctatgtcagaggaaatcaatgctcaattgcgaaacaacacttgggatttggttccaccaacgacagctcaaaacattatctcctgtaagtggatttttacgattaaatttcgtcctaatgtctcaattgaaaggtataaagcgcgattggtggccggaggttttaatcagcaatacggattggattattcggaaacttttagtccggttatcaagtctaccacaattcggttggttttggaagttgcggtcaagaaaaattggagtattcatcaggttgatataaataatgcttttcttcaggggacgttgaaagaggaggtctatgtctctcaacctccggggtttattgataaagatagaccaaattttgtatgtcggttgaggaaagcgctctacagtcttaaacaagctccgcgcgcttggtatcaggaacttaaaacatttcttttacaagccggttttcagaactctcttgccgacacctcattattcatttatcaacgaagctgcaatttgatttatgtgcttgtgtatgtcgacgacatcatcattgtcggtaccacttctcttgtcacaacgtttaatgtat

SEQ ID NO: 11764 - DNA, 852 bp, Arabidopsis thaliana landsberg
tccagcaaatggatttagtaagagaaaccatttctgcaaaacagaattgtaacagttaaaaccatagagatcaacatcagtgttgaatgatcaaataaaaaaaacatgattgttgcgaaccattccaaattctgctatctctgtcattatctcgatagactggtgttgcagaccatatgaagaaacctcctggcctaagtaccctattgagctccaacaacggtttcccacctaacaaattaaaccataatgatcattggaaccttgaagcaaatgggctaagaggaaaaagaatggaacaaaagaaataccatcagcatcccaatggactctgcaccgtgcacaatgtataagatcaaatgcattgctcggaaacgtgagctgttgtgttccaataacagaaagtgttgcaggtattcctcgttctaacgcaaattgaatctgagcttcatgttcatctttaggagcaaacgacattgtaatgacatctttatctaataaagatccgccaaagctagcaacaccacaaccaacatctaatacaacccttatgtttttcccccatttgatactcggtaacgcctgtgaatatgaaatgatttcaacacaaagatagatgctttctattcaagaaaaacaggggaaacagagctaaaaaagtgctgaccttttcgatgaactcaacgtaatgagttaccccgattttgaattgagtaccttcttcatgaaaaactagaaattcaccctcttttttaacccaaatttgttccttcttgtattcaacaagcttgggatgaggaacattgtcataccaaattctgctcatttatagaggaaaccacctttatttac

SEQ ID NO: 11765 - DNA, 583 bp, Arabidopsis thaliana landsberg
gcagatccccctccccgatacatgtcccggacgacgaggacaacaaatctcgttggccaccctgattcacccgaagatgggttcgctccatccccatccgacgacgcctaccacttcgcgacatctcaccgacactatgctttgacaccactttgcgccggcggtgctcctcggtcctcgccccagtcggaggatcgaacgcttcatgcccttcgagtcgcggcacagactccaccgcggccacatccaacacagcaaaataatccaaatcctcatccgaagactcttcagtccacgataacggactctcaaaatcacccccatcagacgaccaagacccagttcccgaaccagacaaattttcattaacaggcatcgcattcgcgtccgccacaaaattaacatcatcagtaggggttgcttgcgcatgccaaacgtcggaacctgcgcacgaaccaactttcagtatcacacaaataaggtgctaacccaacacccctaacacgatcccgccacctgcgaaggagcgatcggcgcggcagggtcttcggcagccgtcgctggagggtcttcgcagtcggga

SEQ ID NO: 11766 - DNA, 866 bp, Arabidopsis thaliana landsberg
cttgaaagtttaaagtgtaagtggttgacactttaaaagtttttatgagattttctacttttgtttttgttataatttgcattttcaaaattttggtataatgaatttgcattttcgatttgaaaatttaataaaataagttatcctttgctatttaatgaatacaaaaatttataaaactaaaagaaaatgaaattatttttaaaagagttgtttttcagattaaaaccaaaaacaaaaacctagagacgacctatatataagcgttagggttttcttctctctgtacccttaaactccgttaccctaaacctcaagccgtcgtctccaaagttccccctcagagacgaaaaaatgaagaccattttgtcctcggagacaatggacatccccgacggcgtggccattaaggtaaacgccaaggtgattgaggtcgaaggtccacgaggtaaactcactcgtgacttcaagcatctgaatctcgatttccagttgattaaagaccaagtcactggaaaacgtcagcttaagattgattcttggtttggttctcgtaagacaagtgcttcgattagaactgctttaagccatgttgataatctcattgctggtgttactcaaggttttctttatagaatgagatttgtgtatgctcattttcctatcaatgcttctattgatggtaacaataagagtattgagattcgtaacttccttggtgagaagaaggttcgtgttttgtctcttgtgtgtttgatttttctttcagttttggtgttctgttgttggatttgtgagtggtgtgttttgtgtgaattaacaggtgaggaaggttgagatgttggatggtgttaagattgttcgat

SEQ ID NO: 11767 - DNA, 769 bp, Arabidopsis thaliana landsberg
ggacacaaattcaccttcgaaaactgtggcggcgagaggacaagaataagaaatctgggatagaggaaagcgaaacggcccgtcttgaaatcagttcgattacgatggagttattcagagacgagtcgaatctcaaattcgatagctaaattagggttcaggggaagtttcatacatggatctgcaggacgaagaataaggaagattacagtcttacgagcagtggcagatttcgtaaatattaaccttttaatgggtatttcttgaagataaaacaatcggcctaaggcccatcgcgaaaatttgcacttactaatctgttttttttctctcctagaattaacaactgcgtttatgttctgcgttatagttttataaattgttaagaattatgagttgaaaatttaatctttgtttaacctcttatgagtagtagtaatagaatttataaaactattacagtaaaatctaaatttttcttttactaagactatgtacattggttacagtatttcaacactctctttttaccttttaaccctccacatcatcttatctctctttcacatcataatatgacaatcacttaatcttttactatctacaatggttttgtttaacaaaattacaataccctattttatcacttttatttcatatattttggtttctttatgttttttatttattatgattacatattatcaataaaaattaattatcaatcaaaactagaataaaataaggtaaatattaataattttataaa

SEQ ID NO: 11768 - DNA, 550 bp, Arabidopsis thaliana landsberg
cctcatccaaagatatgtctactaaagaacgccaaatcggacaagtgttaaaaatgaatccgttgaattgatttaaatccaacataatcccatttgagaaaatacaataagcaattgaataaaacgacgaggatgatgatatctatgatttgaccatggctactcctttttttccaatagatcctctctttatcccagttaactcatccaagagagaccgagtttgcagaaagccgactcagcgagtcaggcaacaagacgagtcagatcgggcagattctctcgagttggtgtgtctgagaaaaattctccttgaagtcagctcaaagcagacacggagaaatcgggagatcggaattaacggagccaaaattcttttcaaaaagctgaatctgaatgaattttttaatctctctcaagaaagctgattgattgttgaagaagcagaatgaaagaaagctagacttggccttcttctttctttgcagacgacgttctctaaagacaatttttttttgtttttctctctcctcgagcaacaacaatgttc

SEQ ID NO: 11769 - DNA, 979 bp, Arabidopsis thaliana landsberg
tatttatagttccttctattgaaatcaagcatcacggaaggagttgaaaaatatacaaacaaattcaaagaatctacgtaataaaaccatctccaatggttgcctatttttatttcctctaaatatagagaaaataatagagacttctattttcactccaatgattttttaaaaatagagatttctatttgttaaaaaaaaatgaagaaaaaatagagatgggttgaagtaaaacagaggaaaaaatggagtatagagacaagaatagatatgggttggagatgctctaaaactcaatttcactaaaccgaaatttaaactcaggtttcttatttaattctgttttttggttagggtttaagaacctgatgtgcgtgacggagtagctcagcagagtatgatggatcagagcgatggaaaacgatggatgcggcagccattgcggcagcggtttctccggcgagatccgaaccgggattgttccggtcaattttgtaagccctacgatcagtagtcatttcctccggcctttgccaacaataatggtccgacttaccatcccctaccttcacagttacaaaataattaccataaccaaattgaaattatgtaaatagttagtctaattaataaagaaagtgattagtgattagagtgttattattgttacctctccatagagaacgttaggttcagggtgggctttaatgaaataatcagttccccacttaacggcgtcaatggcatggccaagttcgccgttggattccagctggccaccgtattctatgatgctccaacacattgttgtcaccgtgaaagccatcggaagcccgaatttcacattgtctccggcgtcataatatcctcccactagatccacctgctcaaattttttcgaaaatgtaattaaaataaacataatgtagtactattaattaaacgttataaaaacccgccccctttgacgtttaggtgg

SEQ ID NO: 11770 - DNA, 876 bp, Arabidopsis thaliana landsberg
atctaactttattttttccatgattattccgggattctcgggaaaaaagtaccagagagtgttttgattctgaactttgtttgtttgattaatttttttccagataagaagatcatcatatcacgatgttataagagtgtcggagattcagaagtttctggacataacaggagttcagacatatgtgatcaacagtgctaaggttgtgttcttgaacgagagacctcagcctcgaccaggcaaaggtgtgatcaatacttgtgaagtctgttatcgaagcctcgttgattccttcagattctgctctcttggttgcaaggtaacaaaaaaaaaacgttttatttgttggatttgagtgaaaaaacattaatgtctttgatcttaaatgctttaggagttagttgtgtgttggtttggttgagagaattgagaaagttaaagaaattttctatgtttgggtgagaaaatgcgggaaaatcaagtatatcccggtaaaaaaactaacattagtgtcaaaaattttggtcggtaaatatatatttacttgtggagaaagttaactcaataaatattgtatagctattttggggtttatgtaatgaaccaaatactatttgaagaagaaaagtataaacttagttgaataggtaaactaactactattcaataattttccttattaatgttgattttgtaattagaccgtcatttattctttaatccttgtttgatggggattgaaaaaaaaagggattttttcgtgttgggtgggcgagaaaatgtggggcaatgatagcaacttcaagaaattgtgaagtagaaaaataataatagcatttgggttgacgagaaagtatgggagaaaattccaagtca

SEQ ID NO: 11771 - DNA, 1168 bp, Arabidopsis thaliana landsberg
gaccacctggtggaaatatcaaggacagccatacgaggtctctatgattaaacggatcttgatttgaatatgtagattgggagctatgacctctttcccaagataggtcaagaatgagggacacccgcgagcagcctactttggaaaccaattcccatcaaacaacacggaatcagacaaaaatctgtgtacccttggaaagatctcgtttccaagattctagaacagctttaaatgctcaaatccaaggtccatagccaagtcaaacgaagaagacacagtcagacaaacaaaaacaacttcatccaattcacaactcttctgtcttctattaaaacactttctcctagaaatctgcttcagacttctttttctcttcttcataggtcacaaatacttctccacactgaagcatacaccatggtttgaaaagcagaactgattcatcctctcttgatatgtaaacttcatagaccacaaaagaagattcaatctgttttgatgcagaacacaaacaaagcagcaaactaacccagtaaattctaaggattggttgcagtaacaacatcaatcatacgaagccataggagaaaacggatctggatttgagtttatggtttgaaagttatggccaaaatccacgacagatccaaaaacatgtcgacctgcgagagaccaactttaagaacaatttccaaacaatccacaaggaaccagaacgcgatctttatatcattggaaagatcttgctttcaggttttcagaacatctttcagaactaaaatccaagctaaatagcaactccaaattaacaaagacagagttgataaacgccacttcatcttcttctcattcttagccaatcttcatattcatcattatgatgctagttcttttccctcatgttgattatgtgtttcatccaaggataaattgaagctaggaaacacacaatcaacacagaccaaaggtgcttattaacccaagcaaaaactccacgctcctcaactgagatcaatctcaatcatcacctcttttaaccaagcaggcattcttctaaacagagaagacaaaacacaatctatttttcgtcaaccacttgagaaacagcctcttcttttttttgaacatgaatttaaaccaaataagcttaagagtagacacaaaa

SEQ ID NO: 11772 - DNA, 1053 bp, Arabidopsis thaliana landsberg
tcaaaaaatggaagattatttgaaactatttattccataaaacttatacaaacaatgggataatagacatatatattccaaaccatcttattagcctcactccgctctagttttagatcactactaaagttagaaaatacacaatgaggtcttttaatttttctctcaaccatacgaagacacaacttcttgatatcttcgagcatactaattaaaaaatatagcctcccatgtaaactccagtataactataatcccctgagccacacgacggggcctcaattccgctgcctggaaacttctcagcgatatctccagctgttctctgtcctgagccaccaccaaaaccatgcggatcatcctcgtctagattccacaagcttccccacaagtgaccttcatcgatcatagagtggtcggatgaggttgttgctacactttgaggcatatataattggtcgtcattgaagacactagtcgggtaatacaaggatgaagctatgttatgatcgttgtcgatattcatgtgatcttgggacactagctgagactgatgattctgagattgtgcttgtggttgtggtttaagatccacttgttgttgtttccgggatagagatttttttactttgtcttgcttcgaagaagatttttggtttttcttgtaatgtgttctccagtagtttttaatttcattatctgttcgtcctggtaaatatcttgcgattgtagaccacctatatatatattttgtgaaaatatgtaagttctcatgaaaggattgattacgtacaaaaactaaacaaaggtacactaatacaaatgtatgataataaatagttgacactcctgaacaatatttgagactatgatattttagttaaactttgaggtaattgtatcaatctattatctaggtttgagtttacaatttactagagaatttcaagaaaatgagaaaaaaaaaaagagtagcttacttgaaaccccaaagggaatgaagttcaaggatgattccttcttcttaggagtgatttgtcctctcttagccct

SEQ ID NO: 11773 - DNA, 1106 bp, Arabidopsis thaliana landsberg
cagcaattgagccggaaaaaaggtaacatgaaatggagatgttagtatacctttttcattgttttgttttctcccatgcatgcttgagaatttgaacaaattattatcacttacaagaaggcaagtcataagatataagtagacaagagaccaaagaaaagaaaatggctgggaggtcgttggggccatccgagttagtcgatgagagagctgaacgatacaaagggaaagtcaccggctttgtcattatcacttgctttgttgcagccattggtggatgcatctttggatatgacattggtgtctcaggttctataccattccctctttaaacacaatttgtagtcactacatgacttcataaaacacctcggatttttgtttttttaacaggaggtgtcacgtcgatggatgaattccttagagagtttttccatggtgtgtatgagaaaaagagacatgctcatgaaaataactactgcaaattcaacaatcaaggcttggcggcgtttaactcgttactgtacatcgctggtttagttgcaactcttatagcctcaccagttactaggaactatggacgacttgcaagcattatatgtgctgggatcttctatatgattggagctgttgtaaatgctggatctatgaaccttccctatgcttttttttggacggatcatgatcggttttggcgttggctttgaaaatcaggttttgtgaagaggacgttattgttaattaatgagaaaaccaaactataatctaatgatgcaacttaacttttttttttaggcagttcctatgtacttatcagaagtggcaccagccaatttaagaggtggtctaaacagtatgtttcagttggcaacaactcttgggatattttcagccaacatggttagttacgccacacaaactctcaagccatggggctggaggctctctcttggttcggctgcttttccggctcttctgatgacccttggcggttatttccttcccgagactcccaccagcttgatcgaaagaggattaacagagagaggacgacaagtcctcgagaaactaagaggaacaagagatgtcaacactgagttaaagac

SEQ ID NO: 11774 - DNA, 675 bp, Arabidopsis thaliana landsberg
gaagttctttacaacatcaacgaacagtttcaaaccgatgatgtcgatgttccattaaccaaagtcagaccggttaagaaagtagctctcgtggtcgtcaccggtgatcgtggattatgtggtggattcaacaatttcatcattaagaaagcagaggcaagaatcaaagagcttaaaggtctaggtcttgaatacacagtcattagcgtgggcaagaagggaaattcttatttcctccgtcgcccgtacatccccgtcgacaaatacctagaagccggaactttacctacggctaaagaagctcaagctgtggctgatgatgtcttctctctgtttataagtgaagaagtcgacaaagtcgagcttttgtacacaaagtttgtctctttggtcaaatcagaacccgtgatccacacgctattgcctctatcacctaaaggagagatctgtgacattaatggaacctgtgtggatgctgcggaagatgagtttttcaggttaacgacgaaagaagggaaattgacggttgaaagagagacttttaggacaccaacagctgatttctcgccgatcttgcaattcgagcaagaccctgttcagattcttgatgctttgttgcctctgtatcttaacagtcagattcttagggcattacaggagtccttggctagtgag

SEQ ID NO: 11775 - DNA, 473 bp, Arabidopsis thaliana landsberg
tagtttcgatgagagaatataccggatgttatccaagtaaatcgggctcagcaataatatcgaagatataatttccgttgggagaggaaaatgccttcaccattgttgtgtacatccatttggtgtacttcccacttcttaactaaccgcaacaattttcgataaacctcgaaccaagtactctgagcgtgctttataacgttcattagtttcactaccatcggcattgtcctttattttaaacacttattggttaccaaaagctttcttcctggtggaaaatcaacaatagtactccatgatatatcatggtttttacgatttttaatcatgatgtaagtattattttagaatctttttagtcttttccatgtctttgtcgatttaggcacgttttggcatactttgaagaaaattggagaatttggagctttatagctgagaaaaacaactcgagacacaaaccacaagtc

SEQ ID NO: 11776 - DNA, 1142 bp, Arabidopsis thaliana landsberg
atacacattactacattgaataattttataattttacatctaattttataatttttttttatgttttatgttatgtttattttctaattcataaataattttttttttttttggtgaggatatataattttgtattgtcatgtaaatttttgtttttgtatattatttaacatgattatttttatagtatgttttatatatattttatgaaactttaacttttatcattataagtaattgttgttacagtactatgaaagactataatgaaaattcaaaaaaatttaaatgtaaatttgagggtgtacagaggcaaatgtcacggagacacggaggaacagagggtcagttgatcttttggagcatttatgagatcgagtcaggcttgaatatctacacctctcggaaaccaattatgagatccctcgtaacacgagagacactcaaccggtgattggaaataagagttacgaactcgcgctccatcttgatggaagactcgatttctgcaaaagcagagccaatatctcccgtcctggagtcaatgttacactcaatgcggctaactaccgctctcagctaggtgtcgtagaagtaagcagtctctctaaacgaatgatttgctaccctactctcgaatcagccttcgcaagcacatggatttgtgcccgcaagaccgaatggtctcagaccgcctacgccgaagctgtccgctatgcacatgatctaggtatggactttacaacagtcgtcctagacgttaaagttggttcctccttgtggctattcgctcctatgatctctgatgatctcttctctctccgatgcccactccccgaggacaactacactgttgccggtgccgtcgtccaaatgttattccataaggccgccgcgaacaacgccgtctcagaaatcttcaatctcgcttctataccagatgctgactacggaagcttcattcctggaccccgcgaaggattcaacctctcagcctattatgccatctccaatgaaggcagcgatgaagtttcgaaatctgccgtttaaaactagtgatctcttgttttactacggaccctcggtaatatggggacccctttaaatcttaccaaatccggttccccacaggcaacttaacc

SEQ ID NO: 11777 - DNA, 610 bp, Arabidopsis thaliana landsberg
cttatgcaagaacacaaactgagtgaatagatgaaaacctgagaccaccacatcattagcattacaattctgtagttggacctctcaagaaaccgtcgtagcagagggaaaagaaacattacacccgcgagcatgttaggcgacaaataggaaacgactgctattataaatagagaaggtgagtgcatagcactcccaaaccaactcttgatagttctggcaaatgctggaggatctttccagctgtaggcgtaagtaacaggcagaataataacccaggcagcagcagagaacactttcagaatgtatcttagtttaacatgtagtgtcatgctttgatgagctttgaaattaaggatcacatcaagaacagctgcagaaatagttctagtagatgagctttcgtcactcaagtaaacttatgaaagtattgaacaattacattaaccaaccttgtccaagtttcattattgcagctgtgataaacacgctcagaactttcttgaatacatcagctccaaagactgaacttggttgtccgccatcccaggccataataatcatggccttccaaaattcatcatcgaaatcatattttatgagaatgtgc

SEQ ID NO: 11778 - DNA, 813 bp, Arabidopsis thaliana landsberg
atctaaatatttcgttaatgattgtagcgataataataatactttggctacaagatacaaaagaaaaatatacatactcaaaattcaaaaatatctcagttactcaaactttgatcaaatttggattcgagatggaaatgacgttgtaaaagttaaatcagtaacccaaatcaaattgtgctcacatcacccagttatcttcttcaaagaaatagttatcttcttcacctcgctttgtttgacggtaaatgattcaggcgatgagtttaaaacaaaaagaaatatctccacgcgcctattatttttattttgctgaaaaacgacgaaatccctggactatatagtccagccgtttgggctccgtggcgttgacgcgctacaagtgcgagtaggatattttattctattcgcgtcttcaatttgaaatggcacatgcgcctcacgtgcaattcgatttcaaaagcctattagtgggctttataggccctgtaagcatagtaaatatttgttgggctcactatttgtctagttcttacgctttcaaatattttcgagaattatgtgaattagctcacttccgcaattaaattataaccacactataaaaaactgaagaagattatcttaacgaattttcaagagggaaaaactcaataaattgtatttgtttaaaatttaactttcatatgatcttcgtagcagaaaaaggccattgctgttttttgagctcaatggcatgtaaaagacagtgatatcagagattgaatgttacaacatgacaagtgctgaagtgagatcaaaccaaaatcgagc

SEQ ID NO: 11779 - DNA, 780 bp, Arabidopsis thaliana landsberg
gtttggttaaggaggtcatcaacaaaaatgatgcccatttatgtgttgtttacttgaaactgttagccggttgctcgcttttgatgttatatcaaatcatgtctcaatgcttgacccttgtattgctattgcagatagaagatatccttgaggatgtggaggattctagcacttatctatacatctggggtctgaatccttgaagctgtgtcaaattatgatctttggatataacatgcatattttggattaccaaacactaatactgatattaatgtgttggagtcttcccacctcttctctaatcttgctttagatattgctcctcatgttcattataccattcaaggaaaagaatacaatatgggatattacttggctgatggtatttatccaaaatggttaactatagtgcaaaatatttacgaatttgtgactcaaaagaaaaaatattttgctgtacaacaaaaagcatgtagaaaagatgtagagcgagcattcggagttctccaatcacgttttgctattatcaaaggtccgattcgtttttggagaaaaaaatgtgttgcatgatataatgactacatgtataattttatgtaatatgattatcaaaaataagcgtaatcaattaaataaaaacatattttaattagtaatcttttacgaaaacaatattttaattaataccttctcgcaaaacacagaatttagtaactttttaaataaattaatgagtggaaaaaaaaacatgcaacttctcatgactaaggaatgtaa

SEQ ID NO: 11780 - DNA, 591 bp, Arabidopsis thaliana landsberg
  unsure (1)..(591): unsure at all n locations
aggcttttttacgttggtggaaaacgaggttttccaagattgctttgtagcttagattgcatgcattgcagggagaggaattgtcctactgctcgggctagataatatacaggtcgtagtggatctcctactataattcttgaagctgtggcggattatgatttttgaatatggcatgtatattttggattaccagacactaataatgatatcaatgtgttggagtcttcccacctcttctccaatctcgttcaaggtattgctcctcatgttcattataccattcaaggaaaagaatataatatgtgatattatttgattgacggtatttatccaaaatggtcaactatagtgcaaacttttctcgagcctgtgagtcaaaagaaaaaaaaattttgctacaaaacatatagcatgtagaaaagatgtacagcgtgcattcagagttcttcgatcacgtttgttatttcaaatgtccgtttcgttttggaaaaaacatgtgttgcatgacataatgactacaagtagaattntacataatatgattatcaaagatgagcgtgatctcaatgcaccaattcaagttgaaag

SEQ ID NO: 11781 - DNA, 1498 bp, Arabidopsis thaliana landsberg
  unsure (1)..(1498): unsure at all n locations
ctacaggatcccctctccgtaatctctgtttcccccagatttagccctaaaccgttactcttctctcccctgtctttccattttcccggaaaatttccgccaaggttttttcttcgtatagtcaattgttcttcttaatcgactttttctccggaaattctccgaatttgattcgtcaattttgggggattcattagttgtcagattcgtgattccttgattcttgcttcttctcgactccatcatcatcatcctctgtcggaatataaaatctggaaatagggagaggaagaagacctatttcctcagatttctctcctcctcctcctcctgatcaatatcttcgttgaccggaatctttctccagatgccacaatcgaattccactannnnnnnnnnnnnnnnnntataaggacgaagccgtcgttattgtttatctggatccgagtctctttggtcaatctctggtgattaatgggttttgttttattatttctcggcatgattctcacctttcatggcttccttcttgtccaatcacaacaacaagttcaaccccaacctcaattacaatcacctcctcctccgccgtctccgcttcagaatttatcaccgccgcagcagcagcagtttatgcaatctcccccatttccccctgaatctggtaatacgcaacctcctcctctggctccgcctcagttcaacacgcctcctcctccgtcaaaatccaccattaacattatgactcctccgccgcctcctcctccacctactccttctccacctccgccaccgatttcaaaaccccctcctcctccgcgtgctcaagcttctcctccgcattctaataacagagaatcccatagaaaccaaccaccaccacggcggttacgtcccccatctcctccacctcctcctcctccttctcgggtcttcaaacagtcagagaaaagtggattaaacacagggaaaacagtgggtcttgtattcgctgggtttgcagcaatgttgcagatatgcgttgttgccttcttggttttcaaaagaaagcagcttctaaggatgacacatacttattgaatttggaagacacattttattgaannnnnnnnnnnnnnnnnnnnacacacttttgagacgaggatctaagaaagattgattgctgcaatgatgtttcctcaaagtcttcatcagcctttttcctctgtaaatgggtacattctggatttgacactttccttctttttcttcttctttgtattctgaatttttttgttcttttaagggagtgtagtttttcatttacatgcctaacgatgctaactagagagagggaacagagagagttggggaaaagtaaaaaaaaaagaatggctcaagtcatgtaaaactgttttagggattctgtgagatgatgaaaccgatatctaatttcaatttgtgagttcgcaaatgtgtgttacgttctctacccttttatgatcatggttgacacaat

SEQ ID NO: 11782 - DNA, 578 bp, Arabidopsis thaliana landsberg
  unsure (1)..(578): unsure at all n locations
cttggcctttcccgcgtccttcttctccttttccttctctgcggtgagctacgcacggcttggtccgccgcgtcctccgggaccggtggccgggcgggtttaaaaatcctcaacccctggggacgaacaaaaatcccaacagtaagaatcaaaggcgtagagaactcggcgtaaaacagaaggaggatcggacacttaccagggacacatacccacggtcgggatgcatcgcgggctggctaagggccccagcatccagcctccctaccgtacctgctacccgcttgaggaggtcgtcggtggagagggaggtcgaggacatccgcgagccctccaaatcgaccctcggcttcatctccgcaagtcgcagccgtcgctctgccaaagggagcaccctccgacgatggatagcggcgatgaccccgcagcggtaaggccccatctcgtaacttctacaaggcttgcagaataggctggagcttctcctagttctcgcgcgtggccccaacgccagnnnnnnnnnnnnnnnnnnnnactcgttgagaaaacggtggaaggatccgccgtcgttcggagat

SEQ ID NO: 11783 - DNA, 460 bp, Arabidopsis thaliana landsberg
  unsure (1)..(460): unsure at all n locations
tgcccgatggactcaagaacgctggctccaccttttctcgcctcacaaagaaggtcctcaaaaaccaagtcggctgcaacattttcacttacatcgacgacattgtcgtcgcaagcaaaagcaaagaggaccacctagtcgacctcgtagaaacattcacaaacatgcgagacgcatgactccggctcaaccctgagaagtgtgtcttcggagttcgctaggggaaaatacttggttacctagtatcacactgagggattcaggccaacccaaccaagattcaagagatcatcaacatggcacctccgtagtccaccagggacgtccagcggctgacannnnnnnnnnnnnnnnnnnnnnnnnnnnnnnnnnnnnnnnnnnnnnnnnnnnnnnnnnnntcaaaacactgcgtggtgcaaaagacttcgcctggggcccagagcagacagcggctttcgaa

SEQ ID NO: 11784 - DNA, 1311 bp, Arabidopsis thaliana landsberg
gtcgactctagtaggatcccccctatgatcatcaccatcaccatcatcatcctcataatcatcattgtgaatgtgatgatcctcttcattaggttcttggagtgcaagtaaaggcattgaattagggttttgccacgagtaaaaattcgaagctgacatagatcttcctctcctccttaacttattagcaataaccaatctcctcctcttgtgaaatggattctcaactttctccaaatccttcgccttactcgctgcttccattaaattaccaaacgatttcgatttcccgacataatgattcgataatcctctcctgaaaattaacaaaaacaaaacaaacatcagtattcagaccatacaaaaccaagaactaacttgaactataacaaaatcccaaatcataaattttaacttaagggtttcaagatttaaccaaaaccataacactcagattcgcagatgagacttgccaagaaaagtataaagatcaaattttcagatcaagaacatagtaaaagacaattatagatacattcatgagtcaaaccaaaccaaacccaaacttacttaataggaagagagtcttcaagagaagaactaaacgaatcaagtgttcctcgttggcacgaaacggcgtcgtcttcttcttcttcctcctcgttttcactgctttctccgatagacgacgaactatccgaagattcctccggcgacttattattattattactcatccttaatccaatcccgatctgtgatccaccacgtcctgattcatcagccaagaacagagccgtttgaacagccttatcctgcgccgaaacaccgcgatgatctctaacgtacgccgccatgcccattccaaacgacgaaccaaccataacctccatataaacttttccgattaagatctctttctctagcctgtgaatataccctaaagactcagatgatcataaatcgccggcgatgtgcgtaggtgaagagctttaaccagcgcaggttaatgatataggaagagagatatacaaaagaaggtgaaatgcaaaacaacactgaacgagaaaaatggaataaattctcatttatatttataacgacaatatcgtataaaaatacgattacgtattgaatacgaatatttatacgtatttatgagtctggaaacacatgttcctaaatatagaatagtcctaggcacgctaacggcgactttgacggtatagacccggtcttgctgacgtggagagttttcattggtttaagtttggacttttgccggacgtttcgggttactgtctccggtta

SEQ ID NO: 11785 - DNA, 1034 bp, Arabidopsis thaliana landsberg
  unsure (1)..(1034): unsure at all n locations
ttctcatcccatgtccttcttgatatgtttgtaccatggctttattttaaactacaatcacactccaattacactcctcgacttcctatgatttcattaaattattcagtaaaacaaaatcgttaaaaaataaaataaaaacagatcctagtaaacccgaattctggacttgaagctgagagttacccattaaattcaaaaattcaaccacaagaccatcttatttcactgacatatgtatatgtgatttcttacaaataatatatagaccaatatttaggtaaaattattattcaaaattgagaaaactaatttgccaattactttccgatttatgtccagttaactggatcggtaactaggcctctcttttttactatctaactatatatattactatattagaaatatccgctagtagcttcatctgaccgccgatcacctcacgctgcagccacatacaattcaacataacaccgttattacaagtttccaattttctgagttaggggttcgaaatatacttccttttgcaaattcgttttttggcaaaattttgtctgtagtaaaataatttgatgagtacgtaaattttccttatttcttaaacctctttaattatatatatactagaattatgccactgttatgcagagttaattaaatattaatttataaaatatattaaaatattttgagaatatcaaacatatgcattagtgttataaaaacaaaaaatttgtatcaatattacaaaacaataataaaaaaacaaagaaacagtttttaattatttaaaagaacagctttttttttttgtgtaaggagtgaaagaaaaaagtttgtttggagattgtagagatcatgtggatgtggagaataagaacagcttttaatttttgaaaaggaacagcncatttcctttatttcctttttggttcgccgtaaagtgttaaagaaaaagaagaagtataagagttgaatttgagacttatgccacatgtcaaacagaaaatgtatcatttattgaaaaa

SEQ ID NO: 11786 - DNA, 540 bp, Arabidopsis thaliana landsberg
tgtatctattacaaaaaaattatacccgtcggatatccatatacccgtacccgtatgagtagttttatcagtcgcgtaactcgtcctgctaaaaaagatctcaaattataatattttgatcactcaaaatgtcaaataaatacataaaaataaattcaatttaaaatataacaaaccatatgattacataatttgatagttaaataaacaatagccgaagaagtgttttattttaactaagattgattttattagataataatagtggtatagtacgagtatattttatccacagttatgcgggtatgggtagtacacatccgtactcctgtttacccaacgggtcagatgttgttgcctattaacgtacacacgggtatatagaaatcatttcatactcacatatttggtaaaactcgtcaggtatttggatactcattgccatgcatctctagactgaaggctgtaacagaacgatctgacctgacagcctcacttttctcatgtccggtggggtggccttgtcgtcgagatcaatcg

SEQ ID NO: 11787 - DNA, 432 bp, Arabidopsis thaliana landsberg
gaccctgctaccgtgatggcggtgacttacacctgcaggaactccgacgggttcgatgttccgtcgtacttttccggcaggtgcgaccggaacttgggtggccatgatgccgcgcggagatgatccgcgagagcagcgcagcccacgccggccaaggggacgcccgtttgggaccgggtgcccattggtgtctgcggtgtaacgcaacgaagtcttgatcgaggttgtggccatcgatgttttggcgacgcttgcgcgcctttccaaggagacccgggcatcctctcccgcacgcctgcggttgagttctgcctggaggtcattggtctatgcgccccttactgagggcgagcgcacaaatgctgacgcctcgtgctggcgtcgggatgaccgtgtcctcgatctggttgaggtagaatgtgccataccgag

SEQ ID NO: 11788 - DNA, 845 bp, Arabidopsis thaliana landsberg
gagagaaagagacggctcataggttcaatggagaaagaggtggatcgctcggagaaacaaggtttgcgttcagtagtggagtgaaacccattggtattagggttttcgagaaatgaaatggtcgcaatttaaggagctgtgaagtgcaagattgaattgcattttcatgatgattctaaatgttttagatgatattattaaagctttgaattttacagttcacataaagtgaataaacgcagaaaaacactttggcaaatctgaatttgggaatggatccatgtaattttaatgtatgcaattggttttgcaggtacaactggtatatacaggtacaatttgaagaaccaaaaacagtttgaaagaaagcggaaaagaaacaacaaaacagagcatagactatatatagttaaatagagcagaactagaaatatagtaacaaactagaattatgcccccttaatttaaaatatattaaaatattttgagaatatcaaatatatgtattagtgttaaaaccaaaaaagttgtatcgttattacgtcaaaaaaaacagttgggggacaaagaaacatttttttttttttttaaacatttttttgtcacatattggtgtgaaagaaaataatttagttgaagattgtaaagatcatgggaatatagtgaagaaaaatagttttatttttaaaaaaaaatattctttttttgtcgtaaataaataggtattaaagagaagaagaagtaaaaaactagaatttaaaacttatgtcacatgtcaaataaagaaagcctcacttattaaaagtgaccgttgatttaggttaattaaatttctacttgtggtt

SEQ ID NO: 11789 - DNA, 877 bp, Arabidopsis thaliana landsberg
attggtgttatatgtttatacttcaattcaacaatatgccatgatcccagtagcttccgagaactgacattcactgtttatctgatttctgagtttttgtcttttgagccttatgtgtaacactttgtctgttttaggtgggtgcggaaactggaactgaaggtacagaaacaatagctaaacctggcgttgtagaggagacgggtggtattaagcaggattgaggccgagtcttttcttcaataaaaccttttgtatttgtggatatgttttggataagagaagaagctgaaagttgaaattacctgatgtgatactgataatgaatgatgtacgttgaaaatgctacgtaacagataattttcttatatgtttacttctctctctctctctctctctctctctctctctctctctctctctctctctctctctctctctctctctctctctctctctctctttttgtctagaatctttttgcatgtgggagatttcgaatttctcagtaaaactcggatcactctctgctagttcttgagcttaatgcgttatatgttgtctcgtaaagtctaagttgcattattagttttatggtaagtttagttttagaaacacttaaatttagatttaaccacctaaactttttcaagcaaagccaaaatcattgtcttcttgttagttgctataatatcccttcgttttcttcaaaggttgttattatccattgtgaagagtttggaacaagaaatttttaaagattttgtctattgcgactactcgatatttgatttcatcatcaaacattcaaaatctagtgatgaccacaagtaaatattttgtattgtcatgttaaatcttaaatggagagttgaaa

SEQ ID NO: 11790 - DNA, 728 bp, Arabidopsis thaliana landsberg
agatttaacatctcagcactaggtatcttctcccatcgaactcttcctctcttattcgctccttcccctttgcagtttatctccgcaaatgtaaaatatccctgatttttttttcatgtaatataatactatcgttaatttatatctaccaaatatgtaacaaatgcatacattagaagtaaacgagaaggagcatcacatactcttggccttgacgatgccaagcatcccatcctctacgttcaataatgttggacatgctggtttcatagaagacaactctagagtagcctcggtaagctcttcccaataatgccctaccacttccttctatcacgcaattattgaacacaaatccacttgggtcttccttgctttctctcccttgtgcggttatgtatcctgttaacatttgttctctcttcacctttccctttgttgccactcttttcacgtgtataatgcagttctgcatccacatacaaacatatcttactccccttaattgaaaaaatacaaatttaaatctaaccttaaattcttaagaacgagttttgtttggttcgttcgaccatgatcgatttaggcttgaaacatgcacgatcaggatacgtatatatcattatatctctatatttagcatgtatatgagagaaatatgagattacttggtatatagattggcctctttcccaaatgaaatcgatggatccttcgatgttacagtt

SEQ ID NO: 11791 - DNA, 685 bp, Arabidopsis thaliana landsberg
gtgccattgggtgcaatacttaggctgagggagaaagtcttataggttttaaagatggtggagatttagatcattttctgcacccacctctcccctaaccagctcctccctagtggtcaaaatctgtcatatcaagcctgtcaccatcatcaatagtaagtacttcttctgattatacccaaacttgcccctgacttacattgacattctttctgatctgtccattgctattgctcgctgaaatttcattgaatgcgcttaggaaataattaaggatgattttaaacataagcttacaagttttcttatgtattgccacaaaatgatacaaaacataatcttacaagttttcttctaacgatatagtgtgtgcttttcctgtcggtttcttcatttggtatcttttcttcctagaaaaatgcattttagggattggcaatctctgtaagtaataccttaaaatttgctatatatggacttaatcatgatgtgtcaaacaagaaatttacacggtcataacaaacccactctgcatctttttcttttacactattggaccactttacatcttttacttgctttaataatctctcaggacttttttgaaagattctcattttcagcggcaagctcttagggttcattgccttccgttttgtttagtggttgatcatagctttaatcg

SEQ ID NO: 11792 - DNA, 747 bp, Arabidopsis thaliana landsberg
tctctaggaactaaaagataagtaagttttggcgtttaagaaatatgattctattttagattaaatatttagacatgtattatgtagatgtagagaggcgtgtgcttctacccaaatatgtgtacattaataaaacttttctcaaagaaaaagccagattttgtggtctaaaagctttataaatatagttcctcacacaaagcataaccttacttcttcttctctctctctctttatctccctcaatacacacacacacaaacacaagctttaatatactctcttttgatggctggaggagagaaaagaagaggacttagtaaatcttgtgctcttctcatagtgattgccgggatagagagatatgcatttaaaggagttgcatcaaacttagtaacatatctaactgatgtggtgaagatgagcaattcaagagcagccacgactgtgaacacttggagtggcttcactttcatgttgcctctcttctctgctccttttgccgattcttattgggacagattcttcaccatccttgcttcttcttctctctactttttggtaattatttctataccatcttttattactaatcaagagtcatttccttgtatcaatcatgttaatcaaaaggtccctttcctttccttgtttttacaagttgcctttttcgataaaattgtcttataacaaaggagagcaaattgaagcccatcaacttatgttttgaacgagtttttttgactc

SEQ ID NO: 11793 - DNA, 977 bp, Arabidopsis thaliana landsberg
aaaacacatcttttgtgaaacagaagaagcatggattaattcgaaggaaaaactatttaataaatacataaatccacccacataggtgtggtgacaaagatatagaattccaaatatggaaattaatctctgccattagtggaagttaattctcataacaccgaaaagctaacgattttcaacttttttttttgttactcagaagattttaaacctttataaatacgaaaaaaccaatctcacaaatcatcaacaatcaccttgatctccactctcttacatataaataaccaaataatttctctcccctcttctctctacacacatagacaataaacacataaagacagattctaatggatttagaacagaagacatgaggacttagcaagtcatgtgcccttctcataggtaaatgatttcctctcttctttttgttcgtttgtttcaaagattcaaaacttcactgaaactaaagattgaacttttgtttttcttgtataacgtttctctgtgtgtatagcgattgcgggaatggagagatatgcattcataggagttgcatcaaacttagtgacatatctaacagatgtagcgaagatgagtaattcaagagcagccaaaactgttaacacttgggctggtttcacttctatgttgcctctcttctctgctcctttggctgatacttattgggacagattcttcaccatccttgcttcttcttccgtctactttgtggtaagtagaatcaagtgttaactaagtgctgaaactctcctccaccgtcagacaataacggtcaggcggtgagggaatgttgcttttatttatcttattttataatcgcgttgttaatagaaaaggttatattgcgataatgtttttggccttctatttaacgtaatgtttatgcttgattaagcagtcattaagggattaactggtaatgggtattaacttgtgcaagaaaaact

SEQ ID NO: 11794 - DNA, 1334 bp, Arabidopsis thaliana landsberg
cacactcgccgaaaaaaaaaaaaacaagaatgtcgaattctccaatgttttttttttttttctaatgaaaagaggaaaatacgcaatgtagtcaattatagacaattgtttccttttcttgaagagagaggctgccaaacagattaattcaccatatagaagatgagaccaaaaaaaaaaaaaaatctacaaagtcaagggcactaaatcataaaaaacccaaaatctcagatctatcaagaaaacgactattccaaaaatggaaattataagaacaaaattctttggacagagatcaaacaagaaaggaacgagaaaaatgaactttaggtaccttagattatccaaatttgtagctgcaaaagttgttcctgtgttcaagaaagaaagacctgtaaaatgatctggatgtgtttggttatatatataagaagacttaaaagataatgacttaatctcgtaacgagtcacacggacgtgacgctgaaactcacacacgctggtgccacgtctttgtctttcctcttttgctctacttttttctcctcataggtgataggtcccataagcaatgaaataaaaaaaatggtaattgacttttctccaaacattttcgaatctgattttctttttcaaggttttataacctctacattccagaatatgactaatgacatcattatccaattattttttatactgtaaactcattattatgaatattctttatttaaaaaaattaccattgatttataagtttattagtataatatataacatatggaataaaacttttatttaaaaaaaatatttttccccaaaaaaagtaggattaataacctgattaataaataaaaagtgttatatttttaagcattgtatgcatttactttatcatagttgtcttgtttttaagagttaaaaaataatgatgaacaatttcacgaacaacgattccacgataaagctttccctgcaacactcagatcttctagagacggttttgcattgcgttttctgggattcgaaacccaaacatgatgtacaagtattaatgaactcttagttaaccactagattaaaaatattttcactattatttttctcttaaaaatattaataatttttagaaaccaaaaattatagttattttattttaataaacgagaaacactacaaaaaaagttaactgcatttagataatttaataaactaaaatatccacataaacatttcaaatttatcaaaaataaaacatcaatttgttttttgttttaaattaaagatttgctctttagagcacagaggtgacaatgatggggggggcggggggg

SEQ ID NO: 11795 - DNA, 846 bp, Arabidopsis thaliana landsberg
tatatatatgtgcgatatataagcctctcttttctcgctctgtgttaaaccatcctctcctttctctctctagatttttatcccctttccctctctctctctctctcctagggttttcgtctctctcgttcactgttaatagtcttaacggagaggtttgattagcctccgggaagattctactgcgaactttggacacatctctctctgccatggcggctgagaagttaagggacttgagccagccgattgacgtcggtgtgctcgatgccactgttgcggccttctttgttaccggatctaaagaagaggtgcttcaatttctctgggttttgacttgttcaaggggctcgaccaatgattagtctatttcgcgggtctgttttattgtttgagcgtcttcttctcgattgggtgtgaggagtaggaattaggagcgtttcgttgttagggttttagcactctgatacatctttgtcttaagacgcttgtttcgggcagctcgagttttcaatttggatttttagggtcctagagttttagtaatgtattgaattacaatggtttagttgctcactgagactcgagattggtgaattaagtcccttgttcttttgtcgcttcactgtttccaatcatacttgtaatttttatcctctgtctttgagctcatctggcagtgaaatagcatcacttaaaaagataattttgctatgattgtttaattttctgattaccgaatctcgtatttcttatacttctgcttcaatgtcaacattcacctcatttgtattttagtttttaccttgaactaatcggcattgcttccgaaacatgttcagagag

SEQ ID NO: 11796 - DNA, 607 bp, Arabidopsis thaliana landsberg
tataaaatcctcaccgatcgcacgtgctatgtcaccaaaacaggagaatatcggtggcttcactgatcggtgcaattggttgctcgacaaatctttcagaagctgtgtcataatcccatcgcaataaggtaaaatcttgtcctccaatgctctgcagacatccccaacaacaccaacagtaacagcacacacttggtattcttcaaagttttgaagacccatctccaagtacttgtaaaactcaggcatgtatttggcaaaattgggacctgctgcataagcaagagcaccaatggcaagcatggcttcctcatgtgcagttgcacttctacaaccaaacaccctcaggaaaagtcccatcatttggtctgcatactccatgaacttagacttggttggttcagatcctaatttctgtatgatgacctgcaagcatccacatagaagtccctgcaactcgttttgtttctccctctcatccaatgaaagcttttccccttccaaagtattgtgaagctccatcattatcactggtactaattgcagaaccatggtagacgtttcatcagttgaacacctgacaacttcattcaatgcctcatatgct

SEQ ID NO: 11797 - DNA, 904 bp, Arabidopsis thaliana landsberg
gccacttgcccttcacatttctataattacatttcttctatttcctattctctaatataattcataaaatatatattatgtgttgaattagtgtttctcatagagatttgaggactatatgttaagttcatactaagaaaatgtttttggtatgtttttgcagcgtttctctaaagtagaatctttggtattcggaaaaatgtcgtttctgagtattgttcgtgatgttagagatactgtaggaagcttttcgagacgtagtttcgacgtgagagtatctaatgggacgactcatcagaggagtaaatctcacggtgttgaggcacatattgaagatcttattgtaatcaagaacactcgttgggctaatttaccggctgcgctattacgagatgtgatgaaaaagttggatgaaagcgagagtacttggcctgcacgtaaacaagtcgttgcttgtgctggtgtctgcaagacatggagactaatgtgcaaagatattgtgaaaagtcctgagttctaaggaaaactcacatttccagtttcgttgaaacaggttcgtggtttcgttattcgttacttccattcgacattatgtcggttattctgacaactcttttgatggtgaagcccgggcctagggatggaatcatacaatgttatatcaaaagagacaagtctaacatgacttaccacctttacctttctcttagtcctggtaagttattcgtctttgtcgatgttactacctctgcttcagtaaaatttggactcaaaatttagtagaacacacatgtcatacttttgtttaaattcaatacttatcaagatcttgaaaatatcaagaactcgaattttctctattatttagtttttgaatcttgtcaaatttgtacagccatacttg

SEQ ID NO: 11798 - DNA, 665 bp, Arabidopsis thaliana landsberg
taactttatggtaattatgaaagtgataacgagtcctgaggggagaaagagcatgctgaaactagcggagagaatggtgatgagcttctgtaccggagtcggcgcgtcaaccgcgcatgcctggactacattgtcgaccacaggatccgacgacgttcgggtcatgacccgaaagagcatggatgatccgggaagacctccaggcatcgttctcagcgccgctacttctttctggatccctgtagctccaaaacgagtgttcgattttctcagagatgaaaactcaagaagcgaggtaattaatactcaagtcataaagaggccctttttgaaaaaaagatcgatatgttacttattcttgagttcaatttttgcagtgggatatactttccaatggaggcttggttcaagaaatggctcatatcgcaaatggtcgtgatcctgggaatagtgtctccttgcttcgagtcaatgtaagtaatgttcttgaaatctagtagtttctgtataaccccactgttgcttgtgttcaaagtctcaacattttgtttgtttaaaaacagagtgggaactcagggcagagcaacatgttgatcttacaagaaagttgtacggacgcatcagggtcctatgtgatatacgcaccagttgatataatagctatg

SEQ ID NO: 11799 - DNA, 527 bp, Arabidopsis thaliana landsberg
  unsure (1)..(527): unsure at all n locations
gattcttttgtttgccactacaaaagcacaattatttcttcgaataatttattatgaaaaacaggtttgcagagatgtggaaagagctgcagattaaggtggcttaactatctaaagcctgggattagaagaggcaaattcactcctcaagaagaagaagaaatcatccaacttcatgctgttctnnnnnnnnnnnnnnnnnnnnnnnnatatatatgtaacattannnnnnnnnnnnnnnnnnnnnnnnntatacttcagtaatgattaaccactctgacgttaatttatatgttaagtgatatttccacaaagtttggagattaatttgaatttttttatttgggatcttcggaaacaatattaatttatctttttttttttttttttttgataaaggacatactaaatcttgttattcttgaaaaaataaaggtgggcagccatggcgaagaagatgcagaatcgaacagacaatgatatcaagaccattggaactcttgtctcagaaagacttcgagaaaggg

SEQ ID NO: 11800 - DNA, 587 bp, Arabidopsis thaliana landsberg
cctttctctttcaatgtccgttggtaaaagacgaaagtttcagacataacatctcttcccatctctctccctctaagcaattaagcagacaagacactgatgatatgagacgaagagaaagaagtcttatcactcatcgtttcctcttatgaatctctccgccgaccaagctcccgtcaccgccgtcgacgaactagctccgccttctcaaccgcatcgcttatctacatcatgtgatctccacccagaagagcgtttctccggtttctgtccttcttgtctctgcgaccgcctctccgtcttagatcacaacgccactccgccaccgtcttcttcttcccgaaacctccctctatctccgctgtttcgttaaaagctctcttcaagccctcctctagtggtaccaacaactccaacggaaacggtcgggtcagacccggtttcttcccggagctccgacgtacaaagtccttttccgcaaagaacaacgaatgattttccggagggtttgagccacagcgtcagtcttgtgacgtcagacttcatgacgaccaaagaaaccctcccatcaatgaagctgcctccgt

SEQ ID NO: 11801 - DNA, 803 bp, Arabidopsis thaliana landsberg
caccttataccatttgaaatgaatatattggaaaattgattcaacccatccagccaaaaattgacatcatatactaatgataaaaaaagattgtacgtctctttcgtgcacacttttacagagggatgagttgaatgatgttcaactttgttttgttcaactcaaaattttccaatcattccactatatgtcatccatttgcagaattttctaaatcatatctcatcttgagatattaagtaattcaaaaaaaaaaaaaatcgttaagaatattgtaagaaggagttataaagggtctcttaaaaaacatctatggacccaaaaacaacctctttacatttgtaaatcaaaagatatgatacaacgttcctaaacacttggtcaaccaaactcctttaaaaatagagaaagattttttagttaaatccgcagcttgggcacttcgaacatatttgatatcgtgtctattgttatctaatgcgactgaaaagaaatgatatcatcaaaggaaatgaaagatcaaagattcagaattagattttccgattagttgttttgcagattcaagatctagaatgctaaaaagaattagagtttttggtgagtgattgaatgatctacacaactgttggtgttaaacaaattgtgttagatattttgatagttagaaattggttcgtaacgaatacgttgtacgggtaaaattgataaataaatcatttatattaattaaaaaattataaataaaaagaagcgttttttcaaaaacaatattcattctagctttcaagattggttggagt

SEQ ID NO: 11802 - DNA, 516 bp, Arabidopsis thaliana landsberg
ctcctgatgatgacgacgacgatgatgaagacgatgatgaagacgatgatgaagacgacgacatggctgcccatctcagtctcagcccggattgaggctgggccaggggcgtgcgagcttgcccccgagcggactggcgccgtcggtatccggggccgggacgtcggggtcccggtctgaagaacgggggcaggccgagggggtacttgaccccttggccgaggtagttgaggtgaccccagggagtcaggccgagccacctgttccctaaggaccgttgcccgtgccgactgcgcaagagggtgacctcgggtcgtcgtggctgcgcatgggcagtccgcccctctggtgcctcgggcgcccaaggcaacgatggtgccgaagccggcagcgaggctgacctcggtggtaccttcggggatcgaggctcgagagacctcccacaggcacggttgatcgtggcccggagtgggtaagtatcttaggatatcttcgtcctggctcatccttcgtgtg

SEQ ID NO: 11803 - DNA, 945 bp, Arabidopsis thaliana landsberg
tgaacatggatttttatgtttccagaatacccttttgagtttcattgcagaggaacaacatttaatgggtttagagaaaacaatgcagtgtctgaaacagtagaagagttctgtaataaaagaaggatgcagaagaagagtgatgatttgaagactaagaagaagaagaaacagagtgtttctagggtttgtagtagaggacattggaggatctctgaagatactcagcttatggagcttgtttcggtttacggtcctcaaaactggaaccacattgcagagagtatgcaaggaagaacaggtaacgacaaaaattgaaatctttaatcttcccttagctaattccggaacatgaaacttacaatgttttttcttgcttctttgtgttttgtcttaaaggaaagagctgcagattgaggtggtttaaccagttagatccgaggattaacaagagagctttcagtgatgaagaagaagagagactacttgctgctcatagagcttttggtaacaaatgggctatgattgctaagcttttcaatggaagaacagataatgccttgaagaatcattggcatgttctcatggcaaggaagatgagacagcaatcaagttcttacgtccaaagattcaacggttctgctcatgaatctaacacagatcacaaaatcttcaatctttctcctggtttgtctcttcttaccttacacatatgcattgagtttaactctgttattgtaatgagatactttcgatatttatcactcaggaacaatgaacttatggtttggtctcaaaagtagtcagattgcaagtttggtgagtctttaagtttcatggttctgtgtgttcttgcaggtaatgtagatgatgatgaagatgtgaatctgaaaaagtgcagctgggaaatgctaaaagagggaactactaacctgaaagctcagt

SEQ ID NO: 11804 - DNA, 144 bp, Arabidopsis thaliana landsberg
caaatctaccttcgactaaaaatatttttaagaaagttattaaaccaaataaaacacaaccattttagagaaaaaaaaacgtttccttgttcaaatcaagcttttcttcacttggcactggcgagctgggagcggatgagctta

SEQ ID NO: 11805 - DNA, 771 bp, Arabidopsis thaliana landsberg
ctattgctggcatgttctcatgagagatgatgatacgtgttctctttattcatgccacaaattcatttatataaatataatctactattcactattaatctattattaatacgatttgatttatttaacatttgcatgcagaaatatgataacatttgttgatatttagctatatccggtcatatatagtttgtaaatagaaatatattatttgttttcattttatttgtttccattttaatttattttatactctctatatattttcaaataggtgtatataaaatttaaaattatatgactataaaatataacctttgtgagaaaaaaaaaatataactttctagtttcctaattaaatatttatttgtctattttgcaaacaagattttctttctcattacttctatccagctcttcattttgtttcattttgtttatataaggttttgcttagggatgggcttacggtttttcggtttggtttcgattcagaatttttggttttacgattttttagttttattaaaactataactatatagaaaccatacataattcgttttggttacggttcgatttttatagttttattgtttttcgaatttataaatattgaaaccatacaaaaaccatatatatctcggcttggttccggtttgaacacaatttttttgggtattccatatttttacgaaagaataagtagttaaatataatatatatctttttataattaaaattttggtttctaaattactaacaagatca

SEQ ID NO: 11806 - DNA, 1108 bp, Arabidopsis thaliana landsberg
  unsure (1)..(1108): unsure at all n locations
ctccagctaaatttaaaaacccataacatatacaagagatgagaaaagaaaaggaaaaaaaaaaatatctggaaagagtgaagtaatgagaggagatggaaagctcacaggagagagcagatgcagaggagaaataagctgccttagaactgtgaagacatcggtcgcaggcggctgcagatgaggagaagaggagtacgactgagaggaggaagagaaagccttgcagcattttcttgaaattgaagaataactaaaaaaacaattataatgttaatgaggtgtgtgggggatgcgatgaatagagaggagaggaaggagagagtgaatcaaatatataaatagtgaacagaaaagaatgaagaagaagaagggaatgggttccagctcagcatcacagcacacgtcacgtcatatatagaagcagctggcacaagggtaggcgtgttcattatttattgagttgagagttttgagtagtaggaatgtgtagtgtgtgtctagcctataaatcatcattccaagtaaaaaggaaaaaaggtagtgtgaaagctagagctaccaccacattacccaatagtctagggtgaatgacgtggcattgcaccgactctctgctctgcctcacagctgggcctggtactacatattgatgtcggtcggtctcttgttttctcaagtgatttattaccacacactctatctagctaattgtgttcctattaatcattcatcggacatgttaaactgttgatttcagtcaatgatgagatcttcaatattcagcagattggtagctaagaaacatccatgtgagaacgactctgtcacatctacggcattcattactacatgtgatgatatcttcatacttctccctctcttgtttaagaccctatatcaactgctgatttctttcaagttctaatgatggataacagatttagagaaacacccatgtcttgttgggtttaggctcatgactagaacaggaagagtaaacctttggttcctctctttttttagtggtggggctgtaaagaagccaatgacgtgagcagcattaacanaaccatcaagtttacccaatactggccttttatgttat

SEQ ID NO: 11807 - DNA, 1105 bp, Arabidopsis thaliana landsberg
ggttctatcgttggggacgatgataaaggcgaggccatttccgggattaggatttttcgggcgaggactaatgaggaaatataaagaaggggggaaagagtagacagaggaagaagtagaactaggcttaaaagggactggattgatgaaaatggctcgaccatgagagaatgggacattgtcacggctcaatccaattgctcctgacttgctcataccatcaggctctgaagcgtactcggcgtctccatggaatgtcatcagatcagttccatttccgaagtaaatgaagtcgaaactgtaagcagaacacgttatggcgtgagagcaaaacagagcaaaaaacagaggaatgaaacagagtgttttgatctgcaattctgtttatttttttcttggatatggaaagtataagaggataacaagatttatatagtgaaagagagccaacaaagtttgactcgacaagatcatttatttttcacaagtaaagatctcgtaacacctttcttggtaaatttcataaaaagtcacaaattaaaaagttcaacttttggaacattttctaaattatgatatataactctgtttctacagctttcttataataaaataatatcacattacagggaagctaaaacgtgaaaagatttgattctatgatgatatataatctttgaatcaataaaatacaattatttttcactcaaaatacgccgtgttaaaaggtttcaggcaaatgaggttcggtttgatcatttacttttgcctcactgatggatcaacggctagaaacagatgagggatgattggttgcgacttgttggctcgaagcttcgtcagcttgaagtttcttgactcgagccttatcgattcgtgctcttctcacagcttcttggatatgtcggtcatggtctttcaacacttgatccatgtttcctgatggaaccactaacggtcctgagtaatgaatcttgtgcccttttgatccataacccaactgcaaaccaaaccatacaactcagaatattaacaatgctagtcttctaaaattagcaaaggagggacgtttagggaactgacgagaatagggtcattcatgttg

SEQ ID NO: 11808 - DNA, 498 bp, Arabidopsis thaliana landsberg
ccccttggagatccttgctggaggcgcgggcgtcgaggaggaggcgatgggcaaaggtgagggaggtaacaggggggtctgtcgcagcggggcagggggtcggggaggtagggcaacacgcagggcaggcgcaggcggggaccggagtggaggtaggtgaggatggtgggcgtttggcacggacgcaagaggtgctgagaagcatgtgatgtagtggggcttgcgaccgacgatggtctgaaggcgtcggtatagatggccaaatgggtagtgcctaacgggccggcccgaggcacgacccatttaatagtgtcgtgccccctgacagtattaaaatggggcccgtgctatcccgacccgagaggcgtgccctagttggcgcggtgtctcggctgtagtgccgggccagcctaagatgattgatttttattagtatgttgagcacttattttgcatagatgtataacacctattgactattggcacaaactttcatag

SEQ ID NO: 11809 - DNA, 897 bp, Arabidopsis thaliana landsberg
  unsure (1)..(897): unsure at all n locations
tcaaagaccaaggaagagtacagaggtaatttcaggtttgacaaaaggttgttcaaccaacccctggttaaagaggcaattcagcaggcctggaatggaaatcaaagggtcgggggcatgcaggttttggaaagattgaaaaagtgcagatcagctctaagtcgttggaagcaggagaataacagcaacgctttaactcgtaattctcaagctagggcaggtttagatgtggaggaatctggaaggtagatcaggtcatacccggtttgtactctgaaaaatgatctnnnnnnnnnnnnnnnnnnnnnngacaggttccggagtcagaccagcagagtcaacggatgcatggggggcgaaaaaacaattctgtctgccatgcttcagttaaagataagagaggtagacagcacatttgccagttatgtgcacaaagatgaagtgtcaaaaggggctatagctgtatcctactttaaggatctcttcaagtcttcagagggaagtaattttgctgacttgtttgccggttttcagccaagggtaacagaggttatgaacagggtcctcaccgccactgtctctaagaatgaagttagagatgcggtcttcgcaataagaagctcaagtgccccgggggcagacggttttactggacaatcattggactccaagtcactcaagaggttcaaaagttctggacaatcattggactccaagtcactcaagaggttgcagatggtttcttctttcagaagtactggacaatcattggactccaagtcactcaagaggctcaaaagttctttctcaatggttcctttcccagggaatggaatttcactcatttgtgtttgctggccaaaaagaagaaaccagataagatgactgacctaagac

SEQ ID NO: 11810 - DNA, 1434 bp, Arabidopsis thaliana landsberg
gaatcatatatatatatatatatatatatatatatatatatatatatatatatatataagaaacttctttgactcacaatgtaatgatcttaccatgtaatcttttaataataaaaatgagtcaagtcaagcaatgagtcaagtcaagtcaagatatttatcaaaacgaaattaataatgaaatatgcataaaaggaccacgaatcagaaaagagttaacaaactagccatggtatgagtgtacaccatcgctcttcgattacaattactcgtatacccatttaagcattttatttgttgaatgctatttgtttctggcataaccgtggggattacaaaccgggatgacaaatagagaaagaatgcgaataagcagaaaatgttaggatacctattctataagaaaacaagaatttgttgacaaaagaaagaaagttcgctaaaagagttatttagtgtctcaaaataaagagatcattgtttccacaaatagctagcatataatcatcaaaaatacaagaatgagatatttacaaaaaataaataaaaaaaattaatacattttatcacaacacactagtgaactaaaatccatagacatatacaccatcagtgatggtccatccccatgcgagtggattacaaatatataatttaacataagtgtgtaaacggagaaaaactaggtttacaagcgttttctttttttcctaagacggaggtgatgttgttgaagtgttacgttggaaactgtatgatgacgaaactctatcaaaaaagacgaaaggatgatgaaacgcaatggttaccacaattatttcagattttaagaatgagataattttataattaaaaaagaaaaaatttatgatgatgttaagtatcggttcttaaagtgataacatcgagttagccaactttcgtatatgtgatatgaagaagaaaaaaaatcgaatcatacgtatgttttcgttacgacacctaaaccaagttcttttctgtgatttcttcttatgaactaaatcatatcataaatttaaaaataccttagaaatcttataattatattatattatacgactgaacgatacaataacacaatgcatattgtttggtgtatcaccaattgaattgcttttggtatttctgaatagaagcgacatataggtaaagaccatcaggattgatttgccatagacaaaaaccatcggatctgcatcttgatttgcctctattaagatcaaagatgacgaaactactctttcttgctcccgatgagatgtcacaagtccatttaactgatcggtttgtgtcaaacccaaactcggaactctgaccttgagatacaacagcagaccaaatatctttttgtggcgagatgcaatttatggagatcggattaaagccaggtgcaaggttgttgcttatctttat

SEQ ID NO: 11811 - DNA, 2217 bp, Arabidopsis thaliana landsberg
gatggctactatattatatataattttgttcttaacgtatgaaataaatataaaatcgtcaacttacatagattatttagaagtcaatggttaaatatctacttcaacgtattcctcatcggaattcgattccaacaccttgtaaaaagggtcaatggcacgtaaaaatagttcttaattaatatctatattactaaatttttagtattattttaattgaaattttcgtggaactcaaatcaaaccaaaccaaatatataaaaatataaaaaaagtgatgttccattcgggtaaaaaacgaagattattcatggatgttgagttatacagaggatatcagagaatcggactaaacttaacgaatgggaaacaagatatgcacgaagccattgatgtaagtgtcctatttgcttgagtgatgtttccaagtagtgattataactaactgatatggttctattctcttatagtgttacaaagagttcaagcaagggaaacatggggacatcggaaaggtcttggaagggccaaaccagtggtaagagtttgattgattgttttcttttgcatctaagtttgtgttaaaaaaatattataacgaaagggcgacaagataaataaagtgtgtagatgcacatatatgaataagaatagtgaaacgatcgatagtagaatgatatatattaactgaatagaggctaaccaaagtaatcataaaacatttaaaactaattttaatagattaatgacgttttaatttttgtaaatatatatatatatatatatatatatatatatatatatatctttgaataacccataataaatgacgaaatcatttatctctttgactatttatctttttgtgtattttttgctacctcttttttgaaggccaggaaatcctcaagagtacaaagatttaatggaggagtatattaagctgtgcacaggtgtgtttttaccccttttttgtttatcagtaaaatttataagtttctaatttcatttcattgtctttctttcttttagatctttctagaaatatcttaaggggaatctcattagcccttggtggatcaccttatgagtttgagggaaagatgcttagagaccctttttgggtaatgcgtatcattggttatccaggtgtaaaccaagaaaatgttattggatggtaatcttttactaccaccacttttcatttcaactttattatcaagattcatttgtagtgacttactctgcgttttctctttttcacttacagtggagctcacactgactatggtaagtaagcttgaactcaaatcaagttgataatattcataagtttttattttactcaagaccaaccataactttgcaggcttgttgtcacttataaatcaagatgatgacaaaactgctcttcaggtattattggtcttatttggtagctaatatttttgtcaaaactactaaacaacacatcgtggaaaacccgtaattaagctaagctatatgaagagcctaatgggtattgtcgtgaaaaacagggtaattgttaaaacttgcgagacatacaagttatagataaaatgaactaacataactacgattttgccatccctcatttttgcaaatataagaggatattatttgcctatctagtgcatattctctctattattactatgatcatttttataatttttatgcttatatttgaaaaggtgagagacttggccggcgattggataccagttattccgatccctggatcatttgtctgcaacatcggtgacatgctaaaggtttgtttcgtctcacactttctgatctttcttacatttcaactagtccttaaaatgttttttgagtcatatatgcagatactatcaaacggagtttaccaatccacactacataaagtaatcaataactctcctaaataccgtgtatgtgttgcattcttctacgaggtactaaaaacttgtaatactctttgtattctcctcttttggatttggattcatgtttatctttaatatatatcttgaatgaacagactaacttcgaggcggaggtagagccacttgatatctttaaagagaagcatccacgaaaagaaacatctcaagttgccaaaagagtcgtctatggacagcatctgattaacaaagtcctgacaacctttgcaaatttagtgaaaacagttaatatggttgatgggct

SEQ ID NO: 11812 - DNA, 844 bp, Arabidopsis thaliana landsberg
ggggctaaaaatctgattgctaatagccagagtctccagatgtgcaaactcatatcattatagagcaactatgatacactgcctaatgcatgcagtcatcaacaagaatttgagaaatttctaccctacagcaggcaaagaacatgcagagcattgtaaaaaagaaaattataaaatgcaggaacatgactagtatataagccttaagtcttttcctggaggaacctaagagtttagaaagatacctctttatcacccccttttgtcccaaatacacctttctttcgtttatgcggaacatcaccaacctgaaagcgacaagaaagataaatcagggcctctgcatgtcactgggaaaaaccccgtaaattaaaccacactcatatgaaaagcaataagaataaaatagtataattgtatataaataagaaaaggtgggactacggttaaatcacgcagagtgcagacaatgaactacgccagggtttattaaaaataaacaaagcatcttgttaaaaatcatagagcattggcagtcagacaaaccttttcaagaatgccaaatacaatctcatacaattttgacaaaagctcagaattgcctgatggtgaatatgtcagagctttcaaagcttgcagtcgtcgagcatgaactgaagaaacacatatgataaggttagaaattcatctccagtcacattacagatggaaagttggaaatctatcttagatgttggttctcacttccataacccccaaattatttaaatccataccaaaactgacaccacatctaaacataactaccttttgacgtcactctcagcatttgggtctaatcaaa

SEQ ID NO: 11813 - DNA, 459 bp, Arabidopsis thaliana landsberg
tgttcttgcttcccctagctagataggatccatcattaagttctgcggtagtaacatctaacatgagcaatatgtgtgcatcaccaggggccgctagggctaggcaagcccatggaggagatgctcatggctggaaacgccgcgaatccaaacccaccgccagctgctgcgccctcggcacccggggcccagacccagaggggtggtggcgctcctcctcccgctgcgggtgcggcacggcctagggctggcgcgaccggaggggcggcgcggcgggcacggagcggcggccgcggccgacgaaggagaaggcgctcaactgcccgcggtgcaactccaccaacaccaagttctgctattacaacaactacagcctgcagcagccgcgctacttctgcaagacctgccgccgctactggaccgagggcggctcgctccgcaacgtcccggtgggcggcg

SEQ ID NO: 11814 - DNA, 997 bp, Arabidopsis thaliana landsberg
attgggtttgattcggttgcaagtactgcagaggaggtaaattttggaatccatgctcttattgcaagtttatgttcttttgaggctttgtattagtttcttttaagcactttttcaagtttcaagcacttagaggtactgaaaatgcttttaacatctatgcgcaggtgagaaatccccaacgggatttaccgattggtattggtcttgctctcttgttatgttgttctctctacatgatggtctccatagttattgttggtttaattccttactatgcaatggatcccgacaccccgatatcctctgcattcgctagtcatgacatgcaatgggctgtgtaagcatatgatcgtttaagatccagtctgtttcatcgtcttagccatgtttaggagattgattgttttcatttggaaattggatgtagatacttaataactttaggagctgtcatggcactctgctcagctttaatgggtgcccttctccctcaggtaaagtttctcaacacaaatcaagagtcaatgttagatactgatacagaggacaaaacgttttaatctcgagtcagtgatttacgattaaatgtcagaaaaaattatgtgtttttcattggtgtgttcttgttactgaatacaactatttcattttccagccacgaattctgatggcaatggctagggatggtctgctcccttctattttgtcagacattaatagacgcacacaggttccggttaaagcaacagtggcaactgggttgagtgctgcagccttagcgttctttatggatgtttcacagcttgcaaggatggtaagacagatcgttttgttttttcagcccattgaacacgggaaccttttcgccatatggactgttattaagtatttgaggctgctgatggtgcaggtgagtgatgggacacttctggcatttacaacggcggcagtatcagtgttgatactcagatatgtccctgcagatgagcaacct

SEQ ID NO: 11815 - DNA, 334 bp, Arabidopsis thaliana landsberg
ttctcaagtttcagcacaagacggaaatggatgccaggcttctcctacacagccaagagctcacaaccatcacggtgagaggtaacatcgatttcaacccacctaatgaagaacatttcttcatgtgatagagcacgcccgactagagaagctccagagaatggagagagggcttagaatgcagaaggggctgggagtgacgtagttgaggagttggcttgggagagctactgtgcgagtaggttcggttcttgggaaccgacaccagcgccgagggtgagtaagcgtctatatgttccgcgctaaggaggttgcgtctatgggtgcctgatgg

SEQ ID NO: 11816 - DNA, 1226 bp, Arabidopsis thaliana landsberg
agacccctaaaaccagataattacaaacgtgttaagaccacaatttgaggttgtaagttgtaacatttgttttcttggtgttagtatataccttaaacctgggtcatttatgcagtgagtgaggaaccaaccctgagagcaaccatatcccgagtatataatctgcaacaacaaaatgttagctttctttcttgatataaaaacaaaagtcttagagaaaattatcattctcaagagaatttggtaaaaccttattggcgatagggccatttgcaaggtaaggcttttcgttgcgcaaatggtgaaaaccgtaagccacttgagcatccatgcctatactaaagtaattgtagaagacaccttcatagccattcgtcgatggaggcatctctccctctatctccaaattctgcaacacaaagattaactaattgaaaccaaagactaataatcacaaaagaatttcaattttgtgtatcaatgaaaatcaaaacctggtcaatgtaacattcttgtgtagcctttaaagaataaggaggatccacaatttcaccagaaggcattgtaatcagaatattccaactacatcaatatttcaacatcaaaagattaagcagagagctcaagaaagaaattgttcatatcacgctttttcgcagtactaattttacctatctaaacggcttataggaacaacacttgctctatgaagtgttcgttttatcgcagatttccacgcaaatgggaatgaacctccctaataaaaccaacataaaccctaattagaacagagtattttataagattaaagatacaaaaaaagacaataagatctctttttcacccatccgaaacttcttgaaagatcgtttcccgttccgagtggcattatcgaaaccggaggaacgggtaaccggttttgtaaattaagttcaccgagacatcctagaacccaaccaacggttccatctccacctgcaacctgtaatgagtgatcaaaccagtggcaataacaaaaaaaaaaaaacacattttcaaatctttgattgtagatcaagcaatggaaaaaagtaccacaattctcatcttttcacgaatctctttagcacattcgtctcctcgagacgcaattgcctctcagcatcccaatccatatcgaataaaatcaataggcttcacttccgttaaatcatacacctgttcttcgctaatcagattctggagac

SEQ ID NO: 11817 - DNA, 806 bp, Arabidopsis thaliana landsberg
aatcattctctctttcttctctcctctgtgatgtgaggtttcgaagatccttctctgattcctcatcaaactcagatcagtagcggacccaagtaagaacacctaattagggtttctttttgttcgtgttccatcggttaatctaataccagattgagttccattggtacttttgttgttcctttcggagataatacgattcatggtcgatcatattttcaaggaatgatctttgctattcttaggattcatattatttgatcaatgcgtttcttatattcattttcaccattcaggatcatctaccaatccataagtttcattagggttcacattgagacttgagctagagaaaacatgtttttgtagctgcttgagaatttgttcttgtgtgaaacaattggttccttgtttttgatttattgcagataggatcaaagcaaacgaggtttcaatttagagtttttttaagctcaaatctcggttgcttcggttgaacttcttgatacactgtctcgttttgagttcttgttaggtcattcctttagagagatatatggcagaggtgaaggatcaattagagattaagttccggcttaacgatggttctgatatcggtcctaaattgtttcctgatgctactaccgttgctacattgaaagaaaccgttgttgctcagtggccaagaggtcagtgtctatgctcttactctgctttacatgtcttgatgatattcatttatgcaatgagataaaaccgcgaaaagctttatcggtctggcgatttctccatgactaggggggttt

SEQ ID NO: 11818 - DNA, 703 bp, Arabidopsis thaliana landsberg
aatgccgacaaacattaaatcaaaccaaaatcaatattaattaaacacaactaataataataaacctaactaataaacataaaatgatactaatgacctcggaacatctaaaagactcactttgtttctgggcttcctcttgtgcgccaagggctttatccatatgcggaaacacaagaagaagaaggagaaagagagccatggaagagaccatagaagatgtcatcttaatattccctcttattttgcttatcagtgccactcatacttatgcctttatataggctagggagatgtcaattaaagaaatttaaagatatgttggataatatagaaaggctaaaagacaaagaagattaggaaacctgtggacagtctagcgatagacttaaagcttatagccatcgacgacttagttgtgtgtatcacttatgagtctcgaagttttggtagtattattcagtgaaaagtcttcaatcaccaattcgccatgcatggtttggtttgtgggacaagtgcattgcattggattctcttcatattatttatctttttataaatttctagtatcctatatttactacgtcatattctgtaattagtttaggggagcattttttagattagaactaaaggagcaaaattttcccaaacaattatttacatatttcataggcttttttttaaaaggttagacgacaat

SEQ ID NO: 11819 - DNA, 790 bp, Arabidopsis thaliana landsberg
ctttcccgcgctcctgacacgcgccttgtgatgaatctcggccgttgattaagagtttggttgagatgaacggactaaagttacgacaagggtacatgtcggattgccacgtggaaaattttgtggaaactttgccacgtagcagtgccggtccaaaatataattttttttcaagaatattttattaaacataaggttacaagacctaaaaatctattaaaattataaagatcagagagtaaaactcaataagaattcattaattttacaccgaaagcgaaggaattttagcgtttgtactctatccaaaaatacgtgtcaaactgaaattatgattgcaacacgtgttgaaaagtcatcggaagtgtaccgacatcaaccaccgctgttgagctccaattccggcgaagaagatatcgacgataaacaatcgcacgaaatcccttttgtgttaccggaaaattttgaacaaagctctaattaaaaggtacagcagaaagggaattgtaatatgcatcgagatactttcgatcctttaacctaagatgtaatctcttgaacatatgcaaattaagttttagactggaatctcttcaattttgtgaaattgaaacgattcatgcaacccacaagttgcacaaaagagacaaattagatggatccatcatgatagataaataccaactcatatccaaacaattattgaaatataaaagcataaaaagatcggaagaagaaccgatccacgacaaggaaagataaaagccagccaactctagaagaaagcaga

SEQ ID NO: 11820 - DNA, 1326 bp, Arabidopsis thaliana landsberg
aaaaacccgagaattagccttcactgatgctgatacacatatgagagtttttgtatgatgcacaaaacttataacgtcacaaaaaaaaatagacgtctcaaagaatatagtatgatacttttattgatcatgaagctaataagtcgcgatcttgtcctaccagcctctatagtcactaagaagaaactggactccataataacgaaacaacaaactcctgagtgaattagagaagtcaatacctctaagcacttaggcccacaaaacgaagaagctgaaccaaaagattgaaccttgtgagcttcatcattcaggcataactggtgatctacaaaaggggtggtaaaatttaagtgagatcaccattggcaatggaatttcatttaaagggaaaccaacctcaataagggaaacaacttacatcttctctcacacatgccgcaggaaagtaatgatataaaattcccgtccttgccaccagaagccacagctgcatcacaaaacttgcatgtgcaatttggacaatgccaatcacccgaaggaagcacctacaatcatagcatgatacaagtatgtaaatacagaaaagatataaagttgactcgaaaccaattaatggaaagaaacattaaatggtcaaaatacgacttcgctgcaattacatacctgcataccaaggcagttttgatgatatgttgatggacaaccatcacagcaaatcaaatctccaccatcaccgcatataccacaagcatcatcatttggatcatccccgtcagtgtccacttgatggagagcaagattcgtagcatctttctgcatattccacgctctgacttggcattgaagaagagaagcgccagattccagataaatattttggaaaggctgacatgacttgctcccagcatgaatctcaaacctggagactgtaagtattttactgcagcaatcacaatgaatcccctctcttgttatccatccctccagcatcacctttgcacctcgacgcctcatgtattgcactttttgtcttagttggacaactccagattcaatcaaccaagagagcaatgtcctttttccagagtatggattgaacccattaatcgctggattctttttatccttagaactacgcaccaacaaagtacatcttccaatttttttggtttttcgtccatgtagataatgtgaatctgatccacatgatggccttgcattattataatataatgatcttttacttttcttgtgtaactcatcccaatcggctccatttcttccctttttggtggatttcccacccagctttatggatgaacg

SEQ ID NO: 11821 - DNA, 945 bp, Arabidopsis thaliana landsberg
attcgatttccagcagaatccataaacttagagatgaagagttgcagccacagttgatacagttaattcacgggtaaatcatctctctatattttgacatctttttacagattaagctgaaaaaactgatattttgtgttttgaaggttgataagaatgtggaggtcaatgctgaggtgccaccagaaacagtttcaggcgatcagggagagcaaggttcgatctctaaaggcgaacacaaccttacaaaatgactctggctctacagcaattcttgatcttgagatagagcttagagaatggtgcatcagcttcaacaactgggtcaacacccagaaatcatacgttcagttcctaagcggatggctcacgaaatgccttcactatgaacccgaggcaaccgatgacggaatcgctcctttctctcctagccagatcggtgcaccgcccatctttatcatttgcaaagattggcaagaagcaatgtgtagaatatctggagagaatgtgaccaatgcaatgcaaggttttgcttcaagcctacacgagctatgggagaagcaagaagaagagcaaagggtaaaagcgcattctgagcagcgagatgcagagtcagagagaagtgtggtttcgaaaggtcggtcagagagtgggatatcagctttggatgatttgaaagtggatttagattcaatgaggaagaggctagtcgaggagagaggtaagggtaaagaaaccattaagcttgtgaacaacgcgtcttcgagcagcttaaaagctggtttagttcccattttcggggcactgagaaaattcacatcagaagttgtgaaagctcatgaaattgttaggcttcaacatcctcagacctcctctagtagagagtgtggacttaccacataaagcaccgttttgaagttttgtacttgcaaattagacatggtc

SEQ ID NO: 11822 - DNA, 716 bp, Arabidopsis thaliana landsberg
acgggctgaaattagaacttcagtttatcatagatcttatcatcatgagagcaggacatagttttggttttaacttcattataaataaaatatttgatattttctctcagggcaagtcaactaaaattccgattccggttccaagaaaaaataaaaagaatttaagaaaatagagccataattaccaaggagtgagagaaataagaagtactgatttgattaagatcctcagtgatgctatcaaggtgaggccgccacgtggacactgacgccgaccggctatgtttccgacggtgacgattctctttaccggccgaactcatcttctccgacaacataacatcttccaaatatttctcacacaacgtcaaacaatgaccatcaagatccttattagtactcacatgatcactattaatatcgttgccgctttcaagaggctttttccggcatcggagctcttttctcttctttgttttcttcttctccggcatagaagtatccgggataagaaaatagatgcttccacgcttaagctcagattcaggagacaagatcaagatcttacgcacaactccttgagaacaaggtttgcttaagacatggttaggattcgcctgaagaatctcgccggcggtcattggactagtgatctcgtcgacgtggccgttgagatgtacgatacggatcaaatctaaagctccacatggaagtca

SEQ ID NO: 11823 - DNA, 1102 bp, Arabidopsis thaliana landsberg
ccaggttgaagaattgtagattgagaaccttaataaatcttttgttcttgctttgcttttttaacttttgctggggtgggtcttttggtggaacaactaactgaacgttgcttctgctgaatcatagtttgaactggcaacatcagctttgcaagaatcctaggcctaacccggatataaaaacactatttgttgaccatacgtgtgggcatcccaatggtgcacacactccttcccctacaactaatcatttaatgggttcagtccctaaagttggaggcttcccaccattaggtgctcacggtgtaagttgctctaagattacagcttctgttggattagtttttagcacatgaatttaactttgctagtttgtatgctcttgttcagccatttcagccaacaccagctcctcttacaacatctcttgcaggatggatgcctaatccatcggtacaacaccctactgtttccgctgggcctatcggcttaggtgcccccaacagtgctggtaatgttgtccctactaattttattcttctgaaatatgtgtgttggagatttagtttaccaaatattagcttatacggttatgtaatttgccatcccttgtttagatcatcattagttggatggttatctgtgcttctttgactgactgaactgcatgaaatgatataaatatatttactgagttacattttccagagctgtagtggtaaactgtctctcttttcttttacggactaaagcagtttttagtggttaactgcctctatggtggattagagagagagagagaactatatgctcatatcagccgttttgtttaattgcacactactcttgtttatagatactcgatggcgaagcaaacattgaatttaatgtcagatagcctcgaagtgctgccttatggctgaaacttatatttatcggatggtttgaagacccaaacgtggaaacctacgtgtgggtgcataccatgtgcgttatgtcccttcaccagttactactcatatttgctcgtgcggtggctataataacaacatcggcgtcctaacaatcctgggcctaaaaccctattgatggaccattaaac

SEQ ID NO: 11824 - DNA, 1392 bp, Arabidopsis thaliana landsberg
  unsure (1)..(1392): unsure at all n locations
ctctcagggagtgcggatgttccctaattccaatcaccacgaagaaactacacaagtttccatgtcgatgccgggtttccagtctcatcattatgcaccaggaggaagaagcttcatgaacaataacaataactcacaacctttggtaggagttcctatcatggcacctccaatttcaatccttcctcctccaggttccattgtagggactactgaaattaggtacccactagtcatcatatcatacagaaactctttctacattttcatagttgactaaagacttatttttgtcagatcttcttccaagccaataggttcacctgcgcagttgacgatcttttatgccggttcagtttgtgtttacgatgacatatctcctgaaaaggtatctcaatcattttcttccatatatgcatctcttttactcgtaaggtatggtactcatttgctttattctttcatttctcaggcaaaggcgataatgttgctagctgggaacggttcctctatgcctcaagtcttttcgccgcctcaaactcatcaacaagtagtccatcatactcgtgcctctgttgattcttcagctatgcctcctagcttcatgcctacaatatcttatcttagccctgaagctggaagtagcacaaacggactcggagcaacaaaagcaacaagaggcttgacgtcaacatatcacaacaaccaatctaatggatccaatattaactgcccagtaccagtttcttgttctaccaatgtaatggctccaacaggtaaaaaacaaagtcagagacctgatactacattcgccatctaacttactagtattttcatggatgtaacttcattctcgttctgtttcttatgcagtggcattacctctggctcgcaaagcatccctggctaggtttttagagaaacgcaaagaaaggtacgcaacacttctttagaatacaccattcaatagtttcttgagctaactctctttctcgctgtgggtttttcagggtcacgagcgtatccccatattgcttagacaagaagtcatcgacagattgtcgcagatcaatgtctgaatgcattagttcttctctcagctctgcaacataatttcatccacagtaagaaggttgctttagaccactccacatccatatttgcatttcaatggcggtcttttcaatgtctcagttaattttttctcactcgctacactgagtttcttcttagctttatatatacgatagtgtatactttgtttacatgttttttggtggaatggaacttatgagagcatatcagatgtgtncttgggaaatatagtagaaactgtttgtttcatttttttttaactctgttcttttgtatatatcactgaaactcgcatat

SEQ ID NO: 11825 - DNA, 554 bp, Arabidopsis thaliana landsberg
aggggctttcacaaacaatcaggaactcggtttaagttcggttggtttgacaggttcaacaaacttgatgtatgatcgatgaaagtttttggtttaaatataggtgactcggtataaccggtcagagaaatgggctggagggcttttgatgtaccagaaccgtggtgaagatacgccacaagtttggtcagacaggtacccacttaagtagtaaattgctactgaattggttaattgactaaaagcttttacaagtcatgttactttgtatacttaaacaagctaaaattaaatttctttttcatccttctggaaccaccataaggtcattatggccagaaatgtatgatctttggtgatgtaattatccagcgttataaattatccacccattaagaacagaacaaattgattcacatgaaatcgttagacaataataaggatagatcaaagccatccttcgactaaaaaaccctttataccttcaacatacctataacgaagggaagtcaatcataacaaaaagaacaagatgatccataccaaaaagaagc

SEQ ID NO: 11826 - DNA, 687 bp, Arabidopsis thaliana landsberg
tataccgatatacatatatcaatagaatatgcacaacatttataatcagaaaagtctacacatgacatttgaaaatgcacagtgtcgaataagatgaagcatctggtttaacagactggtaagtctttctcgaagaaaggtgaaatcccaagtaccgggttcgattcgaagaaattgaccggtttaagttcaaagctagatgctattgttggcatcactggaaaatcttcttggcacggtacgtgatggaaccctagtgtataccacaacactatgtccttgttctcaatggaccgatctctgtttcatcacacaaacagcagttaagataaagcttatagttaaaccaaagacaataggagcaattaagtatggtgtacctgtcggaccaaacttgtagtgtgtcttcaccacggctctggtacatcaaaagccctccagcccattgctctgaccggttataccgagtcacccatatctaaaccaatagatctcattcattatatacatttaagtttgttgaacctgtcaaaccgagcttaaaccgagtacctgattgtttgtgaaagcgcctcgaatttgcggtggatcatcatgatcgagcaaacttgcagcattaccaccaggtacaagcttgtaaccagccgggttccctaaccgagaaagtcggttagggttcacaagatg

SEQ ID NO: 11827 - DNA, 945 bp, Arabidopsis thaliana landsberg
tttgaaacacgatgatgtccatttgagaataagaaagaaggaatgagagagaacaagttggatgatccgtgaactgttctcctcctcatgagtgaaattttgttgtatttagatatagcaagttaggtttacttttaaggtgggaactggtgaattaccttactccctatttctttttcttcgagagtgcaaggattatttataagagtgttacttgacctaggtaaaatatcgaattaatgggactagttaaaacattccaagttgtattctcggcattttcgtgcaatctatttgtttttttatttgacgttttcttagaaagaagaacgtgttttgagtgtaagtgacgtaagcgcgactttcattaaatgtcttgtcagctataagatggttcgatcaatggctcgtcagctggatcattttgagaagtgattgtgagtcctttcttggcaaatgttatctacagatcttctaaatgacggagaaacttgtcgctttgttcatggagcaattcctatatgacttttctatgattcaagaaaaatcatcataaaattaatcatttctgaaaaaaaataaaagatcaattctcaagattttctttatgtcaaagttacttttcaaaattatttccaaattttcttaactatttaaaaaaaaaacaatgtcaaccgttccctagttcaaatgaagttgtgagatctaatattttttctttttttaacatgtggtaatttacataatttcaccacaaaaatagtaaattcccttaaatggtgacaaaatgcggctattgcgagtgaaccacattgcactttattattttagtatatgataatgtcagcaacatctcaaaaaaggccatatgtagactcatccaaagttatatattttaatgtcaataggattcattctataaacaaaaatatacagaatattcag

SEQ ID NO: 11828 - DNA, 976 bp, Arabidopsis thaliana landsberg
atcaaagcgaagctcaatgacatgaaagacttgagaaaacagagacatcaaaaagagctacaggaagagcagattcaatacgaaagtaacgattgtgaattgcttctgctcatctttgagtttcgttctcatcgatttgccttttgaagttcctgtaagattttgacagttttggagtttcacagtagatttgacgtcattcattgcttattaacagagagacatgtatatcgtagagaagagctaaatcttacaaagagagaaaactattgtaaacacttaaattgtcattaccatgaaatatgtctgagtgaagttaacaaaacaccttgaacatgtccaaagaatgacagaaatgaaaaagtttaaaaaatacaaaagccaacaggtttataaaaagcaaaccaaagagtatataccagagttttgaattaaacaagaaccatttttagtgttcctgagagtgatcgagatggtaatccatcacatcggatagggcttcgaggaatgcagcttcgctcgtccctggaagcacagcttcttgagcttcctctaccatttcctccaccagagacttcttgctaagtgtttctctgcacattatggttccaatctcaaatgctgttagtcctctttccactcctttcttcagtagcatcgttgagattctgagcgttcgagccgtctctgccggcattttccatccatgaaactttagtagatcaatatcttcctctgcgtccagtgatcttatgtactcttgggtctctgcagagtacggtttccgggcttgtggccaatatagccactcaaacgtgcaatcttcaaactgatgacgaaaacaaaagttagtttcatgacaatgaacactataggcaaaactgaatccaagaaagaatagaaaaagagtaagagcacttacgctttcaggcaagcagtatccatggtctataggaaccaaaacgagcttcccgct

SEQ ID NO: 11829 - DNA, 1028 bp, Arabidopsis thaliana landsberg
gtcgtttattaataccgtgtactttgtctcaggttttccccaaccactacggtctggtctggctctccctaaggtatgtgcaccagacaaggcaactatttcctgtttgtcaaaaagaatattcagaataacaaaaatattcacgtttgacatgaataacacaaaagagaacaaaatcaaaataaccttgtcatcaagtcccattctgtagaaaacatctctcaaatgatcagctggtgaaggaggtccagcatctaaacatagcatatttcacctcgttatttcaattagtccataaacaaaatctgaaacaaactcatagaagacatgaaacagacaatggaaagattagttaaccagggagtcttccttcttctggacactgttcaggtgctacaacatcaactctcccatatttcatcgggatatcaggaccaccagcctcctgaagttttatttatttctagagttatcagtaaagccttaagaccaaaatagtttcctaataggccaagcccaagaaaagtgaagaaagacctctattgctgtggcactagctaactggaataagtccgcataagagatgttaggatacttgtctttgagaggctgaatgagctttaaagcattaagcagacctgtaaatgtcaaaagtagaatatcaagacaccaaataaaagtcttaagccacaatgcatgtgaaatgatgaaaccagtaccagcatttgcagcatgcttaagctcagcctcaaacctaagacttccattagctccacctctcagtggccactcctcaatattcttgttataagtaccagcatcgtgccaccccaatctaacctgcaatgaaacatgtaacacaaagcaacatgactcacaaaattcctccaatatctttagtaacaagcaaagaactattacttccatgaattcaaaaattccctgtcctatcatcatcaagaagagaaagatacttcaccaagataggaaagcaaaacttagtccggagaagaactttgatatcttct

SEQ ID NO: 11830 - DNA, 967 bp, Arabidopsis thaliana landsberg
  unsure (1)..(967): unsure at all n locations
attatgaatttgttacatctttctattttttggggtccaaaataatagaaataaaaaaaagtctacagacaaagaatattatatgatctgtatgtgaaattggaaagataaataaggtaaattatgtctgtaaaagaaacggtctaacaaacagtcaaacacagacaagaatcaccatgaaacttggagtttaacattaattaagcaactcctgttactaactaactacttcccaatcttcagtcaaacgacaaagatataagataaaactttataacataacacgcgatattccacaatacctaattataggatcattacattgatctatataaaaagatcacaaagtgcattttgaattaagccacaagattccttctaagaccaaaggcaagaaaaaaaaagatggcaggaggagcttttgtatcagaaggaggaggtggtggaagaagttatgaaggaggagtcaccgcattcgttatcatgacatgtatcgtcgccgccatgggaggtctgctctttggttatgaccttggaatctcaggaggtgttacatcaatggaagagtttcttaccaagttcttccctcaagtagagagccagatgaaaaaggcgaagcacgacacggcttactgtaaatttgataaccaaatgctccaattgttcacttcttctctctacctcgcagctcttgtagcttcctttatggcttcagttatcannnnnnnnnnnnnnnnnnnngtctctatgtttattggtggacttgctttcctcatcggtgcactttttaacgcatttgccgttaatgtttcaatgctcatcatcggtagactgttgcttggtgttggtgttggatttgctaatcaggtacgtgccccatccgttgctttcttgtgtatcaatcatctaattctatggtttaggttaatatctcaatctttttatgtgtagtctacgccggtgtccc

SEQ ID NO: 11831 - DNA, 1054 bp, Arabidopsis thaliana landsberg
gcgcacttaacccacccgccgatattgtcaagcccgactggatgaaaagctatatttatatgaatcagtctcaagccatgcagtgagcggagtcatagttcaggaagatcgtggtgagcaaaagcaaatttatataagcaaatcattgaccgatccagagactcgatacacaacgatgtgctaatcgaggtgctaactttgtaaatatgatatatgaggtatgtccatacttcctgtcgcatccaatcgaggtgctagtaatcgaggacgcttggcgaattgggcagtggaacttaaggaatatgatatagagttcaaaaaccgggtgagtatgaaaactcaagttttggctgttttctgacagagttaacagatgctaagtatcactgagcaacccgaaatcaaacatggaagcttcacgtagatgggtcatcatcaaaacaagggtccatattggggatcagactagagtcacccacctcaaagattcttgagcaatcattttctctattatttagtgcctcaaaataatgaatcggagtatgaagacgtaattgctggacttcggttggcacatgggatcgaggctgaagaggtaattgcttactgcgattcgcagttagtgattaacctgttcaatgaagaattacgaagccaaggatgcgagaatggaggcatatctcgaggtagtcaaaggcttatccaaaaactttaaagtgtttgagctagtacatattccacgaggagaaagcacaactatagaggcgcttgcagcgttagattcaactttggattcagatttaaaaagggttatttgagtggagtgcaattcagaaaaggagtattaaggatgaaaaaaagcctttgtaatcacaaggtctcgggcacaagcacgtgctcgtggtgaacccgagttggagttaccaccatcaaagaaaagaagattgaaaaagtcaacgatatctgaacaaagtgttgaaaaattggagaaggacaaggtgatagccattccaacgagggaaccggttaactaaaagtaataacaaagaaagat

SEQ ID NO: 11832 - DNA, 543 bp, Arabidopsis thaliana landsberg
acaatacgaccttcacatttgccagaagtgccagagaggagaggaagtgtataatttcttaactggactaccaagcttccagtattcaagtaaacattgcttccatataaccgagaaaagggtatgtcgttttcttcacaaataggatcaagcttcttcaggacttctatcaaaccagcatcaccaccatgaactgccgtcaagcttaaatcaaaatctgtagcacaaacagaaagaagagaagttctagcagcactaggcttaaaacctgcctggaatccctccctacaggcacctgaaccctctgagggagctaaaccctggcatgcctgataatatgattgaaacgaccgtttatgaatttcttccttcactttgttaatagctacaggatcctcaacatcaatttcaaccccatcaaaaaacatctttctctcatctaatacagcacttgtttctgcccctttaggagactgaccagctttgtgaatcaaatcttcaaggaatttcaatctgacagccaactcgcaggcttctttcttc

SEQ ID NO: 11833 - DNA, 239 bp, Arabidopsis thaliana landsberg
cacttgtaagtagaatagtgaggaagaaggtaatatgagtaggctctctttccggccacggccattagacattcataagaagcttcccattttaaaatcctttaaagactttgaagatgatgagactccaacttctaccactagaaattctcagttgctgcgtattgcttccgtagaagttgacaatgaggtgaatttccattttgttctaacttcgaaacattcgaccattttaacca

SEQ ID NO: 11834 - DNA, 1133 bp, Arabidopsis thaliana landsberg
tggttatcaattgctcaggttagaagaggagtcggtgtttcgaatgattttattttgggctttgcaaagctcttcaatgatgagcttacattggataacattaacaggttatgaattagtcaaaactgtatatattggtaacgtgatattgcttctgctttggtttgttttgataatcttatcttccttattgcaggtcgcgattgggaactatgtgcaaatacatgggttttagcccattcggaactgatgcatatttacgttatatgcttcggaaaagattacaggagtaagttcaacattgctcatattgccatttttcttgtctccaatggctggcattgagtcatactacttttctctttatttggtggcatcgttcaagttctgcgggcatcaatttgctccaccagacacgcatttagtttctaaatacatctaaattattttcttccttctcacataatcattgggcaatgccattttcttggacttcgtaggattaaaaaggatgataagttgataaaggctgaaggtgtggagtctctctctgaagctgaacttcgccaagcttgcagagagagaggaatgcttcaattgggttcagttgaagaaatgagagaacaggttattgctttataaatatcattcagcattccatctttggtggagttggtatcaaacaaattgtactctttgtgaataagaagaatgatctcgtgattggtgtatgtgttgttctagaattttaacaagagatataggtgatttctgatctgcatatctctcattacagctaactgactggctggatttatctctcaaccattcggtaccatcatccctcttaattctttctaggtaagctgctcttgcaactcagtcaatgtatatactatatacgaggaattaagaatgacattgccacatttttcttcctgtccgtattgacaggtcattctcaatggctgggaaactcaagccagaagaggctgttcaagctactctctcctctctgccagatgaggttgtggacacgggtggcgttacagctctttcattagaagattctgtatcaaaaagaaagaggaagttagaatacctagaaatgcaagaagattaatcagggttgt

SEQ ID NO: 11835 - DNA, 577 bp, Arabidopsis thaliana landsberg
tatttttacataccttcctaatagcctagttccaaaacccattttaccagcctttgtttctaactgccttcttcaactctagtgttcattccaccgttgctttatggtttaagcctaagtcattgtacttctcttgtagctctgtgtagtgttcaacaaatttggcctgaccaagaacagctattggaagtgcatcctctgactcttcagaagattgtttctattttttaagctgtgcttcaactctgttgtcccttccatatgatgatatacatcctgaatcacaatgaatccaaaaatgttagtttcgggatagctgtatttttaactaaatctataaaatatacatatctactaagtctgcagaaaggacagagtggcgacagaggtagtccatcatctgttaaagatttatcatcctgcagtatctctgtggaaggccgaaggttcaatgttcacgttatcagaagacaaaaaaaactgagcataggtttgattgcagggttcagcggactgtccatatggaactttctaatgggtatggttcttcgtcttatttcaagggatacaaaattct

SEQ ID NO: 11836 - DNA, 2307 bp, Arabidopsis thaliana landsberg
ccattttccttttgcttttctcttcctctctatctctctggggaaacaattcgtatatgggacgacgaagaacatcccagagagagaggagagaaagatttgacagaaagaagaaacctcttttgggtttgccttgtttcgacacagacggtgcgattgatttatatgatgacgcttcttttagttgcggtgaagccaaagtacacgatccaacggctgagatcactttatttttagccaaagtactcgatccaacggctgagatcactttgtttttattttatttatttttccaaaaggaaaaaaaaagatttttcaaaaaaaattgatcaaattttgcaacatttatgtgttaaaatatctcaggcttgatgtctcatttaacagaaacagaagagaagaacaagctaaccaaactataaatcagaattctgatgcagcattaaggtggtatcagcggcgttcaaggggaaatcatcagtgaacagtcgaaggatgatgtataaagaagccatatgggaggagcttcagaatgtggttcatgcccttgctcagatgaaaacagaacaaagcttacacaagtgtgactaaagcgattcgaatctttatttggtcgaaacttcaatgccaacaatgtgttacttcaatcttgcttccaattattctggagtaactgaagaaaatgtcagctaagaagatgtttccgccttcattgactctgtcttcagacaggtaacacttctattatcttgtacacatcttcatctatttttggtcttcaggtggtctagaaaccaagacatgcctgcctttgtatgtgcgtttgacaaaacatatgacttgtactctttgttcttaataatatcacagatagagataactcttatttttattccttactctaatctgacacaagttaggttaatacgaaaagtatttgtttactgtagataatctattaaacacaaaggttagtcattttactcttcaagttcaagtaaatccagatcagagttttgtagcgtctattaaacctcaaactatctcaaaagtcaactctttgtgttgatcatatgatcaaaccatatctttagggttaagctataaacacaggtacataacctatctattatatatatatatatatatccatatactttcagaacctcaaagagaagaaagaagtcacagggatctgttagaaccaagaacctcacggtgaaaatgaagttgtatgatgctcattgtcacctccaagacaagagggtcatcgacaaagcctcgcagctcatatctgctgctttagctgtcggtgttaccaatttcgcagtcaatggaacctccgaggtttgttcccaaattttcatgatcgcttggtcactgtcatctatattacacaaacgtatacatatttttaagaggttttgttaatggagccagaaagatcccaacttggtgaaagagatgggagagacgtataaatctgttgttccttgctttggactccatccttggtatatatgggttttatgtacagactatcctttttgcaattgatgcacaaaagtttcagatcaaagtttcttctttttcttttctctgttttggtttgcaggtttattgctgatagaagccctcattggtttaaaacattgaagaagttctttgagaccactcctactgctgctgttggagaagtttgtgtctttatcacttattcatctaaactaaaatctttgtcttcaatttctttttgaattctgaaatgtttgctttgttggttcaagatttagtataaactgcaaaatgatatgttgtaatgaaaccccttttggctgacatctcattagattaacatcttcataaaatttaatgtgtgttttgcagattggtttagacaaaggtcccttagcaggaggaattgattactcagaccagctagtcgtgtttcgcccacagcttgaacttgcaaaagaactgaacaaaccagtagcagttcattgcatcgatgcatttgatgatctcctagagataatgaggtatgtatatctacatgttgcatttacaaagatatagcactaagtttctcaaaataaatacacgcagatccatagggccttttcctgctggggtgattcttcattcattcaatggttcagctgaagttgttcctaaactcgctgagcttggtgcatacttctctttttctggctggttcacttacattgatgagaaaattgccaggaagactataaaaataaatttgcttttttcctctgtaattataaaaaattctggaaagggaat

SEQ ID NO: 11837 - DNA, 882 bp, Arabidopsis thaliana landsberg
aaggtgaaggaagcacacaggaaggtaatggtagcaaaccatccagatgcaggtggtagccatttcctagcctctaagatcaatgaagctaaagacgtgatgctaggcaaaactaaaaacagcggatccgctttttgatgcaaatttcaatcaaaagacttccttatgaatcatcttatgttataggactgtaatgtcaaaatgcagattttatgctaatttataagcttgtggtctgtttgtgacacataaagactcgaatcttttctttcacttgttgtcgctgaaaagaacacaaaaataaaaacgcaaagcagaagggcgttctagtcttttcggttttaaaaaaatccagtaatagaaactctagtacacgtgtcatgtggctccagcgacgtcttacgtcaacctctatccattcattcccctattagcaactccctccacaaaactatttttaattttattttttattggcaaaacaaatctattatttaatccttgttttttttttaattattcgacaatcgaccgtctaattatcttttaattatcattagctcttgctaaaggcaaaatcgactcatttttcttgttttaatgtgaagttttaatcgcttataaaagcctaaaactggattatgattaatgagacccggtcatgatttatccactacatgaaagaaaatacgtaaatatagtactagcatttatttatttattattattattattatctgttataatatccatgtctttatcttcttctaattttcattttacgttttttaaaaaaggaaaaaaagaaaaactaaaggagaaagaaagaagaagaagggaactaaagagggtcatcatcatttcatggttacctcctcttcc

SEQ ID NO: 11838 - DNA, 542 bp, Arabidopsis thaliana landsberg
tgcaatcgcctgtacatgcatggctgtaaaccatgcaaacatttaaaatctaccaccggttttgagataaggcaagacatgatcttagtgcgcgaaaataaaggcgcagttacgggaggaaactaatacaactttacagccgcgtccacgttcgctcgtccatctgaaatattggcggcggttacggcggcggaagtgagaggtccggccggcgatgggcggcgagaagatgtcaaccaccggcgctggcgatgacatgctgcctgtaacatctgtgcataagccagcaggtacgtctgtttcaatggacatgcatcctgtagcgtctgcgatcgccccatacacagagggtgtctctgttactcctccggcggcattgagggcacctggacatatcgatgagcacacaaaaacggtagacgtggtcggcgcagagaagcacatccccatgagacatattgggccgcatgaacaggacacacctcatattcttcaaagccacgtaagttctcccatattacgttagatttagtcactattga

SEQ ID NO: 11839 - DNA, 1206 bp, Arabidopsis thaliana landsberg
caaattataaataaccttacggatgtgactaatttcgtataatcatgatgatgattatttcgactcatagcagacaaatggtgtcctctccaccgtaaatgcttcgttcttaagtttctgacatttcttcttagtgaactaatttctcgtaaaacaaacaaaaaagtactaatgacagttttcaaaaataaaaagaaataatgactaaaataaattgacttaaattttagtttatgcaagcaatgtgctattttcactttatatgtctgtctaatatatattcacaatttattcttggaagttgtagaaattacttattctatttggacctttcctcttcctcttccttctttataagtagaccaaactgataagccagctttttcctgttgtcttcgtttgtggctttgttgattcctctgcatcagtgcttttgaagaaactgtttcctacttatcatcttcctatttagtttgcgttgtaagccaagttacttctctatgtagctatgacctgctataaggtaggaacctaactcaagtttttcattgttattatgttgcagaaagtttctgtgacatggagagaaatgagaagacaagtctgattaatcaaatactctctgaactatattctcagcaaagatatgaacaaggaagagattaggtcgatactcgataccaggcatgttttgttccgttgatgaataccgtaagagctttgttcctcttctactagaggaaacacgtacagagttgtcctcaagcttgaactgtttgtggaaagctcctgtcttttacataagttccgtggaggctacggcaataaaattaccgagtagaagctcaaacaaggttaatatatcagtacttacgagtgttgcacaaggaaatagaactaactacgagccgaaacatggagatctcattggagtcacaaggaaacgtggatgacttaaacccactgattcttgcgtatgtgttctctgttggagatgagctacatttctctgttcattcctctaaatctatatccattgatgagcaatattcgtttcgttcgggtttttttcttatatacttaaccacaaacactcgtatctggaaggctttgcacaacggagatggaaacttgagtctcataagagtgtccttcaagcaaataccgcggtacgtaaacatgaaatgatctggctttagcgtctaa

SEQ ID NO: 11840 - DNA, 451 bp, Arabidopsis thaliana landsberg
ggggtttcctcagcagctgcaatagtttcttcctcagccatattcaaaatcatttcatcaatatcaatgagtgtgttttccaaatctgtggcttcagctgctgcggcttcggaagtagaagcttcggcacgagcagcttcggctctgctattttcggcgctgaggccaatggcggtgtttcttcaatagcctcaatgatagtaataattcttcgcttgtttggttcagcaggcttctcgacagccctagcctccttcttcttctgtaaacgcttcatcagtttcggtcccagcggacttagcttattaggtagagattcagtcattacctttaaaattccttctgcgttagtggcagaaggtgttgagggaacttcttccaaatcagctttcgacttcagagctggagcttttcttttcttcgacaaagccaccttcagctcaggactgga

SEQ ID NO: 11841 - DNA, 391 bp, Arabidopsis thaliana landsberg
tggaacttgtccaactccattcccaaaaaaccccaactgctgcatgtattacacgcgaaaagaggagatcctcgaaacgccgaaatccactgtatggcccgggtgtaactacaccgccgccaaatcgctgaaggtatcctcggacgacgattcgcccgacgatgcattcgcaacgattgaagaagaagacgacattactacgtatcatcggcagcggcgcgcgagatagcttgacgcgggccaaatctccgatgaagaggaacaaggatggcaggcgagcgggtgaatggtttcaaaatgttagggttttgcggcgcacagaaaggtaagaaagcccgagcaacgccgcccgcctttttatacacagggcgcgaccattcgagaagcccgc

SEQ ID NO: 11842 - DNA, 857 bp, Arabidopsis thaliana landsberg
caggatcaaatggagtggctccatcttaagaactgcctcaatatcatcctcagactcaaagtcaaactttaaacgacccagcccaagatcagcccctaccaccttcccttcaatctgccagatgcgtggaagcataaacaacaatgtcttcatctcctgcttccgaggattcatacaccgaccaaagagagtcttcgaatatcccgcaatcagagctgaattgtcaaaatgcgggatcttaattcttctctttggaaccaaaccagctgccttcttctcacccatgttctttccaactaaaccactctgtgacattttaaaaacccagaacccgtgaataaactcccaggaaagagaaagtctgaataaactaaaagcccacgacctcaaagctaacaaacagagaaaaagatgtttgtagctttggcatacaactcctctcgtcttatatagctcaaaaaaccaatcagaaaaccaatcaagctgattcttcatcaataccgtatcctcccatatctccaaaaaacttgatttccactcaataaatgtaatggaaatttcaagaacttgttcttcaaaaatcgtagagcataaggaaaccatatctctctgagaactaacttcaaccacaaacacaaccttccacagatcgccaactacaaataaggaaaacttgattctaataatcaaaaatacacaccacaagatcaaaaaacagatccgtaaaaaaaccaaatcccagtcaagaaatcttttctcctttaccaaatatctcccttttatcttctcttcccaatacaatacccagatgagacgcatctccagccaatccaaatcaaaaccaaatagcttgaaat

SEQ ID NO: 11843 - DNA, 1354 bp, Arabidopsis thaliana landsberg
ttaatattgcttaagacagtatacgacaatgtattatatattgtcatcatgaagtgttatgcttcatgttgttttcacatttgagttttatcacgagtgttacatttgattgattcttttgtattgataacaaaagtaaggaaaatgaaatctgaaattaaaatatgtcactcgttctcgttggatcagtactctctccttttttcattttggagtttacaatcttcttttgatagacgttggctttggaccaattataactccactacttttgttaaagtatatctggatgatttttcttctaacaacattcgttcatgtttaaatttggatagtgacgaaacaacaatataaatacaaaagcatcatgctacatgttatggtctatgacattatttggatttgaattattatgttttggttaatctaggctcgtatttaaatacaaagttcatgacctaggctcgtatttttttagagtcgtaataaccttttataaattattgatttcaaagagactcgaactcaggcctctttgaatgtttaggttttcagttaatgtgggttaaaccactagttcaacctcactttgataatttctatgcaaacattttttctccaaaaagtcgtcacactattgataattagaaagtaggacataaacgtttttctttaaaattgaactagaattcacatttgacagcctatatagtgttttaataattaatgcaagttacaacattgactaataatcagtatttgatactaataacatacatttcttttttaataattttttgtagattgtaatacaaactaataatttatttcttttatttttattgtatttttgtcaaccaaatttaattaaaattcaaaagaaccaattccgagggatattgtttacatctatatgttttatatagtaacgtactttttttttttaataataacttttgtaaactaatacagagtaaaatttggtatcagttatcagtaacgcacttttctttttaataataacttttgtaagctaatacagactaatattcggtcttcgctattaatattattgtatatggtaaactataaaatagaaaaaaatatgatatctctaattttgtaattttctgtttgaataaagttatatatattaagtctaaaagtttaaatttacataatctctaaatttagctctaaaataatcattttagaaaaaaatcatataaacattttaccaatcacagactaagtattatttttttctcaatatttggtttcactaaaaaaagggtgaaaacttaattaaatttcttttaactttataggtaattttggaaaaaaaaaaaagttt

SEQ ID NO: 11844 - DNA, 1188 bp, Arabidopsis thaliana landsberg
cagatatgattatagtttcttccatggttgagactattgttgatgagaaaatcctaatgttaccataccatttgattggtgcagatagcgtgtgagagcggcttctgtaacccccagaagaacgtcgttgatagtcttgtaaagaaacaatgtgcacatgagaagttagacaataaaaaacccacaatatcgtttgtggaagagcatcaagaataattcaagaaaatttcacatgagaatacaatatggaaaattgtaacaaatacgtatttaccatttccatagcgttctttataagtttgatgtcatccaaagacacaatccggtgagaaaatttctttatggcgccaggcttacccttcaggggtgtatctgtatccttcaagaaaaatattgttgccatgcacaaaaaggaatccactagggtattccatatcaatctcactgtggaacaaaccacaagaaccaatctaaagaatgagaacccgcgtctatggttgtaagattcacgacactttgggacagggagggtagaaaatgcctcgggttccgatgtttttcgggtagatgctagtatgagagacaagatagacactccatctcaataatgcatggtgacatcttatgacacatatagcttcggcgtcagaggttttagcgtttaggatgtgaacttcccataagggcttagttctgtttagaggaatcatcgttatactggatatgtagtcctcaacgaaccattcaacgtcttcctctgtcaattttgaatctatgtctggtacaaatacatgttcctctacattgacaacatcggtccttaaccattttgtaccatcatcgtcctattaaataagctaaatatgtaagaatatttggaagcacatgtattaagaagctggtaagtaaatcaataacacttttcaaaaaatgtataaccttcattagaaaataataataattatcctgcttaccaaaaggctgcagaaacgaggatgcttgaaaacattaagcttcaaggaatcaacaatgacgtcagggttgatcttggttttgcacccgaactttatgacaataccacagtcgatgctcggctcaagaaatgcccgagccatagggctcagtggctcctcctcctcctctttcatcttcttctccatgctcttagtttctctctttgtatattta

SEQ ID NO: 11845 - DNA, 387 bp, Arabidopsis thaliana landsberg
  unsure (1)..(387): unsure at all n locations
ggcaagtacgcgcatttgataaatctactgtcgcaaattttcattctcacgaggttgaatctagggaaaacacacacgacttatcggctatagannnnnnnnnnnnnnnnnnnnnnnnnnnnnnnnnnnnnnnnnnnnnnnnnnnnnnnnnnnnnnnnnnnnnnnnnnnnnnnggggtaaacccgccgatctacgcacgaccagaccgtctacgcatgagcatggaccgtttgggccaatgacgactggtcccatttttagaaccaaattaccaagacacgcgtccaagccaccacatctcgcgtgaaccctaaatgaacaattcgaacatccacacatagcaccgaacaatccgataacattagtggacggtccagccatgcggcc

SEQ ID NO: 11846 - DNA, 926 bp, Arabidopsis thaliana landsberg
tcgtttttttatttataaattttatcgattgatctagccagttttagtagaaacatatcaaaatgttttactttggttagaccaccacaatgttgatcctaaatttaaaatgttttctgactaaggtaaagattacatgttactgactaccatataaactaattagccccaaacccaaacttttcacacatgtaatttttgtttttaagatagattacacttgagttagtttctttgaagctttccccaattctcatttaccactaaaccacaactatgtgggcaaaataggatttgctttttgtgtcggatgttttacacaatttattacagctctcatgcattaacactattttgatttttgaataacaatttgtagaagaaaactacattcacaataaaaagctgtccggtggcaaaaacaaaactcatttatggttcgtagcacatcaacgagttggaactactcgaacgaaactgggtggaattgaaactagtcctctaaattagttaaccaacagaattataacacgtcacctttttaattttgtggaattaatggtagtagtctccgagattttataatttctacgactctaccaacaaaaacaaaaacttcagtagaggaaagaagaggttttaaaactcgccacgccttttctaacttttttgttacgttaacagaaatatatatcttcgtccaaaaatatctcacagcaatagtcaacgacgatctgtttcactttcaccggttaggattgaggtagatataatttgggacgttgctggactaaattatgaatacggtatacattttggtgaatggtccgtgaatgtgtatctttgacgattgtatcttaaatataaaaagccaactatcttggtactaaattgaagagccattgaaattatttttattaattttt

SEQ ID NO: 11847 - DNA, 1418 bp, Arabidopsis thaliana landsberg
tcataaacgggtgcttatggttctaagaaacatcttaatggctctcgatcttccttaggacaatctaaatctgcatgggagagtaggatccaggtcctagaagggttggcaattgggtggtgcttgaagtaaaaaaatatatggtacaacgcaaaattaattctaaaaacaaataagaaaataaattcttcaaaatttttgaaagaaaaaagaaataggagaaactaaataacagtaaaattagatacccaaatcaaatagaaacatgagaatcaatttgttatgttttttttaaataaatatatataagtaggcaaaacttctaaaattacatgcgaagaccaaataacatgagaactatatataataaattacgcattaaaaaaataacgaacaatttaggtgtgtagctataacataaatttgaagatattttctttgtacgtgattttttttccactgttcttttgatctaaagcaatatttgtaagaaagcaaataaatgtggttaaaccaagccaaattaataaaatcccaatgatcagcattataactttatatgcaacattagaagatatattaatttgataattttaacactactagctcttatataataatttaaaactttaacatttaggaattggtataccacaagttgttaaaactttttgagcttttccagatgaaacatattgagtaaatgatgggattttaagataaccacacaaacacgacaattgttctttcagttttccacaacattgcacagatggttggcttccggcttccaccgccggcagacatactcgaagatctgtcactatgcacaccactttctcctcctcctcgactctaaccaccactgctttggtcggagccaaagacgacaaaacaaaagcgatgaatactaatgtaattaacttcatgtcttatagctttagagacttctttaattctattataatttttatttatttttctttaaaactgtttgcgatttgattttgaagtgtttaaagttcataaagctatatatatagatggagtaatgttagaaatatacaagtgaaaatattcaaagattgattataaataaaatgatttggaaagtaaataaacaattagaagaaatatatctatttagctatacaatattaaagtgtagtcaaagttagaaggattcaaatttggatatttaaatggattatatataattagaaaattgatgtaatccatttttttagtgaataacatataatgagttagaattcgaatagtgacatagtaatgccgacagcataaatcaaatattcttgaattctttgcgaatattgcaattttttttttcacttgtaatgaatataatattattattataatattatatttttaaaaaaataaaaccgggtaaaaat

SEQ ID NO: 11848 - DNA, 369 bp, Arabidopsis thaliana landsberg
  unsure (1)..(369): unsure at all n locations
attgagtatatataatgctgcaatgtactattgggctattttggcaactgtcagtcggactactactttattacaatccgtatgggtgcaagagtgtgaggatacacatgtctaannnnnnnnnnnnnnnnnnnncacggatcacacaagaggatccattcaagtgcatctcatagcttcctccacataatggccgcactaacacgagcaatgacgtccgtcaacgctaagctcctctaccgcgccgtcgtaaccaaccttggacacctctggatggcccgttacaggcgatccacgccggaaaagcctctcggcttaccgtgaacgatgtccactacgacgtgctctatctcgaggactgccttatga

SEQ ID NO: 11849 - DNA, 1132 bp, Arabidopsis thaliana landsberg
  unsure (1)..(1132): unsure at all n locations
atatatacttaaatatatcttttaaaatactacttctgtaacttttagttattatattaaaattactttaaaaatatattatggtctattgtaacaggggttataacctagtataacattaaaacaacagacttaccatatgtgatatgtgtgtaatcagttgcaattacccgttcttaaataccacacttatggcttaccctaatatctatatacagtgctatatcttttatagaaaaaagatgagaattttgttttgtgatgttaacattttgttttacttacatattttcacgtaaaatatgcgtaatttttgttttgttttatccttctaaatgaagttacttaaaacttatataataaccatatttaactcgaagttggcacctttacccaaaaaaaaaacttggatatgggagaagatgatcttaattatctaaaataccgtaagatattgataacaaaaacatctatgggagttgaattacaatagttaaagtaataacttgaaccaaaaataattttggataattaagtaattcttgtaaacgagcaaaacatacggaacataattaagaatcaaattcatcaaagaaatctcaataaagtaaataacaacttaaattaacctcacataatcaaacattaaaaaaaaaagatctaccactaaaacgaacccaaaggaaacaaaaaaaacaaagaagaacctgaaaaccatctactgaattgttgatcttcaatattatcgccgtcttcaacttcacgtcatacttcgtagacctccttttaatgattccatgttagcttgctttatatatatgtaagatctattagtaaatagctacatatatacaaatacatagctatatatgtatatattccattgatcatgtatatataataatagcaatctaataatcaatacggtggccgacccgtagaccaatactgctgatcattctgttgtggcggtggcaactgaaccgaaccaagaaagattcggtggtagtccttgagccgccgccatagctgccatagcttgttgctgtcccatcatcgggggagatcccattccaccaccaccttcttctncttcaccgncttcttgaactggcgtctgcatctcatcttc

SEQ ID NO: 11850 - DNA, 751 bp, Arabidopsis thaliana landsberg
tagttttgagtttcgtgggtcacgcattaattacggataattattatattaagaaggaaaaaaaaaacaaaaaaaagcagaagtgatattaaagtgcttttgagctgtctcgtagaaaccatgaaaccttaataaaagcaaccttgtcttcaacattctccatcttcctcctcacttaatccccaagttcacacttcaaatccactctttctatttctctccttcttcttctatgtctcgcctcctccctcctcatctctccgtcaaccttcctaccatggagaaaactacttcttccgagttaaccccaactcgactcggttttcctaacgagttcccttacgagttcgactctccttccttctcccctggtttcacttctcccggtgactccactgagacggaagacgaaagcagtgatgacgaggaagacttcctcgctgggttaactcgccgactcgctccttcgactcagcgtcttccttcccctctcttcaagtctgaggtaagaaacgccgcaaagatctttgctttctcgttaaacaataaacgcccatggttactgattctgtagtttcttgctctgcaggagaaacgtcaagttgcagctacttcaccacagtcaacactgagtggactcggaagcttttcaaactcaggaagtagaagccctatccttccatctccaacggctcctacgtcatcatttcgtagagacacgcgtgggatgtgattctgcggctgctggaga

SEQ ID NO: 11851 - DNA, 1163 bp, Arabidopsis thaliana landsberg
tataaagacatttcctatgtgtaacgctcttctcattatactaggcggagaacgttctttctcaactttatgttttgcactagctcttcacgagatgacagaagccccgtttcgagcaatggatgagtttgatgtgtttatggtattatgtccttttaagaattctctcttttacgagctttacgttgggatgagactaacatttttaactttctgattctgaaatataggatgcagtcagtcggaaaattagcttggacgcactggtggattttgcaattggagaaggatcgcagtggatgttcatcacccctcatgatatcaggtaaccaaccgatcaatttcaaaaaccatggaactcagtctgtgaagtgaataacttggatgaaactctttatctcttgtgctcttttacagcatggtgaagtcgcacgagaggataaagaaacagcaaatggctgctcctcgttcttgaaaacaaaaaaaaactctccttgtatagctccataaaggtacacacaattttgcttgcatgacccattcaagcattttatgttttgtgtctgcatttttcgccagttctcacttatgtgtttctttacgggactcatcagggcatcctcggctttgagtcaatactacgactagctgatgggaagtttgagaagagctttgtcatccatggtcatggagtattgatttgaatttacaggtactgagtgagacccttttttgggttctctcatttctttttatgacatttatatattgtcaaactttgattttaaaactgtattatatatcatttttattgacttataattatcatttttagatcgaccaagtgtgacagattactttcctagtgataaagactagtgattgaggacaatagcagaaagactaagtaacttttaagcttcggattaagaaatgtccatagtttctgattctttttggcaagtttaagtacatcctgaatgttcgataaaggctagtgtcatcaacatctctaatacatatgacagccaaggagcatgcattgaaaaatgaggcaataaaattgagtacttataaactgttcatacttcttttctacctttgacgttgtaaatgttaagattatgaacttaagaatgtcattgctacaaaaaaaaaacaat

SEQ ID NO: 11852 - DNA, 977 bp, Arabidopsis thaliana landsberg
actcgagtctaaatatgattgtagtattatttttactcttaagtatcacactcttttccactaacatttttttttttttcacatttttggtgagtcgaaatgttcgattagcatactagtcgacggttatgtttatctagaattattaatagaaacacatttctttctacagaaatatatacaacttctagtgtgaatttagctattttgattaaggtctctgattgtattttgatttatcctacaataatttacttactattgttcgatttagcattgcattggatatttgtaagctaagaaagcagtgtttttggagtctagcatctaggctcctccatgtggaagcagcttttaaagctaagacccttggccaaaacctttctctcttccaaagtgggtgacggtaaatcatgctccttttggtatgatgataggactcattttggtatgataattggacttcttttaggcagttgcacacgttcttaggagcagaagctcataggctactaggtcgtcctttgaaatcgaaagtagctcaagaaagatcaggggatggttggatatttggaggtgcttgaagccaaaacattgagctcctcttatgtcacctaccatcagttcaaatctcagaaaccaacaaagatatatttctgtgggtcatgaattcaaggccaccatcaagaccggtttaccttctctgatacttggaataagatcaggactacaaaaccagatgtctcttggcacaagcaagtcagtctggttttcaggggcagtccctaaacactcttttatcatgtggcttggttgcttgaataagttccttagatatttttgttgggagatatcaattgattcactgttgggtgatttattagtaaacttgtttaggctagaattttcgggaacaatctataggtaggtctagtgttgtgtaacaccgcattaagtgtaaatcctatgtaaactgt

SEQ ID NO: 11853 - DNA, 1168 bp, Arabidopsis thaliana landsberg
atgagcatgtaggatgctattttctccttctcaacccaaatagatccagcacacaccaaaagacaggtccactagagaaacaagaaccaactttggtatcatattcagtcagataaatcaaagaccggttaatatatagttgtgatccatcaaataacctcacacagtctttctatatacctgagaccaaaaggaccagactccggttctgagaggtgagacacgggattgcatgagagggtacaaaacggtagcagctagaccaacacctgcactgattcctctgcctataccaatgatataagtaggtatccctttccactccaatgtcgccgtcatcagtgttccaaagctgtatcgagaagaaactatatgtatgcgatgcgaaaccaaagccaacacaaaaagaacaagaggatagaaaggaaacctgaggacagtgaagaacaatagagctagagaaactccagggagcacaatctcttgattgagataattcctccacgcgctaacaaaagaagactcagagattctctcaagaatccttaagattctgcttctactttgcgtattcctataagactcctcttcgtgtaaaagaggaacataaaaactagatgcactatctgtctcttccgcttgcgattgagacgaccttaaactccttctctcatcgctttgtactatagcaggaacaccgttatacacagagataaagagccaatactcaatccacacggtaatagtagcccaagctgcaaatgtgatagctgatgctctaagagatacaaagctaatgatcaaaccagttataaccggagacagtagcttagagctcaagtcaatgcctctaataacagagttcattcttgttaaaaccgctggtgaatgaccttccgacataacaacaaccctgtaataaaaacaacacaacaatctcatatcaaagagtgcaattacaatgccattttatgaagtgaataatctaaaaacattaatttaccagtctcgttcgatcaaaacggtgcctgcaagagtagagagtactccaatggcgccagaaagattcgtcaacacgaccaatgttgcgaaaacagggaaattctgagacttaagatcaggtactaccagcaaagcaacgactgcaccaccagcaacaatgaaggag

SEQ ID NO: 11854 - DNA, 975 bp, Arabidopsis thaliana landsberg
cttcctttttttttgattccgggaaattttcaataaaattgcgatttttatagtcatttgatctgatttttatggttctttttttctgctttctgctttcttgctttattgttctttggtcctaagaaatttcactatccaaaaacctcccgctttcaaatttctaaagtttcttgattatcacaattccaaagctttttgctatatctacatttttttgtgttatttcttcagaagaaacagagcaagaacaaaaaaaaacagacctttaaggagtgttttaagattttaaagatggagaatttatcgaatccagatgaaaacgacgatcatcaatcacctagatccattgaccaaaatgatcaatcagcagtagaaactccggtttactcgacgatgagcatagattcctttgtttaccctcgaacttgttcagagaccacttcagggttttcagaccagatagatgaaaccaacagcttctgtagtgaagcttctccttgtaactggcctgtccttactgaatctaagagctccaaatgtctctctggtttagagatgcaatcaaatgaatgtcttgtagtccaagaaatttatgaaccaggtactgtagttttctctctttctttcttctctgttttcttctactgctttttttaaatgtctcatgtgttctagggtttgtgcagaacttgagacaatgaaggaaagattcgctaagcttctacttggagaagatatgtcagggagtggtaaaggagtttgcactgcagtgactatctcaaacgcaattaccaatctttatggtaaagccattaagcatcattcacatagaggctatgatcttgttttagacaactgtaaaaatgatacttcggttgatattggttgagctacagagtctggcagaatctatgttagagccgttagaaacagagataagagctttgtggaaagagaatgaattggctttat

SEQ ID NO: 11855 - DNA, 358 bp, Arabidopsis thaliana landsberg
caatgattccaaggcgactcatcgccacaacatttggatctttaacggacgattttgcatgtacgacatctttgcgatagacatgctcttcccacaatactcagatcactacaaacggctctacatacggcagtttggacttccgaatagctttacaccattaaatttacaagaaattacgtttagaagtattaatgaacctttggtcaaccactagaccaaagaaactacgtgtaagattaccataagtaattttaaacatgaaatatatcgattacaggacttaataagcgtaaaacagggaccgaaggaaaaacaacacccggatagtaaggtacacaaacatatagaaatcttg

SEQ ID NO: 11856 - DNA, 1152 bp, Arabidopsis thaliana landsberg
ctttcgaatactggacatggcaattgggggccatcgacccgtgtgctccactttgatgatagctttacagctcgtggggttttatccttcatggttgagctggacattcactatcattgtcaatttctcggtttctctggccttgtattctcttgtgatattctaccatgtgtttgcgaaggagtttgctcctcataacccactctcacagttcctctgcatcaaaggaattgtcttctttgtcttttggcaggtaatgtttgcattaatcagtaaacccctcaaaacaagatttctcatgtttggatatactcataagattcttttgattctgaaactgcagggaatagcactagacatactggtggcaatgggattcataaaatctcaccatttctggttggaggtagaacaaatccaagaagcaattcagaatgtgttggtatgtcttgagatggttatcttcgctgcggttcagaaacacgcttatcatgctggtccttatagcggcgagaccaagaagaaactcgataaaaagaccgaatgatttgggcgttagagtgtacatggactggttttaaaccagccatttttatagccaatctttggtgatcttgtatgttgttatgttgaggagaaagatctaaaggttttgctttacaacttttggtttccatgattggggaaaaaagaaacaataaagttgaaaatttagatgatatgaacaataatgttaaagccactacacttttcatcaaaagaagtaaagaacactactcatattaatatctttcccgtatgcatgaaatgaaactttttcaccattgttactctagtctttgttcaattgttgtaaaatcagttcaaatactcaaattcttcttacttctgtgacaaaataaaacactcgttctcattgagtagtaaaattcgaaagtaatgttgttgaaatcttaaaaaaaatcatcaaattatttttcatgattctatcgttctgaatttgtaaccaatcaaaagctcatttatgtatgaaaatattaaaataatttatttgtgaagataaaaattggagtaatgtattaattgaaggagggtaaaaaagtcgcacgtaatatacgggaaaaggcgtgcgaaaggactaaacacaaaaag

SEQ ID NO: 11857 - DNA, 395 bp, Arabidopsis thaliana landsberg
tttgtgaaaatattaaaatttgaatgcactttagtgataagatttcttttgggttcaactggcttgaccagctgaactttctagttcagctggaggaggccagctgaacttagcagctgaacttcagctcagctgtttttaacctgtgttcaccaggaccatcctggttaaaagcggttgaaccccttggtggaccggttgaaccgcccgttctgaccgcgcaggcctgctctgctgcagcagtgtctgacgcgcagatttttttttgtcgctttctgcagggcgcactactttttttgaccggtcatttcgcaccacttttttgcttgtttatgtgtcaggcgctccactttttttctgtgctgtcacttcctggcgcgcagactacttttttt

SEQ ID NO: 11858 - DNA, 2297 bp, Arabidopsis thaliana landsberg
  unsure (1)..(2297): unsure at all n locations
gatgacgctctcgttattcgaatcgatgtaggcaactacgaactctcccgtataatgatcgacacgagaagctcagttgacgtactcttttacgacgccatcaaaaaaatggggcacctcgattccgagctgcaaggcagaaaaacgccacttaccgggttcgctggagatacgaccacttctctaggaaccatccagctcccaaccgtcgcacgaggagtgaggcgactcaagagtttcctcgtagtcaacaagaaagctcctttcaacgcaatactgggaaaaccatggctacacgccatgaaagccgtcccatcaacctaccaccaatgcattaaattcccctcggacaaggggatagcagttgtatacggcagccaacgcatctcccgaaaatgctatatgggcagctacgagcttatcaaaaaagctgaccccgtagtactaatgatagaagacaaactcgcggaaatgaaaacagtcagatcctctgatccttctcaacacggacctcgaaaatcattgataacacggatctgcatagacgaatcagatcccacacgatgcgttgggataggtcaggaccttgaccaagcgatacgagaggatctcataacctttctcaaaagaaaacaaagacagcttcgactggtcaagtgcgaacctccgaggaataagcctcgaggtaacctcacacgaactcaacgtcgatccaacctaccgacctataaagctgaaacgtcgcaagctaggtcccgaaagggctaaagctgtgcacgatgaggtcgatcggttgctcaagatcggatcgataagagaagtaaaataccctgactggctcgccaacacggtcgtcgttaaaaagaaaaacgagaagtggagagtatgcatcgactttacggacctgaataaggcatgtcctaaagacagtttcccactcgcacatattgaccaactggtcgaagccaccgcgggacacgaactattgtcttttatggacgcattctccgggtacaaccaaatacttatgcgcccagatgaccaagaaaaaacagcttttattactaaccgaggcacctactgttataaagtaatgccctttggtttaaaaaacgctggagctacttaccaaagattggtgaacagaatgtttgccgacatcctaggtaaaatgatggaggctatatcgacgacatgctggtcaagtcagctcgcgaaaaaaccacgtcccgcaattaagagaattcttcaaaatcctaaacaaattcgagattaagctaaatcccgagaaatgctctttcagagttccctcaggaaaattcctcggatacctagtaaccaatagaggcatcgaggccaatcctaagcagattgcagccttcatcgacatgccatcgccaaacacggcacgggaggtccaacgactgaccggccgtatcgccgccctcaacaggttcatatccaggtctaccaataaatgcgtccctttctatcagctcctccgaaaggataaaaagtttgattggaatgaggactgcgagcaagccttcaaacagttgaaagcatacctgtccgaaccacccatactcgcaaaacccgaagaaggagaaccgttgtacctgtacacggcagtctcccgaaccgcgataagcggcgtcctagtgagagaagatcacgaaggacagaaaccgatttagtgctttagtaaagcgttgatagacgctgaaactcgttatccagcaatggaaaagctggcgcgtgccgtagtcatgtcagctcgaaaactgagaccataaaatcaatcacatcccatcgtagtgatggcgtctcaaccaatcagaaccattctgcacagtccaactcaatcaagtcgactagcaaaatgggccatagaactaagtgagtacgatatagaannnnnnnnnnnnnnnnnnnnnnnnnnnnnnntcctagccgactttgtaattgagctcccgttagcggacctggatggaacaaactccaataagaaatggctcctccacgtcgatggctcctccaaccgacagggatctggagaaggaatacaactcacctcccccactggggaagtcatcgaacaatcgttccgactcggattcaacgcattaaacaacgagtcttagtacgaagccctcattgctggcattaagctagctcaaggaatggggatccgcgatatacacgcccatagcgactcccaactcgtcaccagccagttccacggggaatatgaagctaaagacgagcgcatggaagcgtacctcgaactagtcaaa

SEQ ID NO: 11859 - DNA, 1148 bp, Arabidopsis thaliana landsberg
ctaatatttttataaaaactatatataggaaaatatcttttaaaattattcaattaaaaaaaagttgtataaatcttctggatatgaaaatttgtttccaatcatatattgtttgttcagtgtatcttatttttttcaaataaaaacataaatagaaaaaaatctgaattacccaatatatatataaaaagggaaaatatttttctttatgatttgcgcagactaaaaatatatttctgattaaagaattgatataatctggagtgattatgtcttacatcgcgtgttgggtggtccttatctgaaccccaccttatatattctcatcgttaattaatcaacggtccggattgttttacagcgagatgcgaagaagaagattttttttcttttcttattccgaaggtacaatttgtatcatatttaaaatacttataaattttacaagtaatcaacaaaattgttttacaggtatgataataatgattcagatggctgaaaaaacatgaaagggtcacaaacgaaagagagaaacattatactagtatttagctttttagcattgctgtccaaaaaaaaaacaaaaaaaaaactattattgagttatgatgattgatgatgatgatctctctgggttcaatatagtaaccaataaaaactagagctactatatcatatgtaacttgtgttgttgtatgttaaaacataagcttaagaggaagcaaagaggctcagaggaaatgtaagaaaaacacaagcatctagctttgacacacaattttaaagacttaaaaaacactaattggaatccttcttctctcgcatccaagaccattctgattcacagagatcaagaggcgagtttccgtcttcgtctttaatggttgtatcagctttctgcttcaccagaaactcggcgagtgcttctctttcgcacacaacagcatagtgtagagaggtttggccttcattgtcctgcacaaagtttgtcagcgacaaaaacataaaagtctgtaattgagagaaagaattagtttagggggttttggttatttatttactttagcattcacatctgcgttcttatcaaccagagcttcagcaacgataagatggccactgtctatagcccaatgcagtggtgttcg

SEQ ID NO: 11860 - DNA, 623 bp, Arabidopsis thaliana landsberg
  unsure (1)..(623): unsure at all n locations
gcgcctacaatgacccgaaggcgacgccaccgcgacggggagtggctgggctgctcgaccacgggcctcaaccatggaaacacagagaagggcatgggagagagggagaagaaggggattcctcacatgcgcagggcaggactgaaccgcagtcggtggagcggatgcgaggnnnnnnnnnnnnnnnnnnnnnnngctcccccaaacatggtgcagcacatgggagaaagggcgcggggtggatggcatgctactacgtgtgagaaaacgaggaagacaatattcacgacagggggtatgtatatgtcagtaccctgaaacaggggtacccttactatagtgtaaaggcgcggtgcccatgcgactacctctagtcgcatggtaaacaacgcccgaccccaccacgtggtcgactcccgggtcgccacgcggccagaggagacgatatgctccaaggtatcaacagtgggtccgaaccccacgagaaagtgtcggaccctagatgcatagaccgaactccgggcgaggttcaggacctcacaggtacaatctagaccctgggacgggtctggaccctcaggggggtcagccactacagtagggtccgggattcaagatgaaga

SEQ ID NO: 11861 - DNA, 1273 bp, Arabidopsis thaliana landsberg
catatcgtatttggatgatattaattctttgactattagctcatatagcttcaagtttactcgtagaagtgaaaaccacgtagcagatcttctaactaaaaaggttaaatgtcaaaattccccttttactatctcttgtgatttctaaatgtcagtgttgtaatgacttaattagcttttatgaaaagttggcggagaaaaaaaattcatacagatgcagacatgtttttaaaaagtttatatagaagtatattgtcttattatttaaaatgttgaaatacatagacatcaaatggacacatattttgatataacattttgccatatattctaccaccaatttatgttgatgacttaattagcttttatggcgtattacttattatgacacaaaacaaaaaccactagcataaacattagttaattatagggaaaataaaagcacgagaacattactagattttccaatcaagtacgtgccctggtggactttcatatcttcttgtaaaccaaattccatccattcttgcaatccataagcgcaactgattacattttggttgaatgccttgacgatatacttgaatatcataccaatattttggtctagttccgtgactaagcaaacaataccaagtttcatcattaggataattatcctcgaattcaatgacataagaaggatctttaaagtttagtttgtgaaatcttgtaggtttatcgtctatgctaccctttcggcatgcaatgttcagaataataccaggactcagctcgttatgaattactacatgatttttgcaatgtgttgcttgatttagctcaaaatgcatagtagtaattaacataaaaattatgagataattcattttttggggtctaagaacttttttgaataaagacatcaatatgtagtatttataattattttgtgtgacaatttgtgttattcatttagtaaataatctttttatgattagcttaatttaaaaacaaacataaaaaacttggctatagatatatatctaaatgtaaatataaaataacatggaaaaaaatatagattaccattaacatttttagattaaaagaaaatcaagatgataaaattagaattttaaatccatctcactcaaaaagaatataatgtatgattgtataagatataataacactaggtagtatcatctatttggaaatatatattaaatttctattaattgtttctatcatctaaagttcattctttctttgtacacttaatttttgtgat

SEQ ID NO: 11862 - DNA, 537 bp, Arabidopsis thaliana landsberg
gacatacctactatgattgatagccatagactaacgtgcggactagaatcagaatcacagctacataggatcctcagaagctcataatctataggcgataacatccgaaaatacataaccatcagtatgactagagagtagaaagatgatgtgaactttccgatatctggacagtaagcgatacacttcgcctgcatatccaccgtaaatcctccaccgtcacctccagcgtcgtatccattcccggcgcggctacgagatttgtaacacttagcaggacgcccaggcttcttgccgttacaacgtccggactcggtgcacggcatcgttggtcgcaccaaatctcgtttctcaaagcctccgctaggtccaggtgacccgccaacgtatggagcatcatctcctgtcgccggagagccgcgtcctgaccggggatcaaccggattcgggtatacatcgtatgctatagatcgttccgcactaatgacgagctgctactatatcagtgacgaggatgatggctcgatgagtagcgca

SEQ ID NO: 11863 - DNA, 689 bp, Arabidopsis thaliana landsberg
aggcaacaacaaatgataagttttaccttcaaaacttgatggttttatcattggtcgagaggagaaaaagagctccatttgctgtttgacaccatctaattttgttaattttctcctctatctccaaactcttgaggtaatcaaactggtaaacaaggatagagcatgaaaagacagataaaaggtatagccaaatagctgagtaagaagaaaacagagtaaatcaaatacctcagggtcatgactctgaaactctgttttataacgaaactctggatgcctcagtggataatcagcttcttcaagctctcttctggttccactgctctgtaatccacagcatgcaacaacaacatataaccaaaatgatccaaatcccatatcagaaaaacgattacaaggtaaagtggacatacattattggtatcggttctctcgaaaagaacaacacgtcctccacggtccccagtagcaagatggtttccagaattatcaaattcaatcgctgagattatatcaactgcagaggaaacaccagctacagtttttaagaaatttcaactaaaattcagaataacatcgattcagcaaaacgaaaaacgactattgaatctaattcaactacaaagcttacaactttcaatttacccagatacaaagttgacccaaaatcaaaactttttcattga

SEQ ID NO: 11864 - DNA, 1069 bp, Arabidopsis thaliana landsberg
atctagccacaaggttagtctcctggctggtaacctatatatgcagaaacacccataagttcaagtagaacacaaattgactagtgcattagactaatttggtactgagctttagttacgacaaaaggaaacaaggccaatagtaaattccctacatttcataactcaagtagctggatcatcaacatgaagaaaatatccacaacttccagtaaaaaacaggcttaatatctatacgcatttacttttcagaatcctgaaattaaaactcacttcatttgacacccaaacaaaaagtaaaaaaaagttgcgtcgagtacaactaccacaggcaaacgcagagatggaatgcctcctggcgggaaagaaaagtccttgctcaggtagtcatgccctttatcagcaggtaatccattagtaactaattcaggagggatacttgaactttctgacggatcaatattcatttcactaattttcttgatcttcttctcttgtacctgtttgattccaaataagaggaggagtcaaattataagagtaaagaaacaaactatttctcttattttgaattgagtcttggaagcaaaagaaaccagtttctagacagttttcacacgtgacacctaatatttctacactataaagcatatgaaacaagattatggaaccgagttacacagaaaggaatttgctataagtggcctatattttgcagacatgtgatataaaaatccattcagatgtcacaccttccaatatttgatggttttatcgtttgtagaaagcagaaacaatgcaccattagctggctgacaccatctgattttgttgattttctcctctatctccaaactcttgagatagtcaaactgaaacagattgaaaagcaagcttattgagtagctcaaggaacacaattactcgtaagtgaaatctggtgataagttttgatgtacctctggttcatgactgtgcaattctgttttatatcgaaactcacgatgcctaactgggtaatccgaatgctcaagatccttcctggaccctccatgctgagagtaacatt

SEQ ID NO: 11865 - DNA, 1376 bp, Arabidopsis thaliana landsberg
ggctcgatcaacacgggctcgggtgtattttaaattccaaaatccatttactcatcaatttaattaactctaaatccacaccaaagaaaagagtcacattttacactgggcctacacaccacaccatagtccatgtgcacgtaggttatttatttattaaaaaaaacacatttgacttataaatatagaaatattaaaacagattcgcttctctctctcactcacacaatagagagaatcattcagttacaagaaaatcgtccttttctctcgccgatctcttctcttcagatcttttcctctataaaatctctccctctctcgttcctcttctcagatctgactcaaatcaaatcaaaaactctcagctatggaagtcgaacgatcgaagaaagacgacgatctaaacaatggatctaaatccaacgaagaagaagaaatctccgtggagagaatcttcgaagagagtaacgaaatcccaccgccgtggcaaaaacagctcacgttcagagctctaatcgtgagtttcatactcgcgattctctttacctttgtggtgatgaaactgaatctaacgactgggattattccgtcgctgaatatctccgccggtttgcttggtttcttctttgttaaaagttggactaagattcttaataaagctggttttcttaaacaaccgtttacacggcaagagaatactgtgattcagacttgtgtcgtcgcctcctccggcatcgcctttagcggtacgtttttttgtttgttgatgtgaacgcgtcgatggaatttggtgtcgccgtctttaattttgtttctatttacggctaaaacttttttgctgttaggtctctattgaaaatgacagagtatatacttcttttttgtgtttatcgctttctaaaaaaaaatatgaaaattaaataaactatatagttgtttaacggtttgtgattaaatgatttaaagattttaatcttatgattatggtgtgtttagattaggtgtggtggtgctatcaagattgattacatgcagagaatttaacataattttcttaaataaaaaacgcgtaaaatttattaggttggtatatgtatattatttacataattatccaatataaattgcataaaattaattaatattctaaatagtttacgtaacttatttttcatttaaaaagctaaattttaattaaaaacatatatgtgaaggatataatatgtgcaatagttaaaaaattaaaaccgatcaagttaaaacctagactaggaaactaatatcacacgatcttttttgataaaaataaatgtgtatgggtttgatacttctttgcagtatgtcaaaatcaagtggatacttcatactttctt

SEQ ID NO: 11866 - DNA, 724 bp, Arabidopsis thaliana landsberg
aagagtaccaccggtttacaaaaccgtggagatcgatacttctcaaccgtatttaacccgcggtaactcgagaaccggtgcaagtccaagccgtagccaaaggcctagttcaccatcaaggaccagccaccattaccaacaacacaatttctcatcagctacaccatctccggctaaatctagaccgatacaaatccgatccgctagtccgcggatccaaagagatgatcggtcagcgtacaactacacatcaaacacacctagcttgagatctaactatagtttcacagcaagaagtggttatagtgtttgtaccactactactactgctacaaatgctgcattgccaaactacatggcgattacggaatctgctaaggctagaatccggtctcagagtgcaccaaggcaacggccttcaacacccgagaaagaacgtatcagttcagctagaaaacggctttcgtttccggttccaccgctgccgcagcaaatggatggtcagagtttaaggagtccaagtttcaagagtataggtggctcacaattgggtgcattggaacaacaatcaaattactcttcttgttgtactgagtctcttggtggtggtggagagatatcacctgcttctactagcgattataggcgatggttaagatgattccataatccaaccaaatcaaccggtcatgatttttttcctcccttttttttttgttgtata

SEQ ID NO: 11867 - DNA, 832 bp, Arabidopsis thaliana landsberg
attccaacactcttaaacccgagaattatgattgtatcttcaaagatagatgattaatcaatatctctcttgtgtttgcaatgcaggcatttgggtgggcatacatgtacagctcccacaacacatgggaccatatctacgtctactggatcagttctttcgtaggagcattatctgctgcattgcttttccgttctatcttcccgccacctcggccccagaagaagaaacaaaagaaagcctgaggaaaataaaacaattgggagaacaccggtcagattcttcaccggtttgggctgtagaaagattcacaaagctgttccattctaaaataaggagaccaacaacaacaaaaagtcaaaagtctccttgtcattgtttagatccacacgcttattttacagatttgtgcgacgtaacttttctcttttatgttcataaatcattcagactctcttccggtttaaaaacatttatgattacatggctggtttagtttggtttattatcggttcactctctattctggttctgatttctgacaacaaatcaaaggcaaaagttgtggattcccatccacaaaatttgggaattgggcctaaaatttctttccaagggtggaagaaatctcaagcgagatctttcgacatttggtagtgttactgcgaaaaggaattgggcctggctaaggcccaactgtatactcttgctgaggcctgaccataaaagaagaagttatttacaaattaaatcagccaaacatgttggaccaggactcaccaactgtatataaagcctaacaacattttctccaaactggtaatagatcaag

SEQ ID NO: 11868 - DNA, 1406 bp, Arabidopsis thaliana landsberg
atgcaaaatttggttctgggttctgcaaaagattgagagaaaacatatgggtcagtgagaatttaaacttctcatggggtctttaatcaaaaagaagaagaagaactgaagaacgaaaatgacttgagggtgttttcgtcagtataagaaaaaacagctcatgcttagtttcagttatcgatggatggagtttaagaacagacacgacacgacatagaaataagaacaataagagagaggtcaatgtacaaacgtatacgtttgactcgtgccaaatcctaagagcgaccactattcgttgtttccttcttttataaaagttttattattggttctttaatctgtggcaattttttaaaattagaatgcgtaattaccttttcagagcacagatttatttgtctgtttcaccaaaaacaaaagattttttggtctttccaaaaattatagttaagttattcatttttaggatgaatttatgaagtcacctaataatgtaatgaatgacttagcacataacattctaacggtaatctgaatttgctcatttttaatatttttaaccaattttcttgacaaaactaacattccattacacagtacaaaataaaacactcccagttataaactctctttgattcttctactaagaaatgtctgcacgatcaagcatatcaatcaaagtcattttccttggaaacctaggaggaagcctcaagatcatagcatcttcaatgtctatcggaagatgagtcgcgacaatcacaatccctccttttttcctatgctctgcgataatatactcgagcaatctaacaccttcatcatccaaagcaacggatggttcatccaaaagccatatcggtctatcgatagcgaggagcctcgcaagttgcaatcttttcctctgacccatcgataacattctcgatttctctttcaccagtctccctaaccccattagctccaacgcgggttgagctttgccgattttattctcgagaagctcaaaccattggacattatcgagtactgtgaatctctctttgatggcgtcttttaaagagatccagttgagttggagtttgtattgttgaaagattcctgactgtgtgatgtcgtgaccattccaaaggatttctcctgcagagggttttgagaatccagctaacattctcaagaaagttgatttaccggatccgtttgttccagttaagacaagtgcaccaccgtcatgaagagatacattcacgtgtcttagaatctgctgcgcgtttctcatgcaagagacgttttgaagaagaagccgagggatttgaggcctcctgatagacattaaaggtcaagacttccgcaccggtatctaaagaaacaacagagcagccatcaaaaagaaataagtaacc

SEQ ID NO: 11869 - DNA, 982 bp, Arabidopsis thaliana landsberg
ctcttcaccttgctctccgtctccgcggtggagagtgctttggttttatttttctttttctggtttgttttaactcttgatatggagtcgtaaatggattcaacttagagttcttttcaataataatcaagtgctttcttatttatctgtgctataatctaaatacaaagattttcgacagcaaacataaccgacactcacacataacaagctacgaattggctataatctttttataactgacataaaacacacatcgacttggtagcaaacgtacaaaaaacagagccaacccctaattcaactctctatagtaattcatctgaatcatctgctgtaacatcagaagaaccttcttcttcctcatcatcctcgtctacattgctcattttcactttgcttgccattattttggctaaggcagcagctttacttgctcggtgtgatcgggtcaccaaagtattaggagcagaaggtggaggagatgctacttcttcttcatcatcagaggatgtttgttcaatccttgctcgtcttcttgaccgagctggttttgttgagcaaggagcaggtgtctgtggcactgttgtagtttcagtgatctctaagttgtagctaactccgagtatttctgtaattagccattagaaagaaactaacagtcaaattctcgaaagcataacgactcgaataacttagctttccatgaaaataaaaccaaactgtaatgtacaaggcaagagatcaatgtaccaaagatggaatttgcttgatcttgtgtaagctcctcgcttggacaagcatccaaagattttagatgttcaagcaccggtttcacttctttaagaagatccttctctgaacgtacagaatctgcgagtaggcttaaaagctttttcaacaactttgtcacattttgttctgatggtttcagatggagcagcacaagtattttgcacagcgctgccacatatgccttctc

SEQ ID NO: 11870 - DNA, 1349 bp, Arabidopsis thaliana landsberg
acattctcgaacatgtaagctgcgtggcatttgggtatagggattgtgtgattctaggtttttaggacgatgtatgttgttatatttagcgcgtttttaggatttattctcattttaaaattatatgaaaacccattactatgaatacaatgagttttctttgttgtaaataatattttagattatcatctttcctttgcatattatattgacttttatagcttgatagaatcatttgcttacaatttttatatttccctaacagagaatatcattcatatagtaaaacttgtttcaaaaagttattaaatcaaagatggaggagtagtaacgagaaaacaataatggagaccaattgggatgattggcatttgagcagccgatgaaggttgttttttgtttttttttttcggcttccctttttttatatagcgtcgttaataaattacaaaaactgtatgagctagtgatcaggagatgaaaagcagctcttccaagctctcttatatggatcataagccaaaaaaaagagaagaatgattcagttcttccgtagcttagctttagaagctaaagcctatagaaagagagaataatctttggaggccatgctatttcttgttacgacatagaatccaacacaatttttcacttcaaaaattggaactaatctacacttttccccgcaagagtaatctaggataacgtttccaagtgacggaactttaattcgtttgggcctccgtttaggcccacagaaagcagaaagccgtattttgaaaaaaaaaagaataaagaccaagtatatatacgaagctcaagctacagtagatggacacaaacttatgttttgtggaatagacgaaaaaactggcgctatattatagtatgtaactcgaaacttcccttttatttatgagaagaaagtgttattacaagtgaggtgccgcagacacatattttacacgtacgttaaaggtaaagggacgtgattacaaactgaccatactttattaagaaaaagaaaaacgttttgatttaagcctcgacaatctcctcgatcaactggtgttgttgcctaccggcagcgcgggtcaaagtggtctcaagtgtgttgaacttgatcttcctagcttcctcgggagagatctggaaaccatttgatatgacctccaatggcaatgccctcaagagcgaggttctacccgccaaagtgctgatcattgcgttttcattagatttgaaagagatccactcgaacttgtttgcgtgggactggacaacgtttgcgaacccttgtgggatgaccacgagctgtcccttctgcaccctgttgaccaacacgttct

SEQ ID NO: 11871 - DNA, 639 bp, Arabidopsis thaliana landsberg
atgtgcacaactatagttcaagttgtgtagttatttgagattttggcatatggggtatcactaatgcatcaatcatgtttttgcatccgagggttctacttgtgtcgggggaattcttaagacatcaaacctttgttattttcgaaagcccctagccgagttggttaggtggtatgagtagcactccttaggtcttgattcgaatcctagtgggagcgaattttaggttgaggttaaaaaaggtcactcgctggttcccctggttgtgtgcacacgagatggactgacctatgggggcggatcctcgtgtaggggctgggagagctcaaagcacgagtaaagatctgtcctatagggggcggaccctctgttgcacgggggaccagctttcgtgacctttctcggtcggggctccgattgagcttcttcttaatataataccgtgggggcggtctttccctaccgaccgagtttttcaataaaaatactttgtggttgtatgttgcttgggttcccttgatggataatgcaatcttggcttaggcatttgattttggaatgttggacttggttggctttgcacattgagaagcaaggcaactatattatgattgcatgctctattcattgcaatgtgtg

SEQ ID NO: 11872 - DNA, 638 bp, Arabidopsis thaliana landsberg
  unsure (1)..(638): unsure at all n locations
gaatccatcgtggctagctcgggtacggtggtcggagtaaattagtggccagagcatatccacggcgggatatttactgaccccaagcgctatccaaccgatccgagcgttaattgccaacgcgagcacgaatccgagcgcacagctcgtcggcggcgatgtgatctgaacttgatcctatccggttcactataccatggaacatctaacagagtgcctgacagacgatgtttagggtagattttctcccaattttccatggcaacataaccaatgctctgcagcaaagttgtagccctacaaaccatcttcacttttgctatagcattcctagtcaaattcctgctggnnnnnnnnnnnnnnnnnnnnnnnnnnnnnnnnnnnnccactatcagtctgaattcagactccaagcagtctgacagctagactttgggcacatgtttctccaatttctgttcagtaccagtgcttagtcacttaagtaaccttgttctcctatcatagctctacaaacttgatgtggtgatctagggcaaactctttataacttaggagatatagagccctaatgttgagccgaatccactgaaattcagactttgccaatagagttccaataggactttttggaaata

SEQ ID NO: 11873 - DNA, 544 bp, Arabidopsis thaliana landsberg
gtctggtaatgcagctcgtacacctgacagaaagcttcggcattaggactcatcccctggcttttgcgggcccagatgtagacactaagtctaaccattgcattgggtgtcaactgatgaaggtatatttcaaagttcttcaaaacctctcctattatatcataaagaggcaatagaagccccgctttgaagaagcttttaaacacaacaacttcatcatccttcggctctggaaccatttcctcgctagcaaaatgaacaagtttactctcagcttccccaaagtaacccaatttcttcattataaccatatcatctgtcgtcacagtggatctaccaaattcaaggtggctaggtttttttgggctcaggatggtgtaacctcttcatcttcgttaccacttccctctccaactgtgttttgctcagcttcatcagtcaaagtaccttcggcaacaggcttttctggcacaacaagtcccgactgcctcatcacctctgatattggtgccatctcagttactttggcctcatcccctcatgg

SEQ ID NO: 11874 - DNA, 950 bp, Arabidopsis thaliana landsberg
tataaaatcccaggtgcagtggaggcattctccagaagacacccgactacaacttcttcgcctcgagatcgttctagatcaagaaactcagacgacggacctttctctaagcagacagtaaaaatcttactctttacatacattgttgatcagaaccgctaaataagacaaagacctaactgtgtttgttttatttgtgcagcatggagactccgaaagagcaaacagttcctcaagatacagagcatcttcttctaggaaagccgttgctgcttcaagctcccggccaagttctgcaggtggaccaagcgaaagctgaacttcaagtcgtctggtttcctcaagcggtggtggtggcagcggcagtggaaatggccgtccctcaactagccagagagtgcaagctggatatgaatccaagactctgtctttctctcgtgcaacagcggcaagaaacactcgggaagatcaattaagaagcttcgagcttctctctcttcggaaataaaggaaaatgatggagagagagacagcaaactccatgaaaacccaaagaaattacctctgaagaaagatgagaatcttggtttgagggaattcatatatttgaacctgatgaaatcctcagatctttttacatgtaatttcagcttcagcttgcagagatctttttcactcgttttgtttatgtaatcgtgatatgtgttagacaaaaataacaataaaaaatgtagagagagtttccatgtaaaaacggtaaaatttctatccgtatattcgattacttcgaacctatctgtactggtactgtaataaacaaaacaatcaactgctctttggtctcttttaatgcttctgtttttttggggcaggcatactctggtcccatcatgtaaaaacggtgaaattttggcttaaaaaaaaaattagctcatctacttagtcaaatc

SEQ ID NO: 11875 - DNA, 1131 bp, Arabidopsis thaliana landsberg
catagttattattttctattagtacaatacataatctctagatcttagttacggaagacacaattgcgtttaaaatgacaacctcgaagtacaccattagattgtttgtttaggtgagtatcattagacacaaggaatttacagacacatcttctcgcgtacctaaatttgttacaacatgctccgcctcggtgaggttgcccggcgcgtccgtatacatgtacattgatgcaatgtctaactttcggttcgcaaacttgtggcattggcgttggcaccaccttcacaggttcctcgggcttcttaggaaacaccacaattgccgcaccggggtcaccaccacctgaaggcttgcctccttgaaacccacccctataaccggtgccaacattactcccatccctaatgctgccgccgctagggatacccccacccatatagccggtgccaggattcccaccaccaccaaaatagccgcttccaatactaggagagttgccactaccaacaaagccgcctcctccacccctgccggacactttaatcggagccggaaatgatgtcaagagtacgataacggaaatgagcatcaatggaatgatctccatgtctaatgaattagtagagctctggtcaagatgaatttgctttaatttgtagacaaatgatcaatgctttatttgtagggtctttaaaataggaaattgtgatcattggttcctacaaaacatggaaatgtggaatgtgggaatcgattcatataaacaagggaggatggtaatttcctattttatgtggggcagtaaaaatatatgttgttagctattttgggttttaaaagctctgtttctcctagcaaaaggtaaattaataaagtcccgagaatttacccaaaaaataatgatccgtgtggaacttaactaagggggtgttattagtttataatccttctatagttctattatgcaaaagatatctgatattacgattttgcgtgttaaaagtattttaaagctgtgtccttggagtgaagttagagaagtaaaacatattggtgttggtatttatagatactaactctaaataataaggcacactctattatcatcatcactctctgaaaacccaaaa

SEQ ID NO: 11876 - DNA, 712 bp, Arabidopsis thaliana landsberg
gactcaagtatcaatattttctcacatatcataccttaagctgtaacaaaaaaaaaaaatatatacatatatatatatataagtgtcaaccaaaagattagaatctcaaaaaaaaaacatgattagttttgtatttgcaagaagtctaaaaacaataatcctcacatttgaattgtctaacccgaactttagtattaatacacatatctaaagcacttgatgaaatttgataatcttactatttttttctttgtcacgtatgaggttagcagtgtattgcttacattcgcaatccctcaaataagcaaatgatgcagtcattggtgttggtatggttttggagcttttgctatagatcaaaatggtattggtgttttgtgtgtttagtggttgagtatttatagtattttgttatgttaatagggttttgattagaaaatataaaaatattaatgagcaagtatttgatatctttgaaaatctttaaaccgtcacaaactaagaatatgctacgtagatgcttaatcaaatattgataaaaacttttagttatgagaaatttcttattcgattagttggattgaatatctaattaatatggttcaatttttttaggaaacaaatgctaaatataatttaatctctagcattataatagtaaacaatttgctggggaaaaatctgtttgttataattcagtgaaaaatgtcgt

SEQ ID NO: 11877 - DNA, 622 bp, Arabidopsis thaliana landsberg
gatgattagaatctcaaaaaagaaacatgattagttttgtatttgcaagaagtctaaaaacaataatcctcacatttgaattgtcttaaccctaactttggtattaatacacatatataaagcacttgatgaaatttgataatcttaccatttttttctttgtcacgtatgaggttagcagtgtcttgcttacatttgcaatctctcaaataagtaaatgatgcggtcactgatgttggtagggttttggagctttgctatatatcaaaatggtattgatgttttgtgtgtttaggtggttgggtatttatagtgttttgttatgttaatagggttttgattagaaaatataaaaaatattaatgagcaagtatttgatatctttgaaaatctttaaatcgtcatcaatagatgcttaatcaaatattgatgaattcttttagttatgagaaatttcttattcaattagttgaattgaatatttaattaatatggttcaattttgttaggaaacaaatgctaaatgtaatatactttctagcattataataagaaacaatttcctgtggaaaaatctgtttgttataaactcaatgattaaatgtcggttagattttattta

SEQ ID NO: 11878 - DNA, 450 bp, Arabidopsis thaliana landsberg
acatactaaatatcctgctgtggaagaggacattagtgctgtggtaattgcctacgaggctccccaatgagacttgaaaaaatttatgaggatgtcaatgaggaagttacttcaccaacaactgatgcgcaaccatgttttgatgatgctctgaatctaagtacaacagaaatatgtgcttctgtttcatcttctgaagatgcaatctacgttgggagggtgtttagagacaagcttcacatgcagacaacgccagcaatatatgcaatatgatggtcaatccattttagacagacaaggtccgacaagtccgaggcttgtataagcgtgcgttgattcacggttcttcgtggagaggtgtttggacaatgtgttgcaccaggggccggtaaactcttgaagtaagggaaagcaacttttgacgcaatacctggtctggttaatgcaagg

SEQ ID NO: 11879 - DNA, 586 bp, Arabidopsis thaliana landsberg
  unsure (1)..(586): unsure at all n locations
aaaatcacgtatcgtgttttgttctcatacctttggtgacatattgttgctgcacaccgacgttttttttaggtgttgctgcgctaatacgcataggccttgttgagcaatacaaaccattcatttcagccatagcccgattcctttcactttcctctgcaaatttaacaaatccataaccctttgatcgtccagtacttggatcagtaacaaccttggcacctctaacagaagaataatgaacacggaatgtctcttgaagaagataatctgtaacatcaggtgctaaatctccaacaaagatagaatgatcaggtccagcatcaactttctgtcctgaaccaaaagaagcccaatttaaccgaaaagttaactcagttccaggcatctgtgtcccattgtacgtctgcagagttctctctgctgctgcatgagatataaactctataaaaccatacccctctggctgtcccgtgatcttgttacgtattaccttgacagaaacgagctgcacaaatgtgtatataaaccattacaatcttgacacacttgaagatcatataggaccagaacttnataaattaag

SEQ ID NO: 11880 - DNA, 830 bp, Arabidopsis thaliana landsberg
aatccgatcatctgtgcatgtaagcaatgtcattatgtcatgcattattaataataaacatataattgtgataactgatgatatggttgtagatgtaaagaataccaaagagatggcgatgcatagaatgctgaatccagggaaatagaatggtgcattttcggagagaaatagagctatatcaaaccaaaataaatatttgttaaaggaaataaaactttattttctcgatattgaccaatgaacgctataaaacttattagtgatgaataacgttttattaatgatagttattaatgaatggtgttcattggtcacttagtgttactgtgttcacttacctgtcaatggactatatacaaatggagccacaacttgagcaaaagcccttaccccggatatacatccttggaccttcccctggaacgagatggtaatcaaaaataaaggcataaatatcgtgtttaaatataaggtgttttcggcacattttaaaaagtgaatctaagtagttaatcttgttcttctttaatatgttaattgttaggcaagacagaatacatatcttaaaagccgtacaatttaattgttaagtttggtggatttccaattcaaaatcaagccaagagtggattgatcatatcctttttatattactctagatcttttcttacttcaaatgtgagatttctaacattcttgagggatgatgattcttctagccactcatccgaaaactgattatatgataactttgatattttatcgttcagatcaaattcggttcaagttgagctagcatttgttgaactcttctactatatcaagtt

SEQ ID NO: 11881 - DNA, 634 bp, Arabidopsis thaliana landsberg
  unsure (1)..(634): unsure at all n locations
gattctcgtaaacggcaaggttgaatcaattcaatcctacaagaagattataggttttgtacctcaagatgacatagtccatggaaacttaacagtggaggaaaatctttggttcagcgcaagatgcaggttagctacttttttgcttaatgaaaatcttattcaactgtatgcataatctcattggtcactgcatacaggttgcctgcagatctcccaaagccggagaaagttttagttgtggaaagagtcattgagtcacttggcctgcannnnnnnnnnnnnnnnnttgtagggactgtggaaaagagaggaatatcaggaggtcagaggaaaagagtcaatgtgggtcttgaaatggtgatggaaccatcacttctgatattagatgaaccaacttcaggccttgacagttcatcttctcagttacttctcagagctttacgtcgtgaagctcttgaaggagtaaacatatgtatggttgtccccaacccaggttcaacatatttactctcccatttgttaatactagagagactattagatcttattctcatttgatctctctctctgcagctatactctttttcggatgtttgacgatctgatacttctagcaaaaggtggactaata

SEQ ID NO: 11882 - DNA, 628 bp, Arabidopsis thaliana landsberg
  unsure (1)..(628): unsure at all n locations
taaaaaaagcaaaaaagttataccaagcccaatagctagtaaaaagtttccgtcgagcaataataaggacacgcaaggaaaatcaagagaaattggacaaatgagnnnnnnnnnnnnnnnnnnnnnnnnnnnnnnnnnntagcagcatagggggggcacatggcacgaggaacgtgaacgggattacgctctcgtccgtgtccttttgtgcctccatggcccgctctagccaccgggcgacgttcgcgtcgctagtgacgatgccacgacggcaaccaacatcctccaagggccatcagtcatcatctggtggaaaggacgtgctcttgccatgagtgatgccacctcctccgtagataagatatgattgttgagaactacgttaccacggatctagtcgaactacgttaccacggatcactagattcgttccattccctcccgtcaacacattaggcacgaaaagatatggatgacccgtatccattcacagaaacacgacagagagtactagaaacacataatgtagggttgggcttttggctctttctcttctttattccgtatgagtggatacgtgttctatatacagagacgtgatagccgttagggcggtattcagtatttg

SEQ ID NO: 11883 - DNA, 922 bp, Arabidopsis thaliana landsberg
  unsure (1)..(922): unsure at all n locations
tggtattaacaggttggtaaggctgttaacaaggttaaaccagttaggaattagaggctagcaagtgaatcgcacacttttgcaaaaggaacaatgtccatgagtcactacaacaagtcaagtggaagtggtatggcattgacaagacgataagaggatgtgtgtgactaaaaagagggaccaaaacgaagttattgttagagcgatgagtagaaaagattgctagcagaagcaattaagataagcaaaacattttcacattattggtaatcattcaaacaaaacgtttggctgcttccctcttaaggttttaaaaccagatcaacgaggactgacagtaacagaacaacaggaacattcataaaaggaaaactacatatctgtctttcagagaacagtggtctgtgaagccaaaaactgaagggtatctgcgttagacttcaataccacataactacgagcttgagttgcgataaggtcatggcctacttcaataccgcaaactttcaatgttcatcaacctcataacctcagtctcacaaaccaagagagattgaatgcatatatccatgacaatcagcttcaaagaagtcaaagcagcctttatcaattccatatgaaagaatccctttaaaactgtctcacattagttctccttatccatgagcatatctacttgtcaaatatctgagagagcaaagttagaaaacacgaactaaccacatcagatttgtggtcacaaaaaaaaatccgaacgaaaacaccggttcaatcaacaatttcaatcatggatatactctaaataaattgtcatcgacaaaaatctctccttgtggagccatagactcgccaaagtccgacggaacttggcacacgaacaaacnacaaaacttggcttctattgttattgtgtgtgtgacat

SEQ ID NO: 11884 - DNA, 1267 bp, Arabidopsis thaliana landsberg
tccattgaagttgaacctggtgtgaatgatcacaaagggagaaccagagaacaattatattttatatatctaacgcgttttttaatttttaaaatcgtactattgaacccaccatgagattaaataaagaaccatggaaaggctaaacaatgaccgagttttattcttcaaataaacattatgatcttatgactttttatcttcattgtttatgacttagtgaatgttaattacagttgactaatggaattattagcatagttagtactttgaattttagtatcgaagcagtctcaaatcatagtcaacttaatatgaaattaacttagagaaatagtattattgtggcgtacatgacctgatcactaaccttgcgtaaagtattgaagatttattgattatgggtcgttggacggaaggacttgtacttgaaagtcttttctgttaatattgggcttagaggcccatcattttaaaggctaagaaattctttatatcttctattctttttttttttttcccgtcttatatcttctattcaagcgtttcctaatgttatttatccgaacagactaatcagtttgggccaaaatcgaaataacaaatcgtcacggtaccagtaatcgctagtgtatacgtgtcggtagtccagcacagggatgaacgaagcatgaactaacttttccacgtgtcatatatccattacacgatctatgaaagctggggtattcttgtaaatataaattatcctgagggcactttcaccaaggtaatcgttattctgcttcccgtttttttttatctttttccggtaaatttctgctctaactttttttttttcatcatctttttggtttcgccaataatggaactcttcttccaccattttcctggaaaatctcggtatcgagaagatgaatccctagacagataaatctagaatcactcaaatctctgctcttcttccgattcagatcgtatcgaattttgaattttgtatctcgctacactgttcgattgagaattctttttttccgattgattcgaatcggattttgtttttttcctcgatatagaatgacttcgaatcaacgtatgttgttctactcctgcattgcgaaaggaacagtgattctcgcagaattcgcttcaaaggaagagccaggaatcgaagatctagctttgagatgcattgagaacgtacctccacatcattcgatgatctctcacacagtccataagagaacctacgcgttgatcatcgatg

SEQ ID NO: 11885 - DNA, 538 bp, Arabidopsis thaliana landsberg
  unsure (1)..(538): unsure at all n locations
cccaaaaaaaaaggaagataaatataaatgaaagttgataatgannnnnnnnnnnnnnnnnnnnnnnnnnnnnnnnnnnnnnnnnnnnnnnnnnnnnnnnnnnnnnnnnnnnnnnnattaggatgatagaatctatgccctcgctggatgtgtcttcaatagtcgttacaggggccattttaatagtcttgttcaccttatatatcatctctgactcttgcaacaagtatattcaacctcctacggaactagctcttgagacacatcaaaactctcatccctcacttcctcctctgcctgtgcctctgcctctgcctctgcctcagcctcagcctcagcctcagcaagacaatgaaaccggacatctaatgccgcttcagtctcaactagaatttaaaatcggttatagggcatcgatcgaggaaatggagtttaaagatattgaaaaagaaggatttgatgagattggttgttcaatttgtcttgaagagttagaagatggccatgagattatccgtataaagaagtgtagacatgt

SEQ ID NO: 11886 - DNA, 489 bp, Arabidopsis thaliana landsberg
  unsure (1)..(489): unsure at all n locations
tgtagcggcgtccctgccgcgaaccatcactgggaagctcaagcctcgctacgtgggaccctaccgcgtcaccgagatcatcaatgacgtggctgttcggctagaattgccgcccggcgcgcgcctgcacgacgtgtttcatatcggcgtgctccggaagtacgtgggctccccacccaccacaccgccgcctctgccgcctcttctcaatggtgcggtagtgccggagcctgcaagaatagcgggggctcgcttgtcgcgtggcgtgcggcaagtcctcgttcactggagcggcgaaccagcttcatcagccacctgggaggagttcgacgacttccgcgcccgattcccagccttccagctcgaggacgagctggccttcgacgaggggagagatgtcatgtacgggcgctcgtacgccaggcagcgtcgcgcccgtgacaggcgccgcgcacaggagcgccaggccggtantcttgggagatcagc

SEQ ID NO: 11887 - DNA, 857 bp, Arabidopsis thaliana landsberg
  unsure (1)..(857): unsure at all n locations
ttcttcttctctgtttcaggcggttcattcgcgccgctcaagcgtctgataaggtgagatttacattgatacatttcactagtcatcctcagcatttcaaataacttggaatcagtaaactgattttgttggtttacaggttcctctcattgaaatggagtacttagccaactatttcgcggaactaactctcacagaatatactttcctaaggttccttccatccctaattgccgcttcagcggttttcttagcaagatggacactcgaccaatctaaccatccttgggtgagtgagctcatatttctcattatgaatgtttttacctcattgaaacaatttttggtgatgtgaatgttattgcttacagaacaaaactctacaacactatacaagatatgaaacatccgctctaaaaaacgcggtacttgcaatgnnnnnnnnnnnnnnnnnnnnnnnnggaagcactcttatcgctatacgcaccaaatacaaccaacaaaaggtataataataaattcaatctaagaaagtggacactgaatctgaatttggtctctctcactctatatgaatatttgacagtttaaaagagtggcaacattaacatctcctgaacgtgtgaacacactcttctcaagatgaaaccgcagattttctgattctcctgatatgaccaagtcagcacaactctctggcttcagcagtttgtatcaggtgatcatcaatcctagtttcagacatcagttttggtctctacagttatggaatagttttccttgtagttgtctgtctatcttttacctgtaaactgttgtagtgtcaggtgcttccaaagaagtgccatctcatggaa

SEQ ID NO: 11888 - DNA, 802 bp, Arabidopsis thaliana landsberg
taatgaaagtttgttgcagtttaaggcggcatgggctttgaccaatgttgcgtcaggaacatcagatcatactcgggttgtaatcgaacagggggcggttcctatcttcgttaagcttcttacatctgctagtgatgacgttcgagagcaggtttgccactaactagctagataactgcgtgcttccattttgtatatgtgacctggtccacctggatacatgcctctaagttccgtggtcgtatttggtttgtttgttgtttgttttgatccttagtggtttttcgtgatatagtcagccaactgcttttccgtagtcataggtgctataactttttatggcttcgtacaaacccttacatgatatcattgtaggcggtgtgggccttgggaaatgttgctggggactctccaaactgcaggaatcttgttctcaactatggggcccttgagccattgctggctcagttaaatgaaaattctaagttgtccatgctaagaaatgctacatggaccttgtccaacttttgtcgtggtaaaccaccaacaccatttgaacaggtatgactacaggaatggcttctctttgatttttctggacaacttatgattgatggttctagtttatttatttattgttattattatatttgtttcgttgtgttccttactttactcaagcctagtgttggttattcatatgtttcaggtgaagcctgcgttgccaattctttcggagcttatctatctgaatgatgaagaggttctcactgatgcttgctggggctttttcctacctttt

SEQ ID NO: 11889 - DNA, 1029 bp, Arabidopsis thaliana landsberg
gggagtctgatcagtatttaaagagattttttagcaaaaaaatgtaatggggtgggcaaataatattctacaaaaataataaataaataaaatacagatcctttctctctcttgtacgattcaccgcatcacgcgtctaatgccttgccaataaggagtttgtggacatttcatcctatctacatgttagttacttagttttgaattttatggtgttatattcttaaatagtttatgaaaataggttattaattcacccataatatattgagatacttatacaatttactttttctttacctgctttggacatttggacttgacatttaaagaatttaatttttttcctaatatttcttacattttaatattatataacttaaaataagataatgaatttcaaattttttatatctgtttttggtgagttttccttttttgggctataattattgactattgagctacaaaacctctttcctttttttttcccaccgtgtggatctcacgcggttttgaaaacagcaagaagttcatatgtctaaagctataaacgacacaaagtgctgtcctccttttctgagtttgttcacacgtgggaagccaactgtaaaatcgtaagcatgcacgctgtttttttttgttgctagccgttataccaactgttcctcctactcatacaccaactattaatttttaaaacattccttttttttttgccaacaataaataaaataaaattttcttcactttttttttttttttcaaattgctttttaaaaataatttaatatataaataacttcttctctgtcaaagatttttcctgattctttctttttcctctattgatttttttttttgctcattcgttgtttcctttcaggaaaagagaggaaacaacgtttcgttttctcagattctttacctttcttaaggaaaaaccccaaaagagagaagataaaaatcttgcattcagattttagggtttctgacaaattctccgacgaaattgaagatccaaatttc

SEQ ID NO: 11890 - DNA, 1276 bp, Arabidopsis thaliana landsberg
caacaaagagattcttttcgagatcattgatcgtgtcgtcaatttgaggttgatggaggtttgcttcttatatctttattccatcgtctttagtgttacttgttggaagctttcttgatgtttctttgtttgttttctcagcaagattttgcggataaggcgaaggcaacgatggaaaacgcggaaccagatcggaagcaatggcagactctctgcaaaaactttctcaaaggaagatccgagcaagtttaaacaatgaacaaaacctgttgaattggtttgaaaatcttaaaaaacatttctatgtaataacaagattaagaacgatcacaaataatcatttatattacagtaagtgtttaaacaacaacaaaaaaatttggagcattcttagagattgtgtacaagttaaaaagaaaaagaattcttgcgtatgcgatattggatcagtgatcttcagcagagaaatctggttctggaggtttctgaaatttcaccaattctttagtagatgacaacaacaatgttgatttcgcggttcggttcttgtgaacgctacgaagtgcatttgccgcaaactttgaagccaagaacgttgctcttatgctataaggacttcctcctgctataaccgatgctgctgccgcttcttcttcttcctcttcttttctaagttgctccaatttcttcctctttatgtaccgtcgccatgctgcttgcatgaagcaagcggcccaagtcctccattgctgtgaatagaatctgaacgtgtgttgtacttgtctgctatggagtctcctgaactggcttgccacgaatttcagctcatcggctatcagagcgaaagcttctacttcggttaaggccttcacggttcttgtagaggaagggaggttagaaccggatttgggatcaagcgcccatgtcaaaagctcgtcaccgcagaaaactactactttaagtaaactccggatgtagaaaccgcttctaccgccatcagtggtaacactttcgagcctaccacggataatgaagagcatcttcgtgactggatctccctcacgaaccaagaacgacttctcagtgaacagacaagggataagcctcacacagaatgcaacaaaaagagcataatccaaattatcaaacaaaggaacctttgccataggaaaaagaaaacgggaaaaaaaagactataacgaagaaggtaaaacgagtgaatcacgaaaagaaacatactcttcggactaacgcgagacagagaagacgatcgaaa

SEQ ID NO: 11891 - DNA, 714 bp, Arabidopsis thaliana landsberg
gcaaacattaaaccatctctcaagggtccaccccatgcagctttcccactagctaatacatagaaacaagagacaattagtttaaaagggattaagagaagcagcactgttttagcctccaaagcttttaacttaccctcggtacaagacagctccggattcattcctatgtttgtcttgacaacccggagataaagcagagtgcctacctgtttagtacacaaaaatttgaacattccagaaacaatcaattcatagagaatgtcatatcccaaatgagaattcaagagagcttcctgagtcatcagaatgtacatgcctcaaacttgggaatatttcttcgtgttcctccttcgaatgcaagaactggcaaaagtgctaattgaggtcctttaatgtccacccaaaaattctgcaatgacatgatgagtaaaagaaacaattcagtacttactaaggcgatgttagttcatgcaagaaagcttaactgcagctgataatttaaaagtcaattaacatttgtttgtccaataatggtatcagttttcttctgattttagaccataacttcaatactcccacctatttatttactgatccaagaccatcaacaaacaagttcacctttattggctcagagaaatgaggactgaagtcgcggaaactgacaaacatatatttgtatggtatttgacaattaaagtataataaaat

SEQ ID NO: 11892 - DNA, 704 bp, Arabidopsis thaliana landsberg
tatcccacctgagactgctttccctggtcaagatattgacggccggagcttctatagatgttttgattcagatgactgttttcaaaacgtaacagatcctgacccagaaacatcacgcactgagtctttggattatctggtaggagacgaggaccatgaatatattaagaggacatgctttaatctttctagtttcagctctggaacagttgaaagtttttcatcaaaacgaatacccgaacgagaagatgattctgaaatccataaaatagaatcctatggtgaatttgttaatccacaccaatatctacctgtgcagagaccagtgttttcttcagaacattctacaggtagtcaaactcttaataattgtggaggcttgaagtttgagtcaaacaagggaaacatgaattttcatgcagacttgcaggttggtggtgtttaggcgtgtaagccttcttcttaattgcccttaaaatgtctgttcttttttataccattctcgcctggacacacatactttcacttttttctctttgatgttttcttgataaccggatgcatattataatgattcaaagtctgttcttgtgttctgtgcatgaggtatttgtttaagtcttctgatgtcccatgcatgtgtgatataaggccaaactgcaaagagaaatgtcccatattatccctttctcttgattttgatt

SEQ ID NO: 11893 - DNA, 728 bp, Arabidopsis thaliana landsberg
  unsure (1)..(728): unsure at all n locations
actacctatctatttaatcttgcttggaaaagtttcctgtttagcagccacgcaaaattcttccctgatgtctcatttctcccctaattccagttctattgtggactgtgcctcctctgaaccatatggccaccatacaatggatgcacccttatcagaagtttctcccaatttggttcctggttacgcatttcagttctttcccaagaaagaagaactgctaaatgacttgaagaatgagtttatccactgtcagtcggatggtgcaagccgaatggtttttgatagacatgtaggattcgataacggaacttcagagaggaattctgggcctgatgtaagcagtgaaagagaactcagcctcaaatgtgaaatcattccttcagtttcccctgtctgtgtcaaaccatacaacagttctgatggtcatcaagttgaaaaggagcttgnnnnnnnnnnnnnnnnnnnnnnnnnnnnnnatgagaatagagcagtccatatgaaggttaaaccagagcttgcgttggagaacacggcttacagttcaattcctgggaactatagtagatgtagtgatgttcatacagttggaggaacgacactgccatggtctggtgtctctaattgcgcaatctcctatcagacagatgtcgggaaagaatacccttttatcccacctcagactgctttccctggtcaagatattgacggcaggagcttctatagtt

SEQ ID NO: 11894 - DNA, 768 bp, Arabidopsis thaliana landsberg
atggaaacctcatatgtgcaaaggttcaagcccctttggtgggtgacccttaatacaagttgtggctgtctccttcagtcaaaatgtgagctgaaaagaagaaaacttttgtgaaatttgattagagtgtaacactgtgttgtcaaacttgtgattattatcctcctagaacagactaagtagtagaactcttttttgtatcatctgctgatccttagtagtttagtcatttgattatgatttataaatgtcatttatgtaatttatatatatacagggtactgatcattttaggtgtcatatatagaagtaaatttcagagagtgctgtgcgggagaatctcctttggtggtcattgtaaggtggtgaatggtattatcaatgggacatgaaaaaaaattggttctcgggttcttagtgttgtaggttcgagagagtccattgttctcttttgtggtttatctttgtctctgttctgtttctaacatctcccaattcagtaccaataattagtggaacaaaaaaaaaatacttttatagtccatactctaaaacatgactaaagagattcggaagcgactttaggtcacaaacttttggaaggattacaatatttttgaattgattgatagttttaaatgtataacaaatgaaaatttgcggaataaaaatttataaggaaaaaattccactatgaaataacgaattaccttttttatataaaaaataactatctttggattgtaaacaaaatttcgtgtaaaattt

SEQ ID NO: 11895 - DNA, 736 bp, Arabidopsis thaliana landsberg
accccctggcattagtcagaaagcatttcaaactcgtgacagacagacagtatggtggtttttcgggaagaagtccactcgaaaacatttcggtgtgtttttactagggctaaccagatcagccgataaggtttataaaaaaaaaaaaaaaaattgaaccaaaatcatttgttaaatgttcctgacccaacgactaccaaataaacatgatttcgttgtcgatagtcatcactaacgattataaagttaacgaaatataaccgattgtcattgttgctaacgactaaaaaaaactaaaaccgtaaaatatggtatagatgtgagattttttgtcgaaattagacttcctttattttgaactagaacttcgaaattcaaattattagatacttttgtctaagtagtttcttcgtcatctgtttcttccacttccacgtgtgtaaatttttcgtgggtttcaggattaagtcttccttctgctatttccttagtcttagttgttgacaaatatgtgcccgtagaatcttcatactttcgaatgacaaattcatcgccagactcactgtcacgcaagaatggaaggttagacacctcaggcacattcaagtgttgaagctcttcaattacttgattatagacatactgatatttgaaaagcaacaaaattatgaattttttcagatgagaagttaggtcagtgctgtcctccagtagttcctctattacctgaaagaaa

SEQ ID NO: 11896 - DNA, 1184 bp, Arabidopsis thaliana landsberg
tcttcattcagttcctcaggtgcatatttattaaatgggcttgtttcttagtctttcattactagaataatggttttttcctaggtttccatgggtaatgagctggactaataaaattgaattggctctgttgaatctatgaatcagaagcgtgtcatcacttgtaatagctgaccctatagtgaaccacataatgaatatattgcgtattgtaaaaaaataaaatattttctgcagcctgttgctacaagaggtctcagttcatgcatttccaagccacccaacggactcagcatagtcaggcccttgtcaacaacatcgacgaacaggtcatcattagatataagcaaaacgcaacaggaaaagaattccaaatgacctgcgggttagtcagaacttgttcttaaagaagtttacacttgtttttttaaaattgaaatatattgtatgaccttgaatagttcaggtaaagagcctctgggtccaagaatatccatgtcgcgacgtgctaaacccgtcttaccaaaacctggtgtgccttttaagtcttcttcacgttcttcagatgcctcaaagaatgaaatgacctcttcatgttcttcactagagagctgtgccagtgcttcatctagcgcttctcacaaaccttctatagattcgataaagaagaagaatgattcaagttccagattatcttcccagccattggcaaatcgatctacatctagaggtattatgggccagccaagaatcccaccccaacaaaccaataagacatccaagcccaagctttcctccagtgtaccaactgctggttcgatccgtgactattcatcagagtcatcacgagcttctgaaactagtaaaatggctaatggtaaccagaaaacagtctctcgtgaaaaggttcctgcaaatgataatacagtacaaactgtgaaacctctcaagaactccaaagatacatctgttgtccaagctgatgctaaggaaggcacaaaacgagtttcagctatcaacggtggtttggttccttcagcttccgcaaaaccatcaggtctccgtgtgccatcaccaaaaatcggcttttttgatggagtaagtccccaaaattcatgaacaaactagagaccaaatatgcaattatttgttccttgagattggaaccactggcacaagatctg

SEQ ID NO: 11897 - DNA, 551 bp, Arabidopsis thaliana landsberg
atgtaagtgatacaattgcttttaattaacttcttcacggggccaacagtgtttgataagattgttgttgtgttcgaacatgttcggttgaatacctacaatgacatgagtttcatatgatgtccctacattaaacaatccttgtgttccattatcactaatctataccttagttccgaaagtattgatgataaactcgatgattgaataatgcataggggcgacaagagagtgcttctttcgatccattattgatttagcttttaataaaggaaccaatggatcggtttccaaacttatggagaatggaacaaaaactaaggaatcataatttccccatctacatttcgaatccttggccaacatgtcctccaaaggcttcacacaattgttttatcaagttagtgttaaattcttttcaactaagataaagatgtagatgtagatatctaacctgaattccaatatcctgccttagatttaccgcaacacctgctcgaattcgtattttacctggaagattgtttagattcgatgtcgttgttacaccc

SEQ ID NO: 11898 - DNA, 536 bp, Arabidopsis thaliana landsberg
caattgttagtttttgagatatgcatgtggtactacacttagggtggagtattcataactcaattcatacgtgaaacccctagtgcaatacccaaatgcaaaatctcacaatttgcctattttctctaaaaactatctaacctatggcacaatattttgaaaaatatgagagaatatgtgagggtaccaatacctgtcccaacaggtgttcttttgtgtgcttataagttgggatttggtttggttcaaaattttctaaaaaaaatcaaaattccctctgtctgggctcaccggacattccgatgtggcaccgtacactacactgtgcaatgttcggtgcaccagcaagggcgcgcgtggatctaccactatgcagccatgtcgagtggtgcaccgaacagtgactgtgcgctatccgttgtgcaccagacaggcactgtacactgtccggtgtgccatgaagcgtttttaaaaaagacttcccctgcctgagccctagtgcaggctattctctcctgcgcgcccaggccagctga

SEQ ID NO: 11899 - DNA, 1218 bp, Arabidopsis thaliana landsberg
gctgaatctcctgatattcgcatttccaatatagcccgatattttcgcattctccgtttcgttaccaaaaaaaatttcaaagcatagcaaagtcaagcacacacacctacccccacctctctccctatatataaatacctgcaggaatctctttagtgttaccaaaaaaaaaaaggtttattattctttgagattcctaagatatgtcttcacttgcagatttaatcaatctcgatctctccgattccactgaccagatcatcgccgagtacatatggttcgtaaatttcttcattgatctctctgtcattctcagcgtttgaagttgagtttgcgtctaatataagttttaacgtatattctttgttattttcatttataagagataaaaagttaacttgagtttgcgtttgtgtcttaaaaaaatatctttcttgaggtttccttagattgtttatgaatcaaaagtcttaaacttggtctcatctcatatactacgttgaaagattttgggtttagattgtttatgagtcaaaagtcttaaacttggtctcaactcatctactacgttgaaagattttgggttgattaaaagaattttgatttattttcgtttgtttgatgattaataggattggtggatcgggcttggatatgagaagcaaagcaagggtaactattaattatatattaaaaaaaaatctttggtttcgtatagagcataaaggatgagtaaatcttgtttaagaagttaagaaaaatatgattaacaatattattgttgcagactttgcctggaccagtgacggatccatcgcagttaccgaaatggaactacgacggttcaagcaccggccaagctccgggcgatgacagtgaagtcatcatctagtatgtttcaaaatataattatcaattaatagttatttaattttgtaaatcatggagtaatattactttcgtttttgtatttgttgttttagccctcaagctatcttcaaagaccccttcagaagaggcaacaacatccttgtaaatgaaaacacaataaaacagtttctttaaactcaattcttgtaaattttgtttaaattattattttactcttgggattaatctgtgtgtattaggtgatgtgtgacgcatatacaccggcaggagagccgattccgacaaacaaaaggcatgcggcggctaagatctttaagaccctagtgg

SEQ ID NO: 11900 - DNA, 557 bp, Arabidopsis thaliana landsberg
ctcggtcgttatttctaaaacatcgacgcaacccccattaccactcggccgttacctctaaaacgccgacgtcgccagtaaccgctcggtcgttatttctaaaacactgacgcggcccgttaccactcggccatcacctttaaaaggcctcgacattggctgataatcactcggccaccactactaaagcgctggcatcgtgaagaaggcagtctgaggcacggctcaacaattctaagttgctacttaagcgttacaaaacaacctctgcagtaggcatcaatacaaacgacgatcaacaagaaggcggaataatacgcacaagaggggtcgaaaccattcttcattatacgggaagtaccaccaaacttacaaatcaactcattatgagatgatgcattcccttctactacattacatttaactaactatactactagctactactacattatttcgctaatactatttctactactaatctacactaacatctaaaaccagtggcatctagcactagccttgttgctgcccttgctgccgctgccgtcgtcacc

SEQ ID NO: 11901 - DNA, 1113 bp, Arabidopsis thaliana landsberg
tattacaacatgaagaacagagagatatgtgttaaactttgacttatgtttttggattcatataaaccagttttcatataaatgcaatccttcaacaaaccacgatggttgtgatgttagtaccagttttatcaaagacctacactgaatagaggaatatacatgggttgagtcactctgattttaaactcttattgaaaagcttgaaaagttacagaatacaagaaaccagagacaacaaatgagacagagttccgtttcttattgaaacaacaagacaatcgacccgaaaacgaactccctcaaagaacacaaagctcacacaaaccccccaagtcaacatctccttgtttaaacaggtagtgagtacttagcggaaacctccttccacgcagcacggctactaatcttatcccaccaagcgctaacatgcttcctatctttgatcaaatgagccttcccaataggaccaacaagatactcggtgaaaggaaggtgagccaaatcagctagactcacaaaatcaccagccaagtattcgttcttagaaagctgagcttcatagacatcaagcacttctgcaagcttctcttcactctccttaataactttctcatcagcagggaaacccataagtggtgcaaagacaatgttgagcgttaaagccaatagtggtggatggtaacttgtagcctcaacgtctaaccattgctctacttgtcctctctcttcaatagtcttccccaaaagatcaggtccttgtgatctatacttctctgctatatacctcatgatcgcacgcgactctgcaacacaaatcgaaatctcttcaacactcatttacctaaacaatcttttccaaacaatcaaaaaaatctcaaagatcatgtgattcattgatcatgatcgcaaatgatcaaatccattatcagatcatgactcgtgtagtagtagcttaaaagagaagaagtgtaccgaagattttgtagtctccgtcgacgaggactgtgattttaccgaaaggcttgatcgatcggaaaagggatcatgatcggaaatagtcaccggaaaaaaagaaacatttagtaaaaaagagggaaaatcggaacctga

SEQ ID NO: 11902 - DNA, 164 bp, Arabidopsis thaliana landsberg
tagtaagcgtagccttagagcctccagcgagatgttccatcatatgagacctcatggcgtgtccaaggatagggtctcacactagacgccacaccagcatcttgatcggtcatacacttcaactagacttggcagactcacacgtacgttaactatacattttt

SEQ ID NO: 11903 - DNA, 867 bp, Arabidopsis thaliana landsberg
tttttttttccttagggttagagtgtagacatggctcttcttaatctcctaggaaccataaatatgccgatggaatactacgaagaagacgaagggattcactttgatccaacgtaccaagaaagctaagaggtgaagacggcatagacttcatagtgatgaaggatgtttatgccaaggagccatgattgctggaccattccaacaattcttttttcaaggaagacgagtggtactatttctcgacaagaactcagaacactgagaagaagattggttgtggtaagtactcaaagcggaatatcaccggagagaacaacgatggcatcgaccgtgggaatgggagggtgaatgagaaagaaaatatcattgacaaagacacaggggatatcattgggatcaagaaaaacctaacatataagagcagcaacaagaacaacaagtagaagagaggagatgttcaaggcagcgaaagcgggtggatcatcagtatgaagcttcttcttcctcagagcagcagcctatcaagtccaagaagtccaaaaaggatcatcatgacgaagcttctacttcttcctcggagcagcagccgatcaatattgagatattgagcgagagtctcttctagcttcttctttgcgacagcagcagccattgttatggggtggttatgaatcggagattccgaacatagtagcatcatctccttgttctgttgctgaaacagagagcagagtggagaaggaaactgctagtttataattgagtcggctgtatgtcatcttttataactatattattaagtgtcgaaaagtcaatgggtatatgataaccgtgacatgtaacgaactgtcgttagtttggaag

SEQ ID NO: 11904 - DNA, 385 bp, Arabidopsis thaliana landsberg
ctccttctccattctgctttctgtttccgcaacagagcaagaagatgatgatttgttcggaacatcccatagcagtggctgctcctgttccaaataagcagctagaagagactcacactcaatattgataggctgctgctccaagtaagaagtagaagcttcgtcatgatgatccttcttggacttctttttcttgatcggctgcggcttagaggaagaagatgcttcatgctgatgatccttcttgtccttcttggacttcttatacttctgaatcttccagacgactatcctcaaacttatcttcttccttcgggtccactaccacaaactcatccataatccagccgcaatcgccttctctcttctgcttcttggttttttt

SEQ ID NO: 11905 - DNA, 1136 bp, Arabidopsis thaliana landsberg
aaacgcccacactacaaagtctttggaggaagaggtcttcaagaacaggacaagcagataaaagtttggaaaaagattcttcattctcgaaattcacacatgtgaggtacaaactcttcaaggactggaaacaaaccggagaatcaacaacatcaagacagatattgccttggagtttcaagacaactagtgtttggaagacatcaaggttgtttgggaaactgatagtactgtaataaacaggataaccagtagatttgattgagaattcaaggagagtagaatgaatgtttggaaatatggaagaatctaaggaatcagtttgcttcctaagttctagggttagggttttgagaagtggagcttcatgtaattgcaaggacctaccacaaaattggtcaaatccaagagaaccaatattggaacaagagttttcattgtatacaagcgttggcaacatcttccacacagatttccaacgtttagacaataaacttgtggacattgcatcgcttaccgggattaatgagagtattcgaaaaagtaaatcgttaggtaactggctgatcctatcaggagatgtaacatcttcgattccagatcttgcagcttccatcgccaagtcgttagatctgaaggaggaatatgaaaaccctaatttttggctgaagagttgaggaataggcggctcattagattagaagaaggagagatatgaaactctgatttttttttatgttttttttttacataaagataagtttaaatttattatgaggaatatttctttcttcggtgttgattggttgtacagccacaatatttttgtaaagacatatcgaaaacttaatatatatagtcaaatcattgtttcagaagatgttaacaatgaaaaatgttgttgaagatagcaaaaaagaaaacatgttattgaaacacaagctcacatgcttttgaacctctgtccacattttctaacttcttgaaaaccagattcttctctatacataccgaagagaatattgccacctttagacaactcgcttttgctagtatgtactatgccacttttctttcttgctttgtccccttgtaatgtctccactcgaatatctctagatgagacgatagacatc

SEQ ID NO: 11906 - DNA, 608 bp, Arabidopsis thaliana landsberg
ggtatttttttaatatgatcatgagaattgataagaattttttgttttgggtatatttgtagatactggagttatgagtggagcgatggtgtttatagaagaagatttgaagacaaacgacgttcaaatcgaagttctcactggaattctcaacctttgtgctcttgtcggatcattgctcgccggaagaacgtcggacataatcggacggcgttacacaatcgtcttggcctcaatactattcatgttaggctcaatattgatgggttggggtccgaattatccggttctcctatccggtagatgcaccgctggactcggagtcggttttgcactgatggttgctccggtttactctgccgagatcgcaaccgcttcacatagaggactcttagcttctcttcctcacctttgtatcagtatagggattttactaggttatctcgtgaattacttcttctccaagttacctatacatatcggttggagactcatgctcggtatagccgcggttccgtcctagtgctagcgttcgggatcttgaaaatgccggaatctcacggtggttgattatcaaggccgctcaaggaggcaaggagatatggaat

SEQ ID NO: 11907 - DNA, 1020 bp, Arabidopsis thaliana landsberg
actatgggtgaagtgctagaattaacaatcaaaatacaattatacaatcttaaacactaaacaaaacaaacaatattaataaaataaatataacttaaagttttaatttcctatttagttttatctataaattatagttacaacaatatatacaaattaaacatgaaatatcacacaaatataagttttacatgttagtgatgtggcatatagatccgttgcagctgcatatacaatatcttcagatccttccagagttgtaagatttctccatactccactctttgaaacgtcacatggattcacagtgaacttccaaccggtcttcgttaacttcttttcgactatttttaagacatgtactacaaaagaaaaataaatcaatatcaaaatgacctaacattaaaaaagaccagaaaaaatatcatacataattctttaggcagggtcggtggttcaagtgcaaaaccagaagcaagagtagagtcagcaacaaaagtataagttccattacctttgatagaaagaattttttttttgtctctggttaaggaacatgagatagagagagaatatatgtcttctcatagaaaattcaatatttaatgacgttcccacaaacctctttcaacaatgctttctgacaccggcaaagccgttgcttgccggcgtcgggacttgttctcttcctttcctttttgttgcatcttcaactcctctcggatctcttgtcttggcttcttttacttttccctctcaaatgtttatgagtttttcccacttttatttaacttttctaaaagctctaagatctatgacggagaaaggaggcgtcttccggaaaattaccttttgacctaatctctgctcataactttgtctttgaagtcaacaaaaaaggaatttattaaacccaacggcactacaccttgcaaaacttagacttgcctcaccgcatctcttggagtctctagatctacgtctttattggcttcctccaaagattctgctcaccggaca

SEQ ID NO: 11908 - DNA, 1053 bp, Arabidopsis thaliana landsberg
tcatcacaatcaaccatctctttaccatcatcaaaattcacaccacaaacacaatctactgtccatttttcataaacccaatcttcgtgtggcttcatctcaaatttaccccgaaaaaaaaaccctctaaatttctctgattctttcacaaattaacccagaaatctccctgaatatcgaagctttgtcaaacccaattcgtttcttctgaacgacgattgtaatgttacgcgaaatagctttgcgattcttgatagaaaaaaagctatcttgacgtaaatctatggttctcgcttcccatttctgaacgaagaagacgaagataggaaccataattactaaaatatgggccggtatgggccgggatgggccgggcttagaggataggtactgttttttttttgtggacggaccaaacgatttcatttaaaaaccaaaagcagataaaaaacagaatggtcaagctcaaagaggaatacaagcggaaattaacggtcaaataactaaatcataatgaagttagcaaaaatatttgcacgtataatttagcctaaagacacgtgtagaagatgtgttcttctgaaaaccactcgtcacgtcgtagtaccaaaatcttctgggtcgatcatatgaaaccgcttcaaaaagatttcgaaaaccgctaacttcggggaagctatatcactgactacacccaatttgatgtagtctaagatcaatctttctatgtaccttgaataaaaagagaatgacgaagatattacttcttgagcaattagggaaacaaaaagaatttggaagacatacagaaaaatcgaaggaaagatattggaatagagatattggaagttgaagttttgatttttaggtttttttctttgatcgtttttatgctaattttgtgtttgttaaagctgaaacttcaatgagatggctttgatttatgatttttatttgggaattttagcttggagatttatggtttggatgatcattgaatctttgaataacccatgcactagtaagatggtatattataatatatggatacta

SEQ ID NO: 11909 - DNA, 487 bp, Arabidopsis thaliana landsberg
gcatcatccggggctaaacaccggacttccatatcgctatcaactcccatccgcccgcagatttctttcaaccgagtggtgaatactattttgcatccgttttctctactcggaaacggaactcctacctctgttaaatccactttactccaaaaggtcatccaataacaagacaaaccttttgtgctttaacacattgtaaatgttagatgcttttatgtcccctgttttctgtttccacttctggttatcagaccgcaacttctcccatatctcatcttggatcctctggatctgtaactctttcgagaccacaatccaaatcacaatatcaaactcacccccaactctacagaatctattgttgatatgactgagaagtgtagttttaccaactccacccataccatgaagaccaagaatcccaatctcctcttccattagacggttccacgcactctcaagcattgattccatagcaaccata

SEQ ID NO: 11910 - DNA, 1589 bp, Arabidopsis thaliana landsberg
  unsure (1)..(1589): unsure at all n locations
tctgtaactatctccatttgagttaaagtctatgaattggcttcattttactctaattggagagcctgacttggttctttatccacattttcacaaaacttctcatttcaggctttccaaatgtattagatatttagatgatccaaaaaaacttgaactatgggagccacataattcaaagcaacttgaaaatgttagttaattaatattgaagctctctcatcattctacaaataaaataaaacattaaataaatgtgatatatatacttattaattatattgtctacctaccagactaacaagcttaccagtccaccactgtgtttggtttatatgtcgagaaaaaacaaaaatctataataaagaaaataaaagtgactggagaccgataaaataagtatcccaagcgaaaagtccaaaacccaaaatcagaccagtaatataacttgaccgtttcttaaccggtaattaccggttaacccgtctcttccgtcgacatttttccttaccagacccgttttgtttttgtcttgtttcggtctcttaacaagtcccgttttgtattcttcttccttacttcttcttctatctataaaacaacaacttcactcatcatgactctttttccccattttcttactctcttgccctttcttctctcactctccggcgactgttacgagtttttaacacttccgtcgtcttctcaggtttggttcttctcatttatgttaaaccattatgtatggtaattctagaatgtagatctggttcgttctcatggatcttgattaatatgtttgtttaatccacgtattagcactaattttggattattatttggaactgttatcattagataagttttgaattatttgcttaagtaaagaagataagagaaaataatatttattagtctgaacataatcttatcttaagataaacagaatttatttccaaaaaaataagtttttgttaaactaaacacaatttattaccagcaataaaaagattctgtttaatgttgttatcttaataactgatcttttgtctgttttttagatgttgttgttgttgtttatgacaagatcttgttctatccattaaaaccaaagaaatggaggaaggtcataaagagccattggtgctaagagttgaaggatcacattgttctttatcagagatggatgattttgatctaactcgggctttagagaagccgaggcagctaaagatcgaacggaagagatcgtttgacgaaaggtcgatgagcgagttatcgactggctatgtaagacaagatagcattttagaaatggctcattctcctggaagtaggtcaatggtggacactcctctctctgttaggaactctttcgagcctcatccgatggttgctgaggcttgggaagctttgagaaggtcaatggtgttctttcgtggtcaacccgttggtaccattgcagcttatgaccatgcctccgaggaggtcttgaactatgaccaggtacctaaagattctagacgtgacctgagaaaaataaaattttgtgtagaatatctcaanncttgtcttctatttgggta

SEQ ID NO: 11911 - DNA, 1213 bp, Arabidopsis thaliana landsberg
ttcgccgagcatcaactacggattcttccaggagatcaatcagctggtaacgataaagacaacgggaatgttgtaatgcggaggaacttatctgagttaagattttcagatgattctaaaggaaagttgtatgaagagtatatgaagaagagggatgcaaaactaagagaagaatggagttcaaaagaaagtaagttgaagtcaatgcaagaagctcttgaccaaagtagaaccgagatgaaggctaagttttctgctgcttccatgaagaggcaggattcgatatcaagtacccgccaacgtgcagagaagttcagatcttttaactctcggacaagttcgaaaaagtatcaggtaatcaaatcatttagtgtctttgttgatgatgacaacaaaactttgtctgactgttttgcaatttgatttagtgattcttcttaatctttttacagcatcctataagctcattacagagtgaagaggaaaacgaaaaagataagctagtcagtggacaatccattggaaaaggtgcttctaagagctcccaagttagaaaggttccatccccaaacgggagctcacgagtctcaaaaccgtcaggtaaagtttcaaacacaaacactaatacttctgggagaggacgaaaaacatcagagataaaactggttacacaatcttctcttcccaaattctctgatcttaaaaaggaaaacacaaaaccatcttctttagctggtagaaatactactaccatgatgcgaacacaggcgagaaatggtaataagaagactacaaaggaagatataccgtctcctgttatgcctcgaagaccacgatcactaaggaaaagcttctctgcaaatatagaattcacagagttgacaactctatattctgatgatatgatgaacaaagagaggaatcagaagcagaacacagacattgatgatgtatcagagaatttgaaaaatgaagcctttgatgacactgaatctgaggctgaagaagaagaaaaagaagttttggagaaccctgtcaaaggagaagaagaagctagagaaatggaaactctagtagttgaggaggatattggtgatgaaacgccttcacttactgaaatagttgagaactcatcagagaatgaaaactacacttctttgagatcagtttctcatgtagacttacaggcgaatactctaccttcttcaacatt

SEQ ID NO: 11912 - DNA, 696 bp, Arabidopsis thaliana landsberg
atctctggctaagccaaaatagctacatatggtggtgatgctgatgatgattttcatttattagttgctttactggtgattattagtctaaattcgaggtttaatccatttgggaagagaatatgttatttattctctagaagtcacgacagcagtctgatcgtcactcacctcagaagggtctgactcagtcgacgtgtacgatccaaaaaggtcacccgcgtccatctcactatccctacgaacatcctcactcagaggtgccatctcaccaacagagctcggacctgcccgatccgacactccacgtccaagcctcttcatcacacctttaaagggtttagggttttcgacggcacccatgggatcaatcacattcagattcttcatcatatcatcacaaaaagatgaatgttaatggggcctacttaaatggtaaacatttgagtaataaaagtaaacattttgaggaacaagtacacgaaactaatattcatttgggtatggcaatatggagaaaaacgcaacatcaaaagcgtcatgacaggatatctgtctcccaaaggctgagggtgggcttggactaaggaactttcatgtttggaatcaggtcttaaacctaagactcatctggctacattttgtgaacagtggattcatttgggttgcatggatgaaagtccataagctgcggaa

SEQ ID NO: 11913 - DNA, 559 bp, Arabidopsis thaliana landsberg
atataattacgcggagcgtcgcgccgctgcaatcgccgctctccacgctggactgttctccgagtcgatccgtcacttctccaagatcgtcgatggccgtcgccctgcgtctcaaggattcctcgccgaatgctacatgcatcgagccgccgcttatagatctgccggtagaatcgcggaagcatcgccgattgcaataaaaccctagctcttgaaccctcgtgtatccaggcgttagaaaccagagccgcgcttctagaaacggtcaggtgttttccagattcgcttcacgatctagaacacttgaagcttctctacaacaccattttacgcgatcggaagcttccgggtccggtgtggaagcggcacaacgtgaaatacagagagattcctgggaaattgtgcgttttgacaacgaaaacgcagaaacttaagcagaaaatcgcaaacggagaaactgggaatgtcgattattacggcttgatcggagtcagacgcgggatcaccagatcggagctcgatcgagatcatctattgctaagtctcagatacaaacccg

SEQ ID NO: 11914 - DNA, 911 bp, Arabidopsis thaliana landsberg
gtattgagacaagatttgagctcaacacgggaatgatcatcatcgattctccataaacgattgaaatcacttgaagtagcgagaagatcaggtctttggcattccttgacaggtttgaaaatggtcttcgttgggggataaaggatgctcaaaggagaggttaggatcggaacggatctcaccattggattcatcgagctgcacaatctcgacacggttcgggtattgctcgaggaggctagtgatggcgagacgatacttcttatcgcgacgaacgctccaattcattgcgtagatgtgccatggcgcttcgtatgtgtagatctctgatcgcttctgctgctcatcggaaccatcttgaatcggatcgctgctcgttcccatcgtgaaatcgattccgagcaaaaaccctagaaaatcgcctccgcttctatcactcgctcaaaagcaaatggatattccagtcatccagtttattttaataattgacgaaaaacgacaccgtttaaggaaaacagagtaacatggctaacatcgttatctccgtctcttcttcaccaatgattttctcggaaaatataaaaccagaagaacaacaaaaagatgtttaaaatcctcaaaaattacaacacaaattgtctaacagaaagaaagagtcaagctttttaatgttctatagaaaacaagaaacttaaatctctcttctttgttgataaaagaccatctttatgccacattttccctcactgtatcgatctgaaaccatcaccaaaagttttccactttaatcagaatcttcgtaaacttcagtatctgatactcatcaaatgtcctcatgtcaagctggtaacgtaacataccaccaatccaccaaaaactctgcaaaactgtgaccttcttgggaattgtta

SEQ ID NO: 11915 - DNA, 647 bp, Arabidopsis thaliana landsberg
gaaaacatagatccagtaacagatatgcaaatcccgaactcaatacacactacaagcaatagacttacatggaaattaaggattttttcgcttgagaagacgcgtaaacgctagggtttttcgcttcaatccaaaccctgtgtccctgtcactgcaaagcctatcgagaaaaagcttctccaagacggcgctcgaagcaggggaaaaacctctggtggatcagaaaaaccctagacttgcagagagaaaaagagtcgactgtgtggaaaggaggcagagataatgaggagactgagagaggtgaatgtgaatttcgaatataaggaaggagcgggtggggaagggcaaagcagaagcttaaaactattttatttctaaaatcaccccattaacaattctttattctacgttacccccttatatttgccaataatttttatttgttacctcgacttcaaaattagaatccacttttggcaaaaaaaaatactaaaatccagattaattaaccaagattacaaaaacaaatttaagtttactttagtagtttgtttgtttcataattcaaatttaagtttttctaaagtagtgtaaatgtataaagttatgtataatgtatttgaggtttcaaacttaaatggtcattt

SEQ ID NO: 11916 - DNA, 961 bp, Arabidopsis thaliana landsberg
  unsure (1)..(961): unsure at all n locations
tgcaggtcgactctagggatccgcgttcgcggcgagggcgatttcgtcggccggtggtgatatttcgttacagaatgcttctggatggaatccgttacaagaggcgttttgtcgccggaattctgaggttatgaaagtgcttttacggcatcaccaccgtttagcttggtgtaaatggcggcggagattacctcgtttgatagctgttctccgtcgtatgagagatttttacatggagatctcttttcatttcgagagctctgtgattccgttcgtcggaaaaatcgctccctctgatacttacaagatctggaaacgcgacggtaacctccgtgctgatactacattagccggatttgatggtttaaaaattcaaagagcggatcaaagctttttattcctcggtgatggtgatgaatctctagatatttctcctggatctttgcttgtactgaatcgagacgatcggaaaattctcgacgcttttgaaagtgccggagctccgattagtgactccgacatcgccggattctgttctcagtcaagcttatatcgtccgggaatggatgttactaaagcagagctcgtcggacgaacgaattggcggcggcaagagaagatggagaacgtcggagaatggaaagctagggtttacgaaatccagaaagtgacatttagtttcagatctcggaaaattgttaccggagatggaagcgaacaagttttaccgttggagttagacgaagacgatgaaggattcttagtagctgagaatccgagtttcttagctcctccgccacggtcacagagacgacacagtagctttgttaaagaagatagagattggatctccgttgggagaaaaagcgtcgacgtttatcccttccgcgaccaccgtcgncgnggnaatctcaatcaccgcgaagatcagtgtctcaatttaaccaccgagaagtcaatg

SEQ ID NO: 11917 - DNA, 738 bp, Arabidopsis thaliana landsberg
  unsure (1)..(738): unsure at all n locations
aatcacacaaataacttaaaatactagattgaatacatccctcttaatgtttttattttcttttcaagatttatccagtagatgttaagggagcagcgggaacaatgtgtaacttggtcagctctataagcgcatggcttgttgcttattccttcagttacttgcttcaatggagctccacaggtaaaaatctttaatacaattgaactaaagttgacaaaaagttgatttggttacaatttttgaattttgaaaagagagttgttaactaaaagtctttgttgcaggaacatttctgatgtttgccacagtggctggccttggatttgtgttcatagccaagcttgttccagagaccaaaggcaaatctctagaagagattcaatctcttttcactgattctcctcctcaagattctacaattttctaaacttctcccacaactgtataagatagaagtatgtaaacaaaaaaagtttattacaatatagtttttacgtgattcacaaatattaacaaacacctttcaagattcacatgaaactaccaaaacattacaaaataatacaaagttttactcagaagaaaagctttattgagaagaagcacaaagaccacccctttttttttgctgttctgtaattatgagttttgttttaacccactgatccttcaagcttgatgctcataagctggttaacttcagctccaaactcatcangtaacttgttgaaaaca

SEQ ID NO: 11918 - DNA, 788 bp, Arabidopsis thaliana landsberg
gagggaacagctacttttacttccataactcaggtcttcaagctcagagtgtgcttcatgttcaggtaatttgaagcagagtataatcttctttaagtgcgtttttgatttgaatttttttttttttcatttgaaggatgatttggagtctgaagcagagatcttgcttgatcctaatattcttagtgatgatggaacagtttctttaaacactttatctattagtgaggatgctaagtatttggcttatggccttagctctagtggtagtgattgggttactattaaagtgatgaagattgaagataagaaagtggaacctgattctttatcttgggtaaggcgtcttcaagttgaattactcgttagtttgaagtttcattattgacattgacatgaaacttgttctgaaatcaggttaaatttagtgggatcacatggacacatgatgggaaaggttttttctacagtcgctatccagctccacggtgagtctttggtttaactaactgtgaaactttttggtgtaaagctgagaactttgtttgagaagtttgagcttttattactgctttctgattttggttttgtttctgtagagagggagagaagatagatgctggtacagagactaattctaacctttaccatgagttatactaccatttccttgggactgatcaatccgaagatgttttgtgtgggagagaccaggataataccaaacatatgttctgatccaaagtcactgatgatgggaaggtaaaagctagctcttttctcatttg

SEQ ID NO: 11919 - DNA, 1381 bp, Arabidopsis thaliana landsberg
agggaacgagagctcttgctaaggttttccatgcgcaaaacagcaaaaatccctttaaaaccgcagatttatttacacacctttgatcgggtacacgtttataaggaacctaaacagcaccatcgggtgttgaagagaataactccacgtcggcgctgaagaataagtagcccccagggaaagaagtatctagtaaggatgctaaagaaaagattactacttctgccattgatttggccctcaactcggtggtgaaggtgttcaccgtctctagcaagcctagactttttcaaccttggcagattactatgcagagtgaaagcaccggctctggtattgataattttattcatataataatttaggaaatttttctttacaaataaagagtaggaatttttgtttggcttacatacttagcttggaacggttgtaggttttgtaatctcgggaaagaagattcttacgaatgctcatgtagtggctaatcaaacatccgttaaagtccgaaagcatggttcaaccacaaagtacaaagcaaaagttcaagcggttggtcatgaatgtgatttggccatcttggagattgataatgataagttttgggagggaatgaaccccttggaactcggggatataccctctatgcaggacaccgtgtatgttgttggctatccaaaaggtaaattttaaatgatttttataattttaagtacttgttaaatatagtaacaaaccaagaagctatgtttcatatatctaaactttcaagtatgaatcgtcttgaatgctatcttgcatcacgtagaaattatagctattataagaatatgtgcatataggttgtgacaacaatttgtgttatggatactcgttaaaaatggctagttaattagttacgtatgagcccatattaatgcaggtggtgataccatatccgtttcgaaaggtgttgtgtcgagagttggacccataaaatacagtcacagcggcactgaactactggcaatacaaatagatgcagctatcaataatggaaatagtggtggtccggtaatcatgggaaacaaagtcgctggtgtagcatttgaaagtctatgttattccgatagtatagggtaagttataaattataaatcctgaatacgttcggttaaagaattcaaattgaaatatctatattgatatgaaattctatctctgtggacatgatagataagcttaattatattttattttgtgtattcatctgcagctacataattccaactccggtcattaggcattttttaaatgctattgaagaaagtggtcaagatgttagtttcggctcaataaatctaacatatcagaaaatggagaatgatcaactccgtaagga

SEQ ID NO: 11920 - DNA, 192 bp, Arabidopsis thaliana landsberg
gtgtctccacgcaattaaacatacatatgaagagggtagctggtaaaatgttcgtcttattctaccttggttcgacgacggggatgaatttatatcggcaataaggagggcatcagcagggaagtcgacgatgtggtcaagtcatagcgtaaacagcagcacgaagggcgtggtcgttgcgcggggatgaaa

SEQ ID NO: 11921 - DNA, 229 bp, Arabidopsis thaliana landsberg
tctattaatcattttttgaagactatgggaaccatttgcactgttttcccacaagttacgtagggataccccatctagttttaatttgctttgatacatgaaactttttcaaaaacaatgtccgaacaaaatattttgggcctgtaatatagtacaaatcacggaaacacccgaaaagtacctaaaagtcaaaattttaagtaaaaaaaaacaatgatacttcgaccca

SEQ ID NO: 11922 - DNA, 460 bp, Arabidopsis thaliana landsberg
ttttgaactgaaattctgtttagcagtgaaatgacatcaacttctagctcagattcaagcatgatccagtgctcaaatatgttcaagtcctatagtcgaattgtagatggtatattgctctacaattttgtttaagaaaggcaatcgagttgctgcacaaaattggaagttatgggctctggaaactggactctcagtcactctgaaccggtattcccatggtacagtgaccgcttaactgaagaagatcgggttcgtcctcaccgccggtagccgccgccgttgatcgcgactcgtcacgattcgtgctcggtggtctttggataagcactgccgatacgtgtcctcaacggcggtgagctggaagtcacccgctcggccacggcacgttctcccccccctggctcaccgcccgcggtaagtactcgccgtcgacagcgcctctcggccgggtgcgcgt

SEQ ID NO: 11923 - DNA, 681 bp, Arabidopsis thaliana landsberg
atgtttttgcagtttctgatgttgcatacaggtgatccatttttttttctctaatgtttctgattttttaaaatgttactatcagtcatgttaatctattaaccatagttattctttataacccagagcaatgattgacgacagtcgaagtcagtcaatacttgttagcggtgaaagtggagctggaaaaactgagacaaccaaactaattatgcagtatcttacatttgttgggggacgtgctactgacgatgatagaagtgttgagcagcaagtccttgaagtaagattttggttataaaatttgtgtcttctatcttgttcaatgagaaaaaaagaactggatagatgcctttgttttcctcccctggtatttgtttgcagataaatatttaggggtgatcatgtttgactttctttatttgcgagttatctattctaatttaagtattcttgttctgcagtcaaatcctctcttggaagcatttggcaatgcaaaaacagttagaaatgataattccaggtgggttattgattttttttttctttctgattattttttcaatgaaaattgagaggtgtatctttaattgctcttatgtcatttgtcaacaaatttttcatgatagtatccttaatacccagtgataacagcactttatgatgttgatatggttttag

SEQ ID NO: 11924 - DNA, 753 bp, Arabidopsis thaliana landsberg
gaggacagagctcattactctattatctttgcatcactcaatctaaatcttaagagtgctgactgatcagttgcatgaacgggagagagagacatctgtctgaaagcccgaagaatctctaggattcgttcataaggaggacttagatctttgaccactctggtttcgtttatagcattgatccacccgtagacaccaggaactatctctgggtcaataattttcagacccaaaacttcttcgtgtgccttgtaagggctaagcaaagtgcacatcacaatgtctacgaggctcatggtctcgttcgtcacagttggttcaccatcagtgtcagagaaaatctccttaagcccttctttctctataacgctcagcttctcctttacttctgtgagagctttctcttgctcttctccttcgcttttcaccacttttatcaccacatcgtaaagctgcacaataaaaattcagtaaagttaaaaacttgaattaaaaagttagggtttatcagatttactcacatgtaattggatgtagttagcccaaaaccggactttagatcttctataagggtcttgtggcaaaatatgtggaccgtgtctcaacgtttcgtcgatgtattcaatgataaacagtgattcagagatgggtttaccgttgtggacaagaaccgggatcttcttgtgaaccgggttataccggagcagggtttggctcttgttctggagatcttcttgcacgaattggtaaggt

SEQ ID NO: 11925 - DNA, 1081 bp, Arabidopsis thaliana landsberg
acaaatcagtaatttcaagaaaagaaaaaaaagttcttacaattttcttacacaaatttcatatttagagtacgggtgacacacataacatacacaccaaacattcccaaaccccaacaaaagaagaaaaataaaactagtaagaaagataaacggtacactcaacaacagtctcaagcccatcagtgaactgatgcggctgattctgctgcgtcccgctagatcctgtaaacgtcttcagaatcgcgaatcccctcgcattcacatactttccggtacctcccattactcctatatgcgattctgataccgctgttctgagaaccccaaagaagcttatactatcttcataaccgccgctttcaaacatcgcggtgaaagccattgtctggctagttccgtcaattgcactcgccacataatatccctgcgctttcccgagtaagccagatccgagctcatggccttcagttagttcatcatcgattactgtcattgtcccgaacattagcatctgaagagcagaaccgctcgggagctgaccgccactagcaacagggaaaccatttaaaatgttgtttccgttattgttgttctggagaatgttagctgtggttccgccgagtccaacgaggaaagggacattgttgttgttgacaatcccattgttgttgttgtttgacggaactccgttgcttacaggaaggtttgcgccgttgggtttagcaaatggaagttgcccgcttaaagccggatttgcgacgactccagttacggctctggcagtgggatttgaaccaccgagtatatcatgcataaaaaataccaacgtattgtcaggaccagcacttgcaccaccaccaagagctgatccagaacctgcaacaccaccaccaagagctggaccagctcctgcaccaccaccaccaagagctggaccagcacctgcaccaccaccaccaagagctgaaccagcacctgcaccaccactaagagctggaccggtacccgcaccaccaccaagagctggaccggcacctgcaccaacaccaagagctgattctttacctggaccaccttc

SEQ ID NO: 11926 - DNA, 583 bp, Arabidopsis thaliana landsberg
gaggcccagaagcatgacccaatagacgagaccataggggctacgaggcccaaaagcgggaggccaaactccaacctagtagaatactggtcctcattataaacgtcttcccttgggctataaaagggcaagacaacccccatccaaacatcatcccatatctctacaactttgcacaagcactcagttgtaacagcttgcaagcaataccatgatcagcactgcactggactagggctccggcctggactagtataacctacttgcctcagatgcaccctcaagccccccgtagctcaccattcggagtgagtctgtgctaacacccctaccgaacacaaatcttattgtccccggttccagaaatcatgatagttggtgcgccaggtaggggagccgttagcgtgccaagcgacatccttcactctgatggccagttcatcagcgttcaccctaggagccgcatcaagttcagcgccctcgactccttcgccatcgccacggggtcactctgccttgccaaccccaatgaacctgccaatgcggatacgatgcccagcgttccttggggaacgaagcggag

SEQ ID NO: 11927 - DNA, 627 bp, Arabidopsis thaliana landsberg
caagtaaaaaaaaaggcatacatcttgtgtacaacgtacaagtacaacctactaacagacacagagagagaaagtgagcggtacctgttgctttgtccgattggacggtggggccttccgtcacagcagaagcaacagcaggctctgatgagatgagagaagctttgcgagggcgtagttcggttatcttgctgtgccgcagccacaagttcatcaattggcctgttcatgcaacgcccctgaaagactggaacaggagcaggacagcgccaaggccattgtaacgatacaaggaaaaatataggttttagatggtgtttgaatgcaccagagctaatagttagttggctaaaacatcgctaatgtgattaattagctaataaatatctagctaactattactctctccgcccacaaatgtttgtcactatttatgtcggtcaaactttcttaagtttgcctagaatatattaggaacatttgtgtcttcgaataattttactaccaaaatagattcaaagatctacctaataatactaattatgtactataaatattaatatttttattatatacacatgtcaaaggtaaaaataggttacctttgaaaagtgagacgactaacat

SEQ ID NO: 11928 - DNA, 928 bp, Arabidopsis thaliana landsberg
aaaagtctatcgaacaaaatatgtgatagaccaaaaaatatgtggttcaaaataaatatgtcgtatcataagccacaaatttaaaaatatcgagcataaagctggagtaacagtatcgtaaataaatttcagttttttcgaaaataaatggtttttattaatggcattgctgtaatattgttttttcctacaatgcaaaacaaagttattttagacataattattacccatataactcatatttttgacatgttattctaataataaaacataaaatataggtcactatattaaattcccctattctcaaagaggttttgtttaggtacttttgtaaacatattgaagttgaacttaatgcttgtttagaagtagtatttacaacaagagttgggatcctagattttagacatagacaatcgaaataaacgagagttgattgattaaattttgtgatttgagttttagaacagtttataattaattcctaactacaattgattaatctgtaattctgatatttcctgagaatgtctctaagcttagcgtttttctatttgatttaaaactaattttcttttgtttttattttcacttaatttgtttagcttgattttgagactgtaaattttccgtgtgaacaaaataaatttgtagaattcgatctgtatgaataaaataactttgtgaaattcgactcttaaatactaaaatgatcttatttgagaaaatggtccaaggcaatttgactcatatcattatgacaagaggcggcaactacaagcctctatataacaaaactggtattcttatgaagtatcaaaagaaaaatattcgtaaagttttaaattgaaacgatatttaacaacatagagaaacataatatgagtggttaattaatttacccgattattatatatctcaaacg

SEQ ID NO: 11929 - DNA, 1536 bp, Arabidopsis thaliana landsberg
aaaaaataatgtctataattatttttccaatttttaccaatttttgggtcatctaatcctaaccctctcaaataatttaagtttatagaatatagttatatatatatatatcaaagtagtattatctcaaccatttagtccttaatatttttgtatcttaaaccaactaatattgacacatgtttgcattgcaagaaatataaatataaaccttaaatgtgtgtgtataataataataatataagcttaaatgaaaagaaaacaaaataaaaaacaatagaaaaaatctttgaaataaaaaagtaataaatttaatatatactttagctaaaataacaggaccatggtatatcatgtaaataaacaaactaaaaatttagttgaattaaattatataaataagattaatataatcttagacttaatatataggagtagtttaagaaaacttaatatgtaaacttgttttgaattattggtggcagtcgtcataaatagagagaaatgtaattcttgttggccgataaaggtgaacctactaaaccggtgaaacccattaaagacttcctgaatctaaaaaaagtaaaaactaaactcgtaaactatccaaatacgaaaagcaaaaaagaatctgtaataaatggtgtagattggaaacccattttggaagcagctctgaagtctatatgacatgttgccaccaactcaaattagacccttaagagtaaagtgttatgatattggaatgctccaaaatatgatctttatggtgatcctaatgggtggtggttatccattagataaagaaaaaagaatgattcttatagattaaataatacttggggtgattatataaatcacacacaaacaacacaattctgagtaaaaaaaaagagagtaaaactttctatgaaggagggaagaaacggttgaggttgaaagggagagtgtagaattcctcattcctgctatctcctttgaaagttctgaacttagcccaccaaggcaatcctctgtctctcgcggtctctttatagtccagagtgttgtcaagaacactgccaccatcagtgcgaccattggtgaagataagaagattgtgttcaagaaatcattgaaccaaccagcattggtgtgagctgggcagtgtaatgctttcatgctgaaacatctgaagtattcggggatcgataatcataagaagagagacactccgacgatgaagagatttctcagagagttcatgtttgtgaattgcagaaaagagagtccaactgaagcaacaagaccaaacaagacgcagtacacagctgcaaatatcgtgaaaggtattgaagcgaacaatgccccgaatttgcctagcattgagaagaatatcataaatcctgctgagatttggataactctgcggcttccaactctggtgcttcctagtaatccaatgttctctctgcagaatttgtatcgatcaagaaatcaaccagacccacttgtccaactaatggagaaagaactttaaaacattcacaattcact

SEQ ID NO: 11930 - DNA, 492 bp, Arabidopsis thaliana landsberg
  unsure (1)..(492): unsure at all n locations
aagagtatttcattaattattatgatttcgaaaccgaagtaaaacaagcatcacattgtcttaatttatttgtgctatttgtgagaatttctcttaaaagttttggtaagatttgagtagaatttaaaactacgtatataatcgttttcgaatcaagtaattgtaaacatagttatttaggattgattatcaaaatttactaattagaaaataatcattcattaattgctttgagttttaagggtgtgtttatgcaatatttttaaataccaattaaaaaaccgcgagtttttagtagagatctaatgtaataatagaattttggaagaatgattggttgattgtcctaatgagaatatcttatttgattaaattgtatgtctgataaaggaattgggaattaagacacgtgggagcttactagtggtagaatataattgatcctnggaaagaagtcagcctttcctttccagatgaaagcagagttttggt

SEQ ID NO: 11931 - DNA, 515 bp, Arabidopsis thaliana landsberg
tgtaggtctacatagtgtaggaacacaccacaaaaaagtttggttgaaaaaaaaacaattaaaatttgctttgcagagtgtcaacacagccgtgtgacactcggataggttttcttaaaaccctaaataaaggctttgctgagtgcctgtacgcagacactcgacaaatacgtctttaccgagtgccaggtttggggcactcggcaaagtaaatagtgtaatttttagaaaatctttgccgagtgccacatcgcgggcactcgcaaagaagttgaacttaaccgaccgacggcttctccttcttctctctctctctcactcacgctcactctctctcacgccgacgccaccgcaccgcgctcgccgccgaccctgcgccctgcctcgccgctggccccgcgctcgaccccggccctgcgcgcgcgcgccgccgtcaccgccggcctagctcgcgcccccggccggcgcccgcgtcagccgcggcgccgcgacgtccgtgcctgcagcccggagcg

SEQ ID NO: 11932 - DNA, 580 bp, Arabidopsis thaliana landsberg
tgccaaacccgtcccgccaacccgtcccgtaaaaattctatttattttattaatgctgattttatttatgatatgtttatgaatcattatcttaatattttgtaattttatagtaattaattgctatcaagtatctctacggtttgctgcttataatcgaattgttatagtcataaaaaaaaaaataatatcaaaaatgataattttgtagtgtttaaatgatattaaatattttggaagttttattttagtaactaatcgtatagttaatgcggagagattttgggaaggtagttaaatgcaaacatttaatttgaagatttactttctaattatcaaaaacaattattaaatgccagtgacagccactgtaaataagtcccaagttgaggatttatttcacaaagtgactgcaaaaatgtatattacccatcaacaaagaagatataaatacagaatatgaactttcgacatagaaaaaaaaaacatgatgaattagctttcactcaataatcaattggagaggtttgaacatgcatgccatttggggtttcaccccattgtgtcagattgaaatttg

SEQ ID NO: 11933 - DNA, 963 bp, Arabidopsis thaliana landsberg
cacaacagtaacggaaagtgagctatcctcttgtactatcaatgtggatatttgttctagtgacatatatattcacatgttattgattggtaactatttagtaaaagcctatattacattttactatttgttacttgataagtataaatcttgttcttctatcttcatgcagtgcacatataatttagtttgtaagatatatgaatcgtgttagccgtttcttacctgcaagagcttgagagacgaggccaaacaaatgacgttgccataacgcattatcctcaagagccaacgcggttatcgtgtccggcccaccaagatgcaacaacaagaatggtgcccatagagcaagaagcttcttgttttttggaggatcgccaggttctgtttcttttccttggttcttggtgatctgagacaccgcataattagcggtccaatccgctaaaagatatgctgtccatagaaccgcggcgagcaacttctttgatgtgcgtttccgcattggtgcaaggaagataagagacgtttggaacaacagagacattatcacaagtcctctgatgttccatttgtctaatatcttttttattgctggtggaatcacttgcatcgttgttactcttttggtgtggaaaaactaagctcgtttaagtatcaaaatttgctgtttcatttcatgctctcttactcatagtacatatatataggggatatagattaattgttaattatttgaccaaaaatttataaatgaacctatttaataacacgtgaattatgttttcatatattcaattcttatattccacggtaactctttaaacaagggcttttttcttgtcagaataaaatattctttccttgttgataataaaatcaagaaaaccatactctcactcttatacacacgttacttaaaatagtacaaggattttctgtttctggcttgattttatgtaa

SEQ ID NO: 11934 - DNA, 345 bp, Arabidopsis thaliana landsberg
atacctagaaaagttaaaagttcaaaacgacttataatttagaaaggagggagtattttttttattttaatacaattttaaacttattttgtaaatgaatggaagctaaccttgtcaggatactgctttgcaagctccaccagttgaaggcgtcctgctttcccctgggcacgtccaaggaagttggctaagtacttcctttttgttaacgggatttgttggacagcaggagcatcagacttcaccatagaatcatccacgttcccaggtataataatatctttccatgtattaaatgcactcgtaccacgtttgtcagtccggtcaccctgacaaatgaaacac

SEQ ID NO: 11935 - DNA, 515 bp, Arabidopsis thaliana landsberg
attttcattgtttgataaaaaaatcgaaatatttttctatttttctttcatttgtacttgagaaagtacaaaaagaacaaataaaaactaaagatgttatagagaaatagatgtatcatctataagttttatttggaagattttttaatattcaaatatatcaactcaactaatcagagaaaagagttctaaatttttcatttactctttcattttatgttacattaaaaaatttctttattatattttagattttttgtctattaagtctttctataactaacgaaaatatagacaaaagtgtaagactacagtaaaacctccataaatttaatactcgataaatcaataacctctataaataaataaattatgttggttccgagttgggactagtgtaaaaaacgacacatatcgataacttagtaagataataatgtttttgaaaatcctatgtaaaaatatggtaccatcaatatcataaattaataattatattaaaataaaagaatata

SEQ ID NO: 11936 - DNA, 832 bp, Arabidopsis thaliana landsberg
cacaagattctagagtgactgggaaatcttgataggcagtcctttggggaagtatgggagtggtgcacggatgttctccgattcttgggccaatgagaaatcgtaggttgttacaagatgatgaatgaagatagaaatttgtagtctcgcaaactccgcgccgacacactgtctcactccacctccaaacaccatgaacgtcttagatccagaccgcaactctttcccctgtccaaatatattcattaattttgagttacacttttgtttacaggaactatagagtaagtgaaaatttatacctcccatctccatggattgaactccaaaggattctcataaatagcatcattgaaatggacagctggtggtataaccgccacaatccagcccgctggaattgtgtaacctgttgaaccaattataatttatttctctataaatctgaacagtctttatttatttttttggtcaacgatctcaactttaaaatataatatatatagaattttgacttcgagtgctgccatgcttgagtgatacttgcctttgatttcgacatcgttcacagcctttctatacattataggagccatgtttgccattcgaagagtctcatttatcacctgcatgagtcgtaatatttaaaatatcgatgccttacttattatactagaaaaataagaactatataatcttaaaaagcaaatattatatgttttctaaggattgtgtcttttcaccataattactttctattaaaattataaatctcaataaatgtaaatgaaagatgtgtttctttatcataatttttttgcaaaatatatct

SEQ ID NO: 11937 - DNA, 476 bp, Arabidopsis thaliana landsberg
acaaggactatatctatgattcttaccggttatcatcttaacattaacaccgaggtttaaagccctcctgattgtttcggcactgtcatgcctcggaggatcaaaaagaggtaaaagacctacaagttgccatgggccaccaggagcatctttcttcttctcgagaacttcctgcaccattcaaatcgatatgaatcacaataaagaaacaaggacacataaacttcacgatatatagtaaccgaaaagacctgtcttgcaacagccaaagagcgaagtccacgctcagcaaacttatcaatcactccatgaactttcctcctaacatcttccttgcaattacagaggttcagtatctgttaacaacggcataaagatcatcagaaaaaccaatgacctgacttgaccaacatataaaacatagaaaaatcagtacctgctctggagctcctttactagctctatgccagtttcca

SEQ ID NO: 11938 - DNA, 623 bp, Arabidopsis thaliana landsberg
ctcactgttcagtgtatgagcgcattgaatcgcctacaggcctgtaaagcgatgccatggcacacctcactgatctcgctcagactactaagatcactctcgacagtctagaggacttcgtggtcgacttgtctttgggattggtggaaaaagacctacagttggaacatttgagccatcgcatcgcgactctagagcagcaggtggaaatccgagataacaccaccgatatcctggagatctagctccatgatgtgtaggaggaacttgaggaagccaacgaccacctggagatgcaccaccaggacatggaggcaaatgaggaggcaaatgagtaggaagggagggagaggaggatccgaggaattagagccagctctaggtccgaaagcgactccctctggaaggcccccttcacccgcatctagtgttgcctctaccactcagggttgacgggttagtttgacatattaggaggataggacccacgtgagcttagtgttggtaacagattttagactaggcatatgggtgaatcccctaaaatgttgcacccagggaaactttggtgatcatcaaatgaatgtagcatattacctcatttggtcaagctatgtatgtat

SEQ ID NO: 11939 - DNA, 1343 bp, Arabidopsis thaliana landsberg
ttactctttttatttttcacaatatatagctcaattccaattttatttgctaaaacataccacatcgataaaattttgtccaccaaccaaattaataacgtgtttcaaactaatcattcactcgttctgagaccaatatatataattagctactaaattaaattaaaaactattttttgtttggttaatgtgttatattttgactttctaattatatgttcgtcaactattcctttcaaactaatcgcacaaaataattgttcgttatattcttcagatccgaacttcaacctgtattattataagaataaactatttaagcgcttactaatgatgttctgtttttcttctcaaacttttaggttatctgtttttataagttaacaatttgacaattgaccaaaatacaaagtcagagcccaacaattaatttattttaatccaaatattctctagctaacatatgatagatctaacatattttaaattacagtctccaaccttgaacagcgacaccgcgtgaaaactctcatgcacgtatattatataaacccctagggtttgtaacattcaacatcaatctcaaataattcatcaacgagaaaagattaattcttactaccaaaagaaagaagataaattactattttgttttacgtacgaaatatataccaagtgagatctacaaatatggagagattttcactaaggtttgtgctaatgatggtgagcatcatcctcacgttatcgatttgtcaagcacaactttctccaacattctacgatcaatcgtgtcggaatgctctttataagatcagatcctccgttagaacggccatcgctcgtgagagaagaatggccgcgtctctaatccgcatgcacttccatgactgttttgttcatgtaagtttttattcttctaaatactaattccacatttttatagaaccttacccaatcatttaataatagttttgtgtatgtttaggggtgtgacgcgtcgatattgctcgagggtacatcaacgatagagagtgaacgagatgcattgccaaacttcaaatcagtaagaggttttgaagtcatagatacagccaaatccgaagtcgagaaagtttgttccggcattgtttcttgcgctgatatcatagcggttgcggcaagagacgcttctgaatacgtatgtttgtgattatatatgaatatacccaatatcctttatatatataatccatgcatatgtataacaactctccaaccaatacttaggtggtaggtccaaaatgggcagtgaaagtcggaagacgagattcgacagctgcgttcaaggctctagcaaatag

SEQ ID NO: 11940 - DNA, 593 bp, Arabidopsis thaliana landsberg
cattctttcaatgcagctttaatgaaatcccactctaatctgtcgtatgctttactcatgtctgttttgacagccatgaaacatctttttattggtcctgacgtcttccgatagcgaactgtctcgcgtgtgataaggccattatcagctatagctccctgaggcacaaaggctgattgcttttcagagatacatgtatgcattactggttgtagtctctttgctaatagcttggcaataatcttgtaataaactgagcaaagagctataggtctgtactctgaaactttctgcgggctgggaacctttggtatgagtctaatatgagtatgattgatttttggaggcagggtacctgatataaagaaagattggatttctgtaataaccttatctgccactgttttccagttggactgaaagaagcttgcagagaagccatcaggacccggagccttgtccgggtgtatatcaaaacaggcttgtttgatttcttgaggtgttggcattgcaatgagtgcatcattcatttctgctgtaacacagggagagagagcctctgagatgatagattcacgatcgccttctgggag

SEQ ID NO: 11941 - DNA, 637 bp, Arabidopsis thaliana landsberg
  unsure (1)..(637): unsure at all n locations
tgaaaaacccgttttggtgtctccactatacatgtcctaaacaggtgtttgaatgcactagagctaatatttagttagttaaaaaaatctgctattgaaattagctagctaacaaatagctagataactattaactaatttattaaacataagctaaaactgtccttagttgactttgaagaatttctgtcacacggcccaatttgaacccgtgcgattggtttgacttgtcctggaactcgtccgggcctctgtctcgctgtgcatacttcgattgattcgatctttttgcctttttgtcccattcaaaccagcgtcactagctttattattttttaaataacaacaactaccaccaccgctaacaacactagatcactaccatatttttgcacaattgccaaaaaagaggagggggggggatggggggggaacgtatatgctccgatccaaggtgtctggttgaagtctccggcagttggattacgtacactgtatgacacatgacacttccgttaagtgccgttgctactatgctttaattaatatataagaagacgagtagttgttgttaggaagaagcactanaggttggacaaatcattggatcaagagacaaagagaatcggggggcgtg

SEQ ID NO: 11942 - DNA, 702 bp, Arabidopsis thaliana landsberg
gagagtatgaggtaattcttgacttgattagcttctggtttatagattactgactttgaagctcataacttatagggtttttctttcttttctgctccttgtgttctacccttgttggagtttttatttttttttggttctgtaggcaggaaatccgagcttcaacaagttccatgacttcagttcccaaaccactaaagtttctgcgtccccattatggaactcttaaagcgtttcatgaaacaatggctgattctgatctcaaagtatgtcatcattgatttcaagtcattaacaattcttatattggtatggcttaaaaattacatttgctatgtttgcagaagtacctgtccgatatcctgtctgtcctggcccttaccatgtctgcagatggtgaaagggtatgcttctactgacttgggcatactttgtattctgatttgtattttttgaggcatactttgaactgctaatcactttcttttacaatattattccaggaaagcttaaggtttagattgattggaacagagggtgacattggatcgtggggtcatgaatatgtcaggaatttagctggagagattgcacaagagtatacaaagcgtcaggttagaaatcaattttcgattttgtctatgaaaattcagtttctcgtcctaggacttgtgcagatattctaagattgttgaagatgtg

SEQ ID NO: 11943 - DNA, 418 bp, Arabidopsis thaliana landsberg
atgctcatcagtatggctggcagaaagatgaggaaaagcttcaacgcaataccggctagcaaaccttgtatcagcgattttatgaaatctctgtgaacaaaaaggtccactgttagtcaaaatgttcctcatatttaatgtcatgaagaatggaacaattttagagaacaagagaactcacttttcgataatgactttcaagaacggtgcaactttctcaattccttcaatggtagcaagagattgtacaaacgcgatagggatgatgaaaaagaaggtaaggaagaagaaggctacattcataaccaatcttctcacagtcaaagaaacatatggaatcgctaggtttggccaatatatatcacgcggctctgcagcccattcgggttaaccattcagttggggttcgggtctgcgt

SEQ ID NO: 11944 - DNA, 666 bp, Arabidopsis thaliana landsberg
gttagggtctttgtgtctctgtttctcaagcttaggatctttgtctctgtttctgtttcagggaagatgactcgaagctggtcgatggaattactgagaagatatcaacaaagttgttctcggaaaaaccaaggaatgataatatcctaattgggatcgaccaacacatgggggaattgtatccactatttaacctgaattcgaatgaagatgttcaagtaattgggatttggggaagaggaagtaatggtagatcagcactagcaagccacgtttaccagaacatcaaacatcacttcgaagctcattgttttctcgaagacgtgagacggatttcgctacatttccgtgactctcatttacaagacgagcttctttcaaatatgcaaggagaagttttgacaacaaagaactgtcataggtgtcttaagacgatcaaagcaaggctgacgaacaagaaggttcttcttgaggcgaacgatgtagacaagcttggacaatttgatgcacttgctgaagaatttagctggtttggccctggaagcagaatcatcataaccacacaagatagacaattgcttatttcatcagtagtgaggagtgtctaccaagttaagctcttgaggtgttacccagttcgtgagctctttaggtcaaatgcccttc

SEQ ID NO: 11945 - DNA, 1343 bp, Arabidopsis thaliana landsberg
acatcaaagaaaatggtcagaaactctttccttttctcttttttgttaaagcagaaagtttttttttgttggctagaaagtcagaaaactttttagtacgtagttatttaactaaagatttttttatttttttattttttaactctaccacacattaataatatcctagcagtgaattgaaactgaagtttgatttaaatatatttccctaaccagttcaacaaactgatttaaaaaaaaaaaaaaaatggtgtgactattaataatttacgttgattactgaattacaggaattaatgacaacgacgacggtacaaaaccaagagaagaaattgtgaaggacacatttaggattgaataccataagacacatttcgaagaacttcacaaagctatagtgttagttcttgatctgtttctggtttagtctctgatctttctgacaatatttaatcaaattcggtcgagttttttttaactaataaatttatgatatgtttatagggaagatgggtgtgacgtaagaggatattacgcatggtcattgatggacaattttgaatgggagcatggatacactgcaagatttggtctatactatgttgattttgtcaatggtctcaaacgttatccaaaagattcggtcaaatggtttaagcggttccttaagaaatcggtcgtcggagagagtaacaaagaggaggtagaggagatgtcacgcgcggaagggaataagacttttaagggtttcgaagaatcggcgggtttctttgcatctttcatggcaatgaaccaatcgaggagagatgaggagaataatcgctgctcctttgattttcctcatactcattttggtgttttgcaaggcatagagaacccatcttcattttattgatttcaaatcccttatgtttttaaattccttatggttggacatgtagttaattagaatttagctcatgttaatatatgaacattttcatggtaatattttcttcttggaatctaatgggtggcatactggcatgatgggttctggctttgtgtgacaatatacatatattattttaaagctgttaattaatccgacgcttcaaatgagttcaacagccaattaaaaaattttcataatataaacaatattatatatcgttaatcaacatatatattgatttttttttttaaactaagtttatataaatgtttatttcccgcaaggcccaagtctattataaactatttcttaaaacctggcattctcatggggtattttaggtatttttctttaccaacaaatattttttcccttttcttttaaaactgggactttttttttccttttt

SEQ ID NO: 11946 - DNA, 1010 bp, Arabidopsis thaliana landsberg
aatgtcataactatgttagttatggtttaaacggatttatataacaaacaaatctaataaattttgatttcgaaataaaggtaaatatctaggatacgaattcagttattctctttaccaaaaataacaataacaatatactgaaatttatactaatcgaggtatataccttataaatcccaattcgcaaataatttgtgatttgacttctataaaaacataatatatcctttaaaccattacaaatgtttaaattttgtattttttggaaaaaaaaaaaatcaaatcattaattaatttaagcaatctacgtttttatgcgttgtttcgaatattagcatctactattaattttcttattaacttatatatatttacgaatattgactttacaaattaatttaagtaatcttcaagttttagggtaattttctaatattttattctatagaaatatcatgtttcaaaataatcttatataaagattgttatctttaaaaatgaagcatattctgcggattctttttcaaaaaatcttctaccaatattgtttttctttaaatgcattaaccctaaaatatattagccggtttctggatgctatataaatagagggtgttgtctcagaatttggcgatgaggtagtggtgtgtttaattcgcctcgccaaaatctccggtgacggccacctttccccatctctctatcccgtaaccaagattgatgttttggacctttccttggtccttgtgtttctgagcttagtgagccaactatggtcttcagacttttttcccagccctcataagcctttttctgttgttggcttcactgttgttctttcaggagctctttgcggtgtttccaccgatttgtctctgagactcctctcctttatggagaaacctttctccttcacggagagaccttcctccttcacggagagacctttctcttagagcagagagatttagaggttatgtatgaaggtgactgtaatgtccttcatc

SEQ ID NO: 11947 - DNA, 499 bp, Arabidopsis thaliana landsberg
ctccttcagtcgatctgacagagcatgtttggagtcaatttgctccagattttttgtggtgaccagatcaacattctatatcaaagttgtagcttaacaacccagctcaaacttgatcatagaggttttggttaatcatccattaaatcgagctccacaaagtcccaaagtggatccaatctactgccttctctgaatatcagggagccttagtatgacagccagacttcagggctatttagctcctaattttgtacaataccaaggcttaagtacttaatcaaagttgttagccagttgtcgtctagtgcgttgatccttttgttcatcgctaaaaaaacctaaatccgaaatatctacgtatttctttaaattaaaaaatgaaaatatctctgggagcttatccccacgccgcttcctctttgatattttgctcaccacagtacagacctgggcttcatccggtggccaggtcttcatcttctcccacgcgcgtctg

SEQ ID NO: 11948 - DNA, 1076 bp, Arabidopsis thaliana landsberg
caagaaattctaaagaagaaatatcgttttatgatgattctaaggatttgagtatctttgatcaaatgacgaatttcacacagaaaacagagtcaaaattaacatgacgaatttcaagaactttcaaaaacaaaatgtaaacaaacaacagaagagtcgagaaagtgacaaattcgagaaaaaaaaagatgtcgagagagcaaatatgtcgcagaggtttgagcggtcaggtcagtccactaatgttagaggagaatagctaattatttgggctcaagtccaacaaatttttttaaatgatatgaactttaaagaatatttcaaattaccaaaagtattttactttcttttggcgattatttaacttcttttggtagttgacacaatcattatattatatgcacacaaattttggaacgaaaatttaaatgtgtttttgttgaactttctagaccacacgattctatattttcgaaatctggatcatgtctagttctaatatttaattacatatgcattatgattatgctatatatgaccccaacaacgttaaccaaatgatttattacactaatataaaaatatttattcaaaataataatactgagttttatttacaatttttgaattgtctaatcataatataaatttttttaatccagttaaaggcaaatatgtttctcacactagacaaataaaaagtatatatcttatatttcaaaaattataaacataaagaagatattttacgtaattatttaaagttagttttaaggatatcatgatttataaaaaaggtttataattggaagacacaaataatcgagcctaattttcaatccactattcttttgctacttgaaccccatgatttatgaaatcagtatgaatcttgttcgaatatcttgatctacgattactttttatgggtatacttaatatgcatgattatagaaggccaagtctgaatacaataagagcatcttcaaaggaagattttagaagtttcttaggttaataaagcaatacaatttaatatttatgatgaatgaagcttagagccgctcttagcttac

SEQ ID NO: 11949 - DNA, 1038 bp, Arabidopsis thaliana landsberg
cttcactagtgttcatgtcccactgatttattattaagtgtacttgatccttgaaggagtggtactgatgaaaaaataattaattcataactcggtttaagtcggtttgtagcataaccgcgatattggaaactggttaattcggtattgatgtagtcttttattcggagaggttttggtattataaaaatttgatatacaagcctgtaactctgcttcttcttcccctgttttgaaacttatcatctcgagttcaagatcctgtagatttactagtgttttaaattagataatgaattactatatcttctagccgagatgttgaatgattattcatctcaatttttaccatttgaaatgaatatgttggaaaattaattcaactcattcaacaaaaaaaaatatgaaaaaatgaacaaattataaaggaaaacttttcaaccctttcttctactatttcgcagaagaatgagttgaacgatgttcagctttgttttgttcaactcaaaaattttcaatcattcaactatatgtcatccctttgtagcctaaatatttttttctttttcaatattttcatagaatttcgtttctcatccgagccaagttataaattcgcatatcaagctttgtatgaacatataacacctagaatttggatgatcagaactttaaagaatgggttttgttttaataaccggttttataactttcatacgaattgaaagtttccgttcggattgtatgacttgcgagtcgtgatgctgtgaatgtgggttacattaagctcaatgacagaagcaaatggatgtatgtagggactggggaatttggagtcttgcaaagataaatacaaatatagtcgcaaagatgagtagagagatcaaagatggttgacactactaatataatctagaatctataggtaatgaaatgattaatattacttagagacgttcagaggaaatcattcattcaaggccatattttgtaacaccattttttggttgataaattatacatttcattaaaaaaaat

SEQ ID NO: 11950 - DNA, 816 bp, Arabidopsis thaliana landsberg
tacctaccttgggacaaatgaaactaatataaatacacacccgataattaaaaccttgctagtgttacgtaaactagaaggcagcatcacagtaatctctgcagcacatttaactcccatcctactagactactatgcaggacgtagagtgctactggtattaattagtggtatacaacgattcaagaaatagacatatacaaatgatctgtcacatccttcagatatgaggtctaaagggtattaactgtcttacgaaatgcaggaaaaccacttacctgctgtttcatgaaattgatatgtgcatcagatataaagcaaaagtagcgctccatttgcttccagaacgagctaggaaaattttgagctgcatcaaagaaccaaaccaattattcttgattaaaaaaattctggaaaaaataaacttaacgagaaccatgaacaattacttaccaaagttgatagccgagttaacagcagctagtagctcttcatgcccatcatctgaaccaataagaagtttttcaaaaaaaaacataaataaaagaagaggggaaaaatcaatcctgtcaaagaacaattctgatcaattgaacttattttaccaagaaaatctagtgttgtagcattggtcgctgtatttttctgacgtttgtaagccttgcggtcagagagtttcctagtgggtggacgacctgccctgctgcagtaaacatatgaaaaaaaaaactaggaaataagcctcatgaaacccaaacacttcttaaatactagaaaactgaaaacgagaaatacttagagacaggagtccctacc

SEQ ID NO: 11951 - DNA, 945 bp, Arabidopsis thaliana landsberg
ctttagtataaacaccaaaataacaaaaaaaaaaaagatataaacactaaaaagtccaaccaccaataaattttgatgataggtcaaagtttttgtacataagtttcaaatgagtattgcgataaatatggagtaaatttgggaagcaaaatatgaggattgatctatttagttgtataaacaaatttcaatataaaagttgtttggtgctttttagtgaattatgaacgcatgattgtttatgtgaacgcatgattgtttctatacatgcatacttgagagggtatggttgaacatgtgaatgtatgttctattatgtgattgtctggttggttctatgtttgttttaaaaagttttagtaaaaatattataggtatttttacaattgtttggttgttttatgtattttcctttatatatatatagtcgtaattatcaaagatagagagcggtagagcgagagattaagagaacttgtagctctcaaatttctttgatcttagtgaaatctccagctatagaaagtggatgcatctctcaagactgaacccctctaaatcttgtgtacagtttttttttttgtctaaatcttgtgtacacttttttcttgcttttattttttgttctagatgaggaattatatccgtaattcctaacaagtggtattatagtataaggtttgtgttgtagttcaagaaatgatgggaagcggagatagttcaggacacagtatcgacaagttcgatggtacaaactatttgttctagaggatgtagatcgaagattctctgtatcgcaaaaagcttcatcaaccgttggggaagaagtctaagactataaatcagggtgactagaatcttcttgacaaaccagttttgtgtgcaatcaggttaacaaaattgtagaatgtcgtgaaggagaagtctacagtggggttaatgaaa

SEQ ID NO: 11952 - DNA, 387 bp, Arabidopsis thaliana landsberg
gatttttctgtctgagtttaaggctgttttgtgccactggtttgactatgtagaggttgagatgatgaaggaaagattttcgaaactgctgcttggagaagatatgtcaggttctggaaatggtgtctgtacagctttagctatctcaaacgcaatcactaatctttgtggtatgtggaattggttttactcacatgaattggtggattatactctttgaatatattttgataggctcgactttgtgttttgcttgaagctaccttgtttgggcaactatggaggttagaaccactgcctacagagaagaaagagatgtggagaagagaaatggaatggctctctgtgtcagtgatcacattgtagagatgactctcttggcaaaca

SEQ ID NO: 11953 - DNA, 522 bp, Arabidopsis thaliana landsberg
  unsure (1)..(522): unsure at all n locations
ctgttttcttgagttttcgtgtaaacctccttttgaaacccgtggaacaggaagccaccatttggcttcttgtctctgaaaagattttcggaaagaagatgatccgtccgctgctgattcgtgtgccatgattccttggtcaacataccaaaactctgtctcctcaaaactatctaatatctcctgcaaagatggaagatgaataagaatgagacctttgctgcttaaaatacctatagagaaactgggaagacgaaaagagatcacttgttcttacaagaagcatgttatctagtttcctgagagctgggaggttaacataaagatctgatcttggtctgcaagtcattatctacaacaatggaaaaacaaaatatatgggtctataatcgaaacaacaacaatgcaatcaatatcaatgcctaatctgtacctcaagtttggttccatcaggaaatgtctgcccagtaggagtcatctctacaatgtgatcactnnnnnnnnnnnnnnnnnnnnnnnntc

SEQ ID NO: 11954 - DNA, 1135 bp, Arabidopsis thaliana landsberg
aaaagagttgttgttcttgtttttggatttgtctgaaaatctgacctgtcagttctttcacacaatcgccgaaatcactttacgtaatcttcttcaacgaatttcagaatcatttccataagatgtttcttctctttaggagcaagattcgtgacgtcaacatcttcaagtccaatcttaccgttgaccatcgtttgcggcaacataccttttcttaaccgatcgtaagtcggtaatctctcaagcgccgcccatcggagctccacgtcatcttcttctcgtctatcgctccgaccaaacacgtcgtccgttgggggagcaaacacatctctgaagctttttgaagcagctccggctaaactccggtgacttgtggagcctaaacttcctctcccgctcattgttcggaccagatcttcatctcgtcctaacatcgccgctgagtcgtccggttttactaatgaatgttcgagacgatttagtttccggcgaccatttaaaggggagagagaaactctggagtgagagagaagagagaagaggcgagtttaaaggcttcgagtgacaatattttttttatttataatacaatttttttttttgtctgttttcttttgtctagtaagactaacaactgttaaatatgatttaaatagtattttatattattttccgatagaaaatacttaaaaagaattactagctatatatatatcgatttcaattagttataaaatcccaaataaaattaattactatctatagcaaaaatgaaatgttgaattgatatatgtgtttgttagttatttgtatcatataattttttttagtaaaattagttagtccaacatttagtctgttttacagatatttgtttttgactattgatgtctaaatgagttgatggattgccacctactgttcagacgtaaatggtaaatatgatttattttacatcattttcgataaaatatactgaaaaaatttagttctatatttaaatcgatctcaattagatagaaaatatcaaataaaattcaatactatatataggaaagataaaatgttgaattgatgtgatatatgtgcgtgttacatatttgtatcagataacttcttatgaatttattttaat

SEQ ID NO: 11955 - DNA, 912 bp, Arabidopsis thaliana landsberg
taagttaatgatctgatcggctgcagaatattaattaactgacaattttagttggctaaacaagacaattttagttttggtttatatcaaaattaattaacaagactaacacgatatatatatatatatatatatcgtgttagtcttgactgtaaaatccagcaaataaatatttatttccttttagtccttacaaaatttatctcaagcagatattgtcttaacaaatttaaacaattcgacttttacattaaaaatacttctaataattatttcctttatccgcccaactaattttaatatattacaaaatctcaaggattatatttaaacacaactaaccatatttatattgatcctcacgcaagataagcatacgcaagataagcatacgcaatttaacgaatatttgtgcctcagtagatgcaaatcttacttaaattcataatcacaatctaaattccagcttttcttattttcatttatttcatattctgaaatttgctctaatgattttctctgcatagtctattttaaccaacaactttatagctaaaacccataatcatcaatctccattcctttctggagatttttacatttaaatatcctataattaataatcaaactttttcaaaattaaaatattataaaacgttttaaatatttataatataaaactttacaaaatttcaaatattataaatacttgaacatataagaatctatatttttcttttgaacacatttgggaaataaataatgggtttactacaatatttaccgaagaatgctattgaattaaattcttaagatttatcatatttaatgaaagatattttgccaataccttgattctttgtttttaaaattaagattaatttgtgtgatctcaactaactactcccgcat

SEQ ID NO: 11956 - DNA, 449 bp, Arabidopsis thaliana landsberg
ttccaaggccgcaaagtccttctctagcttctttacatgaaggaggtaagctgcgagcctgggctcattgcagctgcattccccacgggtctgcttgatgattagctgagagtcccccttcacaaggagctggcggacccctagggatagggccgtagataggccgaagatcagtgcctcatgttctgccatgttgttggtggctttgaactcgaggcgtaccacatacttcaactggtccccgtctgggccgacgaggaccactcctgcgccagacgtctcttggcgggcagacccgtcgaagaagagtgtccagtggggttcggtgaagactgggccccgcgccccgcaggtgtggggcctggctcggggtccggggccccaggggggtactggggtggagtcactccacaatgaagtcggtaggagctgactcttgatagcgtggc

SEQ ID NO: 11957 - DNA, 1087 bp, Arabidopsis thaliana landsberg
  unsure (1)..(1087): unsure at all n locations
ataattccccagattgccgggtaagcagggatcctggtttcatccaaaagtgaaattttaaattactgttacttcagccagtgaacctagcgtggaacatagtaaagggaagaataatcggatgttcccagttcaagtaacacatccaaggtataatatgaaatcaaaatcaaatgttcaggagtcacgagtaatcaaagccatgactgaaacctgaaacttacaaacatctttgtatcgaatttgccaatcaaacaagaaagctaccttgctttatggaacctaaagatcctattttccttcagtaaattatatactaataggacaaaaatcaagcaccattaaatacgtcactaaagaaaggttagtgctattccagcacatcaaacccactttagttttcaaggttacacacagataatgaaaagagaaaaaagctcctcactggttagacagagacaagcgaaaactgaagagaaaaaaggctaaaagttttgttctttttgtatgactgagctagtaaaacattgtccataaatcattcttgacttgaattatataacaacaaagagcaaagagcaaagagactaatttaagttgtcgaatcaaaagccaagaaccaacaatttatgaaatcaagtcgagcaaaactcagattctatggtatatacctaaagcagcgagttcgagtgagcttcctnnnnnnnnnnnnnnnnnnnnaatgagactcatcaacggcccacatagccacaatcccgcggcaggtccggtaaacatgacgatctctttcatctgtccccaaatactctgattcgccaaatcatctaccttcacttcttctacttctgcttcnnnnnnnnnnnnnnnnnnnnnnnnnnnnnnnncatctccttggagctccgaaatcgacccatttccggtttctcctttaacaacaagctcctgatttggacttgcacagtttcttaaaaacctgttcagcttcagggacgactttggtccggaaacagaggagctcctgaaactcgggaatggaggattccatgaccgtaaagtgagtgaagatgggaatggtagctaagggttc

SEQ ID NO: 11958 - DNA, 967 bp, Arabidopsis thaliana landsberg
aaacctttttcacactacatttacattttcaactaaagatttggattttgatactatactgttcgtatgcaatttcttgttagattattttctcataatagatattatctgatcagcttattagaatttgtcttttctaattttagctgatttttataaactttaaacagagatgcatttattgtaaacatggtttttttttattaatacaataatatatttatacacaaaaaaaaataaaaaaaattgaccatttcattggtacatgcatgcatcgatggtacaaataattcccaatttttttctttcttctggtttaacaattcccactttcaaatagaagtagacacactaaattattaatagattaaacaatcgcgaaacatgcaatattatagtagactaaatattgacgtttaaatgatgagtacgtttctaatctttcacgaatttcaacttaagagaaagcaatccccacgaggccttattcgaatagcttttattttatcatcacttgaccttaatataattagttattgaataattcgaaactcaagtactatataattaatgtacgaccatctagatggtaaactcttctaattgttagactggccggtgaggcggtgacagccttcattagttaggccagtagaattcaattcaactaggcggtttgaatatatgacctacatgtaattcttcttctcttttataacttaggttgagaaatgagaatacaattaaaaatactaatatcacgtttctaaatcatatgtcaagttatccaagtgtggtaaagcaaatggatcaaagttgtaggatccaaaatctggtttgtctcaacttttttttggtcaaaattaaaagttttgtaattaagctttcgtagctcaatcaattggaggagtgttgttacaatgctgccagattcagctttaaaattaaccaaacaagaagacacgtg

SEQ ID NO: 11959 - DNA, 1178 bp, Arabidopsis thaliana landsberg
taatatcgtatccaagtccaattttctcggtggttaaagtgttgttcttcgtatcaaattatcgataaattttatggagaaatggtacaaattatgtaatttcttacaaaaatttgatctaaaaagtagttttttctttataatcaataatgtttatgaaaccaattatacgtataaacaaatattttgtttaagaacaaaacaaaaagaactgttgacatagttaaagtgttagaatcgaactttataaagaattaacacagattgaaaaaaaaaatagtagaattatatttcactaaatattgcgaattccatatttatatattaatttataaaaattttactgtatttttttgataatatttacagcaaatccaataagtccattgaaaacattctatttctcgtcttaaagttgtcaaagattaatttttgtttgtataaaaaaaagctcacttctattactaacttgttgggccttttattaatttgccttgtgatttagtttaggcccctctttcacgtatataattttgttacatatgaaaaacgagacaaaactcatccaatgaaattataacacgtgtagatatttatttcaatctgcttacgaagaacgccactttgaccaccgagaaaactggacttggacaaaaagacagtctttgttctggaacggcgtttcacacaggtggaggccaccatcaaatatttaattacaaaactataacattatatattccaattataattttgttactttcttatttgttttttttttgtttagagaagaaatagtaaacgattgattattcacatcgttgacttgttaatctattttaggactatataaaatcaagagaaaaatattcagcaaatcactaacacattctatttctcgtcttcaagttgtcaaattatggtatttgtttgacatttccaaagaaaaatctacatttcataatttcatatatattaatttccttacacataaacctctaaatattttcatatttacataaatagaacaatattccataataattaatagcgttatcattctagaaaaagggcaaaactttaaaaaccaaccctttcttcctcctcctccgagttcttctttataatcttcgcctcctcctcctccaaggtaaagtattcagcttgtttgtaattca

SEQ ID NO: 11960 - DNA, 763 bp, Arabidopsis thaliana landsberg
aagaccttaaactcttttttctcttccctggttgagggaagattaccactatgggattgagcccactcctcagccatctttacaagaatgacgacgtaaggtatgtgcttatgtgcagcggccggctctgatacattcagatcaatggtctccacaaaactgccgttcattaaataattaagaatatcagtaagtactcagtcgtccatccacaaccataatgttaaaggatgccagaacaacataaagtgagaggatatgagagcagtggacctcttgagttcaggccatggattattcaggcggaggtcgtcaagaaaatgatcaggttttgagtcaattatggggtgctcctgataaaaaagaaaagaagagagcttagcatatattctcattggccaatatcctaaccacggcataccacaaagtaatctaaactttatcacaaattgggtctagacaggtggtattaattacctttacagagatgcgaacaaacccagcaaggccataagagcgaaccaaaaccaacttaacgtttgcatctcgacagattctatcaagtttcaacattgaatcttccaccagctgcaaccaatcaatgtcgaaaaggggatgaaataacgaacttaaataacaataacacaggaaaaagaagcctaataaagcaatatcccgtgaagaggacgaggaaaagtacatatgagaaactaactaaagaacattgaatagaaggtatcatgatccatggtgagtgactgtg

SEQ ID NO: 11961 - DNA, 707 bp, Arabidopsis thaliana landsberg
tatgtttatgatattgatacttgacaccatatatttcgtatatgttgtgaggcgttccatatacatatgtaactagatgccctttagtttacttggcatgtgttgtcatatgttctgctatatttcggtagctaatcactaatcactaatctcaagctgccttatctacatatattcatctttgacacgtgtcaaacatttattttttcaggacttctcggggaagacaagagatttttcaaatgaagatacagatccgttgtctaatgagaaactcataggtgattaacatatgttggtttattacaacagtatgcctcacattttttgttccctctagatcctagttgcttcttaatagaatccatgttttgcttattttcttgatctttagatttaggtctcgaagaaagagaagctgccacagctaatcttaagggcattagacgtcttgtgttaagtcctgcctcattgatttccaaaggtatactgatcgtttgtacggcgtcgttgtggttttttttatactgcactctcatttttctattgaattgagcagggatatatagtactcagtctttccagatggatgaagaggaaggctttggaaggtctcttattgttattgatattactagtatagtagtatgacattcatttactttaaatcttcgtttttggcttaagctgattatcttccacatctc

SEQ ID NO: 11962 - DNA, 536 bp, Arabidopsis thaliana landsberg
ccagcagcaatatcgtgaagaacaactaaaatcgttatcgcttcatctaacgcctttagccttactcctttggttgagtggattgaccgaattttagttattgtttatgcttccatgtttttatttttttttgccatggaaccatttctgtaggtctataatcatcgattgtaacctaaattgttttcatttttataaaatatttatattcttagcaaaaaaaaaagaaagttgtatatatgctaagtcgtgggcaaataaaaaagtagtccaatatgtgagatatgacctcacatctacatgccttcaatttgagtcattttcaagaatatatgtttataacacttgattttagatgtggatgtgatgcctaacataaataaagtagaaaatatacaatcctaaactacaaccaaaatttggaatggtgaaacgtaaacggttctttagggaaattcacgatggtcatctgacgaccatctatctgtaattcattttacaagtttgtattcagtcctaaaaatctgtaacaaaat

SEQ ID NO: 11963 - DNA, 1329 bp, Arabidopsis thaliana landsberg
ttcgaataaaaatcaattgacgagccgtgttgttactttgtggtatccagctcctgagctggtagtgggatccactagttatggagtatcactagatttatggagtgtgggatgtgtttttgctgagattctcatgggaaaaccaatcctaaaaggcagaaccgaggtaaaaacataattcaatttcccgctctttattaacttcaacaagattttatatattgtaaattcatatattatacataacatgcatcttgatatcattgctttaagcttcatttttttctttccatttttgttttttggttttggcagattgaacaattgcataagatctacaagctctgtggatctccacaagatagcttttggaaaagaactaagcttcctcacgcaacttccttcaaacctcaacatacttatgaagccactcttagagaacgatgcaaagatttatcagcaactggtgtttatctattagaaactttactctcaatggaacctgacaagcgtggcactgcttcatcagcacttaactccgaggtgaagcaaaaaaaattcaatttcgcattcctccttttcttttacatctcagtttattttctttctgatttgtctcaatctggtcttagtatttcttgacgaggccttatgcatgtgatccttcttcattgcctaaatatccaccaaacaaagaaatggatgctaaatatcgcgatgatatgcgcaggtcagaattcgtctccttaccttctatccactttgtcgtttcaagttaaaaatctcttaatgcatattcttatacaggaaaagagcaaacctcaagttgcgagattcaggagttggcaggaaacacaaaagaccacatagagcagaatatgatccaaagaattacgctaagttaccaataagacaggttcctccttctctctctctatctgaaattcctctatcagctttattttttgtgtctcaagtaaggtttttaacgtgcaggacacgcttgaggttaagaacataccaaatgaggcattttgagccactacaacaacacatggaaactactacaaagtatctgacctcccaacgaccacaggaccagccagtggctttgcatgggctgtgaaaagacggaaagaacctgataatatctctactcttacctactatcaacccagcttgaagagtcaattgagtggaacaagtgttgcatttgtaaagaacactttcggtttgaacctgaaaccagacaatgacttagtttgtgaggtttagggaaacaactatgatgatgttatcgaggaggttcctagtcatgagagtaagctt

SEQ ID NO: 11964 - DNA, 1285 bp, Arabidopsis thaliana landsberg
ctttttgtgtcaatgggcacaaagctcatcaaagctctttttttgtctctctacaatcatcttttcatcttagtataatcgtattctttgggaattaactttccaattaccggttcgatatactgtcatatcatgggcgtaatacgactataaagtataaaccaacaataacctattcctattttttttctatctacctcgtatttttaatctatgttgcatagcaacagaaacggaaacacggaaacgaaacgtttcgaaaaccgaaaacattttttttctaaaattaaggaacgcaaacgttttggaaacatagacacatatatatatataaatatattttaaacaacaaaaatctaaaacataaatatcaaatagttaaagtaaaattcttaaaaataaagattaaaaagcgtaatatcaaatatttagaccatcattttcattagttccattaaaaatcatataaagcacatgagatttgattcgtcgagagaaagatcttaaaacttgagtctcccaaaattagttaaatctttatctttccaaacttttattattattaagtttccaaagtaaaaaaataagattttttgcgtttccaaaatataaaaattttcatcgtgtttccaaatataaaattttaggaaacgcgttttcgtgaatttccatcgaatttccaagagtttccgttttctgaaatgtttcgaaaacggaaaacgcactgcagagagaatttccatgcaattagcttttaatatatttgtccaaatgaaactaaaatgttcataatataaaaggtgccatattccaagagttattggtcctttcacttgatcgttaaattgttggaaagcaaattggcctttcaacgaatcctagaatcaacaacacttcaacaattcatttgtttttattttctagctcctacaaaattctatatctaaataataatattgttaatcaattaattagttattttcagggtatatattctgtatatattattaaataaaagctcgaaaaaagaaattaaatgtggaaagcatgtagctacaataactccccaaccaaccatgtgtgttaaactttcaccactttatcttcaaccttatcatcatatatatattttttgaaaatttctaacaacatataatcttacaaatagacttgagtattcatctaaaagtatagttacatgattaggtcactaaacaaatttttaaattttcaacttgtggaagttgtgattaatttgatttttaagctccattttcatcataca

SEQ ID NO: 11965 - DNA, 712 bp, Arabidopsis thaliana landsberg
caaaactggaaaacgatttttttctaaaattagggaatggaaacgttttggaaacgtatacacatacatattgtatatatatatactttaaataacaaaaatctaaaacataaatatcaaatagtttaactaaaattctaaaaagtaaagattaaaaagcttaatctcaaatatttagaccatcatcttcattagttccatcaaaaatcatatgaagcatatgaaatttgattcgtcgggagaaaaatcttaaaactcgtgtctcccaaaattaattaaatcttgatattttcaaactttttaattattaagtttccaaagtaaaaagacaagatttttcgacgtgagtttccatcatgtttccaaacataaaattttaggaaacgatttttcgtgagtttccattgagtttccgagagtttccgtttccgaaacatttcggaaacgagaaacgcattgttgagagagtttccatgcaacatagtgtccaagtatattcaaattaaaaatacaaagataaactttattattctaaatacatttttaataaaaatcgaaatcgacaagatcgattttgaaatcagtgaattctacgacactaagatttgaaatctatgtagattttttaaattaaaatataaaaactaataaaccttctttacttttgcttttttctccatatatactacaaacttataatataaaccaaaaa

SEQ ID NO: 11966 - DNA, 1008 bp, Arabidopsis thaliana landsberg
tgtgtaaaaaaattaagagtaatggctgctttaatctgcttctggttaaaaaaatttgagtgatggctacttaatttgcttatggttaataaaatttggtgtaatggctgctttcatctgcttagatatgtatattttatacactttttagtggtttcttgtgtttggatttggtgaaaaatctttcctgctcagttacaacctgaagcatgatcttattgctttcagacatcattttgttcactttcttttgttttgatcgatctcagcatgtttttgactcttctgacatctgaaaggttgagtgggatctatgatctaattgtttataaatgatacattcttttcacattcatactactataagccttttttataactagatcacagaatccagatttagcttgcttcatcatcattagtttatgtatagtcccttttacatgtaagcttaggttccgtttatatatattgttttgttaaaagtggtatgttaccgtatgctttcatgttgagagtcttgtgtttatgatatctttattgttttcgcttcaggagctcgttgaaagaatgcaaaatagaccatctctctcttgtcctttgtctttcagatcgtttctctttcaacgtgatattagagtacaatactagataccgtgaggtcctttgtattattggaccttgagttgtcttgtctaagtgggataacctttctagtgaacatttttttggtcagttcatctagtgaactttttttggtctcgtgaagaaatagaagttttctttttcgggcttgatgggtaaagagaatcagttggagacaacaaattgtggagtcaatgatcacgattgtccacccgtcaagaacgaggaactagcagctgaggcgcgttatagtacagacagtgactcgggtttgccaacctgtcgtgtatgccattcaacagaatccgacagacgaggagataccgccttaagtgaatggggattaccccaacggaaccagaa

SEQ ID NO: 11967 - DNA, 1367 bp, Arabidopsis thaliana landsberg
atcaggctatttatccgttcttttttaattaccttcatgataacttgtcaattttgtatttcttattcatgatttttctcatgcacatacctaatttacgttgattaagatccatgcaacgttcataaaataatgagatagtatattagtattagtatcacatacataacgatataatattttacaatgtatttgcatgtaaagcattttcaacaactactacttaatccactttggttctgtgcaccatatcgaccttgagccgcccatataccgcgactagggtcgtccactacgaatataaaaatttatcgttataaatataaataattgatatatttcaatgattgatggattaattaatataaataaacatgtcaatgtaagactaaatgactaatcagcgggactaatcaactcctgttttttttttttttaataattcaacagctggtagatcaacgcgggtttttaatctcttgtaagaactagtacgataataattccagtttctcacccgaaaaactgaagcataatgtttgctcacacacagacacacactgtggttaaaataaaatatcgaaagttaaaattacaaattcttttatcgtaatacttcaaaaaccaaagtatatattatgtaactataacaaaaagagaaataataaattactggattttcaaatctctataatttttgtctccactttatcaaaaaaaaaaacatcagtctccactctccacgcgtcttagtcgccctctctgaatacactacagtacaacgttgaaaagaattcaataaagaagatcaaaaagctataaagttaattactttaattagatacaatttttctaatcataaacctttatcatcatatcgtcaaaacatatcatgaacgagttgtctctctctgttctctatatatataggactcctcttcttcaaagttcagacacaaacataaactagcgtttaataaaaaaaacaagaaaaaatgaagttcggaaaagagttctcgtctcagatggtgccagagtggcaacaagcttacatggattacgattttctcaaaacacttctcaaagaaatcatcacattcaaacgaagaaccaacaatgcaccttctcatggtggtgccaagaccggcggaggattaaaccggaaattgactctataccgtgcgtttagcggtcttgtctcaacgccaaggcataaacgtagtaatagcactcatgatgtcgaagaaggtatacagttaacgggatcgacgaagtcggggccgattcttgtgaacacgaccgcgagtcacggttatgagacgacgtttctgatggccgcggaagaaggaggagagtacgaactagtg

SEQ ID NO: 11968 - DNA, 1208 bp, Arabidopsis thaliana landsberg
  unsure (1)..(1208): unsure at all n locations
ctaatgttgcactttaagttgccatgttttggaggactccatttttgcagacaaagtcattctgttttaaagatatctccaaagggtggtgttccagaaaccagtcatgacagccnnnnnnnnnnnnnnnnnttaaactgcttgtcactaagcctgcaccctcaaagaggttcttgtttctgtttttccaaagggcacataggatccaatgactaatatctcgtatctaaggagtcaaacatggattctttgacatatcaagcagatgacaaatatttgtaaagattgaacttccaaaaccattaaaaggagagggaactagagaaagagcccaaacttgtctagcaaaaggacactgaaacattatatgattgattgtttctttttcttcaccacacattagacacccatctgcattttcaattcccctagttcgaagccgatcttccacagcaaccgctccatttaataacctccataaaaaaaatttaatctttggaacagtttgtagattccataccttgacaaacatgggatttaacgatggtttctcttcagcctgcttgtacaatagatgatgaacctatctactgataaaatcgtacccagatttgaccttataaacaccattgcgagttagagctcaacataaagagtcttccctagaaaccattggtctttattttaccaaaatctagatatccttccaaggaaataaatctctaacatattcaaattcgaaaagctaaacaaaggatcaataagttggtgaacctttagagtaatatccattaaggactgtttattcattggtctcctcaactacccataaaaaatccacttatcaatccaaacatttttannnnnnnnnnnnnnnnnnnnngtctgtaatccttctttgagcaaatctctaccaaataatattctcctccaagcataagaaggtctagtacctttggtagcattaagaaactttgtgttcgaaaaatacctgctcttaaagaccttgcaaaagacactttcaggatcctccaaaagtcgccaagcttgtttggctaacaaagcttgattgaaacattgtaaatttttaaatccaatccctccatgcgacttgngtagacttaaccgctaccatccaatccaatgaattttctttgttgtttgtagagagttccaccanaaatccatcataacactagtcaaatttt

SEQ ID NO: 11969 - DNA, 1046 bp, Arabidopsis thaliana landsberg
caaaacgaggggtcagtaggtagatcaatagatgttacccgttatagcggctatgatgaacttaggcatgacttagcgaagaatgtttggcatcgaaggacagctcgaagatccgctaacctctgactggaaactcgtctacaccgatcacgaaaacgatattttactagttggtgatgatccttgggagtacgttccagacctgaaaaatctatctgtaacagtcaagattgaacaattctgataattcttgtctgtttgttttttccacagagagtttgtgaactgcgtgcagaacataaagatactatcatcagtagaagttcagcaaatgagcttagacggagatcttgcagctatcccaaccacaaaccaagcctgcagcgaaacagacagcggaaatgcttggaaagtacactatgaagacacttctgctgcagcttctttcaacagatagaaataaaaagatgcaaatataccaagtcaacttacattatcattcgaggccatcgcaaagtacatgttttttttgtgtgtatgtactgcaaacaacaaactgagaagaagaagatactgcacggtatataaacatttttataggacagtgatttgatttttcattctaacttgatgttgttgtactttcttgtttccatatttggataacaagtataatgcttgacaagtctatgaggagcatatcttatacagagatactaagatgtgatgttaatgtaactaaacaattaccttcattaatcatgaatctttggtcgtttcttcttcttctcttcagcgcctcctaagaatcagggatcatttcagattcttttataccagtatcctctagacgcagcgaaatattcaacatttcaacgtttgaaaacgaaaagagaggagttaaagaaagaatcacgtgataaacatggaccaggacaagagaaccaaacagtctctgagatctcccgtgtgatgatgtgacccacacacattaagactcaagcttctagtaacatccgtcacgtgtccatgtccctgacactttg

SEQ ID NO: 11970 - DNA, 859 bp, Arabidopsis thaliana landsberg
tggaatgcactgcctgttgaacaacgagatggaatgaaaaatttcatcttataggttattgtacaggtatatacttttggaggctttattagcttgttctctggatataactgggaagcttagttaacagaactgttttgataatgagtttaccttgtagctctcgagtaatgaagcatctttcagatcagaaaggctctatgtcaacaagctaaatgtcattttggtccaggtatattcagcactccctgataataatattcaatgcgtttattagttgcacttctcttgtctctttggtttcagtagctgatacttacaaacttcattccaacccgtagacttattttatcttctggcataacatatgttgtgataaatgcacagatcgtgaaacatgattggccggcaaagtggacaagcttcattcctgatctagttgcagctgctaaaactagcgaaactatctgcgaaaattgcatggccattttgaaagtaagaatctttacatgatatcataatcagttctcactggaatattttaaacattttcttcctttatttagctcctaagtgaagaggtttttgatttctcaagaggagaaatgactcagcagaagattaaagagctgaaacaatctctaaacaggtctatttgagaatctcaattttagcatagtaattattagttctcaatctttattatcgctgttatctcgattaactgaccgtgttgtaacacataccaataagtctgacctgtgtacgagtaaacagttgaatcacccccgtgggcgcaaggaagctgattgtcgggatccctcgcggctgcaccctcgaccgacctagtcttttcaga

SEQ ID NO: 11971 - DNA, 871 bp, Arabidopsis thaliana landsberg
acaatttgtttgatacctctcatgtctaacttgatataaatggaaaatattgacaggaaagtgagtatcacagggccacagagagcaatccaacaagctgagacaatgataaaacagaaagttgattcagccacagagagaaccaccgattgaaacctttaagagaatccatcttggttcctatctttgggttgacttcatttgtggaggcttaagctatcggatggggatcattaatcatctttgagtgaggcagagatttctctctaggagctctctttcgttttatttatatgtcgacattatataatgtgtttttctctgggagagaagcagatttggagttagagaagtactattttcatttgttcttttaataactttgttgcaatttgttgaagttttgtttcccttgagttctttctgttgtaacaatttacaataaccagccattacattgcatttgcttctttcttttatcaactattttcagttcatgataccaaaacgtgttgtgtcgtgtcggtataggacttaggaggatggtaaatactaagctcttcaaaaatcaactccgtaaaagttttatcttctgctgtttacacatcagacccttacttttctctatttacataattcagatcttataaattttctcccagactcttcagtaagaccatctccaatggtgagagttccccacatgtctctcaccaattgtttaatgtaaattttgtaaaaattgttagatgagaacttatgtaaatttttttaatttttcacaatccaatggtagtctctctagtggggttcttaggaaaaaaaatatgcatttgattcatgtacttaggatttatgtgttttggtttat

SEQ ID NO: 11972 - DNA, 1194 bp, Arabidopsis thaliana landsberg
  unsure (1)..(1194): unsure at all n locations
tccattattctttcagcttccaagaactcacagtcgcgtttaatttgcctggtaaatgaaatccagtcagctgagcaaagtgtttgcactcaaacagccaaattaaataaagaataagactagatggaatttggcagcttacgtcataagctcttggtaccaatttctctgaagacggaaagcaaaattgagatcaaggtccttaagagtagtggtctcatcaatttccccttcaggtttggaggtataccgtccatgggaagaccctttaaggtcaaaccttctctggattctatattcggagcagaacaagttccccataacgataaaccgagtctggtaagatggcaaacaatatgagaaaaattgtccattggaaacaaagagtcttatgaaatgtagatgaacaacacaaaccttctggccaccaacaggtttgatacaatgcacaccatagaacctagtcacaagtgtattttcatactggcagacgtgtttgtagtaacttggaagcattcgtagaagcacctggataaagaaaacaaaaaacttcaggtcaaaattatttaggtaaccacacttagtggacaaaatgattaagaatgtaaagtgaaagctaagaaacaataatacaaaggaaatcaaataggacagaagaagtcaagacaaaagccaacgactaaccttgacttcagatttcttcaccgtcttgatcataaatctgtcatcttgagttaagtaaaaaaagcttccactctttccaggcgaagacaattccctaagagcatcgtttccacagatagctagcatgtaatcggcaggatccaccgtgaatagctccctaagccgtctaacaaaagaataaaccaaaggagacacattaatcccaaacccagatagtgtgcagacatcaccaaactatgcagaatcaaataaacagcatataaatggaaaagattgaatacctaaacaccaaagggcaatagtccttccagcggaaatccacagatagatgcggtggtgtggtcttagaaccctnncgtgggaaccttgtccagaacttttcacttgggtcaaaatcactctgtttgagatctcgaacaacggaagcgtgtttgccgacagagtacctaaaaattcacaacttggttagaaaaacacagatccagaaactcaccaaacattgggatcctc

SEQ ID NO: 11973 - DNA, 1207 bp, Arabidopsis thaliana landsberg
ggatccccctctcccgaagccaaaagcgccctctttctcaaatggtcaaagaccctctctacacattctttatcttcaggccttaaagagtctaataaagaaaacgaaaaacgatacttatgaattccacaacttgttgatgctttccatcgtaacaaagacggaatcaccaacacaaagacgattagcacactcaccacaaacaagccttacaatgcctcactaaccactaaagtcaattatcagaaaaaatggaaagtaaatctaaaccttcatgttgatttccagacacaagatgaaactgattgataagatcactgatcataatctcaaagccaaaaaggctcccactttaccaaactcattctaatccacatttcctctttatacccttcacattaagacttaacactctgatactgaacaagtaggagatcatatctcaaaatggtcaaacactgatccacataaaacaaacacattatcatctataagctaacatgaccaaaatccaagcttgcatattccaaaaaaaaagataagaaattgaagacagttgaagagagaaattaccgctaacgaagagccggggagacgtaagagttgagcagcggcgaacacacaaggatggagaagacaagaggctactggatccggcaacgagacggcgaaagctggaaacgaacgccattatagcaagtgggacaaaaggatttgagatcggaaatggcaatctttagggcttatcaaagggttttaacttttataaatcagacaaaacgtcgtcgtttcctctgttttccacaggttaacaaacatgaaagaaatgatgatgatacagtatacacatatgtaattgaagtataatttcaagggaaacaaatttgaagttaagattgttatcttcatccaaatcttacataagatttccacaaacattacagaaaacaaaaagaatacttctgaaaatgatttattttctggttaataaaaaacttagtcccaagaacatgtttatagctatctgtattctatttattctctgtggtctctatacaaaacatggaactgttctgggacttctttgtaaaacctactatctatattcaaaaatattacaaaaaattaccaaaaaacggttccatcttccagaatacaaaaacaaagaagaggaaagatccgaacaccaaaatcttgacgaatcttt

SEQ ID NO: 11974 - DNA, 1264 bp, Arabidopsis thaliana landsberg
cgtgtcacttccctttatctatgtttatgacagagcagagtttttgcacaatatggtcagccacaagttaaggagtgactagttataggatttaataactacgtacccatgtatatgaaggttttgcataagcaatgactttcccttcgctgttcaacactttcaccacctgcctcgctcgatgtgctcctccatgaagcaccatctgaaataatgagaagaaaaccaaatgtctcagattccaacttggatgatacaaatagaatccaaaaagagattagtctaagtaaatgaccttcacaatttccgggtttttccaaggtcccttgtcagaaagcatgcaaccgccttgatctgcgcaagtacatgcacctcccaagaactcaggcaactcgctataaaaaagtgcagaccattttgaacataagcaaaaacaaaaaaacgtgcagctttcgatagaacagatcaaataagggtgggtcaaggttcacatacttgacatcaatgacttcaagcaatttgcttagatacttgtatccgagtacctacataaacaatagaatagtccatattgaattctatataatcaaagacaagacttttaaatagagatataacttagatctctcatacatgaattttagcagatgtcttagggtcaagaaagctcttgacagtgttccagagtagcctaaatccaggccctgcattgataataaacatttggtggagagtctgcatgaaataccacaaagccaagattagcatttgatacctgagatcaagtattagaagctccaattaactaatacctcaggataattgtctccatcaatcttttgtaatcgtgtgataagatctcgagcagacttgttaaagtttttcaatccctgaatatgaagttatataaacacatgagaaaaaaactcatttcacaactaatatcatgaactgtagaaaatacttaccactccttgaacatcaagaatagttgtacttgaatcaatatgcctctttgcagaaatagtgcaggaaggaaacttgatcataaagctcctctcaaactcctttacatgatatcttacatatcgatccatgcttgtaacttgcatgagtctgttaggatcaactttccctagcctttcaatgtaaataggtctaccttctttgtcaacaccgtgatacattgtgggtaatgtttcaaaacttcattaatctcttcgaaatcaaatcctaacgagagaaataaacgttacaaaacaga

SEQ ID NO: 11975 - DNA, 1073 bp, Arabidopsis thaliana landsberg
taataaatgcctattcctttggtctcttgtgttattgtcaaagattgagtttttcctaagttttttcactgttgaatgtagtgttgctgggaaggctttgatttgtaaaaacagcctaccggagatttgttcaggatcaatcagtgcaagccctctttctgtctctttacgttcttcatcaggtaaatccatccttaaattcaataatcttgctcgccttttcgtcgattgtttaatccattgcttatgagttagataccatttgggatgtgtaggacgtagaaccaacatattagcagttgcacttggtgtaagccttggctttgctgttagtgtaatcctctctctcgggttcatttggtatcgaaagaaacaaagacggttaacgatgcttcgcattagtggttagtcaaatcgagtaagcttatggtttatgtaatttgattttgtttgttgtctaaagtattttgttttggttctttatgcagacaagcaagaggaagggttactagggttgggaaatctaagaagcttcacattcagggaacttcatgtagctacggatggttttagttccaagagtattcttggtgctggtgggtttggtaatgtctacagaggaaaattcggggatgggacagtggttgcagtgaaacgattgaaagatgtgaatggaacctccgggaactcacagtttcgtactgagcttgagatgatcagcttagctgttcataggaatttgcttcggttaatcggttattgtgcgagttctagcgaaagacttcttgtttacccttacatgtccaatggcagcgtcgcctctaggctcaaaggtagtcaaaaaaatggtttctgataactgcttttagtaaaaaaaaaatgaaatcacttgaactgatttttgttactgttacagctaagccagcgttggactggaacacaaggaagaagatagcgattggagctgcaagagggttgttttatctacacgagcaatgcgatcccaagattattcaccgagatgtcaaggcagcaaacattctcctagatgagtattttaagcaggtgtttgc

SEQ ID NO: 11976 - DNA, 576 bp, Arabidopsis thaliana landsberg
  unsure (1)..(576): unsure at all n locations
ttcttaaannnnnnnnnnnnnnnnnnnntccgctttttagagcatttatttcctcgtgtcagcctcgaacagggttccttctgaagaaaaaccaaaaataatgagtatggggtttgcggagtacatatctggttgtcgttaccccgatggtgggggaatgcgatgtcgtccatcccggggggcttcagcgccctccgggaggttgtcgccgacttccatctagagcttgaagaagaggacgtcaagaacgtgcaaagcccctcagctggcgcgtcaactatcggtgttttgatccatcaccgacgagtaaatttgtgtatgtgctttctagatcaggatggtgtgctcagtggacgcaatatttatctagaacgtccctatatctagtcttcggtggcttgcgctaccggcaccttattgctcaatgctcgtaataggggttacaagtggatgacagagggatgagctcccatgtctcttatgcgtggtaggatctaaggactatgaatatgttgttcgctacctagttaagcgttgggcgtcttggtggtgtgcgcttaggattcacaccgttgt

SEQ ID NO: 11977 - DNA, 944 bp, Arabidopsis thaliana landsberg
ggaacatggtaagcaaatttgcactgccttcctatcaaaaccaccatttgatcactgtggtttcaatactcaaaattgttttcttcgtctgtgtctcttaggcttcggtagcagaaatgggtagtgcggagaagagaacaaggagaggagatgcaggggaagaggatgttgacattggagaggacataccaatcgaagattatccatctgtagagatcgaaagagatggtactgcagttgcagctgctgctagtagtggttctagttcttcaggcagttccagttctagtggtggtagttcctcgtctagtggtatgttttcataaacccttttcctcttgctagaggtttcccctattcttgtgtcgactctaacattgtaatgatctgcagattcagggtcaggtgggagttcatcaggtagtgattctgatgcagatagtgttcaatcgccatttgtggaagcaaaagaagcccaatgttaaaatcatttgggaatttaaccgttgattctgtcctgaagtactaggaacgtttagctgagggtgtaaagggaggaatgaaggggaaaactgaaggaaaggatttgttttttctttcgatgataaacttaggaagcagatgtagttagaaagaaaaaatgtaataggtagatagaaagagaatgctagtttaagcaagaagaagagttcgttatttaataccttttacatttaggagttgtttagtgtatttgtgagatgctgaacagagggtgagagtgagtgggtaggtactgtttgagaagaagaataagataagagtctttttaggttctatgactttatttatttatctttgttagtaggggtaaagagtctggttgtggtaggaaaaatggtgattgaagagaaaaagaaatcaatgcaatgtattaaatgaaaatggttggcatattaaaaaag

SEQ ID NO: 11978 - DNA, 1451 bp, Arabidopsis thaliana landsberg
atcttgccttggagaagagcttgcgtagagatagtgcagttagggtaataaggggcttgaaagaggctttttataatgctaagatctatatttatgatggactctatgagattaaagagtcatgggtagagaaaggaaaatctggacacaacaccttcaagtataaactagttagagctcctggtcaaccgcctgcatttgcttcatggactgcaatccagaaatggaagacgggtgtgccttcaaggcaaggactcattcttcccgatatgacttccggggttgaaagcatacctgtttcacttgttaacgaagttgataccgacaatgggcctgcttatttcacctactccacaactgtgaaatactcagagtcgtttaagctgatgcagccttcttttggatgtgattgtgccaacttatgcaaaccagggaacttggattgtcactgcataaggaaaaatggaggtgacttcccctacaccggtaatggaattctagttagccgaaagcctatgatatatgaatgcagtccatcttgcccgtgctcgacttgcaaaaacaaggtgactcaaatgggagtaaaagtgaggctggaagttttcaagacagcgaatataggatggggattgcggtcatgggatgctattcgtgctggttcttttatatgtatctatgtaggtgaggccaaagacaaatcaaaggtgcagcaaactatggctaatgatgattatacttttgatacaaccaatgtgtataaccctttcaagtggaactacgaacctggcttaacagacgaagatgcttgtgaagagatgtctgaagaatctgaaatcccgctgccactgataatcagtgctaagaatgttgggaacgttgcccgattcatgaatcatagttgctcacctaatgttttctggcagccggttagttatgaaaataacagtcaactctttgtgcatgtggccttctttgccatttctcacatccctccaatgactgagttaacttacgactatggagtatctagaccaagtgggactcaaaatggcaatcctttatatggcaaaaggaaatgcttctgtggatcagcgtattgccgtggctcatttggatgatgatggagagaaaggcgatctctggtgaacaactggagtcggatgattttggttgcaaaaaggtttgtatctctgtcccatatggtaatttatctagtactgaatatgatttacatatggaatctcttaattttgttatctggcagctggagtgttgagtcctgataggtggaaccgagtacttttggtagcagggaaagtaaagtctctttgatccttttttttcaagagccttaggacccctaagcttgtgaaaggaattttttttacttggtttttatccacacaaaaaaaccctttattcttatttttatttcgggatttggggggaaa

SEQ ID NO: 11979 - DNA, 1635 bp, Arabidopsis thaliana landsberg
tagtggtggtattggttctgcaaaagaatattatggatttacttaccaccattctcaatgttcttcttcctcctcttactatcatctttctcttcctgttttacccattttatcttttgatcaaacttgtgctttgtcttcgtaagaaccttcacttcgaaaacgtagccagaaaagtagttctaatcaccggagcttcctctggcatcggagaggttagttagctttggatgctatgcccttttgttagttagtatattttttttaccaatactaagtaactgagtagatttagtctattatactattactgattcaaatatatgtgtgtatatacataatatagatccgacattggtgatagtgtttatggttttgttttcgaggtcctattttgtcgtggaatctcttgcaactatatgtgtgctatttgatctatttgataatacacgactaaaaataactaaatgtatagatccacataaattgatatgatatttggttgagaacttgagattgttaatgttcttgtcttgtttggttggaaaaaaattaaaaagcatgtggcatacgaatacgcaaagaaaggagcatatttggctcttgttgctcgaagaagggatcgtctagagattgtagcagaaacatcacgtcaattaggatctggtaatgtcatcatcatacctggtgatgtttctaatgttgaggactgcaagaagttcatcgatgagacgattcatcatttcggaaaacgtaagtactctagctagttttactttgttgaatacaaaacccgaactaagctcaaatttaagtagtaatgaagatcatggtagacataacaatatgtatatggcacaaataaagtaaaagttatttagattatcatactaatcaagttatcttattttaacagtagatcacctgatcaataatgctggtgtatttcaaactgttcttttcgaagatttcacccaaattcaagaggcaaatcctataatggtaagcttcctccaacttatatcaatggtaatccaaattaaagtaaaatctttaccttagttgtggagtatatatgactttaattgctttagactcaaatcaacaatttcaaactctatattgattacttcatctaatttgtgtatataaggacatcaacttttggggtacaacatacatcacctattttgcaattcctcatcttcgaaagagtaaaggaaaaatcgtcgcgattacatcgggttcagcaaatatacctttgccattggcaagcatctatgcagtaagatttgtctttagagagaacaaacaaatttttctaacctatttattatgtacataatattgatgttacttggttattttggcaggcaagcaaagcagccttattaagattctttgagacattaagaatagagctaagtcctgatatcaaaataacaattgttctcccaggagttgtatcaacagatatgaccactcctcactgtatagagaaggtaagtaataacatttgtacatgtaactatatcatatacatgttacactatattaattctacgttttttgtttgctttattgaaaaatatagtatggttcggattttattctatcggaatcagtgagtaaatg

SEQ ID NO: 11980 - DNA, 1225 bp, Arabidopsis thaliana landsberg
tcttggccaggtttccaagtggtatgggaccaaagggacttccttgttttcagttgtgtcgagataggaggaactggagctgttgttattatccgactccttgaaagaaagaaaattctcattccctggaacatcctccaaaatggaacttcttcagtcaaaaccggaaacaaaaagagagagacacaaaaatataaacatcgaaaaactatatagattttttttttttttttatgtgatatataaacaatttcttacaagaacatgtcatccatgtgttggatttcatcaaaatcatgaagcgaacggtcaaaacaaccactagcctttaacttcttagtttcttcttctacttgttcactagttcccatatccatctccatctgactgtataatcctccactgaaaccattgtgaatcacatcataatcaaaacatttctcagcagcttctgaagagttcatgctccatccagtaccccacatatcaggagaagggtacgaatctgatgtctcttgatagttaggcacaacaagatcctctaaattcctcctcgaataacgatccatgaatgatactttaacctgctaacaagtcactcactatattcagcaaccaacaggagaaaaacatttgaattcttaagaataaaataatcaaaagaagtcacctttaagatcagatctaaatccaaatccaaaagattatgagtctatcttcttctatcttctgtagatttgtgagtgcgaaggaggaaagagagagaagacaaagaagcaagttgaagagaggaagtggagagcgcgtgagtttgaactttagttagtggcttagaattcacaaacgagatttgtggcttagattactcctccatctaaagcaactctttcattggtccacgtgttaaacatatctttttctgtgtgaggtcggcacttgaattaaaattaattaaatcttgcaagacacaactggccaacttgtacgtttttgtagttcttaaaagttgtctgtttacgggtagacgacaaaaggattttaagttacggatataccctccagatcaggcagtggttagcggctcaggttaggtgacgacacgtcacatgttcactcgatttggtgtagacacgtgtcctgtaggtatagggaggtgatgacacgtgacagactgttttgcggtggagtgggacccatggtctcatggggatgcagtggataatgt

SEQ ID NO: 11981 - DNA, 972 bp, Arabidopsis thaliana landsberg
  unsure (1)..(972): unsure at all n locations
agaagaagaaattgaattactataggattctccaagagcagcgaacaaacggtctctgccaacactgatggttggcatattctcagattcttcgtgaaattagcagaaagacagagatagagagatgacgtcttcttcttctgagtgtgtgtgtgcagattttggaactagggtttcaagaagaagtagatgacgatttttcaccgttacaatatataaatataaccctcttttattttttaagggttattgttgattttactatttttcatataaattttttgaaattattatttttactaaaattttacggatatgacactttttaacacttaaaaatatatggatttcagattttttgggtaaaaataagtagtttacacaaaatattaaactatctatcaatgtcatcccgaaatatagcaaattcattgtttcgattttttatcttagttttttttaacctctttttattttctttgccacttcaattgtcaaaagaacaatctgtatttggtgtctcaaaataagttagaaaataagaggagacctcaatatcgaaaaataatacaatttcatattaattaaatgaataaaataggaaaacaaaattcagccaaaattgttttgtgtgtctgtcttttatgatctctcatagtttttttctaaagtattttcatggacaaagaaaaacagaaaacatcgactgcagagagttataagaccatcaaaacttggagataggaccaaaaaaggaagggctttatagacacaatctcacaacaaagcgcaataagaaataacagctgatctgcctcagagtgtgtgtgtgcactggaacaacttgtaaggcccttggttcgagtcggagaacatgattatgtgtaagaagatacaactgcagatttgagaagaaccaacatcaacaacagtatgaatctctctcaagctnttgatctaatttgatctgga

SEQ ID NO: 11982 - DNA, 1227 bp, Arabidopsis thaliana landsberg
aagggttgcaccctccggttcctattgtgttaagaacgtttcaagaagggtgtacgattggaggcttttatgttccggagaagacaacacttgttgttaatgggtatgctatgatgagagatcctgaatactgggaagatcctcaagaatttaagccagagagatttctagcttcttcaagatcaagccaaaatgatgagataagagacgaactcctaaaataccttcctttcgggaatggaagaagagcctgtccaggagctaacctagcttatatctctgtaggaaccgcgattggagtgatggttcagtgctttgactgggagatcaaaggagataagatcaacatggatgaggctcctggaaaaataacgttgaccatggctcatcctcttaactgcactcttgttcctcgaaccctaatccctgttacttcaactgtacagattcctagttcttgacattctgcctttgtttttaatctcctggttaattggctacctttgatttagttcggtttgctttatctctggtttgttgaataaaacttgaaacatttcgtatggttcataatttccttctttcaagtacattcagtattgttttactagtgatcgtcgtccatttcgtattgctcaattcaacttgtttgaagcaaattctaattagcttcacatttaacttagaggatcaaataagttaacatggttgatggaattgatcatttggatttaatgaatgaaggcgctttccaaatacaatcattgtgttgtatatcctctataactttcagtggtaaaagagtgagtcgagtctattctagagtgaagtttcttccaagcagactaccacattcacaagtaaagacaagacttctgctgaatgttttttcatatttaatctttaaacttttccacaaaaagatatcgttcattttgaaagtaggaatatgagatagaagaagcaacgaaaacaattagaaaattaatcataattcacaatttagagacttacgttattttttggtctatgtctagtttttaaaaagacgtagttttcagaaaataagaaatactttttaaaggttaaaacaaaataccaaactcgaagattctacccattcaaccgatttttactaaaatggaatacctgaaccgacatagcctcgcagagttaaaattaacagccatttaataagggtaatctgggtaacaagccaagggccaa

SEQ ID NO: 11983 - DNA, 644 bp, Arabidopsis thaliana landsberg
tgaactagtattttaagaatgttgataattcatcttaaagaatatgataaatagttttctgcaaatcggattccatcaataatttgtgattagtaaaacaactaaaatttacatcacaaaaattatttagtatattccactaaaattgatttatagtagaaattaggtcatctatgtttccaaaaaataattatataaattaaaataagaggtaggaattttgttagcaatagttacgtcaggaataattcaaattagtaagtggtgcactgtgcacatggtatatggcagttagggccataacctcaccctgtgttaaagtttgtccctaccacgaaaaagagatttgtgacttcacgaaatctgtaaaataatagcaaatatatatttatttgtttattagcataaatttaacaaattccatggggggataacgtaatatttatatacatatatataatctatagacctttaccaataatctctctccatattgaaccgacccttagttttgacccaaaaataaaaccccttaatactaaaacttattaaaaacgtaaaccatttttctaagtaaaaactcgaacctcggatttttccaataaatttctgaaagcaagtgagttatcactgttaagtttttt

SEQ ID NO: 11984 - DNA, 1922 bp, Arabidopsis thaliana landsberg
acataaacttaattattagatcttattaacatggtgcatatataaagcactagttgttcataacatgactatatcaaataacaaactaatacaaaatatcttaatctaataaacaaatattaaacttaagttgactgggatatgtatgtacctaatgatttatgctattgaattattactgtgtcatcatccaaattcaaatccgcataatgcatgttgttgataaaagtataatattaaagatgttctgaaactagtgataatttaatatctgtaagcttgacatatatattcaaaacaacttcaccctcagttttcttcgacattaacaataccgttttcagttttcactattcgaatttggccaaatgggactaattccgatttcttatttaaattagatcagtatttaacaacagatgatgcttagacagcttagttgatttggtacttaaacctccactaaaattttgtccaagattgttgcgaagaataaaccatgcccataatcttcatggctctctacttctccttatttgttaaatggcaatattttttatatcatataacgttaatgattataaattatatctactgttatcagataaatcatgactcgtgagttacatatacagaagaagtagattaatgaaaacaccctattgactactaattaggtttatgttacatattctattagaatttatatcattttctgaaacaataagcattaccgaccttagctcagttggtagagcggaagactgtagtgttagcagataatctttaggtcgctggttcgattccggcaggtcggatcattaaagttgaaagctttttttttttccatttcgtttcaaagtgcttagacaagagtataactacaaactcgtttttctatgagaaattggtgtaagagaattgcatagctattgacagtattatcataaacgagtaggaaatctcgaagaaattttcactgtattttaaaccgtttaagggtaaatcctcattttcgtatattcacgagattgaggcaagatattaagtgtttttctaatataatgtttttataaattcaaactttgtttacaaatttgtaatagagactcactatgagtatgctaacttaatacaaatcattgtgttcatagaatatttagatcagtacacatgcatgaaatagattacaatccaaccttagctcagttgatagagcggaggactgtagtagacgcagattatccttaggtcactggttcaaatccggtaggtcggaatttgctcccacatgagagctttttattttcttttgttgtgacattaaggtttttgaattttataataaacggttatatggtgatcgataattaaatataccaaaaagttttgctcgaattcttaaacgatccgtatgttagcttttttctgatactattagaaatgatttaaaagtgactaaaaattatgagttttctaattttctttggtcaaacaaacatttagttttagattttttaaaagaacaaaaaatgtatgcataattatattcaaatgcttgtgggttgtgcctataagttgtcaacgttcatagaagggtagtgaaataccctttcccactttgttgcacgatttgtttggctttattttcaagaatataaacaatcatagcacactctcaataatacatgcataaatatatcatcaaagttgctctttagaaataatttattttttgaattgagaaaatattataaaaattcaaaaaaatcaagacaggcaaataggtttatggttctaatcttttttattttgttcataaactgcgtcatccttggaatcttctacttctcactcatgatcaaaatttaggatagagaatggtatacggtttagtctattttgaaataaaagtttcgttt

SEQ ID NO: 11985 - DNA, 590 bp, Arabidopsis thaliana landsberg
tgatacgctacaaaaataaataatactattaattaacaagtggtgcacatggtatatggcagttagggccataacctcagcttgtgcaaaagttttgtccccaccaagataatacggaaagatatttgtgacttgactaaatgcgttatataaattaaataaagaaatagtagtaatgaattgcttaaataattgtaacaaacccgtatgggagatacccataatatcctaatctcattctttattgtgagagccgacatatcagtactcatccctacgtttccccaaatggaaagttattgttaaattattcatcaactcaatcatttgtgttagtgccacgccttaaacccttatttagaagttgtatagattttatggatgctacgatgtgatataataatagttatatcaaactttagtatgaattgtactaattcaatctctaagtataaaaaggtatatgctggtttgtacttctcaaatgagaataatcaaaactaagcatatataccaaaaatgggttatcggaatgaatccatgacaatgacatagattaaagaggaaatggtgttaacaatatttttaaa

SEQ ID NO: 11986 - DNA, 595 bp, Arabidopsis thaliana landsberg
ttgtcaatagtaaaataactattttttcaattatatttaatttaatatctattttcctatagttcaatgtttgggaagatgtatatttgctttttatagactgtcagataaatttggtgcttgaataaaggacaagagaaagataatttggtgctagaagtcggcatcatagctgcaaaagaggagttcttgttagcgctggtgttagtagattagggttcgtgtttccggtcaccgtcaagatgcagatctcttttctggtgactctgttttttgggcttcgtgttttgtaaccgagttttcaattagcctaatacccagtttggaaagattaatattaaaaacaaaaattattgctaaaaaaggaaaaaaaaaaaacatcatgggaaggctaagagattttcagaaatgttactttcagagtttgcatggttcactgaaagactttctttgttggaaatcatatctatttatttacacacttatatgtgatactgtgagaatatatgatccgacaaataataataataaaaaaatccgcttcgattataaaaactgcaaaataaatggtgatcatttagttcatcaatataac

SEQ ID NO: 11987 - DNA, 1070 bp, Arabidopsis thaliana landsberg
aatgttgtgatggtagagcgagtcaaagttcgattcttttattcgagttacaatagtctaaatgtattcacttgattgtttcaggtacctggatacagttgatccaaatacgaaacaaagttcaccattttagatcaagtgatcggattcaccctgaactagactcaatacataagaaactgaaggagttggagaagaagatgaaactagctggatacaaaccggaactagagtttgctttacacaatgtagaggaagagcagaaggagaagctattgttatggcacagcgagaagttagctgttgcctttggttgcataaaactccctgaaggttcaccaatacaagtgttcaagaacttgagaatctgtggtgattgtcataaagcaatcaaatttatctcggagatagagaaacgagagatcatggtaagagacaccacaaggtttcaccattttaaagatgggtcttgctcttgtggcgattactggtgaaaagagaatgctttgactctctcattggtcaaacctgactgtatttatatgcgttattgtgtggtaaagtttcgacctttgactttacaagttggcgttaagaagagagatgcgtagatcagcgagtggttcgagagttttggatcattttcccccgacttcacggtctccacgtcgatctcagagcattacatcattggaagatgatgtggaggtgcttttgcctaggtacgatccgaattctcaagcggggaagagagagaagtcaagattcagatttgcagaaaacgtcatccatttgattcctctcattcttcttctctgtatcgcaatcctctggctctcctcttattcaggtaagccgagaaattgattcaatctctatgaatccataattgatatgtgaaacttaattagggattttacaaaggctcatatggatatgatatgaggatcgagatgtctctgtaacattagaatcttgtgttgaattattgtttcaatttgttcatattatactaaaccggtgatggatttggaatttgtcagcagcgttaaggagttgagttcaagaag

SEQ ID NO: 11988 - DNA, 1459 bp, Arabidopsis thaliana landsberg
tctcatcgtttattgagttcaattttcttagatcaaacaaaaaagcaaaagttttttcatactcttaaaattggtctgaccttgttttaagagaaactagagtttgatccatgattttgatgaaatactcgattctaaacttctcctagtcgctcagaattacagtttcatcatcaacttgtctttgctcttcatcagaataggttcttcttttatttacgcgcttcctttccacatggaaaatgagtttgatatccataacaacatcaatttttgtgacttcaacttttgctacttcaaaacctgtttctctatacttttgaaagaaagagactaacccttttagttgagtaattgttgcaacaatatctatatcttcactttgcaaagtcttgctcaccatattcacggcaaccaaaatctcataccatataacaataccaaatagaaactcatatccttctattccataagttttacttatcacaagacacaccacatctctctgcaatttaggatcatcagtgttatcaaccaagaaaaaaaagcatcacaaatttttggagcttagaaatctatagctttaacgcttttgggatgactttcccaacgagtatctgaaaaaagtttaagtgttggacttcctaccatattcttgtatataacactccttgttgtagaaggcaaaaataaataatatgaactctgaatgatccgaaaaaacccaatcgcttttgtagatgatttagccatatcacaaatagccaaattcagattatggcaaccacattgcgtatataacgctcgtacattaacaacaagcattcttttttgtactcctttattttgtccgttcatatttgagccattaatatcatagccttgtcctcacagtctcacacatcatcaatatccaagttaagatacaccaatgtatcacaaagttgatcaaacaacccttttcctactttatcaacaacttccaaaaagtgaatgaaatattatgatacctgagttgaatccgtagaaacatccacacatcgaatgataagggacatttgctccttctgactaacatcaggactacagtccagaataactgaaaaatgtgttgcctcttgaatcttcttaatctgaaacttaacttctgatcccaacattgctatcaattcagtctgaatcttgtggctgagaaaatgatatttaatttttttccttctctttgatacagatgatgtgctccttgatcactggataaatctccaaatatttcagctaagctaaggaaattcccattgatattcttgccaaactctttgttgcttccacggaaagctatattgcatttatccctagtcttcattagtgagaataatcttaatacaacttcttttcaatgattcttctctttctagatatttctttgggcgcacttatcaattcttatatccttttgcat

SEQ ID NO: 11989 - DNA, 624 bp, Arabidopsis thaliana landsberg
  unsure (1)..(624): unsure at all n locations
atggccttccttccttaagaatgtaagattatccggacccgaaaacgatatgacaacgtaaccattatcgtgttaaacgtttgttacttataagtttgttttgtcttaaatattttcaggctatggcggatttcatgtcggaaaatagaggaaatcgagtttctttcaatccaaacaagcttgtcctcaccgctggtgctactccggctaacgagactctcatgttttgtctcgctgatcctggagatgctttcttgctccctacgccgtattatccagggttagttaactttttgtcaaacccttgcgtcattcacaagtaacatgaaaacttacgctaactaaaatactttttattttccaatgcagatttgatagggatttgaaatggagaaccggagcagagattgtaccgatccagtgtacgacgacnnncggtttccgcatcacaaaatcagcacttgaagaagcctacgagcaagctcaaaagcttcacctaaaagttaaaggagtccttataaccaacccatctaacccgttgggtactacaacgacacgaaaagaaataaaccatctcttggacttcatctcacgtaagaatatacatttgataagcgacgagat

SEQ ID NO: 11990 - DNA, 1355 bp, Arabidopsis thaliana landsberg
cactattttttcggtggggggagattttttctctggaagtttgaataattgagcaaatggttgagaattgagagaaggattgaataataaggtaatgaagctatgaacctatgcgtttgtctatttataagccctaataattttcatagatgcatgtatcgtgtcaagcaagtcacgaaagcttgaagttttctgtctactcatgttgatgttgttttccactaaagtcttttaaagttaaaaccacaactttttatcgtgtttacttgtaagattgtatgtaattcaattttagatattggactaaccacctactcaaatattccaaataaactttttcattaaaaatgcactatgatgttgttttatacacataacgcgtcttcaaagtttctataaatgcatgcataaatatcacgtcttacgcaattaattgatcttaatattattacacggcaatgtcgagatctctttgttttctcttaataccacaaatgttccaattaggaaacttcagtacactgttttatttgatcatccactgtttttcacagaattaattgatcttagtattacacggcaatgtctagaagatctctttgttttctcttaataccacaaatgttccaattaggacaattcagtacacagttttatttgatcatccactgtttttcacatacagatcaggatttttttaaccaactatatgaagtattactttacaatataaatgaattaaatcaaggaaaaatataagcaagtcttattttctttaagcatttcgatatagaactaatccacacttcgtcgatgaactaatgactaaacaacggacatttgtttatttcttaaagaattttgctaagttgctaatacaaaaattacaaacttggatactttcacagaggcactcgcagtaatatctaactccaaatgtatatcaaactttaatttagacacaatcaaagaaaaatgaaaaacaagtttcaagtttcagcctaagagacactcgatcaacgatgcttaagtcaggacaacgtaatatctttcacctctctttttttgttgatattaaacacttccaaagaactgttctattgactgcgaggtgaacacatttggagctgttcgctcgggtttcaccgtagcgacatgaagctgatatttgatgaacctctgcaaataagaggggaatgagttaaactaaaagcaaaggtaagaatgtaaatgagtaaacaaggaaaagactttacagctagttgtgtgctgatttacgggtttgtatcgatatgccagtcaggttctagctgtctgacaaaggaagttcttcctatctctgtactacaaaagag

SEQ ID NO: 11991 - DNA, 540 bp, Arabidopsis thaliana landsberg
ggttatagtttttgattttccatggttcagtttctattttcttatgcatttaaagtaatgttggttagcttcccatacttttgggctttagtctccgaggatttttgttaactgtcgacttagtttttgagattatcttgttaatcgtcagctttaactttgtaaactctatctataatctatctttccgtaaaaaaaaatttaaaaaaattgagaaaaacataatttatgagacaaaaagatattaaacatactctgtaaccgttaagctgttttcagcccaatgtcatgaaacccattattgaatttagttcttaataggcttatatagtcacataataatattgggctaagttacttggcccattaaatcatttcccgtggtaggttccagaaacatatcataaaccctagcagaaactctttcctctctcgtcgtctcaaatctcttcttccttcttcttctctctcgattcaagcgtaatccacacgcaaaaatgggaagctacaagcggctgtttcgttccttccaatttggcg

SEQ ID NO: 11992 - DNA, 822 bp, Arabidopsis thaliana landsberg
aaaaaaacccttaaaggtcatataataactatttttgtatccaccttcctagaacaatctaaaaagatttgaattccccaatctaatagtctaatactattttccctagaaaaaaaaaaaaaaaaaaaaatactattttcccaccaaacccatgagagcatgtttgctttgctaccgcaacttccatcttggtcgtaggtgaaaaacgtggtttagttctatcccaaggtgaaaagagatccaaaacgacaaagttctttgtcgtttcccaatctctctttacctatcaagtcccacttggcgtttgtcttctgctctttagtatgagaggagccaccaacatccaaactataaaaacacatttcaacaaaaaacattacaaaactgtttcagagtctcaaaattttaaggatgaagcattcaaaaatgttgtcatgacttactgtatacgcaaaccgcaagccactcgttcacaacccttacccaagtacttgtccatcccacgtcaatcgtccacctgaacgcaaaataacaaagaaaaattgtatgagttaaaaatctcaagcttcaaaatgagactacaaaagtctcacaaaagctagctcacaaaagattgttgaaaaaaatattactttttcatgggatgatgagtgttccaaccgatgagtagcatagcgaagtacattgctcctgtggcaaacacaaaatgaaagaatccatagccatatggaacatcatcttcagcttcttccccttgctcgttctcatctttcttaaattggaaacattaagagtctattcctgtcgaaaatgtcgcgatat

SEQ ID NO: 11993 - DNA, 1304 bp, Arabidopsis thaliana landsberg
tcttttctcttcatgaaagatgcatccgctatagtaagttcattctaattggtagcagtatataatttcttgtaccctcattgattctgcagcatttttgtggcaactaattagatagacaatgctccaccttctgaggagcttgagatcacactcgcaaggtatagaaattacagatgcagatattcttaactgggcgaataggaaagtgaatacaggtggccgatctagtcaggctgatagcttcagggtaagtgttagccaagtacgcatgtgattcatggagactcatcgtcagcatcataatagtttgatggttgcttttttctgatattaggacaagcatctgtctagtggaatgttctttctggaacttcttagtgcggtagagccaagagttgtcaactggagcctcgttaccaatggagaaacaggtaaaaactatgatgttacaacttcattgctgggtccttattctccggtgttaagtcatatttttgattgtctgtaccgtttttgtttgtttgtaattggcacttaaacagaggaggataagaagttgaatgccacatacatcatcagtgttgcacgaaagcttggatgttccatattcttgttgcctgaagatatcatagaggtagagacatatatatggtattgaaacagacttgagtgcttcttcggtttttctgagtcagtaaacttgtgtggtggatacaggtgaaccagaagatgatgcttatcttggcagccagcatcatgtactggagcctccaacaacaatcagacacagagtctactgtctcagaagacgccactgatgatggcgacgcaaactctgtagcgggtgaaatctccaatttgtccattgatggagcttccgagtccagtcccactgtccaagatcaagaattgctgacgaaggcagacaatgatgaggatgaggttgatggtgagaataataaagatgcataacgcgtttgaatgtttattttgatcgttgttttttgggttttattgcgtgaagttttgattggcacaaaggtaacacaaagaaagaagaacaaggtttgatatgtatacaaacaaacagggttttggtcctcaagttttacattgtgtacgtaaacctcatttttgaattgttagagttctacttatctttattttgtttattggacctttttttttcatttccaatttcatttttgtttatctccggtctaaactcgaaattgtataaatgattaggcagaaaaccataacatttagttttccatgtgtaccctccagatataattttt

SEQ ID NO: 11994 - DNA, 566 bp, Arabidopsis thaliana landsberg
gttgttcgatgggggcgatcagtgtatgccaacattcagaagttcatccaatttcagctcacagtcaatgtcgccgctctcgtaattaatgttgtagctgctatttcgagtggtgacgttccacttaccgctgtgcaggtttgagtttctgttgcatttagctctttttgaatatctctctctctctaaatattataagtttgctcatatatttggcgttttctttaacatacagcttctctgggttaatctgataatggacactcttggagcattggctttggctactgaaccacccactgatcacctcatggggaggcctccagttggcagaaagtactgttttttccgccttctctcattcaaacttaataaaacatttggttttgtagacatagacttattgttatctttctttgcttcgacttctttttgcagagaacctcttattaccaacatcatgtggagaaacttgctgatccaggtaaaaatatcagtgaatagactctgttatttgaaatcaccccgtcttatatattactaaaaaagtgaaatgtgattctttc

SEQ ID NO: 11995 - DNA, 955 bp, Arabidopsis thaliana landsberg
cactttcaagactataaatatcaattacttgaacattaatagccaaaattacatatcaataattaagaaatctaatgtaaacagcgagcattcaaaacaaaagacaagaataataagatttcacttgcctctagagcatctgagtttaaaactcaaatgtacttaaagaccccaatgttttcaagtcttgatgtcgttagtgtctctagcacacctagtaatgacactacatcctctgttgtaagcattagcctgaccagagcgacaagcgtaataagaagcacctggtttctgacaaggaaccatatctctccttaaagtttcgtagcttatgtactgtttccgcatcatcattactctccgacttatctccgatggcatcatctcctctccttcttcctctccgattacgccgttccggttcagcattgcgtcgatttcgccgtttaccgacggaatcggaactgtgacggagattgagagatgggtttgaagacaaagtaaggataagtaaacgagagctaaggatctagacatgtcggtgtgtgaaaatttggtaagattgtgatctctgtgtttacgacaactccaagtacctcttgggagttaaaccggtcggtttaagttggattgatagagagtttcaacagaatttgtaacataaagtatttaatttaaataaaactatttttttcattgggttcttatccattttaaaaaatatttattgtggtccactaacaaacactcggttcctttgagaatccacgattaattgttgtgttctttccaactgcaatgttttttgttcgtttagaagataattagcaacgtcaatggtagcattagtgttataggtatcgttaatcacaaaaattagaacaattagcgttaacgaaatgttgtaattacttaatatttttttttgttcaagatataatcatcggtctatatc

SEQ ID NO: 11996 - DNA, 728 bp, Arabidopsis thaliana landsberg
ttgtttccttcatctcttattccggatcactaaatttatttatgttttattcttcaactaacttgtgggtgggttctgtgtaatgcagccggatatagcagctccgggtttgaccttgctaacacctagaataccaacagacgaagacaccagcgaattcgtttactcaggaacatcaatggcaactccggttattgcaggaatcgtagcactcctcaagatatcgcatcctaattggtctcctgctgcaatcaaatcagctcttgtcacaacaggtttggtttaatttatgtctctctaaaactcttttctcaataagaactctgcatttaaaacgtaaaactctatgtctttcagccatgaaaactgatccatacggcgagcgtctgactgtagatggaggtaactataaggtagccgatgcattcgattacggaggaggtcttgtgaatctggagaaagtcacagatcccggtcttgtatacgacatggacatcaatgattacatacattacttatgttctcaagctctttacacagacaagaaggtttctgctctaaccggaaacgtcaataacaagtgcccaagctcatattcatcgattcttgacctcaatgtaccgtccattacaatcccagacctcaagggaactgtcacagtgacccgaactgtgaccaacgttggacgtgtcaaatcggattataagcctgtgatagaggctccattc

SEQ ID NO: 11997 - DNA, 1329 bp, Arabidopsis thaliana landsberg
  unsure (1)..(1329): unsure at all n locations
ttgggttgggtttgtgtttgaaccagaccaagattaagggtgaaccaaagaaaaaagagaaaggtttggaaagaaactaaggaatggagaagccaattcattttcttcccattttgagacaagcctagtagtatcgaaaaggttcttgtctaaagccgaacgnnnnnnnnnnnnnnnnnttaggccaccaactcccactgatcgagcaaattcatcatcaacctctgttgcatctcctcttgttaggcctgcttctcctaaagtgccttctcaaagatatgtctcttctccaaaacccatttccccaagagttgcttaccctcaagtccattatccgaagcccccttctccaaagccgccttctccaagagcggtttcgcctaggattgtgcagcgacgtgagtttgtgcatagaccagagccaagtctattggtcaaaaatgcttatgcaattaagattcaagcagcttttagaggttacatggtaataatgtaaaacattcttgattctgttttgtcactattaatcaagcagtaaaattcataatttaggagatggaaatttgtttgcaggcaaggaggagtttcagagctttgaaaggtctagtcaggcttcaaggcgtggtaagaggacacagcgtgaagcgtcaaacgatgaatgctatgaagtatatgcagcttttagtccgagtccaaacacaagtccagtcacgtcgcatccaaatgctcgaaaaccgagctaggaacgataaagatgacacgaaattagtctctagtcgtatggtaagtgctctcataaaacttagtgagaaaagaagatctctctcagttattcattttgacattaattattgttactttcctgcagtctgacgattgggacgatagcgtgctgacaaaagaagaaaaagatgtgaggcttcataggaagattgatgcaatgatcaaaagagaacggtccatggcctatgcttattctcaccaggtatgcaatcatgactcatctattcttcttcttactcaccataccaatgttatatatgcttgtttcctatgcagttatggaaaaacagtccaaagtctgctcaggacattagaacaagtgggttcccactttggtggaactgggtggaccggcagaagaatcaaaaccaaccgttcaggctaacaccaacacgaccgagcctgagccctcagcctcaatctagcaaccaaaaccatttcaggctcaacaacagtttcgacacgtcaacacccaattcatcaaaatccacattcgttactccatctagacccattcatactccgcaaccatacagtagcagcgtc

SEQ ID NO: 11998 - DNA, 1133 bp, Arabidopsis thaliana landsberg
gtatataagctatagcatatatacggatggggtatcttttaaaccattttctttttcaccattggaccataatcagataataaacatagattgggaaccccaaatattttcacattttgacatatttagtagcgacattaaactacttcgtgaaaatacataggatattatgtcaaattgtcaacgaaactttttatatttaataagaaacgaaattaaataatacttaacagaaaatactcacaagtgactttcaatgattttgtctctaacgttttcaatgtttattttttggtctctgactcttcaaggaaactggtaaaaccggtgtcccggtagtcatcactcacatctcgtccaccacgtgtcactcttacacgttcataagttttcccacctttctacgtccgattctgtatttatataccctaaacccatcgtcttctatacatgctcttatttcacaatcccaccaaaacaaatctcaagaacatttcaagattcagaaaaaagaaactcgcaaacttttttcttttgtttctgtcaacgttcaaataatcaagcgattgttttttttaacctagaaaaattatggctatagaagaaaaccgaagtcacaacgattatcttaggaggatgacttttgcagcgttcttgaaatctggttctctcgccgccgaggaagaaacttaccacagcgacggtgatcatcataaccaaagcacctttagcagcaacagcgattctcagcggccaagcaacgcttcaagtgctagtagcgattcgtcatcaccaatctacccattatctccatggaaccaaacttactacccaagcaacgacaacacgacgtcgttttcatctgttactcaatcaccatggaaccaaacttactctccgtaccacaaatctccatggatttaccaaaccaggaacagtgatttcgaggatgatcctgataacggtttgatcggtacggtcgtgagacaagaaggacacgtgtactctctcgctgcttcaggtgatcttcttttcaccggttctgattccaagaacattcgggtttggaaagatcttaacgatttctccgggtttaaatccacaagcggttttgttaaagccattgtagtaac

SEQ ID NO: 11999 - DNA, 859 bp, Arabidopsis thaliana landsberg
  unsure (1)..(859): unsure at all n locations
gtttcctctttcaccattttaccaaaaaaagttacttattatttaccaaatcaataaactccataatttcatgtcgagaaaaaaatataatccataaattgtttcgtttaggacataaaacagctcttgtgagttacgattaggcttaaatcgaccataacttccgattcattttatgtatacgtggcgaaatgcaatttgtagaacgtggtgaagacaaattggttataacccgtcgagtcgtnnnnnnnnnnnnnnnnnnnnnnnnnnnnnnnnnnnnnnnnnnnnntcaagggacataattgtaattttacatattaaaccgacgctttttataaactactttcccttattagccaatcataactcaacgattactacaaaaatagacgaaataagacataatgaataaataaatatgagaaataataaaggaaatctgttagatccttgtcttcaataaaccgctatatacttccaaaaaaattattatagcttatgcatttgtttttgggttaattcgctaaaaaaatcaaacattttaagttttgatgttttttattccgtcttaaatttattatttattataaaatataagaattgttatatagacgattttattacagacaattctttctaactctctttagattcacgataaacgttatctttttctcattttctatgcttttgatgaacactttcaatgattttctttgcgtaaaatcccgacgaatgactattaattatacatcgttggagatatcatgcatatttgccttcattaatctggaaatctgctaaataaatcgaagttttgaaagtctgttcctataaattggttccggtaaaaaaattc

SEQ ID NO: 12000 - DNA, 748 bp, Arabidopsis thaliana landsberg
ctcttgctatgctttatgttcggctaaatatgaaactcacacaaaatctatcagtcctttttattgtcgtcatactcctttttttttctataattgtttttaatagaaatgtgctgggccggccctgcaggctagattttaaaacatgaagctttgtactaagaatctgattttgcactattacacgatttactcctttcgtatattctctctatttttttacatattcgatttacacctttgtttccgtttctatgttttatagtgattttttttttctttttttttcacatgttttatagtgattttttataaaatatttgcttggctttctcgatgtgataagtgaaagacgcgattcgttgtggcaatgaatgaaaagggccccatttgggtcctacagatattaagcatgtattgtctctttggcccgttttcaaagttacaagggccctccataaagtcaagttgtgtttcatttttttgtttactccatcttctcacgtttcctctttcaccattttaccaaaaaaagttacttattatttaccaaatcaataaactccataaaatcatgacgagaaaaaaatataatccataaattgtttcgtttaggacataaaacagctcttgtgagttacgattaggcttaaatcgaccataacttccgattcattttatgtatacgtggcgaaatgcaatttgtagaacgtggtgaagacaaattggttataacccgtcgagtcgt

SEQ ID NO: 12001 - DNA, 1051 bp, Arabidopsis thaliana landsberg
ctaactcgtagattcttatccgtttttgtaactccatccactctatgatcttcctcgtgtaatctccttctcgccatttctttaactcgatgaccatcactccggtgttgaagtaacacggtgtagcacggcggttgagggatagtgtgatggagagagaagggtttgaccaaaacgtcggagtaaagtaagtcgtgaagtttgcgttgcagtactcaggcgcggctaaaacgacgtcggtagggatgtgagtggagaagagcttggagatgtcatcgacgagtatgagatctgagtctaggtatacgacacgtgagaggcacgtgggaagaatgtcggcgaggtagtttcttgcgtagtttagcggagagtctagcgcggagcggatggaggttgagatgaggccggagatggcggctacgtcgtaagggtaaattcggaatttcaagtagggaaaagaagcaacgacgtagttttggagtcggtggctttgttttgaagtgacgaagtggaaaacaatgttttgaggacaagaagagtgttggaggacggagagaatcacggccattgagccacggaggtaagctgtgtctaaggtcattgccacgtggatggctttgtctgaacaaacgaaatcttcatcgttttcgatggttagacactccggggagttgaagaactttggagcttctttgaatctctcgccgccggcgaaagagacggtgaatacggcgaggatgctgagatataatataaacttcgagtgcatatttttgtgctagagaaacgttagatgcaaatgttgtatttattagctttgagggagagagatagagaaggagaaaagacaggagagaagtttctttactctttaggaaatttttttcagtgagtttgaatagaaaggaggtgacgagagagtcaatgttattgaatgaaatttgtcggcgagatattattcgcttatgtaaggaaaggattttatctttgatccatggagaaagaaacaaaaactttagtcgatggggatttgcttcctcgagatataaaa

SEQ ID NO: 12002 - DNA, 617 bp, Arabidopsis thaliana landsberg
  unsure (1)..(617): unsure at all n locations
agctattctccggtaagtagtagtcactactttcttcaagaaaactttcctttccccacaatatgccggtttgttaagctcccttgtctcttcattaacgttattcccccatatctccaacctctcataagccatctttatagatttggagaatataaataaattaaacatggactaagacataagtagggaaaatttaaaccaaaaccattcatggatatatatatatataacaaaggcattttggcatgaatttgaggtttacagtttctctccagactaaaagatagagtccaatgtattatagtttccggtgttggtccttctcttcttcaatatatgcggtgacatacgactgacaacatgagaatataacttggtagaataggcacaagggccggtatctataatcacatggaagagccttaccattttgtatgctttagattcaagaatttgtaccatcttatgtagttttccaacagtttattcatcacggtatccatgggccatgacctccgcctagtgaaattagaagaaaagttatagtagagtaaagaagtagaatttctttccactagtaattatgagttgaattttttatccatatctnttag

SEQ ID NO: 12003 - DNA, 1543 bp, Arabidopsis thaliana landsberg
actttgttcatctgtgcacaatcgttctactacagtctcagttccaactagtatttccccttaacgctctctttggcatcattgtttatcttcctgaaaatgcaaaagaccaatggattgttttactaggggaagagttttgtgcttcctctccagcaagcaccacgaagtggcaaccaaccggcaaatagttctggctacttttggtatctttattagattctggttcaggctctgggctacaaacataagaaataagacttgacattgtaaaggtaaaacactaaacaaaaacttggaagaatatagaggaaacagtgtggaagagtatacacatgtattgtctgtctgatatctggataatctttccaagtatagagttaacaaattcgcaatttctgatggtaaatgcctagtgtttatatatttgtattgtggctattttttctgttcttacaccttttctggcttctaattacataatggcttgtgcattcaagaactccaatcttcttttaagaaaatagaggctcttcttctgaacaaaggtatacttttcattaccatcaaaagccaacataatcaaatgtgcttgcatccttcaaatgtctcaaggcagaaaattttggtgacaaattccaaaaccatgaacggttttcagtgctttcaaatgtgtgcccaaaaggtataagctttgttctgaaacctctggagagaagaagaaaaaccagccttgtctagaggttggagttatttagctcttgatttacataaaagatgagtgaatataactttatgtcaaggaaagtaaaaaaaaaaaaacaaagaacagccaaacccatatctgtaaatgggcctttaatgggctaaaccggttggtatgatttcgcactcgtgatgtgatgtgataatgaatgtgcaatgggaataaaaaagaaaaggaagagagaatcttatttttggcatgtacgtatggttgtgaattgtgataatacaaccggcatatggtcatgatattctaaaacgggaccattcattgtcgtcttatttacaaatcacatggagagaaggatattacaaaatatcgaaacagagagactatgatttatttgtcttcttcgaaatattgggtttttttagctaaatgcatagaagcttatctagttagtctctttccacggtcaaaattgtagtcgttcgtgaatgtacttcgtgtgttatgatttatgaaaaaaatctatacaaaacagttactgtttgaaaatgtgtcaaacgaaatgatcctttttaggtaattcttatcttagacgaccaaaaccaaattaaaccataatgatggagtttagtttacagtcagaatcaaaactaagaatgtaactaaaaatcgttcactgtatatagtaattaattggttaacactagaatacaaatgccatttagcatctcagagtaagacaatgacaagtctatgcattaatttcattctctttgtcatatatataaggtaaaatatctctataattgtttttaatatacaaggcaa

SEQ ID NO: 12004 - DNA, 1303 bp, Arabidopsis thaliana landsberg
agggggagtcatcaacgggtcttttaaagtttcatgtctcaaaaataaaactctattctctatcatgatttcctctaaaactctggctttggtctgttttagggaaaatgcaaacgaaataaaagccaaattcatcattggaggtgctaatcacccacatgatcctgaggctgacgaggttattcgaaaatctgatactttgtttttgctctatcttcttcccaacctcgcgtaacagagactctgtaatatctgtctccgcagatcttgaacaagaaaggtgttatgctcctcccagatatatacgcaaactcagaaggagtcactgtaagttacttcgagtgggttcaggtaagactcgaaaatcaaggctgtatgacctgatcgaatctaaagccactcgatcaaaacactgatttgtgttatatctgtgtgaagaacatacaagcattcatgtgggatgaggaaaaggtgaatagggagctaaagacctacatgactcgcgggttcaaagacttgaaagaaatgtgtcagacgcactcatgtgatctccgtatgggagctttcaccctcggtattaatcgtgtcgctcaagctaccactatcagaggctggggttcttgatacccccccatgggaagctaaagaacaagaattcagaaaatctttctatgttgttgatttgctttgtgatttgagtcaattctagagtaataaaaactatgtgctaattgcagtttaaccttctcaaattttctatcaacgaatctaatttgatgcaaatatttttactccatagataaaaccaaagtcttgaaaattgagaatacgggagaacgatagtcattcataaaacaaagggtacaagtttggataaggcttataaagcaggagaagaacctaaaatcttcctcggcctctaaagcttccacgagagccaccgcgtggtggaaatctaccacctcttggagcacctctacctctactaaatgatccacctcttccacgacctctactatcacctcttccacgacctgcacctccacgtccacccgttgactgacccctggaagaacaaagacacgcagttagatggagtttgatacaattaacaactctcaactaatagtgtatctaaagtctcgattgttaagaggaaaaagctaattgctaaagttaaacgagctcactaatgttatttcaagttcaggaaaagaaacttatatattgaccaatgatgtgttaagaagtggggcttactttggctgaggaaggaatcgagcgagtggcaaaagcttgtaag

SEQ ID NO: 12005 - DNA, 1077 bp, Arabidopsis thaliana landsberg
  unsure (1)..(1077): unsure at all n locations
ctaaggtttgttaaactccactagatgataaattattttgggttaataaattggtagaacaaaaaaaatattcaatcaacttggtacaaataaaattgtctatgttttaaatttggatggtgacacaacaacatactaatacaaaccattactgtacatatgttcgtaaggtctaggtggaaatcaagcaataaacctaattcgaatatagtatagtcttagcagtttgtactcgagctgtaattttggttaaaccaaaaacatgaatccttatcaattggacagtaagaattcttgaagttaaaagagagattttagtgttttcttttctttttagtttttaggataaatgaacatgaaatgtgggaaaagagcaatacagtatgattggctacacatgttggtcttgtctttctctaattcttgagccacactatcatatgattgcagaatttttatttattaattaattcagattctcttggttctctgtttcttttccttttctcaagcattgtggatttatctctctctctttttttcttctttttttgattttacaaggaaagggaaaaagacttgacatataatgcaaaatgtgcagagggagagggagagcacatgtcattacatgtgattctaataatttagattcttcatttctcagtaaaaagagagacaaaagcattatgctctgccaattttttcttctttatctttagttttgaaaagaaagaaaacacacacacacacacacacacaaatgatttttccttgtaataataatataattgaagttggagagtgactacatatattcaatctatctggcatttgtaaaaaacttatctctttattctatattcaatcattcaacatagcaacatactatttttgacccaacaaaagtagcattacacactattatatcctaaaagtatcctaaatgttgcaagattaacgcagacatataaacttcatcaaatcctaaactctcgatactggttccttctttaactctcaagcgtctctaatcccagttcagttactganaatgacaatacacaattctagaca

SEQ ID NO: 12006 - DNA, 695 bp, Arabidopsis thaliana landsberg
aaggcaatgataatgaagaacaatgtaagaaacaaacatttaaattcttcttgaatcactttctttaccacaatattctgagacagagttagttatctcttgttatagctgcaaagagaaagagtatgcttgaagagatcgaacgcgagtttgaaggtatctcaacatattagcatctttctaattagttcataatcatattcttcaggggaaatcatgaacctgtttccatcttttacttgcagctgctattggaggtcttaaacaaatcaaagttgatgattccaataatcttgaagaagaatgtaaactctctgatccattttttctctttaaaaccttctcatacaaaaatttgtaacttttttgtttataatttttgtttcagctgctaagagaaagataatgttggaagagatggaacgtgaatttgaaggtacttcaagattctattactgatctcatctaagttctaagtaaagaaagtatagattgacagtttctgattccaaccttcttgttctgcagaagcacacagtggtattaatgcaaaggctgacaaagaagaatgtaagaaacaaccataagtctttaacttttttgcttcactcactgactcagaaatgttttctaagacaattcttgttctcacagctgcaattaaacagagcggctctgctataccagaggttctt

SEQ ID NO: 12007 - DNA, 949 bp, Arabidopsis thaliana landsberg
aacctgtctttttgttggccacatgctagcacctcggtttggaacttttacttccctggctcatgcggatacaagatcggtgtcctcacaagcgacccattagctcccgaggttgcttccgacaccgattccaaatcgacacccatctctccgatctgcgacagcgacgaacagattgaggctgtgtgtcctcgcctctgggaagacaattacgagaggggaaacccgtaaagcgagcatctgactgtgcctggtgagtctaaaaagacgctaatattgacggcagaaacagcgtccttatgctgagatttgatagctctctatatatatccggtacacagacattggtttaaagtttaaaccgtataaaatgatataattacaagaagaaagttgatatatatggcattgcaagaagaaagtatattacatacatacatacatacaatttctaaatggacgaaagtaaacacaagccaacattaacagtaactgataaagagggtttaagcaaatacatttctgatgaagaaaagaaagaagataaaaagagcttacgagttacgataaactgaacttcccctttgtattctgaaacacttgctcggcgatactcagatcgagttttgtaatctctaggttagagttatggtagcacccaacgcctctcacaccatctgctaagatcctattgaacccaatggctaaagctgcttcgactttcgccccgtacaccaatctctgtttacaaagtaatcaagacgaggtttcagaaagaagaaacaaaaagttcttattaccttgagccttgagagatggatggctccaaaacacatgggacaaggctcgcatgatgcgtaaatctcgcattccgatagcttaatttcattcagtttcttgcatgcctgtgtgttcgccataattagaaacatgtcatttttgttttgtt

SEQ ID NO: 12008 - DNA, 487 bp, Arabidopsis thaliana landsberg
aagacagtccttctcatagaccaccaaagacagacggtctcttgtcaggctcagccacccgccaatgacccaatggtgtttaatctagcgacagagagcatatcactggtagacgaattcatggatgtattgccagaagagttgccagaaatgccgccagactgagatgtggagatccacatagatctgatccctggtacggcacccatcggaaagaggccataccgcctggctcccactgacttagctgaattagaactccaaatcgcagatctgcaagcagaggcgtacatcggtcccagttcatccgcttgggacgcacccggtcattttgtccctacgaaggctggacgtatgagaatgtgtattgagtaccgagcttcatacgaggttgcaatgcgagcacaagtagccactccctcgaatcgctgagctcttcgatcaggttcaagggggcaaatgcctctccgagatagacctgaggtct

SEQ ID NO: 12009 - DNA, 2136 bp, Arabidopsis thaliana landsberg
tgacgcggaaacgacattccgttccggtcttccaacataaccgaataaacagcatccggacaaacataaaaaaactgaaaaccaagaggtaaagaaaatgcatagttcgctaacccatccgctagacgattagtttccctatacttgtgagaaatccggactatctagtcccttgatataaagccatagcacatgcgtactaggaaggacagcgggtgagattcacttctaagaacaaccctgtccgaagaaacccaacaacaacctccgagtccacctctaactctaatcgggatactttacactcccaggccatgaataacccgtagtatacaccccataactcagcaagaggtgttgagcatatcccgatattaattgcaaaccctctgcgccattccccattgctctcctgtaagacccctcctgccgccgctaatccgggattgcctcttgacgctccgtttgtattcagcgtgcaccaaccttcacttggtctactccatgagattagtctatcttctctgcccactaatctccgagacactcctaccaggctaccaccgcattactttaataacttcccgagctaggtccatataaaaaatgtttggttttcttaggtatccatatattatttttatgattttctcgaatagaactcagacaaaatgaaaaaaaattgaaacctaatttatttagcagtaccgatgaaaacattgcatatttggttttaaagttttatctttgggatataaacttttttctttggtttggtataacatcagtttatttcacacctgatcataaattaagtgcaattaattggaaattggaatacctatttttctttgttcgacatttagaagaaactgaagaacacttacattaacattacaaatacaaaccctaccactcccttgtttggttagtactagcagtttacttaaacaacaagaaacaactacaacatttaaggttatatggctcatatctccttaagagccttcaacacatcaagcatgttagggcgcttagctggcgtttcagcaagacaaagcatagctatctgaagcagacgaagctgagagttcttcaaagccacagatacgagcagtggatcaataacatccacagctttcccttggttgatcttctgaatcgcccaaccaaccaagttccctccttcactctccttaaagtctggaccggttggctctttccctgtgacaagctccaatagtatcacgccaaagctatagacatctcctttggttgtggctcgggcactctgaccatactccggtgggatatacccgaaagtccctgctatgactgtactaacatgggattcacaggcactaattagtcttgctagcccaaaatccgccacctttggttcaaaatcaccatctaacagaatgttgctcgctttgatgtccctgtgtataatgtgagggatgaaaccgtgatgtaggaaagctagacctcttgcagctccaactgcgattttgaggcgttttgaccagtccagaacctctagcatcccagtttggttccttaaccagtgatctaagcttccatttaccatatactcatataccagaagcttctcttcactgaaagagcaatatccaagcaaagacacaagattcggatgcttcactttccctagagtctccatctctgccatgaattctcggtttccctgcgttttggcttcacttagcttcttcaccgctactgttttctcacctggtaaacaagctttgtaaaccgtcccaaaaccaccgtctcctataatgttcttcttagagaaatgatctgtagcctcgacaatatctcctaaacgcaccttcagaagcggctgctcgaacattgctatattgatgcttaaaggctcccttgatctgcttccacttaagaaatacaggttctgatcaacaaaccctttcaatctgctttcctccattcgctctggatcatctctttgcttcactctctttgtcataacccatctgcgcagagagaaaacaaacacaaaaacgatgatcgtaaagccaagcatgagtcctgcaatcccccaagcactcctcaacttagttccctcgatcttgcaatgtgatccaaccactc

SEQ ID NO: 12010 - DNA, 1124 bp, Arabidopsis thaliana landsberg
ctttgtcccatgctccaccttcgaaatgtgaaggagcaaatgtcctcaaaaacacttctcctttaaaattctctaattcaagaattgtcttgaatgttgttctcaacgctcttctatacgcgaaatgtgccccgacatttctgactccgggaatgtagcaatacaaacatcctatccttttttgtttgtcgaaaaggaagagtggtcggaaaaaccattgtccagatgagatgattatgtaatcgaactcaccgatttgggaagcccaagtagggtcaggttcgtcgaggtagagattgtagaatgaattaggacctgtcggaccggtttccgtttcttcagcgcgaaccaaatgtgttgtccaaaatgtggcgatcgtgaagttgtacgttttgtatttccatcgttggaaattaaactcctgttgtgagtcatcctcaggatgttccacctgaaattaatatctaaaccaaggttacttttgcatcaagtaatgtattaaacgagtaagtattgtcataaaataaataaaaaagttggataagcattgagagaattggtacccgagagagtaggcagatcaaagactgaacgtggtttctgctaacggagtcaccaacgaacgccattcttgttcctctaactatttccagaaactcgtaaggatcaaacagagggagatcacattctttaggtttccatctccatttcatgaaacctaaatcaggtcttccatacttgatgcagttttggtgttcgtgtatcgccctgcatgtcgtgtttgtgtagtacggggctttagggtttgggatccactcgccggagaatatatcgcatttacgttttctctttttccggcggtgctctttcttaggagttacttgatgatgaccattcgatgatgagatggatagacgatcattgttatgcaaagatgatgacttgggatcatgatatgtgtcgtcgtaatcattatcatacgacgatggttctgaatcttctgtcttataactatctgatgatgatgatgaatggttatacctagatggagaagatattgccgacgacgatgatgaattcgataaatgtttgtatgttgatgttgaataatagagaggataacc

SEQ ID NO: 12011 - DNA, 658 bp, Arabidopsis thaliana landsberg
tatacaatcattaagtagcgttagcagcgcggacgtgatccaattctgtacaaaaaagaaagaacctttccacgacttcccaccattctcattatcgttgagcagagcataggcggctaaggtactaatccaaacgagaatcgattccgttgaagcgaagaagaagataatcgacaaagaagcacatttcattcctttaaccaagcgtttacttgtcttcaacggtgttataccccaagccgattcaacaacaacaacaacccaagcaagaatccaattcacatagagcttaaccgcaaccgcaatcgagataatcgttactagggttacgaaaccttggaagtacgaagaggcgtaatcgaattctacaccgggaatgatctcaataagcttaaccaacaagaaagctaaaatccctggaatcagaaaaccccctaaaacgatgagattcgatgaggtcaaagtagcgagaagaggtaaatttcactgcagatttcaatgtcacaggtctaccatagaatccttgaaacacactataagcgattgatccaatagctaagagatagaagacggtgataacaacgatgaaaccgattagaattaagacctttgttttggtatcgatgtcatcatcgttgttgtgagtagcgaggtttga

SEQ ID NO: 12012 - DNA, 569 bp, Arabidopsis thaliana landsberg
gccgcagtatatacaacgtcaacagcgttagaaacgcagacgtgatcacaatctgtaccacaaagaaagcatctgtccacgacttcccaccattctcgttatcgttgagctgagcataggcggctaaggtactaatccaaacgagaatcgattccgttgaagcgaagaagaagataatcgacaaagaagcacatttcattcctttaaccaagcgtttacttctcttcaacggtgttataccccaagctgattcaacaacaacaacaacccaagcaagaatccaattcacatagagcttaactgcaatcgcaatcgagataatcgttactagggttacgaaaccttggaaatacgaagaggcgtaatcgaattctacaccgggaatggtctcaataagcttaaccaacacgaaagctaaaatccctggaatcagaaaaccccctaaaactataagattcgatgaggtcaaagtagcgagaagaggtaaaaacgaagcgaagctcgatttcactgcagagttcaatttcacaggtctaccatagaatccttgaaacacactataagcgatt

SEQ ID NO: 12013 - DNA, 1027 bp, Arabidopsis thaliana landsberg
tccttaatttaaattcgtataatttgatgagatcacaagaatttcttcaatgtagtagagtatatcagttgcatgaatacaaaatgatttaatgttaatcacatacataccattgattagaaaaaaaaatggttaagaagaccaaagagaaaaagagatggttcaaataacagtctctcacgcgcctcttttctcaagtttacaaagcgcaaaatccttcagccattttaagttcacgtgcctcacgtggtttaggtgcgcgtggctatgtcacgtgttgcttctgcttgtactactattacattacctcttgagcagttgggtgatatttatttattttcacctctatagtaaatagtgaagctttaaaatgtaaaaataccatcccttatagaataacactgtttgaactttagtgacaatgtattctttgaatagtaagaacaaataataacagtttagttggtgaatgattctattatttggtgacgtggtcagtcaaatttcctctaataacaaaagagtattgacttttatgaatggttgtctatctagtcaacagtaaaaaaccaccgttggatcattaataatcacaaatgatttgagatatatttaatgcattgtcttttttttcttcactctcccactacctaaaaagaaactgcctaagactaagctgaagaagaagaaagaaagaaacagagaagacataaaaatgagaggagacaaggaagaagagaaggcgaagcttgcacttgtgttagctgcaaagtcaagatcgttgttgtacacttcatcgcctgcgagtccacgtgtgtttgcttctccgattcacactcttgcctctgttccgttttgttgggaagaccaaccaggcaagcccaagcaccctcttcgtcctctttcttaccccaagtgtcttgatttgccacctcgtttgctccttcctggtgagttcacgcaaatgcccttgcccgagaggaaacatgggctcttgaggttcttgaggaggaaagggagaggggat

SEQ ID NO: 12014 - DNA, 550 bp, Arabidopsis thaliana landsberg
taaagacttcttcgaagattgtagcatacgggatttgcagcatttgctacaaagacgaacttgtcgagttggcatgtagcccttgcgatttcaatctttgtaaagcttgctctcatctgccgcaggacgtcacgcacgatttccatccggatcatcctatggaattttgtctgcaccagtacgatcagaaaccgggacacatcatctgctccgggtgtggcaacatgtcttctggctctttctataaatgtaaagagtgtgagatatatttggatctcgattgtgcgctcagtgcgaacatcttcaggggctgggataacaaagacttgctccattacagccattgccacttgcttaggaggtgcagaccgggactagacgctagaggttcttgccttctctgtgagcttcccctctctccctcttccatttgttatggttgcgttcattgttactcatttgttcacgaacgctgtaatgattttccaagagagattgcacatcctgtgcatcctgcacaccctctcaaacgacttgattacatacgaac

SEQ ID NO: 12015 - DNA, 1043 bp, Arabidopsis thaliana landsberg
  unsure (1)..(1043): unsure at all n locations
gaagattctaacttttttcttcttgtgatgcaggtaacttgtcgatgaagcagagcataaaaacagaagtagagtcttcactcgacgaagacaaagttaacatgggtaagtcaatgtacaaataactcttgatttgttggcgttttaacaccatctacatggtctaacttttccaacttttataaaaataggaaagtttccaagaaaaaaacatgtgaagaagaggattcctgaagcagaagccaagtctttttcatcagacaagtcctgtttcgttgcacatgtaacagattctaacttacgagaggatacactggttggtacttcagatctattgttgattcctttggagagatatggaagttgttactcatgtttaaattttttactttgcagtttcttccaaggaagtttgataggtccgatggtctgattaaaggaagtaacaagattgttctgatgaatgaagaagcaaggacatggacgcttattctgaagtttaggaattcacgtagactgttttacagtaggggtggctgaaaaagtctctgccgtgagaatgggcttaaacctggagattctgtcacgtttaaactggagagtagcaacacaaaaacgcctctactccttttctccattgcagaatcaaagagtgcttccacaaaagataggacccgatttctgacactaactgtcacaccatccagtatccgcagttccagacttgtaagttttgttcccttgtttttggtattgatgctttgtgaagtgcacagagtatataagctaattgtctccctttctttgcagtatctttcgaagaagtttattagtgttaacaagatggaaagggcaggagggaagaagataactctattggacaagaatggagaagagtggccagtgaccttactgatggataagagatatacaaggatggttttgggttcagggttgagagaattctgcaatgctattggcgttaaggcatatgaatctggggtgttggagttggtttgggaagagacaacaactcttnctat

SEQ ID NO: 12016 - DNA, 831 bp, Arabidopsis thaliana landsberg
agatcttggcgacacaaacctgtcatacttacttctctcgtatgcaattctttgtttttactcatcgaatctgttgtttcattggctgggagactgcttcaacccatacaatgacctgtttagcagacaaactgtatctggatatttttcatgaatgtaaccttcgggctggtccatgtaaatggtttcgtctaagtagccatgtaagaaagccgtctttacatccatttgctgcagttccatgtttagatgaactaccattgacaacaagagtcgaatggacacatgtttcactactggtgaaaaaatctcttggaagtcaattccttctttctgcgcataacctttagctacaagtcttgccttaaaccttggttgttctactccagcaattccagcttttcttttgaatatccatttacacccgataggcttctgagaattgtctctgtcaactagagtccaagtcttgtttttaatgagggattctatctcctcatctgctgctttaagccatttcttactgtcagggtcttgcaggacttcttggaaatcagtgggttctggatttcctccatcttctgtgataagatacgcatatcctgctatctcatcaagcacttcctcattaatttcatgatcctttaaccttgagggtataacaatctgtcactttggtttgactctggctatatgatgggttcactgaatcctttctgttcctgtatcttcctggtctgtattggatggctctagagaaaaatccccctctttttctatagctccaccttgaaatgagaatcgccatcaaagttaagacctgtatataca

SEQ ID NO: 12017 - DNA, 1105 bp, Arabidopsis thaliana landsberg
tcaaaccttgatcgtaacatttagatattgcatgccgatttcaaacataatattttttattttttagcccaaaattaagatattttggaggtctgaatctgaatattagtaataaaatcttagatatgatgcatctataccggctagcttctaccacttattactaaccaaataaagttttaacttttaagtattatggtgatatgaattttgaagaaaattttgacaaaacaatccgtagtacctaactgagttttaaattactgctatcaaaaaatgataaaactattttttataaattcagtaccatatgaaaaacatatatttagataagatataatagatcaaaatagtttcagttcaatcacacttgtaagtccaagactcactgattctctcatgtactacacaaagcttaccagttcttaaacgtttgcaatgcatccttcgctggactctggttgcatcattggactacttgagacctcaaccgtgtgaaacgggctcaatcgtatgccagccgctatcaaaattacagcccgggatcttatatgcagccttagctctaataacaattggatcaagtgggttgcaattcaccttggcatccgtgggtgattataaattatatgaatattagtcaatgattaaattatatttggaaattttgacccatttgtgtagactgtgtgagaattatgtcatatttgactaatctttaataataagaagttagtcaaatatgtaatcaaatatagtatagctacaaattattgttttatattttgactacatattatttttaaaaaatatatgagtcaaattttgcaatgaatacatagatcatttttcaggaaagaaaattatttattcttaatgctgaaatatgtttttgtgaaagctagtaatttcgatctttatatatatttaggataaaagtttgactcttatacctttattaccataccaatataataagtagcttaaattttcaattatgagctaaatctcagtcaaatatctgatataatctcttagtccctttgtaatagtcaaatttgtaaacataagataatataaatattgaccaatttacatgcaattt

SEQ ID NO: 12018 - DNA, 793 bp, Arabidopsis thaliana landsberg
gaataacaaaaaattcaatgaatgtaacgttcatcagtcaccagactctccgcggacaaaacacacagacacacatacacatttgtgtacatatatggttaatatacatgtgtcatctggaaatgtttgtgatagtctatttgttcgagcatatgacacgaatctttggtaacaaaagctaaataatcttctagaacatatctgatgattaacgaaaatattgaagcattaacagcaagctaaataatcggatgtcaaaacaagctgttagaaaaaatatttctgttacgattatgtcaccccttttattttcttttctatatatatttacctaaactatggaataattgcaaatctatttcactatttgataataacaaatctgtttcaaatcttgaagttagtttaaaagtttatcatttaattaatgtagataacttagatatggatattggaagaagcaatctgactctgaacaacaacaaaattatgaagtagaaaaaaaaaacaaagttaacaagtgtaattggtagaaatatgtggggaagtacaaaagggttttggaaaagaaaaaaaaagttaataacataagcacagaacattgtgctattaattgttttcaaattcagtttaactttctctctcccactttttaaatctaattttaatgttttaatttaattttgttatttttcattttaaatttcataacattactaatatttttttatgaaaaaaagagataataccaaaaaaacgaatagacccaaatctacaaaaaaaaaccaaaaaa

SEQ ID NO: 12019 - DNA, 895 bp, Arabidopsis thaliana landsberg
tttattatattataaaaatgttacatgataaatgacatattaaatcattcaaatataactattaaattaaagaaaagaaattgaacatgattttgatgaataggtggaagtgaccttgctttccacacagaatccttacaaacaacaaataaaatatgttaactcctctcttcataaactcgtaaaacgctaatatttatagataaaactcgcaaatgtttttcgcataaatctaattaaacaaacacacatatatgttgcttgaaatagttctaggatcatgattgttattgtaacatccttggcatcgttgcgggttaggaccatggttttctttctcatataacatgaataatctgatcggaggataacaaggacatcatcatgggaccgtgtccttgggaagagaaagttatcgcggagaccaattctttcaatcgaaagaatttgtttattgattccaagatccaatacccaaataactttccaaaaccattagttaggagaaaattcatcggttgagaactagagataacctcggtgaatgagaccaccggaaacaaacattataatagattcatactgagtgaagccaatgcatcgaaagacaacccataaatgaaacgtctgcatgattgaagtaaattgccggaaacataattgtttccaatcaacaaatgaaatctcaattgagacttcaaaactaactcgcttggatagatgtgcattattccttattgatttcagatctgtcatcaacattctatggagcaaaaactgcatcgagaacatcaaagactgatgaacaaaggtgtgatatctctattgcaaactcgatcatcatcaagtggaagagaacagatcagatcaaaaaccttctcaataataccaaatc

SEQ ID NO: 12020 - DNA, 1045 bp, Arabidopsis thaliana landsberg
gcaccctacggtggagtgcaactcattgttccaccaggaaaatggctaaccggaagtttcaacttcaccatccattttactttgttcatccaaaaaggtgcaactattcttgcttctcaggtatgaatgatttccatctttgcattatataaaactgaaattagataaatatattttgtgtaaggaattagtcatttatttacatgttttttattttgtggtttttcaaaaaataggatgaatctgaatatccagtggttgcacctttgccatcatacggacaaggaagagatgcagcaggaccaacatttgctagtctaatctctggcacaaacctaactgatgttgttatcaccggtaaggttaaccaaattaataatacaacaatttaatgaattagtagcaacagtttggtgctttaacgaccaagaatcaatgatataagatcttaagaatgtattttacgtataaagactagaattgatggaatttatttggttaggtaacaacggaacgatcaacgggcaaggaaagtactggtgggtgaagtatcgcagtggtggatttaaggggatcacaagaccttacacaatcgagatcatcttctctcaaaacgttcagatctcgaacatcacaatcatcgattcgcctgcatggaatattcatcctgtatattgcaacaatgtcatcgtcaaaggcgttaccattcttgctcctatcgattctcctaataccgatggaatcaaccctggtaagtccatatcccacgccacattatatcaaaacgctctgattttttgtttgtgtttctaatcatcatattggctttatattttcacatggcattgtcattttgttttgacacacttttttcttctttattagattcatgcaccaacacattgatagaagactgttacgtagtctcgggagacgattgcatcgccgtgaagagcggttgggatcagtttggtaaaaagtcacacccaactcaacaattgtctatccgacaatcaaatgcatctctccgcagcgcggaatagca

SEQ ID NO: 12021 - DNA, 949 bp, Arabidopsis thaliana landsberg
caaatttaaggcaagttcccaacaccataaccatcctactttgatgcttcggtcgtcagattccggcgttgaccaaaaattatattgaatttgttttttttttaataaacaaattaaaataagaatttattttataattttaagaaaaaactaataacgaaatataccacaaataatataacaatataaaccacaaaaacattatataacaaaattttggtttatatttggattgatataacaagatatacaaaatatatatataacaaattagacaacaaattcttttttttatactatattttgttatcatattttggtaatataagaaaatatacattttacttttgacaattatttttcttctataaattgtagtgttcatatatatatatttattaatttggtatataatttgaatttgttaatatataaaaaatgcaaaggtcattagctgatatatatttttttttatataaatataattattacttttctattattttacagttctagtatacacatgcatttttttttcctatctctgttaagaaactagtagaaaaaaagaagcgctgacacagatttataaacaaaaacaaataaataaaagcgaaaagaaacaagttgaaagttttttttttttttttttttttaatccaaactgaaccaaatagacatgtgaatgttgttgtgagatcttttcctctgttctttgaagaatatgaggttgggattaatctcaattcatcaccgaatctgattccgccactttgttcttgcctctttcttctcctccatgccttctctttcgatattcatatctgcttgattatttctttagtagttgcagaagcttcataagcagcaaaactaaaaggttctaaagcttttgtcctaatttaatccattcgattcatacatgttatttcggtaaattttgctgtct

SEQ ID NO: 12022 - DNA, 341 bp, Arabidopsis thaliana landsberg
aaatacaatctcgtttttatttattaaataaatttaaaatagattttatgttaatatttatatttctatatataatattttccatatctttagtatatattgatatataaatttttttttatcaagctttcaatttaatgaatgttataaatttattttaaattagtataaataaatgttttaaagtgaaacttattttaaatttgtaatataatttaaattttttattataaaataaataaatgttttgaagagaaatttataatataatttattttaaatttatgcagaactttaattttaaatgaaattaataaacaaaattcaaataaatgattttt

SEQ ID NO: 12023 - DNA, 1598 bp, Arabidopsis thaliana landsberg
cattctccattattaacccgcgtttgaaatcgttgaagatttgaagacacagaatgggcaaaccaagcaaagggtaaggcttttcttctcttcttcgaacagttattcatcttagctcagattgttttgttcttgaatggttttgtgtttgagatttgatttcggacgtttcaaatcggaagtgacaacgaagtctgataagaagttcgagaagaagcttcagttttacacaagtaacctatcaaatttgtctcgaattcgaaaatttgttctgtgctaagctatcaagttgcactgtgtctgaaactttgtttgtgagtgcagaggtcaaagatacagttacttctttgtctgtccaaaaggagattggcaaggtaaacacttcctctaggattatgcttcccattagagaaagtatcaatctttgttagaacttgttaagaatgttacaattctgcaatttgagtccattgtttagttcaagacttgtagttgttggttgctattgtgaaagctttgaactttatctatatacatatgatttgctaatgagggtaactctaattatggtttaatcagaagaagaaaatccgcagccgacaaaagaagctaaaggcgtatgatctcaccaacctgtcggagtttcttcccgagttcaatgctctgcagaaatcagctcttcctgcacccgagctgaaaatgaactgtaaaaggcgacaaaagctcgtgtgagtctccatttcctttgttgttctttcttgcgattttcatctgaaaggattgtgtctttgtgtgttgtttagattgacggaaggggagagattgaacaaggttctagaccatccagcttttcaagctgatccagttggttcgatatttcagcacttgctgagtcaacagccaccggtggaagagaaaccgaagaagaagactaacactaatggaagcaagaaaaggaataagaaaaaaggaaagactgattccatggatttctgatcttgtcctataagtttacttatgttttgtttttgttgttttgttatagtaacatgattttggaaatgaagaatcttcaaatttgattgttattattgttcaaattacacaagttttgatctgtaacaaactcgtttacagctttcctttaagaacacagtctcgcctgtgagatctctctatgcagatttatgtgatacaggtctcatgcttgagattgatgagtagtaatctagaaaagatgatgttctagattcattgcttagatgagtaataaacgacgtcgttttagacacgttataagccaggtgttcgcaaacaaataaatttaggtacaaatttgtctgggtatgaaaatacactcagaatatagtacggtatgaaaatacccttctcccgattatagagtgtaagaagaaaagaaatcggaacaagtgaacggctcaatccatggattcctgattttgtcgtatagagacataagttcctaacaaatgaaggaccttcaaatttatgatctattttgtcgtatagagacataatgatctattttgttgttttgttatagtattaacaaatgaaggaccttcaaatttatgatt

SEQ ID NO: 12024 - DNA, 876 bp, Arabidopsis thaliana landsberg
tccaattcatacacgtttgatttgatatattgtgttcttagtttttattctttgcgagaaaattgaaatggatgttttaggacaaattttcggagagttaagttctcatctctcgtgttaataatcttttcatgatttttaattccttagcgtttgattttctgtttaatatacatattgtattctactgtttagttgttcgccatcaattgattcggatattttagaaaattttctagagaagtatgttctcatctcatttcatgatttgttatatgttctcatttatcatctttttgtgtgttaatattcagatcagattaggttctaaaacaaacacgagagaaagaaagaaagaaaaatatggtttagttacaaatatgttttacctttacgtttcacgtgattggaaaaaagtcgggtatgaaacagcaaatggttttctcatctactctaatcaattaaactatgaatttgacgaatacgtttaatttcttttggtgtaccaatgctatagttatattttaaggaaaaagagctaggcttaattatgtcctacgaacatgtgatctcttctaacttcactcattcttcccacaaagttccttggctgctatcttcgaccatggatatgttgaagaagcgaaagctcgatgaaaatggaatcgcgatgctacacgatggagtcagtggctctgtttcgtttcgattggtgccacaagacgcgaggaagattaccgagcttttctttgctgatcagcttcttgatatcttgcaagaagctattgtacgacatccagatgttcaatttttttttttttgaaaaattgttaaatttattcaaagaaaaaacctggtttacaatataacagcatt

SEQ ID NO: 12025 - DNA, 1108 bp, Arabidopsis thaliana landsberg
agaagtcagggtcagaagtcttgaaagctctgagaaaagacaacatgttgccaatgaaaggccaacccaaatcacctggtggcagatagtgcctgttctccccaaggctggactcatagagccacacattcaccttcctgaccaaccaattcagaccaaaacatcccaacaccatcagaggaaaccatactgggatccaactcgttgtctccgccatagacttttcacttagttaaacttgccaacttttgtttgtccctttttttcttttctcataaatggatatttatatcctcatcttcatgtagatacgtgtattacattactcaatacctggaaagtctacaagtaaaactggtaaaatatcttttaatctggaaaaaatcttgtccatgcaattcctggtagtaatattatatcttatttttgtttctaaagaacaagagagaatcttagcgggatagaatttatttatgaaagagatttctaaccaaaacgagtgttcctatctaatttgtggtgggaagatacaaagggacacacggctagctcctaaggattaaccgaaattacttccattttgggttctctatatggcaaatgcctctctgtatattcttcttcaagaaaataagttaattcaccaaaaccagtactatcatctctacatgtgtcgagcatgagtatactaattcatcgataagatcccgttgatactaaaactaagtagcaaatgtagatccaaatgcaaaacagtgaacacattcgttaaacaacagagaaacaaaacactccaagaagattaattagtctaaaattaatactaaactttttcttatcaatttctcttctttttttttgtccacattcttcttcaagttgtttaattttgatcagttaaagcttaattacaactaaaaaatccgttgattcgacctctctgaacgtaattttcaatacgtagatcaacaagtgaatttcactaagtttgatcctggaaatttcgatagggtgtacgactacttcacactcggattccgacacccaccacaacaaaaaatcaaactttggtagacacacatggagaggaattcgtaaagaaaagaga

SEQ ID NO: 12026 - DNA, 1209 bp, Arabidopsis thaliana landsberg
ctacgtttcttcggcccaagaggatcatttgggttcgggtcagtcagcagcgagcaaatcgacaacaaaacctatataattccacaccatcaatatcactcgcacaaagttcaccaatatactaggtttttttttatagaacatgactttggtaaaaaatagtagtagagagacaaaactcaaaccttggatgtggtaagagcaggactccattgctctttcaatatgtcaaggcaaatgcttcctttgctgtcgatgtttggggtggtacaccttagtcttgaaattcacctgcaaaatcgtacactcgctaataagcctgatgatcatagattttcattacacatcagatgattaaattagtgttgaaaaaacacaacacttttggtggcttgaaaggataatccgaagagaaatcaatagaaaccgtaaatacgcctccggaatacggactgtcatgcggtcccatgatagttgcttgccaatggaatatgtcctcctcagccacaggacctataagaaagacgttgctatcagacccatttattcatcgaaaaagacaataaaacctgcatgatcaagtgatactttttatagaacagagacaaattggcagaataaataagaagtacaaaaggagacacttgaaataaaagcaagctaaacctctggatattcttaatcgtaccaggcaaaggtttaacgagttttctcgaatacaaaaaaaaaaaaaaaaaggttcatgcagagtacatatatataacagaaccaaagagagtctaacaaatcatagcgttaccaaaaaaaaactcagaaacatataatgtggattgatgaaataaaagtgtgacatatatcaaaccctaaaagtgtttttagtgtgaatctatcagtcaaaatcagccaagaaaagggagattacctgcgctacagtttgctggaggatgtctctgcatatccctcagttcccttgaaatcctcttagaagccatgcttttagactcgaaaacctgcggacgagataagcaacacacaatgagtattaaggaattcaactaagaacataacatatcatagaggaagacgaataaaacaatacatacgtaacgtaagtgatgataaaccctaagaagtagttgaaacagaaaacataaaggaaagatggatcaaaagaaacataccacaacaggaagatgaatctttttttca

SEQ ID NO: 12027 - DNA, 930 bp, Arabidopsis thaliana landsberg
aataaactttgtaaaagtttcctctatgtccatctctcaatcctttttagttccttggcaacttccatcatctttggaacatcacctctatgaccagtacatctgagtgagagcataaggactgctttcattcgtcgtatcttgtgttcttcggtttcatcatcacccatactttccaacatttttggatccaacatgtcaaagattcttccctcttccacaaatttggatatcctatctgaaatccttagattcattacattttgtttgtcttcaaactcttcaaatagactctcatcttcactgcaacaacaatcaaccactccgtacgttcttgtgaaaaagttttgcaacaacactccaaagctaaaaacatcggtatactcggtgatcaatccggtcgccgcgtagttatactctagataatctaatgttccttctactctatcagcatgaaccttaacaaatgtctctccttctggaattgcgatacaaagacaaaagtcacttagctttgctgtcccattggaatccacgaaaatgttaaaaggttgtatatccgtatgaatcatagttcttgacaacgcggtgtgaaggtaagaaaccgcaatcgcaatctctttggcaatctttattcgcattctccacggtaacaacatttccgggtttggagtattgaatggtatacgttctgcatactcgcaaactaagaccggatgctcaaactcaagacaacatcctaacaatttgaggaaattcttgtgaccactaaccattgatgagaccgctatgtcacgacagatcttttctaatgtatcagatttgtagtagttccatgtggctcttttgatcaaaacaggacggttttggagtatacctctgtacataaagttgaaccgaatcacgagattgctctcgctgaagttatcg

SEQ ID NO: 12028 - DNA, 1098 bp, Arabidopsis thaliana landsberg
aatgtgtgtcttctgggtacacctgaaaacacaaatccaagtaaaagtaacgctttcttagaattcaaatgttcttagatataaaagtacatcttgttagtttgagaaatacaaaccttttccttgataccagttaatcggttgaacatgacagcacggtgtcctccatcgacattgtagagactattagtaagggcatagacaccgagcccaccaataacgctgaccttaagaagggcagagagagcaggagctccaggaatgttgggaactttgttgaaactcatttcctgatagcaaaacagaattcaaaccgcaatgagatacccaggagaaacagttcacagctaagaactttatatgtagcaaactaaaacgccgcagggataaattcgtttgtcagcagattaaaaacatcattatacgaagatccaaaggacttaacaccgcataagaaatcacacacatagaacaatcaatgcacaagcctccatttcagaagaaacaaaaaatccaagagagcaaacaaagaagtagtgttactaagagaatcaattgacatggcaaaaaactggagagaaaaacgaattcgaaaagatcgcatagaaaagcgtcagaaattgaaagcatcggtagcagatcccaaggctaaaatcgatcaagcctttgaacattatcaactagatacagtacccatagatcgtcgaatatatatgacgagcaagtcaacaagctttcaacaagaaaagatccacgagatttcaccaaatgatcattccaactctaaatcacacaaggattagcaaattgaccgacgatcaggcactgtgtgactatcgacaaccaaacagagcatacaacgaaacacagtgaaaactgggaggaaaaagcagatagataaacctgagctcagctcttaatcgacggcgatggtaggatttatgaaagatcacgatcggagctgccggcgaagcttagggttttagaaatgagaaatcggtcagatatgcattggcaaaaaaccttctagtatgttcgtgcctatttgcttaggcccattactttcaaatatggttcattaaacacatatcttgtcga

SEQ ID NO: 12029 - DNA, 1097 bp, Arabidopsis thaliana landsberg
  unsure (1)..(1097): unsure at all n locations
gttacagacgaccttaaaagtactataccctggatgctctatccgcttactacaaacccaattctaagtaaaatgtcagtggagaaaaagaagacactgtaagagaggttctagaattgtgaagtttaaaagagtatcggaggttacctgatctaggtttcggagtgcctctactccaaaggtgtaatatgatataaatggtcttcgagtctgaaatatagccatgaccgagttaagaaagaagcatcaaatgaaaatcgctatatatctcatcatccaagtcgaagctttggttcattctagaaaaattaagtcaaaagtgacaatggagtgtttcttacagtcaaaacagactaagtctgtggtttcatagaaagatctatatgtttttattcttatggcctactggtactcaacttgtatactccaggaaaataataatttcattacttttagctgatgatgtataaaagcacctgggaagcagcaagccattgtatcgtagcctttagctctgggtctcctccaaaaacaccacatccccaattccctgtcgcgacaccatcatcttcatgatcctcgttatcaactccttccacataaaaatctctgataagattgttagcaggcttttctctattcatctcaacatcatttagtggagttcggtgtgactgcatcagaaacagtagagaacaacaaaaaaagttgaaacattatttttcaaaagctaattcaaattggctacaaatgaaaaaaggtactaaaggtttgtaggatgattccaaccgcagtagtttctgtacgcagaagaccagaatctctgccgtttcggacaagctgaatttcattatctccttcatccatgaatatattctggtgctcccaagccttgctacaatttaaaaagccacatagtgccttattaatttccctgaaaaaagcagaaagaggaggagacattaaatttcacgtggaaagagaatagaagagtatagaaagaacttagtagcangactccaaaatgttgtatagacacaaactgtggattgtctgaaaaacctatgaatccccaaaagaaggtttcacatacctta

SEQ ID NO: 12030 - DNA, 1081 bp, Arabidopsis thaliana landsberg
ctctcttcactgtcttacatatccccgacggcttgtctgaatctcagactcaatctcctgatcttttgcttcaactcacgcttctcaacaacaattgtgagatcccatttcgagaatgtttggctaaactcattaaacctagttcagattcaggaacagaggataggaaaattagctgtgtgatcgatgattccggttgggttttcacacaatccgtggcggagagttttaatcttcctagatatgtcctctgtgcttataaattctctttctttctcggacatttgcttgttcctcagattcgtcgtgaagggtttcttccagtaccaggtacggctttgactcatagtaggtcattgttcttattgttaattgagtcatcaaagacacaattggtccgtatttcttgaactttctaggtttgtttcagattcggaggcagaggatctagttcctgagtttccaccgcttcgaaagaaagatctttcgagaattatgggaaccagcgctcagagtaagcctctagatgcttacttgcttaagatactcgaagcgacgaagccagcttcagggattatagttatgtcctgcaaagagcttgaccatgattcacttgctgagtccaacaaagttttcagcattccgatatttcccattggcccttttcacattcatgacgtcccagcctcgtctagcagcttgttagaaccggaccagagttgcattccatggttagatacgcgtgaaacgagatcagtagtctacgtgagcttagggagcattgcgagtcttaacgagtctgacttcttggagattgcttgtggactaagaaacaccaaccaatccttcttgtgggttgtccggcctggttcagtccatggcagagattggatcgaatcgttaccttcagggttcatggaaagtctcgatggtaaaggaaagatagtgagatgggcaccgcagctagacgttcttgcgcatagagccacgggagggtttttgactcataatggatggaactcgacattagagagtatatgccaaggagtacctatgatctgcttgccttgtaagtgggacc

SEQ ID NO: 12031 - DNA, 626 bp, Arabidopsis thaliana landsberg
taagtcttaaagtttttgttgacaaatttaattcctgttgtatatatattccaaaaacaaaaatttgtataatgtttgttaaacttaatcacagtatttttagtaaacatgttatatcatattgtggactaaatataatctaagaaagttttgttaaaagaaattgtatagcgaaccaccgaatttaatttttcagttttctgtcaaaaaaaacttagttaatgttttcaggtttctattttcgaaatgttccaaaattatgaaaagaatgaatatttctatttatagtccatgtattgaatataagaacgtcacaaatttcagaaaacatttttgttatgtcgttaaagcgactagttttacttctaccggtgaaacttatcgacacgaggtattatcaatttatcatatacatggttaatgacaacaaattctaacgtttttttatttgataaaaacacaaaatctatggtttcattattatagtttatatagtaattagtaaatccattacattaaggaaaatattaacgaaatttttctacaaatatttatgaaccttgtccacttttaccaaccactagactgggcctgaatatattatggatatacctttttcatacatc

SEQ ID NO: 12032 - DNA, 592 bp, Arabidopsis thaliana landsberg
taaatatatatcacagttaagtatttagttttagattttcattagacattttagtgtatatgacttcggaaaagaagtaaaatttacaaatttaatattacacaatcaatcatgacgatcatatttgttacaaaaacaattttctcaatcttgtagtacgtaactttaacattaatactaacttgcaaaagttagcatatttgctaattattaacctattcaaacaaaaggaaaaaatggtattcacagaaataatggtattcagtattcaccaaataatagaagacgacagactgtccgcagatttctattttcgaattgttccaaaatcatgaaaagaatgaatatttctatttatagtccatgtattaaaatagacgaacgtcacaaatttcgaaaaatatttttgttatgtcgtaaaagtgtgtcgttaaagtgaacaaggatctagtctctgtcttcttggcatggtcttcttcaactcagaaaaacaaaaacaaaaaaactcataagtcgtaacaaggagatgaaacgttgatttttacaggagatttaattattttcgatttgatataaaaacaaaatcatttcg

SEQ ID NO: 12033 - DNA, 542 bp, Arabidopsis thaliana landsberg
aagtttatttctactggcggaaaaagatgttaaagcccacaagacaaggcagaggtttctcccatactttgtctttagtttaaccgccgcatcctctctctctggtcggagaaatctccagatttggtcatttctccaaccttctcggaaccctaatttaaccaaacctctcctccttcagattcatcttcctcctaatctccctaaaagctcaaacctttctctcaatcaattctaaacaatggcaacagaagcaacaaccaaattcccagaatccgatctccgtccaatcccacaaccaccggattttcatccagcaatcatcgttccagctcaaaacacaactcttaaattctggcaactaatggtcgccggttcaatcgctggctcagtcgaacacatggctatgtttccagtagatacagtcaaaacccatatgcaagctcttcgttcatgtccgattaaaccaatcggaatccgtcaagctttccgttcaattatcaaaaccgatggaccttttgctttatatagaggtatttggg

SEQ ID NO: 12034 - DNA, 1175 bp, Arabidopsis thaliana landsberg
ctaaaatatattacaatacgacatatggttagaaaaagaaaaaagtagatccacggcattggaccaatacatcattcgttgtctcttcaagaacatcatcttctcgccatttgtctttaaaaactctaatgcaacattgtcactgtcctcatcttcatcggaatcgactgatctcgagttcgttctccgttggtttagaagatcgatataggtttggagatcgtgaacgcaagaaatgttttgaacatcgaaaaaatctagcgtgagttccaccccaacatgaacataacatgaacagctccatggaagctcataaaaaccacctaaaaccctaaaattctcattgaataaaacacctggaagtttgtgaccggatcaatgacgtagtgatcctaagaaccttaccactaactttttggcaacgttttttaaactccaagttaccaaccctaggtcctgcgaaagagaacacggtcaccggaatatctcccttgccaatcctccggtttaaacctagttccgcattgtcataagcaaaaagtggagccaatgaccttccaatgctatgtccaggagggggagacctacaccttctccctttacctaatcaacaaactctaagatttcggacagaagctgttgtctgcagctctctagtccgaatttgctctcactctcatctgatgtgtataaactcaagaacccggattcaaccttcacgtcgagacgcgggttatgaggatggaacctagcaggagttaaagaactcatgaaatttgccaaccattcagggttagttaccgttccacgaaacgtcaccacaatgtctctcctccctaaacgtttcaccgagtcatcggatgaagctgcaacgtaacctacccaacgcgctcgtcgattcatctcgttctggataggactgatgttgatgttaatatccggtgtggcgtagatatattttgtgacttggtagtcctcaggttggtcgatttcggtttctttaagtagggtttgtttgccatacttgcagttcaagtaacgtttggaattagggtctagatcgaaggctttgtaacaagtggaaactaagttgccgtagcgagtgatctcttgttggagaagagggttcaaaggttcgatgagatctttccagttgttacatccatgtatctctc

SEQ ID NO: 12035 - DNA, 730 bp, Arabidopsis thaliana landsberg
aatgaactttgttaagtaacacataaaaatagtcatataataacagtatttaagagtacaaagtttaaagggatgcccaaactattactcttgtagagttttaatccatatgctctacattctctacatggtctataaacgtataaatccttgagttttcagccttcttattagcgatattcccaaactggatttcattttttgccgcagtgttgttcaccggattatagtagacaatgtagaaaggatagtttagatggcgtgtagataacacaatttcacctccactagtcatcccaacaatgtatagagatttattcacaagtttcttccaattaaaagacaatgtgtagacagtcctcgaccatatcagtttattggcatcttccagaacccgcaacacaaaacttcttgtgacttcatgactctgatctccagagggcactggccatagtatgcctaatttacctttgcaacttatgagacttgaacaccaaattatattttccacaactaaaaacttgaacttttcagacctaacatcaaagcaaactaccatataaggttctcgagtttaatttccaatgcacttagctaaatagtacaaaactccatcaatgcatatctcatcacgaaaaggcctatggggtagcgagcattggatcattctccagaaacttttttcgttcctaatgttgaaactcgacatgccaaatcctcggacgccaac

SEQ ID NO: 12036 - DNA, 866 bp, Arabidopsis thaliana landsberg
  unsure (1)..(866): unsure at all n locations
aaactcgaagctctccttcaatctgattgtcagctatatcaaaccaatatagttttgataacaggccaattgaaggcggaattgttccactaaatttatttaaatttagggagctgtattgaggaaacaaaaattaatactaatggttttagagaatgcaattgactgtttataataacatgaatccacagaatcttacagatatataagttcttttagagttccaatggactcagggatttgaccactgaaactacatcccacaaggatcctggagagtaaaaagagttagataaaataagagataagacaaagtgatacataagttgtgtactagagatttaatgatagtgtgtttccttacaagttccttaacttcccaaggttaccgatgtttggtggaagcggtccggacaatttaggattgtatgacaaatccctacaaagattggataataagatgaaaacaaccaaaaaccatttttatgtgaaaggaaaaatagaaagaaaaagaaagacatacaagatccgcaactcggacaagaacgatatatcggcaggaagctttccttccaagtcaaggttacctagtgatctacaataagcaacacaacattaaaagtctgcagagcattattggaagaagcagcaacaatttacagagccttacattgaaacgacgcggtcattttgacatgtaattccaacccaattggttccacaaggatcagagccttcccaaccatcaggaggagtggtccattcactcttcagagcatttaaagcagaagctgcaccaatattcaagattaggaaaaactctgttcatcatctatatggntgtatatgtatatatncacacacac

SEQ ID NO: 12037 - DNA, 807 bp, Arabidopsis thaliana landsberg
cgactgttgctggcatgaccgaaatcataaccaaaaccaaaaatcttcagaaatctcttcatctcatctgtagacttaggcagcacatttcctcctggtaacatatcatgaacaagtgtcagaagctgatcaaaaaaattctctgacataccactcttgacctttatcctataaagtcccatgattgcgctaacctttgtgtagttcagacaagtcgaatacaatggagtttctgcatcctctaacttctttctgaactcaacttcttctttactgtccattatttctgactcttcaacattatgttgctgcgatcgtagcttctcctcacttgccataaaagctatcctaaacaaatcataagcctcatactcagacgtctgttctgctgtattgttacttctatccccatgtttactccaacacttacttctcttatacttaatatccatccctctaatcactagatgctctaacactgtctcatttgactgatgaaccatattgcggcaatcaacacaagggcaaaacatatctgatacattacccaaacagcttgctgaatcaaatacaaacttagtcgctccttcctcatactcaaggcaattcctgtaagcaatcaaaatcaaaattcttttagaaaacttaaagtttttcagaccgataacgagattaaagaagagtaaagagaacgagagcaacgtcttaccttggtaaccagacccaagctttatccatggtacaaacactccgacggtgtatacaattatcaaagagaattccagttaagcatgtacaagaatagag

SEQ ID NO: 12038 - DNA, 1022 bp, Arabidopsis thaliana landsberg
agctcatttgccactctcacactgccaaccaaaaaagtattattagcttggcacgtgttagatgtgtagaatttgtaaagagttagttttatttcacacgctagaatttaccttactgctgcgtttgtcccaaacgcaaccaatactgcccatcccaaaatgttcatgcttcatattccacacaccattaattaaggaaaacaaatcattagaaatttctttgcagtggaagtattcaaaattttgaattcttaatacattaaggacattgattaataaacaaaacaagagactactacgcacgttgggtctagtctttattcagagaatctctctgataataaataaatgaatcaaataacaaatcatgtaaaccttaaatgttgtaaagatgttaattagtttaagagatataacaaattttaccatatggagagtgcagctacggagacttcagcattcttcaaatatccagcaaataatacgagtgccataaaataccaaatctccaaactacaaaagtaaataaattgtatttaaaatatgaattcattaatggggttggatcaaatcggaccaaaataattggaagagaaaaaatatttgcactcaccagagcatggcagcagaagccaaagacaatttaacaaacccccacaaattgtgaaaagcctcccacgtaaatccagaccaagcctctccacacgtacaattaaagatatacacaagttgtgcaacaacgatgacccaccacgacgtgttaagcactaaagctaaaccaggaagtccccagtgtaacctagacatgactagccacgtgaagaaactatggatcacaagaaccacaccggatattccagccatgaccatgatcttgctttgtgattgcaaaaacttcgccgttgggaagttgatagcgtaggcaaagatttgtgggatcatgtaaatggagaaaatccctgccatggccgagattgcagcggtttggcctataaaggtcaggattggagccgcgaagatat

SEQ ID NO: 12039 - DNA, 923 bp, Arabidopsis thaliana landsberg
tgcatatgcgtaatatacacagatgctagttgatccacagagatgaatctatcaccttttgatccaacttatcctttgatcgatcactggaatcagaggcagcagcatgcatatgccctctatcagactgcatgtaatcaacatcaggaattactgtttcattcaaactatgcatgtttgatgaacataagcaaatgactagtcctgtggatttggctataccggtagaatgccccaagttttaccaagggattccggtacaagcctcccaggagtgacattgtagagataataaaactataaaatgattagagccagattacgagctaacccccagatctctatgatctgcgtcaccatcagttgagacatcagtccttgaactggtatcagccatactagtttctgtactaatacttgagcaaacactatccacttgtgctcccttttgcaatgataacctttcacctctggtgcagagtttcacactagagggaggaaaagctgccaagaggaaagagaaaagatgattatgaaagaaattaacagatagcagagagagagaactgcatcagtttggaatttgggcacactcacaagtatcaagttattggctcacggaaaccagcttaagtcacactgcaagacaacggttcaagtactaacatggactgaaacaaaacagcggattcaaaatctaacacaagcgagaactaagcttataacacaagcgagaactaagcttatagcagctgatcactcaaaccaataactcatcaccaaggattcaaaatctatgactcttaacagaattcaacagacacatgaaattcaaagaatactaacatttgaaatccataaggattcatcaagataattcgatggaatttggttgctgaaaacgtcatcgaatgaacaaaaaa

SEQ ID NO: 12040 - DNA, 831 bp, Arabidopsis thaliana landsberg
tgagaatatctgcaacttgatcttctgttttttcatgaagcagcttgataatccctttctgtgacttctctctgacgatgtgacaatccacctcaatgtgtttggttcgctcatgaaacacgggattggaagcgatgtaaaacgccgcagtactatcagaaaagagtatagggatagagattcgaatcctcaaatctgacaataaagtggttagccataccatttcacaagttgcaagggctagagctcgatactcagcttctgcagaggatcgagagatagttggttgcttctttgaacgccaagatatcaatgatgaacccaaaaacatagtgaacctagtcgtagatcttctactatcctgacatgatgcccaatcagagtctgcaaaacccttgagtgtgagatccagatcagcagaataaaagagtctttgaccaatagttccctttatgtactgtaacactttgtacacagcctgaagatgagcagtacgaggtgtagaagagtactgacacagcttgtaaactgcgaacgtgatatccggacgtgtgatagtaaggtacattaggcgacccacaagtttgcgataatactccttgtcttccaacaattcaccatcactcttggacaaatgcaggttaggtttcgtagggatagaagaaggttgacaataaagcataccagtggaagtgaggagctccaaggcatacttccgttggcagagagagataccttcagaagtgcgagccacttctaaccctaagaagtatttcagagggccaagttctcttaacctgaaactttccttcagagcattggtcaggtgtg

SEQ ID NO: 12041 - DNA, 734 bp, Arabidopsis thaliana landsberg
cggaattgaagataaacctgctagggttggtaagtgataaaagatgtagttgttcttgtggggttatcttatcttctaaccatttttcttgttttattcatacggttagtacagtcgatcaatatctcacctaacgaatttcaaattttaatctcaaacacttagattcactcattcaccaatattattgctagaaacaagtttgtttctcttcttgaacaggaatgatcacacatctgcgtatgataagaacgtcgaggaagaattgcaaccgagtcaagtgcctgatgagatgataaagcctgactctgacaaatattggtcgcctcatcctcaaaccggtgtctttggaccttcctcctcttcctcgactgacacaagggacgaatttcgcggcggtcaggaggactcagtgatggaggagaaagcttggttccgtccaacaagtctcgaggatttggacaagactcaccattcgtagcaaacaaactcgtcctttaatttgtgttttccaaatgttccaataaaatttgaagtaaaattgttatgctatgtttcgaaacgaactaaacttatggtgttatgaattataatgtatgaatgtatcacttgttctagtttgaaaattacttctggttcatatattaactaaactaacaaagagaaaggtaatggataaattggactttagatcatactaaacaagttatatagcaatgtgattacttcataca

SEQ ID NO: 12042 - DNA, 705 bp, Arabidopsis thaliana landsberg
cattcgacgagccaaagctacgatggataggaaaaaaatatctctggaagctttttttttctatggaattattaaattcaccttgaaattttttggaggaaaggtgaaatactaaaccaagatatatgagcttatttaaaatcaatacattttagtgcatattgctaacttttttcgatcgtaagaacttaattaacaggcagtagaagcttttggaaagaggatatttggtcacacatcattggcattttcaaatgtgaaaggtcccgatgaagaaataagtttttttcaccatccgatttcatatatcgcaggaagtgcattagttggagcacaagtaagtatatactctcttttcgtttaagtatactggtttactcttgtgaacaattatgaaacttttgatgaagttaattaactaattgttttttttaatgtttaacaaggctctcaatatccattttataagctacgtagacaagattgtcatcaatctagctgttgacacaacaacgattcaagatcctaatcgactatgtgatgatatggtggaagcacttgagatcatcaaatctgccacacaaggggaaatatttcacaaaacggaagtttgaaacacatcacctgatgtttgatcagggttatgtaatatataactatatgaagttttgtatttgcaatgaatttttttatggagtatgataa

SEQ ID NO: 12043 - DNA, 1008 bp, Arabidopsis thaliana landsberg
tgtgttgtttaaggtgatcactaaggccatggtgatgagattaaagaaagtgatgccaaaactgattgttccagtgaagtctagctttatacaaggcagattaatcacttataatatagtggttgttcaagaagctgttcattcgatgagacgaaagaaagggctcacgggctggatgctcttgaagcttgatttggagaaagcttagaatcagataggcttttctggaggatactctagaggcatcaggtcttccggcgaaatggattacttggataatgcaatgtgtaacgggtccttcaatgagcgttttgtggaacggtgaaaagacggagccttttaagccttcaagaggactccgccaaggtgattctttgtcttcatacttattatgtgtatggaacggttatgtcagcttattgatgtctctattgctaagaaagaatggaaaccaataagcctgtcgaggggggaccaaaaattttgcacatgtgctttgtagatgatcttatcctatttgttgaggcctctatggcacaaataaggataatccagagaatcttggagcgattttctgtggtatcaagttagaaagtaagtctggaaaaatcgatttttttttttccagataatgtgcatcgagacttggttaagttgatgagtgatgaaagtggtattcaagcgacgagagagttgggaaagtatctaggaatgcccattctccataagcggattaataaagacacctatggagatgtgttagagaagatctcattaaggttagtcggatggaaagggagatttttgagtatggcaggcagagtcactctcaccagatcggtgctagcatctattccagtccattcgatgagtacgattgcattaccgggggctataactaaaagtttggatagagtgtcaagagattttgtgtggggaagtcatacaggacaaaggaagcaacatctactagcttggaaagagtttgcagaccaagatgggggagga

SEQ ID NO: 12044 - DNA, 786 bp, Arabidopsis thaliana landsberg
ttttcgatacaagcgtctatgcatacccaaggttcaataagggaactactaatccgtgaatcccatgaaggcgggttaatggcacacttcgaagtggataagacattaagtgttcttgttgaacattttttctggcctcacctcaaacgcgacgtcgaaaaattctgtgcaagatgtatcacttgcatcaaatcaaaatccaggtcacatccttacggtttttatatgcctttacctatacctaacatgccttgggtagatatttctatggattttgtgctaggtttaccaaaaatcaggcacaaagactctatatttgtagtggtggacagattttcaaaaatggctcatttcataccatgtgcaaaggcaaatgatgcaacgcaaaccgccgacttgttcttcaaggaagtagtgcgtttacatggtatcccacgaaccatagtctcagatcgagatacaaagtttctcggacacttttggcgaacactttggcaaaaactagggacaaagcttcttttctccaccacatgccaccctcaaacggatggacagactgaagtggtcaatcgcacactctcaactctcttaagagccacaatcagtaaaaatttaaaaaattggctagattgtattccttatattgaatttgcttacaatcgtgcttgccattcggccactaagttttcaccgtttgagattgtctatggatttaagcccacaactccactagatctttcaccattaccaccaaaaaagtctagatggtgtggataaagccgaggc

SEQ ID NO: 12045 - DNA, 727 bp, Arabidopsis thaliana landsberg
actatatcatattacatagcttcgaagccaaaaggcacatatgacgtttctctaaacatgtttgagcctattagactgagaaaatcaaagattggttaagagaaacaccatacaataaaacagttatggctttggtgtaggagtcggcctacagaggatgggatgcctctttctgtgtaaagtgaccatacacttggcttgatactcaccaagaggtccatctggcttcttccttaccatgaatgtaatgtatgacttcgatttaggtcctccgcgataataacctctcacaacttcaaccaactccacattcaaatcctacaaccacaataagaaagcaataataatgttaaagccaagcttgcgttgaatagttgaaaatttccaaaccattacttcaaagttcaaagaagcttgtaaatcctgtcaacctaaccattgctactgttaacacccgagattgaatcctcaagctcagataaaattccaatcgagacctctcttagagccagacctttagttttttagagaataaattagattttcgttttcgtgattcagtctaagctacctaactagaatggaaggtgcgtgatagattaaacaaacccacaaaaagaaaagggaaaaagagagagaacaaaaccttgtcttgggttaagttttttggaggacaaccataagaccattcttttttcccctgtaactcggcgaaaaagttttttta

SEQ ID NO: 12046 - DNA, 635 bp, Arabidopsis thaliana landsberg
  unsure (1)..(635): unsure at all n locations
tgccataatgactcactgtaacccccatgagggaatattccggggataaactaggtaattgagggcctaaatgtccttgacagggtcgggcagtccctcgattacttataaatacccctgtattgtgccaaagnnnnnnnnnnnnnnnnnnnnnnnnnnnnccccgtgttagtgcaacaaatcctcttccccattccccattggatctagctgtcctgagaggcaggttctagcatggtacatcttggtgctccctgggtgcatggagaacttggagaggtgagcctcatccagaattttcttcctgaggtccctatttttaggaatgaccagtccgtcttcaaaccataatattcccttactatcctggcggaaatacttatacttctcaattttttggttaagattttccttgacgatttgcactcccttatcaccgaattgggccataataatttggtctaacaaggttggttcgatggagatgtagttcaaggtactagagggaattacttcaatcctcattttactcaactcgtcacatagggtattgatgcgaggatcattgccatacaattgcattgtgactttcgacttagggcatctgctaccacattggctttcccagggtggta

SEQ ID NO: 12047 - DNA, 1137 bp, Arabidopsis thaliana landsberg
aatcaggtaaatagtaaaaaaaagagagagaaatttttaagctttagtaaccagtaaacaaacatgaccagagaaaattaactattaagaacaagatttgccaacagatatttgattgaaagaactgaaatcaattccaaaattcgaaaagcaaatatattatttcaatttcgtaccaaaaagggaaagaagattacaagtttagaaccctaaaagtgacagagacacaaaaggttttctagctcgaagtgagggagagcttctggcttgaaatggagggtttcatgtgcttaaggttttaaaatcaacggtatcatagtagttaaccaagttggatagaaattgtcaaagaagaaagaatttgtgtcttctttcatttaacaatctgtgccaataaagtattgaacatgaagcacaatccccaacaaaaaagttacagtagacttgcactacactagccatatcaaaaaaggttctacttgtgttatgctaaaaaataatacatgaagctgacttcatctcgtgtgtggctcaactttggctccaaggcattaataagagataaacatgacttactatcttgcaatgtatagtctagccatcgaggtggcttggaacaccaccaatgagaggccattgcgcatctgcttcagattgaatatcggaaaacacatgaccttgtactatcaagaacacagcccgataaggtttggagagttcatgagaacaaccatttccatacacacgagtaagtcatttttgtaccaaaaggagagaaagagtatatacccaaatcatggatgatgtcttctttcttggtgccatgttttgctgattgctgcaatttcctaaaatctgtaagaaaaatttaagctttttagggtttagtaaactgtaaacaaacacgaacagagaaaaaaaagtaaaagcataacaacaccgatgaacaatttactaatctaaaactgattttcttttccagaattcataaacaaagaccgactacaagaacaagatttgctaacagatataggaaacagagaatcgaatcacagagaatattcaattttgtaccaaaagggggaagaagattatgtacctaaactttggatacaagtttagaaccctaatagctgc

SEQ ID NO: 12048 - DNA, 856 bp, Arabidopsis thaliana landsberg
atttgactaaaatgaggcggtctgcaatttccacaaaaaatcagattttttccaatccactttcaacttccttccatcagccactgaaacacgagccaaccctgcatcttgactttggcttcccaacttagttgctacctttgaatcaataaaatcgtgaatagaaccagagccaattaaatgaacatgatcttcttcccataagttcctttaacccgcatagttttataccctacattacccgaaacaacatccacaaaggtttgtggcatcttctattcatcttcaccattcaatacttccaatgcatcctcaaattcatcttcaacatccatacaaatgagttgcgtcttcctatttaccaaataatgttctagtgtacttctcatcacaaaagtaacaaaggctttttgctttcctttcactcatttcttgttgagacaacttcctcgtgttgtgtggtttatagtcgccttttttattgtgattttttccttgttattgtagtgctctgtccgcggctcagattctctattggacctcttgtgaccacttgctactctagatttaggctgccaaggtgtagaataaggcttcttaaggtgtgcctttacatacagcttccctaacctaaagcaatggcggtccgtttgaggctgaaacattctaacatgcatctgagtatccattcatatacctgccaaatatacactcaccaaatactttaaagattaactttaattgtaatcaattcaaacttttggtgataatcaacaatttcatccgtctcttgtagcttcttcaactcagccataggattattacaacattcatcatcaaagcgctccttcaacaa

SEQ ID NO: 12049 - DNA, 618 bp, Arabidopsis thaliana landsberg
tgtactaaacagcgtgccgtttttagtttttccataaaactaccttccgatttacgtggagactacaatttgtaaatgtaacggtattgtcgaaaattttcctactggagaatggttatggacttgaagcttatagcagcaggattacgtcattgtgggaaagtacaagcctttaagcgtggagaatcaattcaagctcatgtaatcaagcaagggatctctcaaaatgtgtttatagcgaataacgtgatctcaatgtatgtggatttcaggttgttgagtgatgcacataaagtgttcgatgaaatgtctgagagaaatattgtaacttggacaacgatggtttctgggtatacgagtgatggaaaacccaataaagctattgagttatacagaagaatgttagactccgaagaagaagcggcgaacgagtttatgtattctgcggttttgaaagcttgtgggttagtgggtgatattcagctggggattttggtttatgaaagaattggtaaagagaatttgagaggtgatgttgttttgatgaatagtgttgttgatatgtatgttaagaatgggagacttatcgaagcttatagcagttttaaggagatttta

SEQ ID NO: 12050 - DNA, 994 bp, Arabidopsis thaliana landsberg
ccatacatgataatgttgagagtagcacatatgaaacccattgaactagaacgcgagtttgcatctccaaacgcagttcttgttcacgcaatcgcgatagctggcaaacacacgttcaaagctagaacgcctgctactgttttcagttgaaaaataaaattgaaatcagaaatcaattagtttcaaatgaaacgcgttcaagctaagtattctagtctaatttatactattatagtattatatagcaagtagacataatctaaactaacttattgattaaacgtcataattaaaatctgctaatcagatgtgaatctgagtcaccaatgttatctctaatataaatgatctgggggcatcaattaaaaatgcatattcaaacaaatttttatatcatatcaatataatatatcatataaaaacacataataaaatctcactatcacatataatgcaaactgaaactatatatataatatgtataggtggaaagaaaacttacgaatctggatttggggacaaagaagaggaaaatgagaacgtagatggattcagcaagagcaccaaagccattgacagtagaaaccaagtattcaccaggtgtcactattccgtaatatgtccataacgacgagctcattaacgtgcaaatgtacggcaaacactcgtattcctccgtcgatctccgctgcactatcctccaaaacgtctccctaattatcattttaatgtttaacttaatttccccatttcttatagttcaatcaaatgttacaaattaatcaagatcatatgtagaaagagagagttaactcacacaggggagaggaagacaagcaccgatataacattccctgcaacgatcatatatataaaaataactcattttatagtataagttacataactttgtgggtatatcaaatatgtagatgataataaacacgtgcaaataaaatgggcatgttacctatgactccgacataaaaactca

SEQ ID NO: 12051 - DNA, 927 bp, Arabidopsis thaliana landsberg
acgtcggaatgtggctccgaagattgcgacacccatcctactcaagacttgatgttctttctgaagatttggggacttctaaacataagaataaggataattctaactgtcatgtttgtcacttagcaaacatcgaaagttgtattttccatctgggaacaacatatgtaattcagcttttgagttgttgcacattgatgtttggggacccttttcagaggaaacaagaaacaattgatggttttaaatatttttttactgtagttgatgatcactccagagcaacatgggttgatctacttcgacataagaatgaagtactcactgtttttcctgatttgatcactcaagttgaaaatcaatacaacactaaggttaaatctgttcgatctgataatgcaagagaattgagctttccagcattctacaaagagaaagggatagttccatatcattcttgtcctgaaactccagaacataactcagtagtatagagaaaacatcagcacattctcaatgtggcaagggcattaatgtttcaatccaacatgtctttaccatactagagagattgcattctcactgttgtgtttctgatcaacaggactccttctcagctgcttgctaataagactcattttgaattgcttacaggtcagaaacctgattattctcagatacggacttttgattgtctttgctacagctccacatcagctaagaagcgtaacaagtttcaaccaagatctcgtgcttgtatctttcttggataccctgcaggtttcaaaggatataaagtgttggatatggaaagtaactcggtttatatcacaaggaatgttgtctttatgaagttgtgtttcattggtgaagcctcaggattcttttctgctgctctgtagtcttacaccatagattcttgctgca

SEQ ID NO: 12052 - DNA, 1165 bp, Arabidopsis thaliana landsberg
agagtgtacatttcgcataagaagggtggttacatcttgatattatttcttgattaaatctatgaattaatggtcatggcctaaggagtaaacttgccattcaagtttatgaattgattatgagagttattttttgagctagatatgtacctaatggtcaaataaagatacataggagaaaaaaaaaaactataaagagaggtggagaccctaagaaaatagactccatccttttttttgtaaaatggttttcaatgttataaataaggtccaatgggctattttcggatttaggatcatacattttcccttagactcaatccacttacatataaccagactaaaccatttattacaaaactgatctaaaccgaaagctgaaaatcataatctcatatcgtaaaacacgatctgagccgccgtccaagaattgcagaatctcaccggaacagaaaccctttggggagcctagacgagattcgtcgaacggagatggtgattcaggatccgttgtcctcctgccaccgtagagcagttttgaggaggaagaggcgatccaggttgccatagtcatgaatctcctagctcagtcgagagagttgacggcagtagtgagtagatctcaagaccatcgacggtggtaaagcctcagcggagcggagtcgacctcccccatcaagcggcgacccaatgaaacctccagaatctttagacttccgacctaaccgccgtcaactcttgttcttcactgtgaagtctcatccttcctctctgtgaagccacaccaccgatatagctcttaccgacagtgtctcacataatcttctcccctccaccagggccgactcaatatattctctgtcattgtacaaattttcaaatatggcccttttatactaaatattttgagtttggcccttacatttagttaaaattttattatggccctcagatttagtcaaaatttctttttggcctcaaatttgataaattttttattttaccctttaattttgatcaaataatttttggatcatgtgcaattactcctcttgcacttccccaacgccgcctttgcttttcactgcttccttgattttgaatagattgaattgccgagaagatgtagcggatcactgtttgagcaccatgtgccaatgggttt

SEQ ID NO: 12053 - DNA, 969 bp, Arabidopsis thaliana landsberg
tatttatagtaaagtgaagaggaaaataacagaaacaatttgtaagatattatatcataaattgcagacacaaaaatggacaaaaatccttaattattttattatcaaatgatttgatctttctttgtattttatttaatgtgaagaaaataaagggaaaatatagggaaaatctctcacatttatagtaaagtgaagaggaaaaaaacagaaacaaattgtaagatattataccataaactgccgacacaaaaatggacaaaaatccttaattattttattatcaaatgattttattttattttaatgtgaagaaaataaagataaaacatagggaaaatatctcttgtttttcatatttgaaaaatatattttagaaatatgatgtaatgatataaaagaaaatctaacaatagtatatcatatatggtatatttcggtttgaaaaaataacacatgtataaagaaaattttaatttttcaggaaaatagagaagaacgagaaagagaaagagagaaagtttgttaagcactttgctctcataccatattattcataatcagaaagtaaattctcataatcgaatcataatatttcaactagtatttataatacatgtgcatatagcattttactaagctaaaggagacttagtgtatttctaagctaaaggagacttagtgtattttactaagctaatttgagaggtcatgttgtggattttcatagattctcattagatgaaccctcaaaactattatataacataactataatcgatgtagaaaaaacagaatctatgacataccacgagaagacctacttaaaaaagataaacgttgaatggaaaactaataaaaactagctggaccaatctaaattaaattacaaacccatattttatctgacttaacttcttagcttgttaaaaaacattgtacggtggaacttatctagtaaaaaagagt

SEQ ID NO: 12054 - DNA, 429 bp, Arabidopsis thaliana landsberg
  unsure (1)..(429): unsure at all n locations
agattacgtagccgtcaccaagcagtgccgagcgactccaacgggtccaggtgccgctccgtggctcgccgatcgtcaacggaaagggaacgcgaaaccataattcattagcgatcacgtctcacgtcattacatgtaacaagnnnnnnnnnnnnnnnnnnnncagatgtcggcgttgaccttatatcttatatgtatatgatccatagctccaggcgatattgatattggcgttggcaggaatatgacannnnnnnnnnnnnnnnnnnnnngatacccgcggcccgcagagaggcgagaggcatggacaagcaacgatcatctgcagactccatgcgttctgcgactcgagacgtcagtgcgacgtacgtcatggatactgaatgccgaacgtgcagcaagtggacgttgaaccgagaggcgagtaga

SEQ ID NO: 12055 - DNA, 1029 bp, Arabidopsis thaliana landsberg
  unsure (1)..(1029): unsure at all n locations
tggcttaacttagcgtaccaagaactccgttgatccagtaaggtacaagatcctctaggaagctaacggggatccctctctcacttgttacatgtgtactgcctcacgtgtgtgattgttagaggataagccatttgtagatccttgaaaagctctatcacttctcctttcatttgtacgtacgcatcttttaaataaaaaggaaagtttagtttattgattcaagtttctccttttttctcttggaataacttagtgttgtacagattcccttcactagtattctgttaaatcccttcactaatattctgttaaatctaattttttgtgctgatctcctgaggcaaagtttgtgaacttatcataaaggttttcacacccttgaatgttattccttgactaacctactacctttcatccgctacctaaggaacttaacctgtgaacttgtgacaaaaagtcgagtatcttctttggagcttacatcacacaccatagacttatcatatgatacttcatcgatcaatggcttcacaactatattcgcgaatctccattatattggaacaattagtgagcatcaacgatgattgaacgcatatgaaaagatagaaaaatctagcttttatttatagatcgaggtatgtgaaaaaaaacaaaaaattatttgaatgaagtaacaaaacaacaattagtgagcatcaattatttctttttcaacagttcattacttcattcacatagttgatcctcactaattgttggtttgtcgtatggaaaccttacttcattcacatagttacccaaaatctatattggttattcacatagttacccaaaatctatattggttcctttttttaccaaatatacactaaaatatccagaaaaaagctaaaacattggttatttttattcaaatatacgcanatatttctgaattactcgaaaatatctatatattcggatttataattgntatgttaggtatttggtgattataagcataaatttaactaatattcttag

SEQ ID NO: 12056 - DNA, 788 bp, Arabidopsis thaliana landsberg
cgataaccaggaattatttaaactttaattaacgaaattaccaacctttgatttaggatcaacaataccctaaattttaatggtgaaatgaattttatagccagccagccctttggagtaggttttctttcataaacgtcaaacataacaaatactagtcaaaatataacaaatctaatttccacgagcactaatgctttcgtttgcccttgtctatgggcttatgaactcagttgctcgtatattcttcaatatttttggtttatcaaaaaataatgagtagttgagttatcgatatgttcaatagatattttagttagtaaggaaacggtgttgtaacttttttttgttataaacttgtaatgaacgtgtacttaaaattacatcataagatcgggtcacgatggagtaatgtacttatttcatactcggatcatcgatcgattagcgactcttgggatcaaacctattttgactttgattattttgaaagaaaatagaaaaaagaagggcatagatgaggtagccatacccttattaccccacaattatttgatttgacttcccatgcgtctttccgcagattagtagccgccattcgttattcataattacatcagcattgagtgccataatatatataaattggaccctcagtataagaaatagtgattttctctaaaaaaaaaaaaacgtccaggtttgaaaaagcctaacaagactctttgtaatgatcattttgaaataaaaggtatagactctaaagaatgggtgcttccggccaaaag

SEQ ID NO: 12057 - DNA, 1030 bp, Arabidopsis thaliana landsberg
acttttttgctcaaatggtttgaacctttcagtcttgttaataaatccgatgtaattgtgacattgtagacagccaaaaaaaaaaacatcacattcacaaatcaagaggcctaactaaaagattaggaacttttaaggtggtttaaaaacaatctaaatgttcactacgctaaaatttagaacaaaggaacaaagctgaacaaagctgaacaaagcttcagctatggagtagagaaaaggagagattaagattaagatcaatcttcgaagaagcaaaacaatctctgaagatgaatggaccagaagaagatgagactgcttcgcttgtttcactgagtgatgatgaagcattgcttttccatctttgttgatggttatgaggatgattcaacgacagagacagcgataactcttcttcttcttcgtgttcgttttctcgccatgtgtttttccaaatgttcttcgtgttctcagcctaaattccaaagacataataagctcttataaattagagactataggttatactcttcttggtcaatatataaatttgagaatgtccgtgagaacataagattagtatttgtaataaatctactaattcttctacattaatcaacggattcaacaattctaattgtctatagattatagtatatctaaaatcaatgaattaacctaatcaaaacaattatgtactccttcaaatataggtggtgattttattttactaatgattttatcaactcttttacccatacaatgggttagttgtttatccaaattataaattattttactaatgaattatattagtgcttactacttaagaatttattgtgacaataaaatctctatctgaaaattttcagtaccgagccccatgctaccctagtgttgacccataccataacaatgttcagtggtttagtgagtgtttatctgagtcttaaataattttattattgatatcaacttttcgcaacggctatttatgaaaccatatgataaaattgaatatatttaatac

SEQ ID NO: 12058 - DNA, 1480 bp, Arabidopsis thaliana landsberg
cccaagaattgtaagagaaattaagccgaaggtaaaagtttaaagcctcgaaaattaagccgacagacaacataatgtcccgaagactaaattcaaacctcatttcaaataaggaaaaatatttggttagagaaaaaataattatatggatgttagacaccaaatatctaactgtacatactatcaggcaattttaggattaataaaacaaaaattaatcacacctccccatatttgattaatagccatttggccttgtctaatttgctgcaatttcttcgtaaaatgagcataagaggataatgagcttatcaagcatattataataattacatgattcataatttgttggaaatctattatataattgaatcatttggacaaatcgctgataagaaatatattagtaattaagagaatttcctctttctcttatctctcacatatccttgagagagagagagttcacttgtataaacttttgtttccggttagccggatatgtatatctttcgtcttagtgcgatctcaataattctggctatgtgtcagacttttgtcaccggttttgtccggttctctcgccgtgacgagcttagatctccatcttaagcgtttgtcgacatctccgccttcttcataattctctttgtttccaccaaattgtttgaggaataacatcttcatctcttcgttttgctcacaacgtacgagcaaagatcaagctacatcaattttgggtgtggccaatgatgaagcttccccgacgatggtgctaattggagattttgaagcagctctttagacttgatccggcagaatatcgacatctaggcgcttgcattcgagatcgacagaaggcacaaagatcttcatcggtcactggccgattgatggtggcaaatcagaactgcagtggtgtttggcgattccaacggtggagctcgtttgtctcgacgcgtggcgaaggggagaaacacgtcctccacgcgtgtcaacacttaatcattattgcgttaatgttttattatattttcaaacgatttgggttggacatgagtttaattttcgctgtaatgttgggccttctgtattttggccttattggacttttaatggaaatagtcgacaaaaaaaaaaaaaagaagaaatatattagtaattcttcacattaaaaccataaaatacattagtaatttgatgcaaagatattattccttaatggaagtgatggaagtcgatttttaaggcccaaacaaaataaagcccaaaagacaaaaatctaaagttttgaaatttccttttctgattctgaagtttccttttttgttttgaaatttcctttatatgattctaaagtttccatttgttttgttttttttcccttttttcgattcatagcacaactctatataagaagcaagactcttcatcaatagtggtgttatctgaacaactgaaagagaatgagaaactccca

SEQ ID NO: 12059 - DNA, 393 bp, Arabidopsis thaliana landsberg
  unsure (1)..(393): unsure at all n locations
cgcctaggaattaagaggcaatcgagatatattattttgaatgaacaactagatcttgccccccgagagggtaagatcctagggtcatcttggagtcagcaagccacccaagacggatctagatgacgtagagtcgaataggggtggaggtggatatgcggaaagctacaactagaactacnnnnnnnnnnnnnnnnnnnnnnnnnnnnnnnnnnnnnnnnnnnnnnnnnnnnnaatgtgttcgggggttctcaatcggtcgtaccnnnnnnnnnnnnnnnnnnnnnnnnnnnnnnnnnnnnnnnnnnnnnnngccaacaactcccacgtgattagatggataaccacacacaagataaggataatcacccgagtctaatcgcggggcacgca

SEQ ID NO: 12060 - DNA, 1148 bp, Arabidopsis thaliana landsberg
attgctgtagaaaaaatcatgtgttttagttagttcaaaattttaggtaaaacatattgaattaaatcttcttctttcaacaaattaatgttttcaggatattagaagagaaattaggctgtgaaagaataaaagacaaatgacttagagatattatttcctttcatttttggtgggttgttgaattcatttttttttgttttaaagaatattgagagattaatttaatatatgttttccattgtttgtgcggcttgccaaaatgagaaagttaggtccgttggtgtgattcaacataaactgattaggtagtggatgcacaataagtgctcgggcaagtgtgggctaacctatgaggaaagaaatatggttatcgtcaatgtcgcaaaatcttgtccaaaagagagatgtctgagagtgttgtggaaggatgtagatttagagaatatattcttcttattgatcataaacatgtgtacaaagtatatatagagaggagattgtcgagataaacctaaccgactatacatgttaatatacaaactcacaaagcccatataatctaacttagcccaataaaggagagtaaagtgaggtgttggtggaaactaattcatctctaaaaatctggagaaatcggacaaagatgatgaacttgatgatcaatatagtttaggcttttagggaagtgtgaagatgaacttgatgatcaaattttagttaacccaagttaaatttgggttgagttaaatgcttcatttgcttttgcatatgatataaaaggtgatttgggctcatttgagaagcgacacgaagaagagtgagagcaagagcaaaaccacaacaaaaaattgggtgattgttgagttgatgatttgaaatatatcgattgtcttattttagatgcataaatgaatatttgtagtatgatgctaacgtcaaagatttttgaaaaaacactgataacatatatattcaaagaagctaacaattgagccgaaagttgcttaattgttttgagattttactatgcttttccttttgatttagtggtttttttcttagttttggattaagtttaagctttatttcctttgatattatttaaaataataaaaaaacattatatgttatgttataataatatc

SEQ ID NO: 12061 - DNA, 797 bp, Arabidopsis thaliana landsberg
agtcaccattcttccctccgtcacagccaccaatattcgtgttaccgtcacagccaccttctttgcctccgtcacagtctcagtcaccttctctcgcttgcaagtcaactccataccctaagctttgccgtacgatcctcaacgctgtcaaatcctcaccgtcagatccttaccgttacggcaaattcactataaagcaatgcctcaagcaagcaagccgtctatccaaagtcatcaccagttacgcgcggcgcgtggaaagcaaaccaggctcggccacggccgaggaaataggggcggtggcggactgcggcgagttatcggagctgagtgtgaactaccttgaaaccgtcacgacggagcttaagacggcgcaggtgatgacggcagctctcgtcgagcatgtgaacagtcttctcagtggtgtagtgacgaatcagcagacgtgtcttgacggactcgtggaggctaagagtggtttcgccgccgcgattggttcgccgatggggaatctcactcgcctttacagtatctcgttaggacttgtgagccacgcacttaaccgtaacctgaagaggtttaaagcctccaaagggaagattcttggtggtgggaactcaacctatcgcgaaccgctcgagactttgattaaggtaattaattaaaacttgtttctaattcttttcttttttcgtttttgtttgtttgtttatactagctgttatacattcctttacatattattataaagttgttaataatctagttgtaaagacattccagctcggaagggggac

SEQ ID NO: 12062 - DNA, 977 bp, Arabidopsis thaliana landsberg
ttcctcctaaccatagcaacttctttcctcatgggatcatttaatccttcaagttcctgaaatgcagtttaaccactgagcttcttagtcatcgacataacatcacccaggaaaagcaaattgttcttttcatagaaaggaaagagctttgatccacagagctaatctctatcaagtagtgctataaatgtagaaactttcactgttctgcccataaattgaggggaaaaagtactaaaaccagagactaagaccagattcataaactttaacatcacccagaagaagcaaatggttcttttcacaaaaaacttaatccaaatagcttatttttagcaaatccaggtttacttgctattgatcatttaaaatcctaaaacaaacacaaaagccccaaaattttctccccaaatggcataaaccacacaaaaaccaaaggaaaattataaaagaatttgttcaatgcaattgtcagatcttgaaatttccaacagttgggtcctacaatttccccttaaacatgaattaaatccacattctatacaatataaaaaccccaaatgttcaatttcacatcccaatccaaaaaatttccataacaaaaaccaaaattgaagcacaattctccaaaaaaaaaacaatcttttttttatatatgaaataaccaatatagatacatacctcacggatcaaagcaagacgcttagtctcttcttcgacacgaccaagctgagcttgaaccctttccctaatctccatcttcttcttcgggatctcttcttctttcgctctaaacgcagataacgcagttctagacatctcctcatcttccttcgacatttggctgctgaaactcatacttcccgacaactgagctcccaattgtcggctatgcaccgccggagccaccggcgtcggctgcgacgtctatattgcctgcatctccttcatcttcactgaaatctcctctctttgac

SEQ ID NO: 12063 - DNA, 729 bp, Arabidopsis thaliana landsberg
attgacatatttagaacatcttcctggtgctttctctccagtctcgtatccaccacgactaaattcataaggttcgtttatagtaacccaatgcttcactctatcaccatatttattgaaagcaaactgtgcaaaatcacggaaatcctccctatatatgagtttcagaacatattaagtaactgcaaaaagataggagacataactgagataacatagatcaatatttggcttagaggacttacaaaatacggtcactcaagaaaccgccgtattcatcttcaagagcctgaggtacatcccattgaaacaatgtgacaagaggcgttacacctgcaaaactcaatcaagattgccattttagccacaaggttaaaggaaaaaaaaaaggagatttcatatgaaataaagatgtgggggaatgtgtaacaaccatttgcaatgagctcgttgataagatcattgtagaatttaactcctgtttcactcactcccttgtcttttttcccatctgattgttttcaacaacaaaatgttgttagaaagtgcatctcataataaactgcaaaagaatcattaaccaaagaatagatctttgtcttacggggaaatattcttgaccaagatatagagaacctaaaggcatccatattcagttttttcaatagttgaacatcttcctgcaacattttcaaaaagttagattagatcaacatcttcagtggggag

SEQ ID NO: 12064 - DNA, 1280 bp, Arabidopsis thaliana landsberg
catacgtgatgtaaaacattgcaccatctgagtgcggcgtggcttgccataagaatataaacaaggtggggatatatacattcgggtgcttaatggcaccccatagctgaatcatgttctgctttgaggtctgaagaaaaccaagactgagcagcgttatattctctttctgccctgatgctggtctgaccacacgttgttcattcacgagaacagcaactgctgaagttatcaagggtagtaaagctgtcaccccaaatacaaacctgaggtataacagcttttagaatgccacttagttagttagctatgccacggaataccgaaaaagagaaaagctactgtttgcgcaaattgtgaactgtacctcacaccatatgactccaccagggagccgctaaagtaggaactcacaattccaccaaaagctgaggatccccagcacaaagactgcagcgatcctgacacgctttgtgactcaccacgagcccgttccactaccattgagtctactacctattaaaacgttaaccacttaattaatatttcaatatatccaactctatcttgcaacttaaccaagctaagttaaccagaatggatttgaaaacttacaacatcagaaaaggcgacagagagggaaccaagaagtatacaaaaagcagcactatatttactgtcaacaaaacccagccatcaaactccaagaaaatgcaccaagaagtcccgagagaactagatatgacctctttcgataaccaaatagaggcactgaatcactgcaaaacagaccaacttccttaaacagttatcacagtcaagaggtatagaggtgataaagaactcatacctgataaaaccatagagaggcttaacaagccacggcaatgaagaaagacccgttatcacagctgtctagtcaagaggtatatatttgtcagcctataaagagatattcccatgaaagtccaacaaggaactacaaaaagcatacctcagcaggatcaagatgcaagtcatcttttaaatagaaactaacagcgagcctagcgagtcctaaaacaccttgaacaaaatacaccattgctacagcaacattatctggtgataattcaacaccgtagaatttgattctgctgctactaagatttcttcctttacgagggggaggctgtgttctaatactagaagtagtatctctgtctccttctacatctgtattcgatgtatctccttcagctacacctattcatatacacacattactgaggattgggtta

SEQ ID NO: 12065 - DNA, 572 bp, Arabidopsis thaliana landsberg
ctgccaacgccggattgtcgaccttcctggccgccgccagcgccgccaagccgaagatcgccgactatccgttcaccaccctcacccccaaccttggcgtcgtggacctgtcgagcagcgagcgtttcgtgctggccgacatccccggcttgatcgagggcgcgtcggaaggggcgggcctgggcacccgcttcctgggccacgtcgagcggtcggcggtgctgatccacctgatcgacgccacccaggacgacatcgtcggggcctggacgacgatccggggcgagctggaggcctatggcgacgagctggccgacaagtcggaaatcctggccctgaacaagatcgacgccctcgacgaggagaccctcgccgaaaagatcgccgaactggaagcggtgtccggaaccaagccgcgcctggtctcgggcgtctcgggccagggcgtcaccgaacttttgcgcgccgcctatcgccaggtgcgcatccgtcgcggcgacctcgaggaagagatcgccgaggacgatgatcatgtcgagggagacccccggggctggacgccgtgagccacg

SEQ ID NO: 12066 - DNA, 1076 bp, Arabidopsis thaliana landsberg
ttggttcatgacttgtcattgcttcctctagtttttgtttaaattcctctatcagcttttgactatttttggtagcttctctctggaccaaaatcatgatatctctacggcatttattgatcttttcctccacatcttcctgatcatcataattccaagcttcttatattaggtgactcacttcttcactttctttaaggcgtcgatcatatctgaaaatgcttttctttttcttttttgacagatcaaaatgggtaataagcggtctatgatcaaaaccttcgaagcgatgatagacacatctgctagctggataagcttcagcccaagcaccattgatcatagctctatccaacctacagtgaacaacgtgctcatatctctttccgcaccatgaaagaaaattccctgagtggcgtaaatcataaagatcacattcagccatgaagcttcttatatccacgaaggtaccttcgtgtctttctggtcctccttgtttctctgtagcatcaattatatcattaaaatcaccagtgaggaaccatggatcttctctgtttgaaccttgggctgttagtagattccaaaccaatttcttttttgctctatctggttccccatatacaaatgttgcaaaaaagtgtttgcctgcagccttaatgcgtgtatctataaaattgtggcaggaagataatatctcaatttccaactcttttttccagaataaagccaggcctcctccgccgggactatgaggagagataaggaactgagaaggatactgcatccaacccagagttttgattaccatgtcatccacgtttttcgtctccatgaggaataaaataccaagtgagatgtcagaatgaatctcacgcaattgccggtctgttatgggattccctaacccacaacagttccagctcaaagcctttaaggaagaggatttgatggattgtgaaaatccatcgacggcttgatcattgtaggtattaatgttcctttaggggttgcattacttgtggatggattatttgcatctccctgtaacgtcaacttctttttaacaggtggtt

SEQ ID NO: 12067 - DNA, 1051 bp, Arabidopsis thaliana landsberg
acttggaagggcctggcatggttacaacgacccatctacgctcttaaaatttgttattgaaaaacacataacaaagcgaaagtaatataaaagaattattttgatttatataaaagaatagatattacaccatattgtctctatgttcatctcatccccaacaacaacaagtgtccacgtcaaaatgataatagtagtaaataacaaatatgaacgagaagaagtaattaaaataaaacagtaatagaaagcagaggatccaaatccaccaaactcaaaagctctctaagccaaaacgacagcgtataaagctccggcaacagctgttctcacaaggaaagctttgttagcccatgcggcacttggtgcatcagcagcaccgtctggtcctggagctggagacgaagttggagttaatccagcggaaggaccgggagcaggagcatcggtctgaggaggagaagcaaccggggatgttgttggagaagtggtaggagcggtggtaggagctggagttggctcgttaactggaacaggcggtgaagcaattggtgaaggtgtttctgctgtcactggaggaagcgccgttggtggaggagtaacggtggttggtgctggtgcaggagcttgagcgagacatgaagtggccaagaaaccaagaaagatcaaagcttgcattgccttagaattcatttttagaatctctcttctttgtctgactcttgaaactctctctgtttaatgttataaactcttctttatttttgttgatggtgtagaacaatgagagaagagagctctatatatacgcgatggttgggaaatagttaataattaattattggtgtgacactaatcatgcgaaccacatacaaaaatacaacatggcttagcttttgaatggcggtttaaaataattgttgtcttttttctttcttaaacttgacgtgtttgagtttttgaagttttcttgaagaatcatctacatgaaggagcaccaaacggatacacagatctctgccacgtgttttctcttaacgatgttaattct

SEQ ID NO: 12068 - DNA, 650 bp, Arabidopsis thaliana landsberg
caatgtctgctttagctaaagccggggcatcgttaagcccatttcttttatcattgttggcccttggatcttgaaatgatcaataattcttgctttgtcttgtggaacaagttcagagtgaacaatatccaaagcattctctaactgtcaaagttataactttctgattatatcactcacaaaatagagacgggaataataaggcaatagctctgcttcacctgttcttgagtagacatagctgcgtcttggttatctcctgtgagcattgcagtttggattcctaaagatttgagttccttaagagcttgagcaaccccatatcgacaaccatccaaaaggttgaaacttccggtcagttttgctcccatgtatatgtaaccaatggtcttacctcgcttcatagtagcttcaatatccggaacattatctaacatccacaaagaaaggattttgtaaaagttagatagacagaacaaaaacaacactcgagacagttcgaaaaacgaatgtagttaaaattgaaaagttcaaagacctgttaagcatccagctctctgtgctattcttttgtttccaatgtcgatatcttgaccatctattctccataaactccttctcctggaaagttctgaaagttctcgactata

SEQ ID NO: 12069 - DNA, 692 bp, Arabidopsis thaliana landsberg
cactatatttcaatgatattggtgcatttttgacataatgcaataattttcgataaattatgacaaaaatttggtaatctcggttcaatttagctcggttcgaggtttttaaccgaaccagtaactgaatgtcatgtttcctcttattggttggtttagaaaataactgaatctgaatcaaattaaccaaaattttgatttatctcatgcaggtatgggaccagtgagtccagagtacgcaaaatggggacaaatccaacggtcaatattcaaagacaaactcttcccagagtcagatgatcaaacggctctgctttacttactctacaaacacagagaagtgtattatccaaagatatacctcgaaggagacttttatttcgaaggatattggttagagatcgtaccgggtttatccaacgtaacggaacggtatctggagatggaaagagaagacgccacgttgcgtagacgacacgcagagaaagtgagcgaacgatacgctgcgtttcgtgaggaacggtttttaaaaggagaaagaggcgggaaaggaagcaaacggagaccgttcgtgacgcattttacgggatgtcaaccttgtagtggtgatcataacaagatgtacgatggtgacacgtgttggaatgggatgatcaaagccattaatttcgctgataatcaagatgatgcgt

SEQ ID NO: 12070 - DNA, 808 bp, Arabidopsis thaliana landsberg
gggctattaatttcaggtttatttaaaaaggaaaatttaaaaaggtcccagaaccaggcaaccaattttcttagagatatcagaattatagccgactcttttttcagctcattcacaaaaaataatgtcttcgagttctcttttttctgattgttcatcctataatttgcgttaatatcctcaccaaatcgtgttaatcttctcatatgattcctgtctcttcaatttcggtgtctccgtctccgatctcagtctcctcagtctccatctcgatcgcaaaaatagagttaagttttcggaaatttattcttttcaagatgtttgtctttttctgatgatggaaatgtcgggtaatggtcaaggaaattttgaaaatttgggttttaccaagtgattagcttttatatgcttcttcaatttaggttccaaatgaattaactcattggtcgtagagacaataggctattgtctatttcgagtcaatacccttttgatcgctcaaatggcaaattgatattgtttattacattggcaagcgactgatttgaaaccatgtgttgctctcaaaagatggacttagtattgtgtagctcttatttccaatcatattggacttttattataaattcttttttgacaatatccttggtaaaccaaacaactacttaatgatttgctaatagggagtttacagtttgtaaatatagagaatttacaattttttttaatttctaaataacaggatagggaggaacgaatcttataagtcaaaccatcgattttcaaaccgaggttaacaactttcacc

SEQ ID NO: 12071 - DNA, 886 bp, Arabidopsis thaliana landsberg
acggtatgagtaagtttagatttactatattgttaataaaaaaatatatcaagaagtttgttgcaattgatagactcttctttaatggtcaaaaccaaagaacatatatatgtgcaaagaaactctataaacctgtataacttttgtttgttcaacattctgaacacaaaacaacagtaaagtaacaatgagatatatagccaaaaaaaaaacagagtagagaagaataaaaccaacgtatccttccaaccaaatgaagcatattatgagataaaatatctcatacctccttaagcttctagacttgcagtgttacagcttcaaaggtgatattgattcatgtgggtgggggagtcgaacattggtcaaagaatactgtgtatatgaagaaaaatctgattttaatcacaaattccaagtgactgatcttgtgtaatttgagaagagatccaacagtttatcgagtgtatccgggtgaaatttccttccaaacaagtaacacggtctttggattccgttccacatacaaggcatccatatttcttcaccctgttgttagccaaaaagaaaggtgttgttttatataaaatcctgaaaatagatcagagctaagaaatggtttcgaaagcgcgtaccatcccaacacttgtgacatgtacgagtgtgtcagtagactgcagatagataaattggtttagttttcttagttgaagcaatggaagaaactgatgcaaaaagatggtttagtgtttggtctataccgtgaggttgtttagtaactggtgtgtgatatcctcaggcatatatcctcttgcgatgccactttctctcagaccaataaacttatgttacagtccagttagcaatgccaccgggatcaagcctc

SEQ ID NO: 12072 - DNA, 1399 bp, Arabidopsis thaliana landsberg
gatgtttttaatatagtcttcgagaatgcgcggccttttagcggatggagagagatcatcaatatcgctgttactatccgcgttttttgaacgcttatgtttgcgttttgagttttggcgtcgttttgtcgcattccaatggttcttgatcgagttttcggttcgcccttgtatgagtttagcgatctctgcccacttattcccgattctggtgtgtgcttccacaagaagtctctcttcttcttcactccaactatctttctacaaaaccaaaacaacaaatatgtttacatatatatccgaagttttaagtgtaagaatacagatctatatgaaaaccttgatatcaggacggagatgattatgccatctctcacgacattgcttgcctgctcttccctcaagcttctccgagattactgcccatttcctctctccatgttgcatcaccaactttatcaacttcctatatacatatatataatgattatactcatttttttgacaaaaataaaataaaatatatatcatatataatgcaaacacagtattatgtagaagcatgaagatctacatatatataattataatatatagtatatatatatacctgtcttcatcggctgtccattgccctttgatgatattcttgtatggttgcttctttgttatatccttgcaagtataatctttagctgcacctttaacgacgatttctccaataacggccaagtttttctccttcctcggaccaaacatcatgttctctttgttttcatttctaatctcaatcgcccttgtcgtcttcacgatcggtcggtctataaaacgttcttgtttcttgaagcacaaggcttcgtgcttttggccgttcaagaatctctcaaccgccgtcaacggtggtgcagcgccgtgagcgaggctcttctcttgaattttctgttcttccatggaagaaaaaggagaaaaagtttagtgtagaatggggaggtgagacgagagcacaaaggtgggataaaattaagctggtaataaggaatatgagaatttaatgggaggtaaaataaaatgcacactaattactaaataaatttcattaattatattgactttttagtcaaaaatagtataacccttataatagtaaaaaatagtccttctagttatcgatactttgtagtttatagaaatatatcaactacacatcaaaagttattacatgtatatatcttagaagtaagataaaaaataatcaagactacaaaatctgagacttaggaaaatatcacatatggattttatctatttgacacttaatatcgatcaagtcaatatttttacgatgccattaatctttatttagatcaatatctacgaacaatataatgattttattagc

SEQ ID NO: 12073 - DNA, 594 bp, Arabidopsis thaliana landsberg
tcctggctcgagctttttgtcgcgcacttggtgaatattacgctgctggctccgtcttcacttatctcttggaatttcttgatgacgcacggatcgacgacgaccttcaattgaagtctggagcgagctggtgaggtggggatcgagcggggatgatgggtttgacgactcgacggcaaacgcgagcacgcgtgaaacctgatggatgaaaagcgaacacacggatgggtcaaactgggactagaggacgacgaatgacattgcgggttggagaccggatttaacagcggtgttgtaccatggcgaacaggaaatcgacgaccggctaagatgcgaatcggcgagttgaacgactgacgatttgacggcggccgcgacagatcaaggctgagacacaataattccaaatcaaattagaatgagaccagcaaggagatgacgctggtgagcaaagcaggcaggatactgggcgtcgcggcgtactagaaaaagattcggcgcgtgcgtcgacgcgcacggatttttgttttgttgctcgacgcacgacgcagggatagacagtaagcagggacacgcggcaagactcgacgagga

SEQ ID NO: 12074 - DNA, 521 bp, Arabidopsis thaliana landsberg
tacctctacatatcttgacttgccacactgacacttcttatcattctgatgatccttccagaaaagcatacaattatctggacaaacatcgattttttgatagtccatacctagaccagagagcagtttcatgcattgatacacgtctttcggcatcttgtgatttggtggaaacacttcgctgattaagatcaagagctcgttgtaacaattgttcgagaacacgtacttagacttaatagccataagtcgagtcacgaaagcgagaatggaaacttttgtgtgttcatgcaatggttcttcagtagctttaaggaggtcgaagaactttttaacatctggaggtagctccttactatgtggtggaaacacaaaatcaggatcctcccttaaatcttgaagcatcttttccatcctatcatattccacgtcatcattgttgtgggcttcaaacatattttcaaggggacactcctcgctgtgataccccagacttcatagttaggcatgtagctatattt

SEQ ID NO: 12075 - DNA, 1288 bp, Arabidopsis thaliana landsberg
  unsure (1)..(1288): unsure at all n locations
tgtggaaatgtaacttcaaataactgattgcgtttagtgtgattctttttaatgaacctactaccactttctatattttaaataaaacaaacttgttacttaaatgctaaaaaaaaagtaaaaatcgcaatattattttttgaaaaaacttcattttaaataaaatatgatgtgaattttcaatattttttcacataaatgcaaacttaaaggctaaaattgcagttgaaaccatgtgaatcttatgtgattttaatgaactagttggaactttttgcttgccaaatcggataagttctttttgtcttgttttattattatttttaaaaaaatttatcccaagaagtgtaaatcttctgtaaatttctttttcatgtaaatacataaacaaaaaccgaaaattgcaagtgaaagcagtcaaagcctatatagaagaaaagtttatgcattgagttgatttgtaaattttaaagattaaaatgaaaaccagagttctaaactgagaccggttaaagtcaacacagatgaatagcatgatggatatgataaaacattacatcaaatgtgaaaagtgcaatgtaggctcaagagtccaaattcaataagaaagatcaaatccatatgtttataacacattgaaacagagattttaagaaataccaatatttgtggttctgcaaaaggaaccctgaagtttagagatttaactatgaatgtttgtaggtgttaagtaaacttgagatacaacacaacaaaataggaagaaataaatctttttcacacatatatccgataagttatttcgattacttattcaaatgaatactttaaatacaaggaatgctaatcaatacataccaatttctgactttcgtccacggacaagggattctctacaacgactgttttggtttgagaaaatgatgaatagattctaagtagtcaatattttcttattaatgttacccgtctcataaagctggttgtggactctcttttaattttagtaactgctcattcaataaaaaataagaaacttcaagcttattgaatacttaatcaaaatttgaaaaacgtttgtataaagacaaatactattagtatcaccataactcatttcttcccctataaataacaactgatctttgtattgttcatcactcaacaacaaacacaagaaagaatcataaattgaaatacttcaaacatcttttttctttcatcatggctatcaaaaacgtgattnttcttctatcgactttatgtgttgcaatgtctggcaatgctc

SEQ ID NO: 12076 - DNA, 719 bp, Arabidopsis thaliana landsberg
ctctcgattattagtattattttttgtttctttctttctctttatacacaatttaaatacgaattatttatatagtatttccaattatcttttcgggaaaccaagcaggacacatagacacagtaacccagagatccacctctctctgtcactctcagtctcacttgtcttgttgttaataattgtctgaatttctgtttcctctgaagggtaccttgtcggaagataggagggataagattcacagtaaacggattcagatacttcaatcttgttctggtaactaacgttgccggcgccggagatattaacggagttagcgtaaagggatcaaagacagattgggtgaggatgagtcggaactggggacagaactggcaatccaacgccgttctcatcggccaatcactctctttccgagtcaccgcctctgaccgacgttcttctacctcatggaacgttgctcctgccacgtggcagtttggtcagactttctccggcaaaaactttcgagtctgaaatctgaaaaaccacccaaaagatgttttttaattttattttttacaatggaagaagacacaaacaagaagagagatgagacattttccagccctgggttttccctttaattttcttgggaatattccggtggcttgtggaaaatatttcccgcttttagtattattatcagcaaaatttcttttaatctttgcgattta

SEQ ID NO: 12077 - DNA, 831 bp, Arabidopsis thaliana landsberg
  unsure (1)..(831): unsure at all n locations
tcatgaagtacttacgaggtagatccacaacagacattgctcctcgtggtttccacatctctcgaagctttctacttaatgctgatattgtcatgttacggccgggcactttcacgatcaagctgttcttcaacaaaccattcatcgccgccaatacctcactgccaattgttatcactggttctccatcctcaccatcagggaactccagtgtcaaactcatcatctaagatatcattcggatttaggataccacctaaatgtccccccaccactttcttcacccacgaacccggtgcatcaggagggtctcccggagaatgacctttctctcctaggtccgtcatggtcacatcttgcgtttcagatctcaagcctccggcggcgtcgcccattttctctctatcgattatattgagaccacattttaacacaatcttaaaaatgtatagcaaatgcttaaaaatcttgattgactttaattaatcatggtttatcggattggtttatcctagggtgggcttatcgagttaggcccattggttatgtaggcttatagctcgtagaaagacttcatgcgtagtgacgtggtgaattattaatggttgataaggatcaaacataaacgagccaaaccggaaaaataaaccgggaagtattaaatcacaattagaggcgggtcttggtctcgagtctcgaagcgtataagagtcaaatacaactgtagcgtagcttcagatctggttattttcttccttcgtgtggaacagccatggctatggagtntcttaggagcagtagaagaatattggaatcttctggatgcgcgat

SEQ ID NO: 12078 - DNA, 456 bp, Arabidopsis thaliana landsberg
ttcgcttatatcatgacctttaagagagaagcttgggtcacttatggcgctctcgtccccgttgttaccggtgtcgttatcgccagtggggtacgtctttttctctacaattctcgtaatgaaaacgtctttggttgttgattttgattctgccgattttgaaatatgtgttcttttacctgtagattgtgatgtctgaattgttgttagtttagagccattcaagatgattgtatgtgttccacgtatgtgtctgaaacccaaaataggtttgcttagtttcatgaatgtgattacattcagtatacaaattcaattttccctgtcaagtacaaatttgagtcctctgtggctgtattatctacttatctaaagcttcatcctttaatgcgttattccagtcatgtgttatctaaagcttcagactttcttcttgtaactattgccattcttaca

SEQ ID NO: 12079 - DNA, 1155 bp, Arabidopsis thaliana landsberg
gtcggaaaaaaaatctcaattataagataattatatatttattatctacataaccaccctcactgaatttaacccaaaccccattaagagaagcgctgatcgtgaaaacctatctttagctaaatctttaaaaaaataaaatatatttctttgaggttacaaaagaatatattgtattttttaaacatatatttagctaaatctatagaaaaaataataataattgaaaacttaagaaaacaaataataagtgattaagtttacagagggggcattcccataaccgcctttggaatccaattatcatcccctcggagaaaatacttaaccgtaaaccttgcagcctcatcatcagacgaaatgggcttatacccagcccatttaactctcttggatagatccgacccaggacctgaattcttgtactctctatagaatatagtacgtggaggcgggtcataagtcgaattccacgcaatccacccagcgggattcacgaacgacccaatcaccgattgcataataaccgtcttcgaaaacaatttccacggacggccaagatacgtcgtagcagttacatttccgttgggagagattgtgcattggtggatcgatattcccgtgttctgattggcctcttgtgtaccttcagcggtgattgtgttgaactgattcggaagctgttgacgcggacggatgctgcagccttggaagacgactgtgccagctccgaagatgaaatcaactgttccggtgacgtcacagttacgatagtattgtcgatttgagtgagtataaagagtatcttggtagccgtcgaatgaacatcgatagtagactgaccgatcggaatctgatcggaatgctaccgcttgatgcttctctggcccggcggtgtttatgattcccatgtccttcatcataaatcctttgccttcagttgctgcgcgtaacaagttaaaaagtgtttaaaatgaccatgttacttcaaaaaagcagagagtataaataagaaagatgagagaggtaccaaacgtggaggtattgaaagtacgaaccccgtcgaccatgttagtgctaccggaaataatggtcttatccctgccggcgccgtagataaacacattccatttatcctttttcataaggacattc

SEQ ID NO: 12080 - DNA, 1449 bp, Arabidopsis thaliana landsberg
gttatttctaacatctatttcatttattaatttggaatcatgtacaagaattgatactttaagagtacattgctactaagcaaatcaaaatacatatccacaaatacataaccaatcattcaaaagaatgatggagaagtgaatttccacgatgtatcgataccgaagccttgctcgcaaacaaattatgaaatctgtttctttccctatctatcgttcatgggagaaactccatagtcgactaatactcaatatcttttcttatattgattcgtctattatccgtgaacttgttatttctggatcccacattcgccgatcgatataccatatatatcctaggaatttttactcaatcccttccattgatcgggattgtggacattggacattcatgaaaattcaaaagacttttcacggagagaacaagatgaatcataaaaccaacaaactccaatgaacttgaatgaatagcctctccattcggaggaaatggctagaaacaaaatcgtctccgctttctaacagcaaggtcccaaatcgagactttatgaacaaagtgcttgaaaggatgcaaaataataccctctgaattcgaatttggtaatggcttgacatgaaaatgtgatcgaattttcaaagattttagccaagaatttcgtcttgtcaaaagcaatattgcggttttattgtgtctcttgcaagtcgtagacttaagatttctacacgatttgaacgagtgttgttggcatggtgaaattttattagtgccgtccatgaaagtttattttttagggtttttgaatgaaaaaaatcttcaacagactcggaaaagtgttgagtattgtctcggtgtttgataagtcattgttccaaaacgacgttaagaaaatgacgtatcttaccgttttgttgtagggtcacaataatatttttggggtacttaattgatctcaaaatatcttgatctatagtcagttaaatgtctaaagatttctatttcgaatttcatatatcaaaaactgacattatgaagacttttattacgacattaaattgaataatatgtcatttaatcattcaaataattgaaaagttggcaagacttaaaaccccataagtctttttgacttcttgttcttcttcactctcctcttacgtctcactccatttcttccgaaatctctcacgacctctcccttaatttgcaccaaagaaagcttcttccatcgtattttaaaagtaagttctcccattataattcttatacttctttcgttgatttctgaagaaatttttgtgttcctgatttttaaatttttggtattggtcaagttgattaatgctaaactctgagcctccttctgtttattaatattttcgttgatttctttgattacattctatatattgagtattgatggttttttttaaagtatgaaatattaa

SEQ ID NO: 12081 - DNA, 828 bp, Arabidopsis thaliana landsberg
tatatatatattcttataatttaatctcactagtttaatctaaaattctaaattataataaaaaatagttcgcaaattacaaaatgcattttattagattttatccttttgtttcatttgcgctaactattctctctagaagtatactttaaatacatatacactgcttattttatttctgttttgaaaccatttgatttagcttaagattgcttaattaatgatgaattcatgacttaattaatctatatacaaagaaaagtcaccatttccccattgtaaaagtctcccaaaaccactgaccctaagcatgtacttgcctatataaacaagaccaaagtattactcaaactcacagcataaacaatatatcaccctcttcctagaatcatcactaaatacgataatgaatactttcaaaaccccatttctcatcatcgttgcgattagctttctggttcttgcaaccaacgctcaaaacgctcaacaagactaccttaacactcacaacaccgcccgtgcgcaggttggagtagcgaatgttgtgtgggacacagtcgtagcggcctacgcaacaaactatgcgaatgctagaaaagtcgactgcagcctcacgccctcaactggaggatcttatggagaaaacctagccaatggaaataatgccttgttcacaggtgtagccgccgtgaatctttgggttaacgagaaaccttactacaactacactgccaatgcatgcataggtataactaacacaaacagttcatatataatacaagtatttaccaactattatgtgtactttatgcctttacaatttgtggt

SEQ ID NO: 12082 - DNA, 949 bp, Arabidopsis thaliana landsberg
gctgcgaactcctttgttgttgtgttagtatatgtggatgatttgatgattgccagcaacaatgatgaggcagtgcaacaattgaaggctttgttgagatttgaattcaagattaaggacttaggtccaactcgtttctttctcgggttagagatatcaaggtcttcaaaaggaatttcagtctgtcaaaggaagtatgctcagaatttgttgacagattcaggtcttttggactgcaaaccgagctctatacctatggatcctacaatacactttacaaaggacatgggagtaccattacagaatccaacgtcttatcgtgatcttattggcagattactttacttgacgattacaagacctgacattacttttgcggttcatcaactcagccagtttatatctgcaccatctgatgttcatttacaagctgcacataaggttctcaggtatattaaatcaaaccctggtcaaggcttaatgtactctacagactctgaattgtgtctcaatgctttctcggatgtggattgggctgcatgtaaggataccagaaggtcagtttcaggttattgtgtttatattggcacttcattggtatcttggaagtcaaagaaacagtctgtggctagtaggagtagcacaaaatctgaatacaggagtatggcacatgccacttgcgagattatatggttgcaacaactcttgaaggatcttcatgtttcagtcactagtacaactaaacttttttgtgatataagtttgcacttcatatttctatgaatcttgtgttccatgaaaggaccaagcacatagaaatagattgtcaaacttgtgcgggatcagattaaggcttggaaacttgaaggctttgcacgttccaacttgaaaccaacacgctgatatctttgaccaaggctcttattcctgaccctttcattacttactg

SEQ ID NO: 12083 - DNA, 1100 bp, Arabidopsis thaliana landsberg
ttttgtttgcagccatacttggagaaagcagaactagatctcttcctcttctcaatccttgacaagtaatacctcttcatgatttctctttaccaaacttgcgtttctcaaatctcttgacttatatatcttgtgatacgtctctaatcattttttttttcttccaattcctatcatttcagatcaaattatatacctcactggtttaagctttgattccaagaaaagggaaatgaattctaacaactggctcgcgttccctctatcaccaactcactcttctttgccgcctcacattcactcttcacaaaattctcatttcaatctaggtttggtcaacgacaatatcgacaacccttttcaaaaccaaggtatgtgcactcacatttatgtatatgtatgttcatattcaaggccttaatgcaattcttttattaaacatatactatttgctatgttaaaagcttttaaaaacgaagggttcaaatattaagacatgtaaaatcgaaagcatcattgcacatgttttaagattgttatgttcatatattttcttgttttttttacaaatttttgtttgtgttttcaccacaaaaataattaattatattctttctaattaggatggaatatgatcaatccacatggtggaggcggcgaaggtggagaggttccaaaagtggctgatttcttaggagtgagcaaatcgggggatcatcacaccgatcacaacctcgtaccttataacgacattcatcaaaccaacgcctccgactactactttcaaaccaatagcttgttacctacagtcgtcacttgtgcctctaatgctcctaataattatgagcttcaagagagtgcacacaatttgcaatctctcactctctctatgggaagtactggagctgccgctgcagaagtcgccactgtgaaagcctcgccggctgagactagtgccgataatagtagcagcactaccaacacaagtggaggagccatcgttgaggctacaccgagacggactttggaaacttttggacaacgaacctctatctatcgtggagttacaaggtgtttaagatgtctcaattttttcgcgt

SEQ ID NO: 12084 - DNA, 1118 bp, Arabidopsis thaliana landsberg
  unsure (1)..(1118): unsure at all n locations
cattttccttggatggggtttaaattaaagttggatatacattgggggttagatattactgcgagggcctctatcaattgccgtgtaatactatcaattgcgtaagacgacgtgatatttatgcatgcaattatagaaagtttgaagacgcgttaatgtgtataaaacaacatcgtatagtgcattcttgatgaaaaagtttatttgggaaaattgagtccagtctataataataaaaaacaaagaattaaaagaagaattatatagaaacttatgagtaaacactgtaaaacacgaattttctaattaaaaaaaaagttgtagttataatctaaaagacacatagaaaaatactttagtggaaattaaaacaacataacatgagtagataacttaatgattttgtgacttaattgacacgatacatcatacatgtatctatgaaaaagttagggcttacatactaacttacaagtaaatacataaaaaagttgttgttttaatcaaaaagacacataaaaaaaaagactttagtggaagaacaacattaacatgagtagacatacaacttcatgctttcgtgacttgcatgacacgatacatgcatctgtgaaagttagggcttataaatagacaagactcatattcattactcaatcattctctcaattcttcaatctttcatcaaaatttcttccagagaaaaaacaaatctcccccacaaagaaaacaacaatgtcgacgaaaaagatcatgttgaagagctcagatggtaaaatgtttgagattgaagaagagaccgcacgccaatgccagaccatagctcatatgattgaagccgaatgtacggataacgtaatcccggtttcaaacgtgacaagcgagattcttgagatggtgatcgagtactgcaacaagcaccacgtcgatgccgctaatccttgctccgatgaggatctcaagaagtgggacaaggagttcatggaaaaagatcaatacacgatctttcatctcatgaatgctgcgtatgcctacacatcaaaagccttcttgctctagcttacanacagtcgcggatatggtcacgacaataaatgggcttttgaatgagcggatta

SEQ ID NO: 12085 - DNA, 1321 bp, Arabidopsis thaliana landsberg
gtgtttttaacattagacttaaaaccagagagaatttggccatgtatatatgtccgtggataaaaactgttacagtatattataaacattgtctctactcaccatattcaacagatatatagtatatatcatgtacatgtattaattttacactgaataaatctataaaaaaatatatattgcaacccccaataatatgaaacgaaaaaagatagaaaacgcaaacccactacggctttagtacatacattcatatatatgaatagatcatagatgtgcatttcaaagttatgacctgatcaatggccaggtatattttcacactgtttcgagatgatagtgcaagtgtacgtcgagcgtggcgcgcctacggcccctacacaacgttgggtggtacgcatcttatacagagggaggaagagacgcctcctggaagtggactgaactgatcatcatggcgattagtggtcgccatgtcttaaacgtttacatccccgcaatgttgtgatgcgcttggtggaacatctattttggaggttacaaagccattacctttattgctcctatctcatcaccattgcatattttgcattactttcacacttataatttatatatagcctcaagccattgaaaatttcaatgatatgtaactctttagtttatctatatgctgacactaattacaaagctaactagtaagcaactcaaaaagcataatcactagatcctaatattgaaataacagagatactttgagaatctttaaaaaatattgctctcttttattcaggtgcataaattgctagtaaaatgaatatgatttgtttttaaaaaatataattttcataaataatatatgtaaaaaaaactatgtgaaaacatgtaactggatcacatctattaatattatcaacataactcgtaattaaacatatgaatatatggatgagtaaaagatttttgaaaaaactcaccgagtttgcggatttcaatttgagcaccaagagcttcattcatatgaatcgaaaacatgaggaaaagaaaaaataacatgaaagaaactgttgacgacgacaacatcttaataaatctctctgttagtacttatcactaatcactgaatctgacctaatttaggacgttgcatgagctgaatctgagctaattaaactttcttttatctctacttaatgactgttactcacgtttatttcatttatgtggaatatagagttagagataagagagagtttaacttatggtagagaagaagagagagatgctcagtttgtcccttgttgatctttgggatattagt

SEQ ID NO: 12086 - DNA, 679 bp, Arabidopsis thaliana landsberg
tcagcgattgaggctcaagatgttgcaattatggacaagggatcaagtctcatgaggtttccagagctttcggcgaagcttcaagtagggagtcagatactgagaactgcaatcgcatctgcaatccccacaaagagcttttcaaatccttattggaatgaggatttgatgtttgtagttgcagagccgtttgaggattgcgttacagttgttgtagaggatcgtcttaatggtggtgcaataggaggacaaaacgatgtggctgttgggagggttcagattccgatttccgctgttgaaagacgaacaggagatacactggttggttcaagatggtttagcctagataacggcaacaataacaaccggtttggttctaggattcatcttagattgtcattagacggtggctaccatgttttggatgaggcaacaatgtataacagtgatgttagaccgactgcgaaagagctttggaaaccgcaagtagggcttttagagattgggattcttagtgcaactggctttgatgcctatgaaggttagggacgggaaatgcggtggaatcgcggactcgtactgcgtggctaagtatgggccctaaatgggtcagaacaagaactgttgtggacagtctttgtcctaagtggaacgagcagtacacttgggaagtgtatga

SEQ ID NO: 12087 - DNA, 1111 bp, Arabidopsis thaliana landsberg
  unsure (1)..(1111): unsure at all n locations
ttctttctctctctctctcttctgtttttgaaagccaaagtgtctctcttggacagtgatggaactgctttaagagatttaattttttacccacgagagaagtcaagttgttgaagaagaaagatttgttcttttgtcttgtttctttcattttttcatccacaaagatctcaaagacaagagcctttttttttcttttggggttgcttcaatgcgtacttgtagtagagagcttgtgttgttgttcatggtttgatgatgagaagaaacagattctggttttgaagaaatggggtttgttctgtttcttgtgtttaagggttttatggatggttttttgattcgaagctttcactgagtcttatggttgtgagtgagatttttgggggtttgaacaaaggagatggagaaagacgagtttgtacttccggagctaaagagttatagctactgtagtagctggaagtgaagaagattttttaatagattgtattgaatatttagggttttcaaagtttggtttcttgaagttgaattagacatgaagctgtcaacatctggattgggtcaacagggtcatgaaggtgacttgtttactctctgattttcttagttctgtttctggacaagtgttttcttagttcttgtgtctgtgtttgttctaacaggagagaagtgtctgaattctgagctatggcatgcttgtgctggaccattagtctctcttccatcatctggtagtcgagttgtttactttccacagggtcacagtgaacaggtttgggttgttgtttaaaagtatggagctttatttttagacttgtgttatatttgggcatttccatttaaatagaagtgtacttgtaggtagctgctacaactaataaggaagttgatggtcacatacccaattacccaagcctaccaccacaattgatatgccagctccataatgttacaatgcatgtgcgtagttagttccctgtccctttccatattcaatttttacttttgtaaactagttttgggatgatgtgctttgtacgtatgggtttcgtttttacttttcangcagatgttgagacggatgaattctatgctcatatgacac

SEQ ID NO: 12088 - DNA, 316 bp, Arabidopsis thaliana landsberg
gatttcgtagccgtcacccacgagtgtcgtggcggctccgaggggtccgtgtgccgctcctgctttgccaggcgtcatggtaagaatagcgctaattccttattaagttgctttaacgtcttcctttattgcctgtagaaaaatgtgcgcgcatttatgtctgtattggcgttgtctctaatgtttaaaatgtagataagtccatgctctgttgctgttgaggttggcgttcatgtgaccactgttgctgtccggttcgtataggggattgccgcggtttgcgggggctttggtatggctcgtcctgtgctctctc

SEQ ID NO: 12089 - DNA, 729 bp, Arabidopsis thaliana landsberg
gtatgttttgtagattcatgcatctttaagcctttttgtcagttactaacgcatccacaatttcggttttttgtgactttggactcgctaagattctaacttctgatgaccttacatcctctgtaagttctgtacaatgaaactaatttaaattttgtgacactgttattataagtcagtatgtttataggttgttggaactccaagctacatgtgtcctgagcttcttgctgacataccttacggatcaaagtcagacatttggtcgttgggtataacaacaatacattcttctttgatattttactcctacacttgttcaccttgtgactaccgtttcatgcatcatcatggaaaacaggatgctgcatgtatgaaatggctgctcataaacctcctttcaaagcttccgtaagtatccttacagttggtttttgattttggcattaaaacacataatgtaaaatgtgaaatcttgattgcaggatgtgcagacactgatcaccaaaatacacaagttgataatggatcctattcccgccatgtattccggctcattgtaagcctgaaatcatttcctctgttaacaacattaaccggcgttgctgtaccaacctcttttcctcccttatctgcagccgaggccttattaaaagcatgttgaggaaaaatcctgaactcaggccaagcgtatggttcctatatgcttatttgcttttgatgataagt

SEQ ID NO: 12090 - DNA, 1192 bp, Arabidopsis thaliana landsberg
aattagatatttatgggaatatttaattatatttttaaaatatgtgtcgggttgtttcaattatcaatcaagggaggtataaggtatatccagaaagttctgaaaagatatagtaatctggatatcataccttacaaaagtgtttagtgcatccaagttaagataatatatacagaagattttttttttctttttgaaaaccaatattcataaagattatatgttgtcaaatccgggaataatcttggaatgctcttaacgagtaaaaaagtaagtttttagttagcataaattgtcttcatggaaacttaagttctcctcaatgccgttcctagatttatcagagcttaagacgaagttgagattacaagcctttccaatcttttttaaataaaataattttgtaactatataaatcattgaaaacaaaaaaataatatgactaagacatattttttcttccttcatttttaattaaggttttcaccaaattctcataattttatgttttttaattcaagttcgatacattctcaaagacatacattctcaaagacatgttgctaaagatttatttttttattattattaaatcagcataatcatcattatttataaacaaagctactataaagatgaattagtatacattaagtatatttatatttagaagcggtgaagcagattccaactgttttaaaataaataaagtggataaaaatagcattaaaaattaggttagtcacttttaagagaaataaaaaaaatctttattttcttaaaaagtcgaggctatttgcttcaaatagtataatatttggagctctaaaacttttaaattattatgaaggcaaaaattctatttcaattatacaatttgaaaattataacttaaatcaaaagtattaagtacatgccacagaaagagattaaccgaagaagttagattttctttagaaacttcctttaaacctcactttggctctctcagatctgttttattcttctaccaatgaaatcaagtttgagagctacttatctcttatttctcgttactcgagtaatctatattatttccggtctctctctcattgcatcgaacttggttcagagcttcaactataatagtctgacttttcgtaggttttgaaccaaatttgagttttttcttgtttcttctggaatttgtggt

SEQ ID NO: 12091 - DNA, 1200 bp, Arabidopsis thaliana landsberg
ttaactacataaatctcgctaatcccgagtttaaaagagaagacatgatcaagaaccaaaagccttagttgcatttagaaagaatgcgtagtaaacgaaggaaataacatcgtaactttaaccggacttttcactcttccgctcacaataaacctaagcctcaagactctaccgtagtttaccgttgtctgtggcctaggatccacaatactcggacgaagactcgagtacttagtgtccaaatacgacggcgaaaaagcttctaatctcagctccgtcgggaaaagcacgccggtgaaattgtaaaacgcgtgagggttgcttcctccaacgagaactctcccgtcacgaagcaaagtcgcgatagaatggtacattcgagggatagtgcttgggttttgaacttcaaatcttgaaccgaccggtttatcgggatggtaaagatcaggatgtaaaaccggttcacgaccaagctcccaagcagctgtccctgaagaaccaccgttaattaacagaacatttccgtcaggtaaaagcatcatgtctcccataactctcgctctcggcatcttttcaacgatccattgaggattcacgtcgttgatattgattctcgcacacgtgtcaagagccttgacaaaagtgtttctccaagagaggttgtacgatcctttcggtgcacctccgcacacaagaacctctaacacaaggttcttgatcggtaaaagaacagcggagccagtgcttggatagcttcgtggatcacctccagggatctccggataagttctgacgacagtgtttgtggaataatcgagcaatatcgctctgttgttagcgaaaatgaacaagttaccatcggtgttgaggaaaacgaaagggtaaagattgttttcgtctccaggatcattggtttcggacaaaaacgggatactgtagaaatttggagcgtttgttttggggaaaaactcgtaattgaattgacctcgaccaccgattatgatctgacgaccgtcggggaggatatggttcgtagcgtaccatcttcttgcagcgagtccgttatcgacttctatccagtcacaagaattgtcgtcgcaaggatccataagtctaactttacgttctccgtctaaatcacctcctgtttgtagaagagttcggtcggagtgactcctcttgaggagcccaagtgttgga

SEQ ID NO: 12092 - DNA, 893 bp, Arabidopsis thaliana landsberg
gacgacaatgttacagcttcgggttgctgttgtttgaactgatgacaggaaaactcccggagtcggttaaaaaaggcgactcgatagataccggattggctgtcttcttgagaggaaagacattaagggagatggtggatccgacaattgaaagctttgacgagaagattgagaatataggtgaagtgatcaaaagctgcataagagcagacgcgaaacagagaccgataatgaaggaagtcacagggagattacgagagatcactggattatcaccagacgacactatcccaaaactttcaccgctctggtgggcagagctggaagttctgtccactgcgtgaagagacaactactgaacttcacaaaaaaatctgtaagtattaatatgaagatttgagtgaggtttttgagtctcttagaagctcttggcttctctttaggctactttcatctatctatctatatataagtatggaacttagtttatataacggctttaaaattcggtggatctatttggtcgtttatgtcgtaaacagaaaatgtcctaatcacggtaatacccctttttggtgtgcataatgttggtgggtggttactgtctttgtaaattagtgttactatgttcttgatatgtttaatcatcaggttctgaagtataattcacaaattctgctcgttcaaatttatttagttgaagatggggctagcaattcaatgaataatttaacaatgttttcgtttgtactccactatttaacactccacctcctaagtccacatgcaaatatcgtggctaatactcaaaacataatcaatcacaaaaacaaaattaatatcgctttgtgtcacatatcatgctaaaaatgttggagtcgacatgaaccatg

SEQ ID NO: 12093 - DNA, 883 bp, Arabidopsis thaliana landsberg
agatgatgagtccatgtcatgacttttgtgaaatttgaaattttctgtcatcttatattcatacaagtacaaaagtatctcaacatttgcaagtacaacacagacaaaaatttcaaaataaacaacaattcaagacaattaatccttttgtgtggaaactaatcaacaattcaagacacaatgagaggttttacttattgtccaagaaaccaatctaatcgctttttttgccatcctctctcgttggcttcttgacataattctttgaatggaagttggaaaagagagccaaaagagaagcattaaatgcagcgttgaaacaccatccccaaatcccggtgcaacccgacccgaataagtgctctcggagcatccaaccggataacccgaaactgaaaacaaactgaacaatctgacaatccgtcaccaatctcttccacttgggcctcgatccaacggcgcagaggaagtagtaaccgtacatgatgacgtgtaccgtcgaattcgtcacgagcgcaatcggaaacatcgattggcgagttcggagccagagataacacatgaccacaaccgtcgcgtggtggtacacgtggaggaaggatagccgttggattgatttgccgagtatgatgaggatcgtgtctccgaactcgaggatcttcgagaggtagaagacttgagcccagaagaaaagcggtccgttaggtttaacgtcgacgggaaagcaaatcgcgtgaaggaaacgcgccatcggatctgaagacgcgtgagatgaggttattgagagagtgcacagacggccatgactaaggagaggagacagaggattaggctgtggacggctgtgatcggtttgaggatcgtggactgagtgatgggagtg

SEQ ID NO: 12094 - DNA, 928 bp, Arabidopsis thaliana landsberg
  unsure (1)..(928): unsure at all n locations
tatcctcgtgccttgaacatgtagtgagatcatcttacacatataccattaattaatcccattcttatgaacgtataatgcaatcatcttacatgtgttttgatcatgtttgtctttgttaagaattttcaggacttgtaggtgtgaagcagagaaaatactgtggaagaagaagaagagaaaatagtccatttgataaacttgttgagcaaagacaattagttcaatacaatttggggttgagacagtcaatgtctttaaaattgttacatatgagaacttttgtctacctcaacaacagcattgcttcttcaatgagttcattgatagttgaaccatggcgtgccaaaccgaccgtgccagaaaatatatcaaagttctcaagctcagccgcggtctcaaagacggtctctaattcattcttcatctcaaggttttggaaggtcttgacagtctcaacgttagctttcatcatcgcaatggttagctctattgcaaacctcctgattcttggaacctttggaactggctgttcatatctcttgaggatattgattaatgccttggctagttcttcctcggttactccggcttcctcgaacatccctctcaattcttcgggagtattcattaacttgagaatatgtggtgctaatcccaccataacttcttgaggtttcctctcttcagactttattgccttaagaacctgcatggagaagataactagtgattcatgattcttatcaatttcgtatgaatcaagaacatatgaaaggacttactgttgctcctgcagatttaataacttccttcatctgttcattgaactgaccaggagctgtatatgcacaaagattacgcaagatcctcgctgcattcatcagnatcaacgggttgtccaacgcttcaacgagtcccttagaac

SEQ ID NO: 12095 - DNA, 1288 bp, Arabidopsis thaliana landsberg
aactttattagtctagtgatagtgagtagtgagtttcttgaaagagtacaaaaacattgacaataatgctttcggattatttttgaaagaaatagtctaaagacggcatctagatcaaatggatatcataaacttttgatccgaatgttgcggttatcaaacaagaaatgacaatagtataaaatatggtagaagtattgtctatccttatttcttaagcaaaaatgatctctattttatgaacaactagcaataaagaaaatgtggaaaacagatgataagttactctggttcctatattatatgaaacagagtagtgacaccattatttggaattcatggaaattaaaagacgagactcggtctctttgacatagtcatgactatccttgtgcagatattaaaatgcctgacggtgaacaaattttttctacgtgtgtggtcaaaatcaaaacaaaaatcactttttgataccacaaagtaatttgaaatatgcttttgctcttttgttataggaaacagagtagtaacaccattgcatgcagttaatagaaatcaaaagactcttcgatttttttatgactatggtttgtttttttgtcagcttcactaaataagacaagacacgatacacgttgtagttgtaccacaacatcattaccaatcaaagtctttctgtctttgtcttcgtgagtctccaccatgacttctaatttggggtaacagtacactacgacttttcctttgaccaacaaactacgacttttctacactctctttacaccatatattattagtcttactttctttacaaactcaataatatctaaaccaaaagccaaaacacacgaaaacagagctatgttcttcaagctctttaccatcttcttcttcttcatcatcctactctcgaaacccctgaagtcctcttctcaaagtctcaacttcacttacaatagcttccatcgtccaccaactaacatatccatccaaggaattgccacagtcacatccaacggtatcttgaagctaacagacaaaccggttataagtacaggtcacgctttctacgccgaaccaatccggttcaaagattctccaaacgatactgtatcctccttctcaacaaccttcgtcatcggtatctactctgggatcccgacaattagcggccatggcatggcctttttcatcgctcctaaccccgtcctctcatcaaccatggctagccaataccttggtctcttaaacagcaccaacaccggtgccgatacgcttcatatactcg

SEQ ID NO: 12096 - DNA, 1089 bp, Arabidopsis thaliana landsberg
  unsure (1)..(1089): unsure at all n locations
aaaatgacagaaatacacaagtgaacacagtttcacttatgattcctttatcttgaccaagctcctaaaaccccaaacaaagcaagaagagcttaagtatgatattcaaaagagtaaagggatcaaccaaaccagctgaaataatcgagacaaaccggaagaacaaaaaagccagaatcttgaagcgttggtcctggccgatgaatataatgaactcccctggcagctaaaccatgaaaatactgcacataacagattcattcatcaaagtgtcaaaactaacacaaaaatgggaaactaaactgaagccaagaacccataaaggttggtaaaaagtatacaccccaacaactaacaaacaaaaaacaaatagggtaaatttcaagtcttgtgctttaatctctcccacagcctaaagttacaataggtataacaaaccataatcattcaacactaagatcaaaaagctgtcgaattcagattaaaagatggaaacctgacagagaagaccagcaagaaggtatttccagttctcagcgaggagaccaatctccgttgttatttccgaacaaaatctcctccatagctacaaatgtacaaaaccaccacaattcagccaattacgacaaatatgatcgcaaggaagcaaaatcagaaagaaaaaaacgacgaaccttggaagcttcgcggcgaatataaagcgtcattatcttcttctttgttaatcttccacttccatattacttcataccccaacagtttgggtcaacatcatcaaaccaaacccaccaaattcaaattcaaatttttacaacctaatcttaaaattatctgtggaacccaagtcgagcttaacgcttaacgatcgatcgaagaaacgagaacgatggtgacaccaaaagggaaaatcccaagagatcaaaagacgagagtgagaaatctaaaacaaagaatttttccttttaacagatctgagacgacgatgataagcaaaaagccctaaacaaatttctccgtggcccccaaaaatctccgataagagcanaatagcgtttgcaaaatcaattaagcaccgtttggtgacgataa

SEQ ID NO: 12097 - DNA, 564 bp, Arabidopsis thaliana landsberg
cgatcgaacaccatcaatcaaggtggcttatttatattgatacgtgcacttacctcgtatatcctagaagtgagtagaggtaaagtttctgaaatagttcttgcaaggatatgcaatccgtttgctaaatctttatatgcatatacttccagaagaagatgttttgccttattgatacggttttgcaaggatcagggggagcacatttctaaagttagtctttatagaagattcaattgaatctagatatacaagatcgaaatatgtcctgatgacagttgttgtactctttttccttggtgagttttcctgaagtttctcacatgaggtttttaacgaggcaacaaagtgcaaatgcaatatgcgtcaccatgcgctctttctccatattttcccactgggttttttgggagttttaatgaggcatgtgttggtcgcggtattcgcccaagggggagtgttgagaaccctaatgaagggttatgtgggcaaataccgaatatagccctgaggctatcgcgtctctatatatagaacctgtaccctcatatgaaatggagatta

SEQ ID NO: 12098 - DNA, 1407 bp, Arabidopsis thaliana landsberg
  unsure (1)..(1407): unsure at all n locations
taaagattgcatttggggcatttgactcctttcatgtttaccaagtaagtgagatcctggagctagtattgtcttaccatgtttacggatttggtagattgtgcttgctctttatacttgaaatggtttgcagatacttgcaagaagctttcaaggttccccttgttatacagctcacggatgatgaaaaaagtatatggaagaacttatcggtggaggaaagtcaaagacttgccagagaaaatgcgaaagatattattgcttgtggattcgatgtaacaaagaccttcattttctcggacttcgactatgttggcgggtaagtcgcattcgaatcttctatggaaataactagcaccgctcttgctttgtagaaaatattgcttgaagagctcttggtagtacatatagtctacatgcatgtagctcaattttttattttttttttggcgaagatttgtaagatcatatattgtcctttgttttttttttttttttgattgatgtatcacagtatatttggctgatcatatgcaaaaactttgtgtgtagtgctttctataaaaatatggtgaaggttggcaagtgcgttacacttaataaggtgactttactatctatctccttgaattgcacaatgcggctgatatgttgtatagctactttgtgtttgtggttttcatttgtatatctccttctttgctaggctatgggaatctttggcttttccggtgaagatcctatcgcgaaactcagtttccctcctgtgcaggtatgtcgtttgttctgttggtgtggctatgtgtattctaactgcatatagactgtataattgttttccgtatatttgcaggcagttccatcttttcctagctcattcccacatttgttccctggcaaggacaatctccgctgcttgattccttgtgctattgaccaggtgtgctgttttcttactttttatattaacctgtttgcctttttaaaagattaataacttcccattggtataaaaatgtctgtgactgcgagcatgtgatacttccatccataatcagtttcttttatgttttccatgtatcacatttgtatttataaccaatctttctttctttttggttttgttcaggatccttattttagaatgactcgtgatgtcgcaccccggttaggctatagcaagcccgccctgattgagtcaacattttttcctgcgttgcaggcaagtagtttcttaagtacactacacattcctgatttcacaactaattgccttggtcactttacgcagggagagaatggagaaatgtctgctagtgatccaaatctgctatctatgtgactgattngcaaagacattaaaacaaggtaaatctgtaatcgttttgtcgttcactattatacaag

SEQ ID NO: 12099 - DNA, 1147 bp, Arabidopsis thaliana landsberg
agacttatttggtaccaaagaaacagttacagcagatgctcatggcatatctattctggaaaaaagtgggaggtcacagatcatgctcgatgcctttgctgacggaagcagttttatctgtctgcaatgcggtggtctggtgagcatccataggagagatgaacactatgcctactggtgtagcaatatgtaatacaaggatgctattttgttggccattacatgagaatctgcggcaaattgccttcactgtaatattttgttgctaaatgttgttgatctttgaatggaatgggagatgtacaacacttcaaatttgtcttaacctttacttgtaatgtgtcttatgcttatcaattaacgcttgaagaaaagacttagctctggtttcttgtctgagtcttaaggtacttgaacaaaagtggacactaaacaaatattttatcatttacaacaaaccaaagaacaaataaaaccagtattgctcatacaaatatctgcaacttgaggatgaggtttatttcctcatgagctcatttagtgatgtgtataagatgtcaattctatcaacatgaaaagaacaatctgactcctaaaaagccatcagctatctgttagctacaacaagcaatcagcagcacccgccgctcgtcctggtggttctccttgatgcggtagacacgcctaataacgaaatttccaatatcacacaaaaccttaaagacttttcctcccaaatgaaacacggcagcaagtctaatctctgtcgtgcatgaactgatctacgttagagaaacacaatgatatcctctccgagttgcttaaataatctaggaaggattgataaattacctgcacccacttgtatgatcctttccataaaagtctcatactcacaggcagagagagcttgaacactaaaagattctctcagataacggcaagcaacttgattacatgatcttattaggtagagccttaagtcggggttttgacttgaggagtgtttcgtcacttgtcctaatccactcagagagtctccatggcttttgccatttccatttgaattgaacaatccactggtgatgacttctcttccacctccaaagtctcccaccctgttttcctacggctgatagttttctca

SEQ ID NO: 12100 - DNA, 756 bp, Arabidopsis thaliana landsberg
cccacattaatggtgagacgatgaaaataaaattattattagtgaaatggatcttaaaagaaagataaaaattgaaagatatttaatctattaaaaatagtttatgaaaaatatatgtaaaattgtataaagtatttagttatttagggagaagatagaaaaaatcttttaataaatatttgtttgaaaggcttttaaaaaagaagagaaacaaagaaaaagaaaaaagaagggcgttaaaaactataaaaataattaaagtaaaaacgtctaattggctaaaaaaaactgtgaagactctagatatggctccgaatggagaaagcgtatcgggcggacgggattaagcggatcaagtggatcaagctggacaaaagcggatctagcggtacatgtgcggttcaagcagatctggcagttcaaaataaatatttgaatagtaaaagcagatcatattatataatatttaaatatagtattatttacaaatacaataaatatatttatcgtgataacttttaaaacgttaaaaaaaaatttaaatacaacaacaaaaaaagattaatatctactatttttattttcccataatatatctgcaatattttctctgatatttgtcataagatcgctatcaattacttctgcatcttccatatccctagatcagtctcagaatttgtgtccgtactctctgtctttcccattacttctgcaaaatcatcatctgaaaaatttgaaattcagataaaatta

SEQ ID NO: 12101 - DNA, 1681 bp, Arabidopsis thaliana landsberg
cacggggactgaggttatgcacccgtggagggacccgaggacgaaatcgaagttatgcaacctctgaacactttcttcggtcccgctgagtttacaagaccatttaagatttctgcgaagtgttatgttgcaaaggcagtgagcctaataggaggtcatctcaaacccggtgagttggattggttcttgttgcacccacagttcaagcatttcttccatatgcctaaagactcaaatcatatgttgatggatatgtggatgctcttgcttcgcacaacgcgtttagagaagaaaaaagaatgttggttcatagtgaatggggtcccaatccgcttttctctcagagaaatgacactgatttctagattaaactgtaaggtatttccaccttccatggaaggattggggagtttaacgtttgtcgggaagcactttgggcttgggtcaacaataacatatgcaaaagtcaaagcaaagcttctatcaatgaagaaaccgggaacagagcgtttgaagatggctgtgttatacttcttgtgtagcataatcatagggaagaaaaaaggagggaaacaagcaccctcggtaacacctttctttcttaggatcgtggatgatcttgatatatgtaagacattcccttggggtcgcttggcatttgaggagaacatgaaagaaatctttcatttgatggaccactttggtggagttgtgggcgcaccatgggtctttcctagttttgtaatacctttggaggtaattacattttgaaattgtacatattagtataacttgcttcatctaaattttgatgatcttatgttttgtgtagtatcttacgtttgaggcaattcctgttctgaagaaaactttccaagaaaatgttagtaatgcacatgcacaccgtaagtgtccgcggatgtgcaagatgaaatttaaagcaagcaaaatgaaagggttttctttgagggaaatttatgactgccttggaacaactaaggtaattttgttttgaaattgtatacataagtgtaacttgcttctatattcatcatcctatgtaatttacttatcattatcactctttttgtataattggttttgttatttacaggacattcatagtatcttgactccatcttctcgtgagacacatcttctagaccgtatcacggatgtagataatggttggaatgatgtggatgatccaattgctgatggttgaaccaagcacttaattgaccaagagaggtcaatatggtttgaggagctttataaccaagatgtggctacccgggaaattgagaacgaggctgtagttgatgtggaacctgataatatgactttggatgatggagaacctaataatgtggatctggatgatgaacctttggatgatgtggtccaacgagtttggctcagctaggagacagatttcttcaactagaagaccgggtgaataagaggcttaaggaaatcattgagaaatttgatggcttggatgacagactcaaatctgtggaattgtatgtgaaatgggtaagaggtgaagaaggttatcctatttatgaagaaactaggcagacacaagcacaagtaccagagagagactttgaacaggtcaagctgagaaggaccaggcagagatagagcaggcggagaaagacatgttgagaaggaa

SEQ ID NO: 12102 - DNA, 833 bp, Arabidopsis thaliana landsberg
gggtctttattctgtttttctctttgaagaatctttaaaattctcagatcttctgaatctctcttctttaaaactttttttaactttattttttgtactcgcttctttgccttcatttttctcgtatccacatgtcgttggtctttcgctacaagccacgaccgtagaatcttcttttgtctgaaaagaattacaatttacgtttctcttacgatacgacggactttccgaagaaattaatttaaagagaaaagaagaagaagccaaagaagaagaagaagctagaagaaacagtaaagtttgagactttttttgagggtcgagctaaaatggagatggcggtggctaaccaccgtgagagaagcagtgacagtatgaatagacatttagatagtagcggtaagtacgttaggtacacagctgagcaagtcgaggctcttgagcgtgtctacgctgagtgtcctaagcctagctctctccgtcgacaacaattgatccgtgaatgttccattttggccaatattgagcctaagcagatcaaagtctggtttcagaaccgcaggtattgcttctctttaatatggccaggattaatttttaattaaggattttgaatttgattctattggatttagtgtgttatattcaatggatatgaaggaccacttttgttgttatttcaagatttgatgcttcaattcaattctccgacacaatttcctgtttttacaaaagggttcctttgaatctgtctggtagatttggttattcaatagcttggtgtaactgttcttgtgacgatatggttactgtctgatctggtgtctaatctt

SEQ ID NO: 12103 - DNA, 1246 bp, Arabidopsis thaliana landsberg
gatatcaaaactagtgactaaaatattcaaaaaaatctctgtttcaccaaaacaagaaaaataagtaaaaaagaagttgtgaattttcattgatatacagtgagtgttttctttcttttgctgtatgttttggacgtttgtgagtaagcacttattattattttccaagtcctaattatatttcatcactgccatgttctttaccgatataattacatcatcgtcacatgcacttacataattatccttttttaataaataaaataaaactacaaaacctaatcttctcattaatcacaaaagcaaaagatttaagtaaacacactataaagacagaactaaacaaaagctatggatttgtcttccaaaccacaacaacaacttctaaactctcttcccatcgccggagaactaactgtcaccggagaaatgggtgtttgttacaaagagtgtttgaaaaaccacgcggctaatctcggcggccatgctctcgacggttgcggcgagtttatgccgagtcccacggctacttccaccgatccttcttctctccgttgcgctgcttgtggctgccaccgtaacttccaccgccgtgacccttccgagaatctcaacttcctcaccgcgccttcgatttcttctccctccggcactgagtcgccgccgtctcgtcacgtgtcttctcctgttccttgctcttactacacctcagctcctccacatcacgtgattctctctctcagctccggtttccctggaccgtcagatcaagatccaacggtggttaggtcagagaacagttcaagaggagcaatgaggaaacgaacaagaaccaaattcacgccggagcagaagatcaagatgagagccttcgcagagaaagctggttggaaaatcaacggatgtgatgaaaagtcggtgagagagttttgtaacgaagttgggattgagagaggagttcttaaagtgtggatgcataacaacaagtactcacttctcaatggcaagatcagagagatcgaacatggcctgtgtctgaacactcacagcaatgatggtgatgggtcttcatcttcttgaagaaagattcaatattcggtttaaacctaattaggatacttttatttggttttatatgagcttttaccgttttttttttttataatagtgtcttttctctaacatgtaatcgttctttatatatatatttatgcagtttgaggggatcctctagagtcgacctgca

SEQ ID NO: 12104 - DNA, 1070 bp, Arabidopsis thaliana landsberg
caaaatatatgcatattcttcctgcaacttcttaatgattggagagactgaagtgttctcattgctctccaattgcattgtgtttgctttgttccttgtttgagcataaatcatcaagatttgcactcgactctcctgttttttgttaaactttaatgttttcacctctctgactgagccttgtttaatgccatgaagcagaacctttttatgaccagtaacaaaactcatttccagcttttgtagattccatgttatatcacccaacgtcactgaccattgtactcccaataccacatcacaatttcccaatggtataaccataaaatcagcttgaaaattagaaccatggaattcccacttgaacttatccactttccctcggacttcaagttgattaccatcagccacagagactgtagaacagactgcatgactcatcttaactcccaacaactctgctgttttagggtacatgaaattatgtgtagatcatgtatccagcaacagaaagatcagacgttttccatgagtgccacacactttcagagtggtataatctgcaaccccggaaactgcacttactgaagcttgtggcctattgttctcctcctgaacgaccaattcatgttcagtgcttgtatccatgtcagattcctccacttatgcttctacttcaatcatataaatatgagttttcttgtgtttgagatagtggtctagtgtgtatttttcatcacactgataacatagacctttagctcttctttgactcatctcttcttgagataagaatttcattgctggcattttcttctcaaagggtgtcacttgttatgtgttgaaattagtctccttcttcaccagaggtttatgataagtaccaccaagtgattgtttaggtggagggtgagctttctcatacaacctttccaacactaaacactgcctaatagtttgctgatcaaacatccttacatggatttgagtctccaaacgcagacctgccaagtaagtgttgaccaaatactccttagaaagaaccacctttgttttgattaactcaaact

SEQ ID NO: 12105 - DNA, 648 bp, Arabidopsis thaliana landsberg
aaatcattagctccactactatataagtattattttatttcatgtaggtccttaactttattcgattctctctgtaagccactaaaaatgcgataaaacatatagaaaacccaagaaaaagactcaccggatcgtcggtgacaggagaagccgtgtgaaagacgccgtcgcaaccatcaatcgccgccttaagagcctcgtagtcctgaagatctgctttgcacagaatcagtctctcctttcctccttctagttctctcaaatgtgtgttcttcggatcatctgcaagaaaaataattataaagaaatccaaattgtcaatcaaaacaataaaaataacctcaacaacttcagataattatcacaagtgaccaaaaaagtatatataaaaatggacaagtacctggattccgtacggttcctttgactgtgtaacctctctcgagaagtatcttaacaatccaagaagcgatgtatccaccagctccggtgacgcagacggtttttccggccggtgaggctacgtcgactggcatatttcccggtggacgaaagtaaagagcttcggttctgaaaagaggctttcgagagactatgaatgctttagttagaaatttgtggtacgtttcgtatatataaagaacgaaa

SEQ ID NO: 12106 - DNA, 831 bp, Arabidopsis thaliana landsberg
cacccaaaaaagaaaatatctttaattgtacttatgattaatctatttttaccatggttgctcttgaagacatcaatgaaaagttatgcaatggagatggttctaagcgttcactaaaacaatttggctgcaaatacagatgcaagctaaggaccatacgtttggatctttttttttcttaaactatattaaaaattcaattcaattggacttgggcgaagactacaacaaagaactaaaagtctagttacaaaattggtgaatcggcatttaaccggaaaagaaaagaagctcgccgcttgttaatagatgccaacagaccgaccggagccttaaatccggcgggttcgagacccaccgcttggatcttttgttatgttcttgcacccgttctaactatgattttatgtaataaataatgtgcatcttttgttatgtttttgcttaaatttccctcatggttttatgtgataaataatgtgaattgtccaagtaatgtaataatgaataaatgaaaaattgataagtatcaagtgtgtggtgttttaatggctttcaaggtaactagtattataaagaaaaattgttatataagttgctcttaataattatcttgaattctcacgaaattagaataacattagatcaaaaccctagcttcatatattgttaaatcattactatcccacaagaattagcattatggaacaacctcggcttggcattcacagcatacctacataaacaaaacaatatcatcgacatcagaatatttaggtgagaccatgtttttatgtacattcactacatttttacttcagaaaatattaa

SEQ ID NO: 12107 - DNA, 867 bp, Arabidopsis thaliana landsberg
  unsure (1)..(867): unsure at all n locations
cagatggctagatgagaagaatcaggtacaagttaatgctattacaagatcacgtagttcattcctttctgggtcaggtttttctttctcccgactaggtccctggatacaagaaagtctcaannnnnnnnnnnnnnnnnaggaaaaaatcacaaagagtaaaatagcagcatgaccagacattggactctcacagtacgcaaacatattcaatacatacatgctggatatgagagcagtatatcattagcatttccaaccaacctgatgttgcattcgaacccataatttgttcatctcggtaaaattttgaagcacgaactctaaagcattcatgtgtgcatcaccatctctggagagaaaagcaaaacacttgcctcttaacatgtgtttcatagcttaaacaaaatcatctaacagcaggtcgtgtggccttacccttccaagtcagaaccaatgctgggtaacttatccctagtaacttgagcaagataacttctcaagaaaagaccacgcaagggatgttgaacagctcgacacatttcaacaagatccttaagtatatccgtagcagtaacatccttggatttgatatatacagatcctatggtacataaaagatacctgaaactcaattgatgagtatctacaaagttaaaatcagagtgtgcaaatgacaacgtattctgaacaacaagaacaaaagaaacttacaatcttggcaaaatgttaccggcatgctgaactaactcgtagagctctgcgatggagcaaccacgtcccgtctcttccttgaagaatatctcaaagtccccaattcattaaaaactcgcatatctgaacaatcagatcgcagtaaggaaatga

SEQ ID NO: 12108 - DNA, 940 bp, Arabidopsis thaliana landsberg
aatttgcaatcctctacggagcaagacctcggtttagcattcataaatcttcttgcagtgctcgtcacctttgtcgtctcggatacttcacctctacagagaggacaatgtaaggtcttggggtataggcgcttttttatggtttttctgcggaactgcttgaaacaattggagtgacgaacactcgtatcgcacatgtaaggatgacatccactagaagaagaagagcatgtcaaaagaacagcattgtgaggcggttccatgcagattacacaccgcacatcctcccaacctgtctcaataggcgactctgacgccttgtgtttgtcggtcctcgaagaccgaagcgggtatggcgatactctgactttgttgcttgactcacacattttagattttctttaggcttctctcaagctaaattatttcaacattaaccaaaaaacaacattcatcaagaaattatgcaataaacaaattcataagaaaaccaaatagaaaatagttggatacttggatgattagaaaatcaaaattgaactatacgtatcaaaacgtttgtttatttgtcaatcctcttattaatgagcttagactcaaattccagaccaacgacgagtacataaagtaattgatggcaaagatttctgaacaggcctactctctatacgataaacatgacggcccaatcatcgccaaggcctaaacctctcaaaccttagaatgaacgaaaataaatcaaattttttatttaatatatgagaacaaaagggtattcaacaaaattgcaagaatttgggtccgttacaaaactatattggttcatgtaactgtagtactgtattggtcaccccgtaacaatattattccccaatttcaacagatcagtgagatatcaatatgaggaaatcagaagaagaaaaaaaacacccacccttat

SEQ ID NO: 12109 - DNA, 921 bp, Arabidopsis thaliana landsberg
gctttctacattatttacgattatacactttccaacatggcggcctctgtagataatcgccaatacgctcgtctcgagccaggtttgaacggcgtggttcgttcttacaaacctcccgttccaggccggtccgattcccctaaggcgcaccagaaccaaaccaccaaccaaaccgtgttcttgaaaccagccaaggttcatgacgatgacgaagacgtgtcgagcgaagacgagaacgagacacacaacagcaacgccgtgtactacaaggagatgataagaaaatccaacgccgagcttgaaccgtccgttttggacccgagggacgaatacacggctgatagctggatcgagcgtaacccttccatggtacgtctcacagggaaacatcccttcaactccgaggcgcctcttaaccgtttaatgcaccacgggtttatcacccctgtcccgttgcactacgttcgtaaccacggccacgtccctaaagcccaatgggctgaatggacggtcgaggtgaccggattcgtcaaacggcccatgaaattcaccatggaccagctcgtctccgagtttgcttaccgcgagttcgccgcgacgctagtctgcgcggcggaaccgccgtaaggaacagaacatggtgaagaagtcaaagggattcaactggggatccgccggagtttccacctccgtgtggcgtggtgtccctctctgcgacgtactgcgtcgctgcgggatctttagccgaaaagcggcgctctcaacgtctgcttcgaagggtcggaggatcttccgggcggtgcggaaactgctggttcaaatacggaacgagcatcacagaaggaatatgccatggatccatcaagagacatcattttggcttatatgcaaaacggagagtatctaacaccagaccacggt

SEQ ID NO: 12110 - DNA, 624 bp, Arabidopsis thaliana landsberg
cctactttttgtcatgcgcttgatactttggatgccgatgactagctcaaggttatctggaagaagttggatatcacccagtgcaatgaccgggagaaggtcttgtacgcctcgggaagacttgagggagccgtgtctgattggtgggatgccttcacagcagcacaccccaatgcagatataccataacctagcaggagttccaagtgaacttccatgctcatcatataccctcaaggattatgaaactcaagaagaaggagtttctttcccttattcaagggaatatgatcgttagtgagtaccgtgattgcttcacccagctttcacgctacgcatcggaagaagtggatactgacgagaagcgccaagagcgtttcttagaaggattgattggaccactgaactatcaactatagagtcataccttccccaacttctagactctctgaacaaggcaattggccttgaaagcaaaagaagggaactgtctgaccacaataggaagttccaaggtcagtctagcaggaacacacgcccgaacaactcgcagggttctcaatttcgctctggaaatcaaggtggaacaactatcaagtgcacgctcttgacacaaggcagaga

SEQ ID NO: 12111 - DNA, 670 bp, Arabidopsis thaliana landsberg
tggttggtctgggggttgttcctttgttgattctgattctgattatttctctggccttgctgtccagagcgttgcacttgataattatctcctccctgatttccagagcgaactgcgaaccttgagcattgtttggccgggtgttcctgctggactgaccttggaattttctcctaatggtcagatagctccttccttttgctttcaaggccaattgccttgttcagtagtgtctggaagttgggaaaagtgtgactctgaagttgatagttcagaggtccaatcaatccttccaggaaacgctcttggcgcttctcatcagtgtccacttcctcaggggcataacgtgaaagctgagtgaagcgatcacgatactcactgacagacatattcccttgagtaagggaaaggaactccttcttcttcagcttcatgattccagaggggatgtggtgagcgcggaagttctcctgaaactcctgccaggttatggtatcagcgttgggatgtgcgctgtgaaggcatcccacaatcagacgcagctcctcgagtcttccgaggcgtacaagacttctctcggtcgttgcactgagtgatgtcagcttcttccaatgactttgagcagtcatcggcatcaagagatcaccgcatgagaaatgtggcgggtgat

SEQ ID NO: 12112 - DNA, 609 bp, Arabidopsis thaliana landsberg
  unsure (1)..(609): unsure at all n locations
ctattcggacgtacggatcgaggattcctcgaccggacagattttatatcgagtattccaacttctggtcgatnnnnnnnnnnnnnnnnnnnnnnnnnnnnnnnnnnnnnnnnnnnnnnnnnnnnnnnnnnnnnnnnnnnnnnnnnnnnnnnnnnnnnnnnnnnnnnnnnnnnnnnnnnnnnnnnnnnnnnnnnnnnnnnnnnnnnnnnnnnnnnnnnnnnnnnnnnnnnnnnnnnnnnnnnnnnnnnnnnnnnnnnnnnnnnnnnnnnnnnnnnnnnnnnnnnnnnnnnnnnnnnnnnnnnnnnnnnnnnnnnnnnnnnnnnnnnnnnnnnnnnnnnnnnnnnnnnnnnnnnnnnnnnnnnnnnnnnnnnnnnnnnnnnnnnnnnnnnnnnnnnnnnnnnnnnnnnnnnnnnnnnnnnnnnnnnnnnnnnnnnnnnnnnnnnnnnnnnnnnnnnnnnnnnnnnnnnnnnnnnnnnnnnnnnnnnnnnnnnnnnnnnnnnnnnnnnnnnnnnnnnnnnnnnnnnnnnnnnnnnnnnnnnnnnnnnnnnnnnnnnnnttttttattgagtatctcacttctggtagacctaactctttattgagggtacg

SEQ ID NO: 12113 - DNA, 620 bp, Arabidopsis thaliana landsberg
cacgctacgcaccggaagaagtggacacggatgagaagcgccaagagcgtttcctggaaggactgattggacctctgaattatcaacttcagagtcatacatttcccaacttccagacactgttgaacaaggcaattggccttgaaagcaaaaggaaggagttatctgaccacaaaaggaaatttcaaggtcagtcaagcaggaacactcgcccgaacaacgctcaaggttcgcagttccgctctggaaatcaaggcggaaacaattatcaagtgcaacgctctggacagcaaggccggagaattaatcagagtcagaaccagcaaaggaacaactctcagaccaaccagaggtctggtgggagttcacagaaccgtcaaggtggcgccaataacacgcaggccagaagcaacgcaccagtccaacccaacggctgtttcaagtgcggtgagctaggcactatgccacaactgccaaggctaaccagcagacccccagaaaacaataccagagaaatgccagacaccccgctcgtggatctgtcagacaagacacgcagaacagacagaggagggttatccgtcacgggaatagtactgagatgcgcatgtgtatgtatg

SEQ ID NO: 12114 - DNA, 493 bp, Arabidopsis thaliana landsberg
tcgttgatacgtcgcagggtcggacgaaggccaacttgctatagttgcgcctgccgcggcgaccacgacggctgtcgtagtgccgaacagaagggcggggctcttagcgccggagcaggtgtcggccctcgcggctgtcagggatgaggcgggcactgtgtcccgccggctgaaggaggtgaaggaggcactaagtcaggtccgttgagctagacttcggtgtttttttcggctttgctggggccgcggtcttacgtgtgttttgcaggcggctgacttcgtcgaccgcacagcatcgggggcgctcacggcagttgtgtctgccgaagtcgagagacttcggacgcaacatgctgacgccgtccgtgaaaaatcagccaccgacagtaagtgccgcaaggtggcggacaaggtggcgcactggagagggagaaggctgactccggcgccaactggcgggggagaggagggagaccaacgaggcctcgccaag

SEQ ID NO: 12115 - DNA, 1248 bp, Arabidopsis thaliana landsberg
  unsure (1)..(1248): unsure at all n locations
gttggggtcgacaaagactcactaaatccatccgacgcctaagattttatcttggcttcttttgatgtgaacgcgtatccaccctgatttgattcccatagccaagagcctgaacgatgtagtgtataagaagtgtacgggaaagaaacggtaatgaatccacaatggatatgtacagaaagaaataaaattatatagattatagagaagcaaaattatgatgtatttgcaaataaaatattgtgcaaataatctttatttaatactattaaaagagtagctgttggaaactataacaggtaatttaaaatattttacaagttcaacatttaataattttgaaattcagtccaacataactatcagtatggaaataagccaaacaaatgactcaaaataagaaatatgttttcacattattatttaaacatttttagtcatttgtttggcttatttccaaaacgatatttatgttggacttgttttcaaaagtattatgttgaacttgtaaaaaaatttatatagctgttgaaatttccaagaaaaataggttttacacctaaaccctatccactatatatataaaccccacttttgtctctatctctttactaatttcttaaaccctctcaacaatacgtaacaatggcctccaaatccgtcgtcgttttcctcttcctcgctctcgtggcttcctctgtcgttgctcaagctcccggaccagctccgaccatatctcccttgccagccactcctacaccgtctcaatctcctagagccaccgcaccggcaccttcaccatcagccaatcctcctccctcagctcctaccactgctcctccggttagtcagccgcctactgaatctccaccagctcctccgacgtctacttccccagccggagctccgggcacaaatgttcnnnnnnnnnnnnnnnnnnnnnnnnnnnnnnnnnnnnnnggctctccaaacgcagctgcagttagcagagtctccctcgtcggaactttcgccggagtggccgtgatcgccgctttattgctgtagaggctattgacccatcgaatagattcactcgactcattgtcgggttcattgtttgtccttttgttactattcaattatgtagtctatagtgttttctatgatgctttattatcgtgttattgttggtgttatatttgttacaattttttttataatttccttgattattggcattcttgaataattcatggtcacttgaat

SEQ ID NO: 12116 - DNA, 621 bp, Arabidopsis thaliana landsberg
catctgcttttccagggtgatacatgatatccaaatcataatcttttattaaatcaagccatcttcactgtcttaggttgagttctttctgagtgaatacgtacttcaaacttttgtgatccgtgaagactatgcacttgtttccaatcatatagtgtctccaaatcttcaaggagtgcattatagcagataattccaaatcatgtgtcgggtaattcttttcatgtttcttcaactgtcttgaggcataagctattaccttcctttctgtaaagctatttaccaaagccagagccatgataacactcgtggttgcacggttatcctgggtggtcactccatattccatttaatatgaaatgatcttgtttaaccatcgggttatcctcataatacaaatttcatcatcggaacaaaagtatcatcaaagaataacatcgtaatgaataagttgagcagtagcacaattacttagcatattatttatcctaggtaatcaaggaatagggttggtattctaggtaacctatttaggcaaacccatcaaatttatcaaataccaaaagtaatatattatatcattatttgggtacacagaaatcagagggagatcacttgctt

SEQ ID NO: 12117 - DNA, 592 bp, Arabidopsis thaliana landsberg
  unsure (1)..(592): unsure at all n locations
tccccattaatatcttctaattctttattttctaaatcaatatatataacttaacttaaacatatttaaactcaattaaaaaatttaccctttatattttcatttaacaactttaacaactactattttaactacttttttaaaataaacttttaacacaatattaaaataaattttaaaataaacccttnnnnnnnnnnnnnnnnnnnnnnnnnnnnnnnnnnnnnnnnnnnnnnnnnnnnnnnnnnnnnnnnnaaacaattcttaattattnnnacaaaaatactttcnanttcattcnatttacaccaatttaatccataaatttcanacacaatanantatatcaaccataannnnacttnatntattnaatccaccanaactnacaanactcaaacccacaacttccacccaccannaanaanaattttaccatanaancaannanntaaacctctttccaatatataacatnaattctancaatntaattnnnttttcatnatnatccnatnatccttctanaanatanatcanntnaactcaaacaatctttctanttacttctttaanaantttttttatataa

SEQ ID NO: 12118 - DNA, 984 bp, Arabidopsis thaliana landsberg
acacgcccactataagcccacttcaagcccacttcaagcccaatcccaaaattacaggcccatctatattaagtaccgtttagataaaccgtaccgtgcttgtccaaatcgaacaagaaagaaacatcttttattggtgttatctttgatgcaacagaagtacaaagtacattacaaaacgaggattgctacatgctataaacatacaaaaatcaacaagctttctttgcaaaccagaaaaatctaatcagtattttgggacaattattgtttttcaagtgtcccatatcataacaatggcaatgacaacaactccaaacaacacagccaaaaacttataacgaggctcatcaacatgaactttcttgtttggtcgatacccttttgccaacaaatggttcacagacacatacacaaatatcccacacgccaagctcatcgacaatgcgaatatccaatccgcgatggacccttgagtcgttgcatcgatgactatcccgatggcaacaccaattgggctcgagatggcgaatgcgaaagaataagtgattgaggagaataaaggacggtcaggaatcatacggagaagagctattcccattgcaatcgctgcaaatatcttatggagtgttattgtccagagagctctccaagcatctgatttagtctctgaaataccaatagctatgccttcgaagacagagtgaaaacagagagctacgatcaatagaatgctatctccaatcgaagtttcagttgttgctgacctctgattcgatttgtcttctcctgaaacgaaataaagcacaaaactttcaacacaacataattctaattcttgattgagattcacaagttcgaaacttttggtaccttgaagctccaaatcagtttgggtctttgagtataatgagcgatgaccgaatcaacaagcattggtcaacataaaaccagcccaagcccacatataagcaaatgggtaag

SEQ ID NO: 12119 - DNA, 1022 bp, Arabidopsis thaliana landsberg
ttagggtttggtgcaagcgttgactctcaaggtcttttaacttattctatacaagatttttactattctttttgatttgtaatgtgaatttttaagtattatgtaatgcggatgagaagtatagtgatttggctattttttttttttttaatataatgttaagttatattcaacaaaaaatatagtttttataattagtgaggtttggtaattggcttaaattacgtaaatatattgggatatggagatttaagtatattatttacatttaactttatcttagattagaaaatctcatctctatataaaaaaatataatttataattttatttttatgaaagtctattataattcttcctaaacacttatgtattctttattctcatcaaatttatcaaaatatgtttaaaaatgaataatgatttgaggaaatttattttaaaagaaagcctttaattaaaaaagtgagtcatatacatatataagagaagggggaaaaaaaaagattatttagcttaacgtgaagttaaaccttctagaatgtttttttttgggtgggtctcaaactctcaatggtgggatcatattaatcttcatggccacggtgtttttgcgtatatttgacggcgtcgcttcgtacacttcgtgtttggtccatacgaaagtgctttccatcttccttgggacattttctcctattatcatgtgtgtaaatgtctccttttcgatttagtcacttgtcccaaaagttttgaagaaaataacatcatttgcgtttcttttttagtgttctctttaaaatgattgaactgtctaatagattaattttcgatttaataaaattaactgatcgccaaaagcaaagaactatcaatttacgtgattggaaattacgttaaaggagactgactcatttcaactattttcattttggaatatattacagagaactaaagaccacatgtgaacgcatagagtattgcgagagcattgactatctttttctccaaaactttagttt

SEQ ID NO: 12120 - DNA, 955 bp, Arabidopsis thaliana landsberg
tctacaaaatgaagcaatttttggttttctttttaggaaattaacatcaattattgttgaatcaatcaaaaatggatttgccagtttttggatggtatttatggattttgtccttttaaaatagtttatagattttgctctttttagactacataaatgtgatttaacatgtgtcttttttctacgtttgagtttaatcggttgcagttgttcttaaggtttagtatttaatataaaatatgtatttttgccaaaataattcctaaacacgtacaattataaatgtaaaaacggtaaatctgtaagatttcagtaaaaatgacaatccgtaaagatttataggcttctactttggttttggatccaagttcgatttctagaaagtacactttattacgatgaatagtataatcggaagttaaagtgtgttgcatgcaatatcataagagccgtgcctatgggtaagaaaaaagacatttgccttatgtctcccaattataaagaatttttagggtccctaaatattagaaatggtgtattagaatagttttgaagtaccctgtttttcgtgaataaccatggttcaatttctcttccctgttttttcatataattttttttttctcttaaaagtgaataacctgatttttaatgttttgtttattcactttaattattttaaaattgttggaacctacttcaacgtttctaaatatttataaatttaacatatactaatccatcttcatagtaactttgtttataaataatgattgtgctgtttgataataaaaaccaaaaaaaaatctaaatctttagaaacatgtctttgaatttgttgaaaacgttaataaaactgaaggaagaaaattatgtcttaattatattatttgttttattttcagtaattttctttagttttcgaaattggttttattttaaatttttttttgaa

SEQ ID NO: 12121 - DNA, 2564 bp, Arabidopsis thaliana landsberg
ttctctcaatgaaaggcatttgtaagttaatggacatgattattagccttgggcattttagcatgaacaagatactctgttttccaagttttggattacattgtttactctaatgtgcaggtttgggcaacctatcaaggttaactgggcttatgcgagtggccagagggaggatacatcaagttggttcacaatcttatgcttgatttcttgctaaaacagtattttgggtgttctattgatacaataacgcacttctgtgatcttcatgtgcaggtcacttcaatatatttgttggggatttgagtccggaggttactgatgcaatgctgtttacttgcttctctgtctacccgacttgctcgtaagttttttataccatcctcagcattcttgtattggaaatggaagtttaagatttgcagaaactcttccgacaattgctattgtatgtagggatgcaagagttatgtgggatcagaaaactgggcgttcaagaggatttggatttgtttccttccgtaaccaacaggtacttgactgtctaactctcagtccttgtgtatagattggcttttactttaaacactgatcgattgctgcaaatcttatttccttatgcaggatgcccagactgcaatagatgagataactggtgagtgttgcaatttgttttcccccttgatagttgatgttaatattttgttattttagctttgtgtttttgagcttattgtaattggtgggagattctcttctgcttttcagggaaatggcttggttccaggcagatacgttgcaactgggcgacaaagggagccacttctggtgaggacaaacagagctctgattccaaaagcgtcgtggaacttaccagtggtgtctcgggtatgtttaactattacctatcatgaaatagaaaatcaaatggaaatagagaaaagcctcaaataaacttaattcttaccctttgatgtttatacattggcttatttgttcctgcagaggatggtaaagatactactaatggtgaagctcctgagaacaatgctcagtacacaactgtttacgtcggtaatcttgctccagaggtaaaatagaaaaactgttataggtattctgtgacttaactcaaccatcatccataccttttttgaatcaaagatattttcgttatccaggtgtcccaggttgatcttcaccgccacttccattcccttggtgctggggtcatagaggaagtccgtgttcaaagagacaaaggtttcggatttgtgagatactctactcatgtagaggcagccctcgctattcagatgggaaacacacattcctaccttagtggcaggcaaatgaaggtaaaactaactaacttaaactgttcttttgtgggactcaccattctttttggtttgggaatgctaaaattgttgtgttcgttgttcctacagtgttcttggggaagcaagccaactccagcaggaacagcttcaaacccgcttcctccaccagctcctgcaccaatcccgggattctcagcgagtgatctcttggcttacgagaggcaactagcgatgagcaagatggcaggaatgaatccgatgatgcatcacccgcagggacaacatgcttttaaacaagctgcaatgggagccactggttcaaaccaggcaatatatgacggtggttaccagaacgcgcagcagctcatgtactaccagtaagatcttcctcggagccgttacttgagcgaagagttctttattttcttcttttttgttatgtaacgtctttattgtatctttttcgtttcttataacttatgttcttgatataatgttatcatgtaactgtgggtttgtggtttgtgttcctcgttttttcttttgttaactactacggtttacgtttttgcacatgttcaacttctttctctttctctttctctaacttaatcttatttattgggtcgtaagttcgtatatcttatgtagaaccattataatttgaagtttttacctctcaaaattatgtttatctcatttcatattataaactcaacaatactgtgtttaaatggaatcaagtacttctcattcaatactacacactttgtacttgtgttgttgtaaatgtaaacatagagacttgagttctgtttctctgttatcttggcttcgagtcgtttcctttgctgcggaatgtagaaagtgagaagaatgatcgcttaaaatcaccatctttcactttaaagctcgcttgatgatgatgtggttgaatcatattgtttgaagctgcgaaacacaaaagacaaaactatggtcaagaggagttttcatgacatcgttctaagaccctaatgaagctgaaatataaaaagatttaataccttgttcatcctcagaaagctgactctgagaagatgccattcttgatttccttaactcatccgatgatcgataggcacaatcatcgtctccttcagatgttgttacagagacccaatccattagactatctgcagcacgagttttcttcccaaacttaaaaaaacgtttgatccc

SEQ ID NO: 12122 - DNA, 835 bp, Arabidopsis thaliana landsberg
gcacaaggacagtaaatgttaacaaagcatgatgtaaccaacccataaagtgataaataggtagaaagtgttaggatatttgatgaggaaagttagtgagtatatagtaagcataaacttgtagcatattgtttagcatatactggtcagcatattgtttattatgtagctatcgtgtagttttctatgttggcaaccatcgtgttgtcgtttatatgcaggttttagaaacatcagtttataggggaggtgctgccgaattttttactgacaataatattttttgtacataggtgttcttccgacttgaccttctccaccgttagctagactcgtacattattctcaggtatacattgttttcgtaatttctcaggtatacattattctcagttttaatcgttaaccgtagcgaaccgtatgcgtcacccgttcgggaacggcgaacgtcacattggcttgtgaggttcgccgttccggaattgtccacgtattttggacagcctgagagtgtaagccgatgcttgtgatttgtgacatgtgccttacgattgacgcggaatttcggttgtgtaaccagttgttctccaacacaccatgttcaggcgtgtgcttggagagcagcggggttatgctgccgaaatttagcgacaatcgtaggctacacgtcataaatcacaagcatcagcctacactcttgggtgggtttagggcctttacctaatagggatgtcactaattaagcacggacgatcgttgatgttctttgacttttgtttacctttaaaatggacggtgatcggagggtgatgtatgacggcgtgagaaaggatgg

SEQ ID NO: 12123 - DNA, 623 bp, Arabidopsis thaliana landsberg
  unsure (1)..(623): unsure at all n locations
cgaacgggtgacgcatacggttcgctacggttaacgattaaaactgagaataatgtatacatgagaaattacgaaaacaatgtatacctgagaataatgtacgagtctagctaacggtggcgaaggtcaagtcggaagaacacctatatacaaaaaatattattgtcaataaaaaattcggcagcacctcccctataaagtgatgtttctaaaacctgcaaataaacgacaacacgatggttgccaacacagaaaactacacgatagctacataataaacaatatgctgaccagtatatgctaaacaatatgttgaccagtatatgctaaacaatatgctacaagtatatgctaaccattatgctacaagtatatgctaactatatactcagtaactttccttcatccaatatactaacaatttcctaactatataatcactatatagttagtttaacataatgctatgttaaacaatatactttaccatgtgctaagtaactanaaaaatttaaaattttacctgtcggactaggaggcgaggcggcgtcggtgcggctgcggcgagggacggcggtggagagagctggtgccgaggctctcggcgcgaggcgagtggtggg

SEQ ID NO: 12124 - DNA, 1020 bp, Arabidopsis thaliana landsberg
gggttttataaacaggaaggatgctttgtgaaaatgtgttgttagcttctgaacttgttgaagggttacatatcgaaggtgaagtaactaagggctgcttacaaattgatcttaccaaggcttatgacaatgtcagctgggagtttctaatcaacatccttgtggctttggatcttcctcctatttttataaacttgatccgggtttgcatatctactccttatatagtattgcttttaatggtgagttgattgggttttttttcagggtaaaaaagaaatcagacaaggagatcccatgtcttctcatatatttgtgcatatcatgaatattttagcaaagtcactggataagggcgcagttgaaggccgtttcatgcttcacccttagtgttctgcccctctcattactcatctcagctttgccgatgatgtgttagtcttctttgacggttctaaggattctgttgctgggatcatatccattcttgatgagttcagaattggttctcgtcttggaataaacaggcaaaaaacggcttttctgttggatggtggtgacttgcataatgtggccactatctctgagcgttttggtgtttctcagggtgttcttccggttcgttatctggggattcccctaatgacctagaagatgaaaaaacaagattatcaacctcttcttgacagaattaataaaaagttctcctcttggactgtcagacatctctccattgctggtcggctttcctccttcttggtgtcagttttcctccatcccaaccaatgtctccaaaagattgagcagatgtgtaatgcctttctttggaaaggtgtgcctacctacgctagaggtgcaaagatcacttggaacgtagtatgtacgcctaaggaaagtggtggctttgggtcgaaaaggttgatctcttggaataaggttttcgttttccccctcccctggttgcttttcactaaggctaattctaaatgggtttcttggatcaggattaatcttattggt

SEQ ID NO: 12125 - DNA, 593 bp, Arabidopsis thaliana landsberg
  unsure (1)..(593): unsure at all n locations
tgcgtgctgcagcgccgagacggtgtggcggggctcttagcgccagaagatgtgtgtcagccctcgcggttgtcatggatgatgcgggcgctgcgacccgcggctgaaggaggtgacagaggcgctgagtcaggtccgctgagatggacttcgttccccccccttttttttaccggctgctggggccgctgtcttacgattgctctgcaggtggctgacttcgccagccgcactgcgtcgggggccctcacggcagctgtggctgcgaagtcgagagcttcggacacaacatgctgacgccgtccgtgagaagtcggccgccgacagcaagtgtcgcaagctggcggacaaggtggccacgctggagggagagaaggctgacctccggcgccactggcggcgggagaggagggagaccacgaggctcttgttaaggcgcaacgtgcgcaggcgtgagctaacctggcacgtgcgnnnnnnnnnnnnnnnnnnnnnnnnnnnnnnnnnnnnnnnnnnnnnnnnnnnnnnnnnnnnnnnnnnnnnnnnnnnnnnnnnnnnnncttgcagctgtgtatgtcggtcccttcagaata

SEQ ID NO: 12126 - DNA, 1251 bp, Arabidopsis thaliana landsberg
ttgctcctattccccttatagtgttttgtgcattttcctttttctaaaatacataagaagtcccatgagtttttggtctacctgttcataacatgtaagactatatggagtggcacctaatatagtccatacagtgaataacttagttcatactgggtcaaaggacataacatggtaacttagtcttgttcatacggtcttacttcatactttcataggttcatatatagttgaaagttcatactcctgtacaataaaagtaaaactaagagcatcttagtatttcaatgagatacccaacaaaaaaaaaaaaaattagaaaaaaaagaaagtaagagagaagaaagaaaaagtaaaagagaaggagaattgagttcctcgtaggaaaaactttgaaaaactattctcatctaaattggacagatgtcatcgtattattagttcaagtattaaataacaattaatatatctgttttgactaaaattttttttttttttttttatagaaacttttcttacttttatagatgctctaatacattcacttcttgttcattaagtgatttttgtttggtgcaagtcaatatagtatgttttcatgaaattgtgttagcatattgtttatttatatatatggtttagaaatcgaattagatcggttaaatatgatttgaaaaaaaaaaaatcggtttagtctaaatggaaaagttgatttatttggtgtagtgtctttttttttgtgtgtaaccaattggaatataataatagtaggtagtagtaaatagtaacttactatcttgtgaaatggtaaaattgcacatgaattccgtaatagattaaataccaatcatgtcaatttgcaattgtgttagaaaactgcttaccactcacatgttcacaatttctttacataaaataaaagatagagtaatgtttatacattccaaaatgtgtaagataatatttttgcattttacattttcaaaacacaacataatttgcattatctaattaattttgcattttacatgtaaagataacaaacaataaaacaaatttgcgtttcgtaattttgttcactaaaatattatatttttgatcaaatgtatagtggcgagtatttttcagtctctttgatgaattcatatttctagaaaaatggtttagtgatgctggttcaatttggatagttagcaactaagcatgatgataaaatgttaggtaagaggtaacattatatacctttactcc

SEQ ID NO: 12127 - DNA, 716 bp, Arabidopsis thaliana landsberg
tcctacctttctccgagcagcttctcttctttgctgctttgctccgccgaacattctcacctgctgccaaaacgtccacaaccacttccttctctacttccgccaccgcaaaaaccaatggaatcaagtcttcctcttccgatctgtccaagccatacatcccggactacaagctcgccttcgagcatttttgcttccacgcggcaagcaaagtagtgcttgaagagcttcaaaagaatctaggcttgagtgaagagaatatggaggcttctaggatgacacttcacaggtttggaaacacttctagcagtggaatctggtatgagttggcttacatggaggccaaggaaagtgttcgtagaggcgatagggtttggcagatcgctttcggttctggttttaagtgtaacagtgtggtgtggaaggcaatgaggaaggtgaagaagccaaccaggaacaatccttgggtggattgcatcaaccgttaccctgtgcctctctaaattatcattcttctaaattaaatcaagtaagatctctaattactccaaccaaaagatacagtttggttggatgataggagttatttactgatcattcgtatctaagtctggtataagaatggatgtggctagagtcctgttcagcttcaacttgttttattttttggttggtctctattggatcttcataaactttgagagattaaagaaaaa

SEQ ID NO: 12128 - DNA, 636 bp, Arabidopsis thaliana landsberg
ttcttacaaattagtccctttaatttgagatgtgtgttcactatcacttctttaattcttttggcattacatgaaagtatgagacttaatttacttacaagattaatttagtttctatatgagaaattagttagttacatgaattctttgttgtaaaattttcataaaattaaggtcttacattcacatttccacaaataaaatttgataattctacataatttttgtggtaatttcttagtgtagtaaatttagtttagtatgtactagtactgacgttcataaaccttttcattgactaatgttcaatattagaaaattcgtaagtgtatatcacaaactaaataatcactaaaactctctcaagcactaatatcgaagagtctacccttactacgtcatctggcgccggtgaagcttctgctcaccggcgtcgggatttctttccgttgcttcacacatttcgttacctctttctctttttatttctgctttggctcttctctcaatcatcccgaccacattttcaatcgattcattttttcgactgctcattgaccagtgacagagggcagaagagttggccggcgacccttccttctcctcagcctttgtctgcatcgacctttttgaagt

SEQ ID NO: 12129 - DNA, 1155 bp, Arabidopsis thaliana landsberg
  unsure (1)..(1155): unsure at all n locations
caaaaccaatctaataagaatttcaaactttaattgatagtaatctatttgcagccgactagagatggggtggttcggacattaaagaggctgcagaacaagattcacggacctgtgagtacctacttctgttagaacttctgggtctcaattatgttttgcgatgtttctaatcccctgatgtctcaaccttcttaggtactaaaccaattattgtacctaatgagaaccgctgagaagacagtacaaatacgaattgctctggctcttgcacatctttgtgaccctaaagatggaaaattaatctttattgataacaatggtaagcatctcatatattcagaatttcattttctaataaaattttctgtggttttttgtttctgatctattgaagtattacttatgcaggagtagagtttttgttggaacttctctatttctcaagcaataagcagcagagatatagttcaagtgctttatacgagttagctaaaaaagctacatcctttgcaccagaggattcagctccttgttcacccacacaacaggtaaaaaaatctccatttcttctttcaagcatcaaataatttgtgatttgaggtcttgacttgttgttattgattattatactgaaggtgtttctgggtgaaaaattcgtgaacaaccccactatgtccgatgtcacattcctaattgatggtataacatttaaccccatttatgattctatagaatccaccggtgagaacattctttaatgagtatatccatgtcctatgttaggtaaacaattctatgcacacaagattggcttggtagcttcctctgatatatttcgtgcaatgtttgatggtctttacaaggtaagctactgaatcacgattgtggtaacttatctcatcagaatatcatctaactaactttgagaactggatataggaacgcaatgctcaaaatgtggagataccaaatataagatgggaagtgtttgagcttatgatgaagttcatttactcaggaagaattaacannnnnnnnnnnnnnnnnaaagatctgcttgtagcagctgatcaatatcttatcgaaagtctcaaacgtcaatgtgaatacaccattgcacaggtaacaaacgtaaaaccaaggtcttaattt

SEQ ID NO: 12130 - DNA, 812 bp, Arabidopsis thaliana landsberg
catgcctgcagtctagagtctccagattaattgaattcgttttgtatttctcggcagaggacaatggaggcatttctaagtaatactgttcggcaactcaacttctctacattgctgctatatacggcgttcgaaaataattctaagaaatcatactgttttcttttcttctttttctttgttttgtaatttaaattcttatccgatttgtttatttaaagatgtaattgtgtggtttggattatttgattggatttctactagaaccctttatcatttatattttgtgtctcactacaatatacataattatactattataatgttttaagaatacacttccaatgaaattggtagaaaaatcatttaggtttgttcatgtattactcttttctttactaatcgtttcatcaatctatgtaataaagactacagcgacccaaaacatttggaacgttttgaactttttcttatagcactagaattttagtctctatgattacaaagttaagtaatagcatattgtaaatcattgacaacaaaaacagtttatctcagtttgcactcatattaaaagctacaagcgatgcatatgcaccacctgaaatctccattaacgtttcatgtcttccactctccgcgatcacaccgttcttcacaaccgcgatcatatcagcgtccttgatggtagtgagccggtgagccaccacaaccgtggtccggttcaccatcacctgatcaagcgcatcttgcaccacccgctcagactctgcatccaacgcgcttgtcgttcatcaagcaacaaaatttta

SEQ ID NO: 12131 - DNA, 748 bp, Arabidopsis thaliana landsberg
ttggagttaaattcatatctcgctctcacacttcgacaatccgatttctatttttttcttatatatctatgatccatgatattcctgtttacgtacttctctttgtctcagattcattgtctctgtttccaaaatgatcacgtttcaccaccagctctacatattcgaactcaagcacaacgtgagtttcattcacatgtcttatatatatataaactaaccctcaaagtctctgtaacaggtgaagcaattaaagatcaactgcagtgagaatgagaaacggaacattaaggtgacccacatatctctacttccacataatgtatgtttctctaccttattttgagttctgcaatgttcagagagtccttgaaaatattccttaaaattcatccgatcaaggttcaagatcaagagatcatttctcagcatttctttctaattcaagaacacaatgagagcttcttcgtacaagtccacgtcactatccatttccatgtatgtttaatatattctcatatatgtctctattggctctaatataattttgttgatgggaattctacatttctggttagattttctataaatatttttatgccacaaagatgaaggaacgcaacctagaagcaaactggcaaagaccttgtggagttatgataatgctaatgagctatcggaatagattataagatgcatcaaaaatcccgcatatacactcatgaatcttctgatggataaaaagagt

SEQ ID NO: 12132 - DNA, 1157 bp, Arabidopsis thaliana landsberg
tggggagatttgaaatgggcgtaagtgggcatgccatagttgaccagctctagtggtagaaacggggcgatgtttgaatattaaacgacacgatcgttgaccaaagaaagcagggtcgttcttaaacgcaatcagagagagaagcgagacgagagacgataatgggaggagctttatcaattgtgtttggaagtggagaagatgcagcagctgcagggactgaatcttccgagccaagtcgcgtcctcaagtttagctcttccgctcggtggcaacttcatttcaacgagatcaaagaatcaaacaaactggtaacgtctcttagactctcgatttgattcaatcgatttcgtgtttcaatggaatttaactgatttggtttctgtgaataataaagctggtggttgatttctcggcttcatggtgtggaccatgtaggatgattgagcctgcgatccatgccatggctgataagttcaatgatgttgatttcgtcaaattagatgttgatgaacttcctgtaagtatctctctatcataaagtcttcatctttctttttgtagtgctatcaatagtttctgactttatctgtctctgattgatccatagactatagtatactgttttgttttaccgtaaattcctccattggagtgttgtgagtagaaattggatagctttatggtacataagtgcagatcaatctagttctgatataacatgagatttggtgttttgtaatgagaaaaagatctaaatttggtgcatctctgtcatggttatactttgccaaccaaagtttcaacttttgtgtctgtctcttgttttgattgatccatatttctctgtttttctctgattatgagtagatgttagattatgttatggtacaactgctaatcattcgaattctgatatatagatgagaagttggttgaaatgggttcacatagctgcttctgtttcaacagttattggattttgtactgagaaacaattttaaattttattgcatgactaatgttttcaggatgtggctaaagagtttaatgtgacggcaatgcctacctttgtgctggtgaaaaggggtaaagaaattgaaaggatcattggtgccaaaaaggacgaacttagaagaaagttagcaaactcagag

SEQ ID NO: 12133 - DNA, 916 bp, Arabidopsis thaliana landsberg
tgattaactcaaccacatgctaaatcatatcttatgttaaacgatctttgtttttaaacttaatgattatcataaaacgaaatttatgatgaaacatatataatctttatcttgtttaagtatgtaattcttgtatgtttgtatacgccttgcaaatcaaaaaactagttgctgtttttggcattgtgtttacgaaatatttattaatattttaaattaattaaataaatgttcttatttctcaacaggaaacaatatgtattttctttctttataaaattacaatgaattatttgttttaagctgtctatttccaagaaacaaaacacaaaaatgataaatttataatagtcacataacctgtcttacaaaaaaaaagaaaaaaagcgaaaagaaatgtgacaacagaaaatggttttgataaccaataagaatcgacaaaaaaaaaacttactccacatatacacttctcttcactcttcagtcttcactattcagtctcgagtatttcaccgatctataaatacactcctcttctccaccaaaagtatcatatcataccaaaaacataaagccaaaatataaacacataagccttttagcatgagttcaacgttgagcgatgtgtttagatcgcatcccattcacatcccactctcaaacccacctgacttcaaatctctcccggattcttacacgtggactcctaaagatgatctcctcttctccgcctccgcctccgacgaaaccctgccgctcatcgacctctccgatatccacgtggccactcttgtgggccatgcttgtaccacgtggggagcgttccagatcaccaaccacggcgtcccctcgcgacttctcgacgacattgagttcctcaccggaagacttttccggcttcccgtcaggggaagct

SEQ ID NO: 12134 - DNA, 591 bp, Arabidopsis thaliana landsberg
cttctcacacacacacaaacataacatctcctccattttctctcttctctctttttataagaactcttcttcttcttcttcttctctctcaattccatctctctctctctttctagttcttgttccctttcgaatcaagtgatcatggctcaagaagagatacagaaacctactgcctctgttccagtggttaaggaggaaactcctgccccggttaaggaggttgaggtgccggttactacggagaaagctgtggctgcgcctgctccggaagctacggaggagaaagttgtgtctgaggtggccgtgcctgaaacagaggtgacggcggtgaaagaggaggaggttgcgacgggaaaggagatcttgcaatcggagtcgtttaaggaggaaggctatttggcttctgaattacaggaagctgagaagaatgctttggctgagttaaaggagttggttagggaggctttgaacaagcgtgaattcaccgcgccaccgccaccaccagctccggtaaaggaagagaaagttgaggagaagaaaacagaggaaacagaggaaaagaaggaagaagttaaaacagaggaaaaa

SEQ ID NO: 12135 - DNA, 629 bp, Arabidopsis thaliana landsberg
ttcttttgtactaacagagggttcaacaaaattttcttctgaactattctacctaagaaagctaggaaaaatggggttgccctctggttcttatttttcattccccttttcattttcttaaggtttgaaccaaaacaagtttttgtggttaatccttccttaacctggtatactgggaagtttaacattattaaacagggtatttagtagttaagtatgtctctaatttttcttaccctcagtccaaaagtatttctattttccctctatttacttagttttgggcagtatacttatttaaattaaactctaaaaaatcttgcagtacttagggtgtttgttatttttcctaagtagttcataatatttaggacctaggaaaattggtttgaccaaatttggttggataaattttgagttatgaattttgcaagttctgtactcatttagcagaataaacttcaaagggttaaggaaaacaggtttgcccgaggccctggtgtttctctaactatcctttcacggtgccctgcagaactgatccctgagttctgactcgcaaaacctctggctttctgtcttcacctaggctcttcccactgtacagtgactgcgggagaaaaggggtg

SEQ ID NO: 12136 - DNA, 723 bp, Arabidopsis thaliana landsberg
actttaaaaaaaaaaaaacaggacatgagatattaactgtttttgccaattatgatgaattttaagcaaatgattgcggagatcaatgaatgcgcttgacaaaaaaaacaaatgatattaatatggttgttgacccaaataaatcccaaagtagggtttattgtcggttttagagtgagattttcaagttgtaatcaacagctgataagagttatcatctcaaagatgtgttaagatcccattgagatggacaaaacgtaatatatacggggcatggacattggacagtgcattcattgccaaccggtgtagagttagaagttcatgaaacttaataattttcaaactactttacctcggagaaagcggtggtgaggcaagagcggcacttggacaagtaggagtcgcctgacattggagctttccaaaaacggtattgggagcatcaccattggaaccatgaacgaaaccatagttagaaattgtgatagatattgcacggatgacacggttgaggttttcctcgtatggactccctggtttgtatgtcccttgactgttgatgcatatgtggtgcagataagcattggtttggttcagcgaattggtttcattcagggacataacacagtgtataaaaaccctttgtacggaaatcatagcaaagacaaggacagaaccaagaagttttgatgcagacgatgaagacattgtttttggttt

SEQ ID NO: 12137 - DNA, 1419 bp, Arabidopsis thaliana landsberg
aaaatgcgcaatcaaaacccacatatcaaagagcagtcattaagaataagacatcctcatgttatagcttgaccaaatcacatgctctacacattcttgtcttcgcccttatgttttgccctaattactccttcggacctcagctattattgaagatcaaaacctagaccagatctaatattgtagagacggcgagtttggtgttctaaacatcatgatcaccactttccattgtttttgctggtcctaacggaacactcaagcacccttcctttttccagtagataagccaatgagatgtccctactgcaatagaacggtatgaatctctggacactctgttattgatttgatatggaaagaatgcttgcctaaaacaaaaacgaagctcactattgttatcaagagatggtggtttgaatcagtatttaagaagatatgatttgtggcaaagacgctcactatgatgtgtatgagacttggtttgatgtagtgcagtatgttctgatagtagattatcaatcatcacaacagcgttttttggtgacaaaagtctgttcattgcctctgccacgtcctgaagaagatcaagtaaacatccaaggacctccaaaaacagatgatccttattacagagattctcaatcttttccgtacttgttccttgattgatccttttcactatgacgaaattaaattgacaactgtttccatatcttgctatgaggaacaaaatttcctagtcatgactataaaatgaaaagtaacctattcggcattctgtttatgacactaatagagaacaagtgtgggaaagggaaatgacggtattcaagtgtgtgtcttccattgaccggaaaataaggtaagaaaaccctcacctttcttatcatgtgttgcgcttggaaatggaagaatctctttatgcttcttttcgccacctctaaatcctccaactgcatgaacacaattctatatcagatatatgagtgtgcaccatcaactaagtaacagtccaaaaccatctaactgactaatgcgcgaagacacctacattggctcaatctttggctgaccaggttttctgttcctagcatcaaatactatattctcgagaaaatccatattgctaacaccagggatctcaactggagtttggagactcaagaagagaaccgcaagagatccttacatatcatgcagatgctcggctttaaacacaatgatttatgagaggggtacgagtagagatactctaggaatcatatgtttcaacaacatgaagattgagaaacttaccttgaaaaaatgcgttcataagcaaaaaacttacgagcctcaacctttcataatattagttaggaaatatcagcaatgatgcaaatgattcacacaatttggaattaagttaagcttgtc

SEQ ID NO: 12138 - DNA, 657 bp, Arabidopsis thaliana landsberg
ctagcttgctaattgtcttagagcttgtctgaaaaaaataaaaaaaatcaaaagatcaataatgtgctgtgatcaaagtttttggatgagtagatttacataccttaagaagagcaaagatggatactcctccagcgacaagaaaggtgcacatgtattcagggaaagtgtatcttattccgtaaactaaagttcccattagcataactacatcacaaaaaggaaatcatgaataagataaacagagagatcttcttagaatagagtttcatcatcatctattcgagatcataatagatagataccttacctggaatcatttttgacgattttgccaaaacctgcaataagcaagatcagaattcaacccatcatttacctaagaaacagttcataaaccataatctgagtattactactgatgaggtataaagttacctgagctggataactgatatacttcaaggcttcaattcccatggcaggaccaattgtattagtaatgcctgcactccaatacgtccaccatggtgctccaccgttaccagcatttgaccagagcttgatcactggacattatcacattacagacaaatacaacatttcagctccattagtctgtattcgatgataacaaagtagagatggaattgaaca

SEQ ID NO: 12139 - DNA, 700 bp, Arabidopsis thaliana landsberg
tatcattgttcaaatctcttgatattacatttggtaagttcatctcctaattacaacaacaacaaaaaaagaaagcaagaatctttgttatcacttcttcttagaacccaatgactcatcatcatcatttttccaagctgcttgccattgcttatcatacaatgtagtctcatcaaacaagttcttgagtttatccacatcctcattcttacgaataaacaaaactccagccacagccacaaacaatagtgtcttgcagaagaaattccccatttgatcaacaagtcctactccggtaagactatcgacaaagtaagccataaagaatcctatcatcgccgcacgacctacaaagattaagagtaagtaacattctttgtgtatgtgtttgatcttttgagagaggaaacaaataccatttaagagttcagcttcaggtaagtggtatctcttaatccaagcccaccatggaataatcgatgtatcgaaaagcactggttcgtcgttactcgttgtttctggattctcttctagccattttcttctctttgcctcttcaaatcaaaacacattaaacatcaaattcaaatttcgttttcaccaactaacagagtaaaaaactttaaaacaaaatcgaggatctgattctaatctaaccagcaacgattacagaatcccaatcggtttttccatctttctc

SEQ ID NO: 12140 - DNA, 844 bp, Arabidopsis thaliana landsberg
  unsure (1)..(844): unsure at all n locations
ggaatcttgtgcaattacagtggctgttcttatgttgatcctgactacaacatggatgagacagagtcgttatcttcaaggccagaaagagaacaaagagaatatgatagcttcagaagaaaggctgagatagctcgagggaagagagcgatgacaaagaggtatgagcttatagatgaggatcaggacgacgagtacatgcctgagcatactcgcagagccaccaaactgctaaacaaacccgatgtattacctgctgaggaatatattaggctcttcaagctgaacgagttctgtagcacgaggtatccttgctcaaccacactttcacaactcggattgttggaagatgttcagcacctgtaccagagttgtcatctggacactctaatggcttatccgtatgtagcatatgaagatgagacaattcaattcctctccacgctgcaagtggagctctaccaaggtatgacctctgatgagttggattgtgaaggattgggattcttacgattttctgtatatggtcatgagtataggttatcaatcaagcgattggaaggattgtttggcttccccagtggaacgggatctaagccaaagtatgaaagagaagagnnnnnnnnnnnnnnnnnnnnnnnnnncagctctgtaccgttgaatgcttccaggtcaaagagcaatcagaaaagcagccctgtcatcaggtacttccagcattctatagccaatgtactctactcccgagagatcacagggactgttactaactctgatatggagatgatcgcaacggccaacaagggaactcttcaccaaactaagaatggtatgcccctccagg

SEQ ID NO: 12141 - DNA, 299 bp, Arabidopsis thaliana landsberg
gctaaatcttcattcttacggatgaagagaactcccgctacagccacaaacaagagcgttttgcagaagaaattccccatttgatcaacaaggcctactccggtaagactatcaacaaagtaagccatgaagaaccctatcatcgcagcacgacctacaccaccaagacaacaacttagatgcacaaaatgttaagtgtactatatctaagtgttagatcataagtgttttgaaaatcaccattgagaagttcagcttcaggctgatggcacctcttcatccatgcccaccctgggaat

SEQ ID NO: 12142 - DNA, 449 bp, Arabidopsis thaliana landsberg
ggttcgccttgaggaagaagagtgagtcatccgcaaatagtatatgtgaaatctgaggtcttccattactaacgcgtataccttggattaatctctctctattcgcttgtgttatcatcgagcttagaacgtccgcacataagatgaatgattgtggcgacagagggtctccttgcctcagtccgcgacttgcttcaaaaagtccatatgggcttccattgattaaaacagagaaagagactgaacgaacacataccattatccactttatcaactgtgacgcaaaacccttttttcgtagtacaccctccagaaaattccattcaatccgatcatatgctttacttatatcagttttaatggccatatatgaattagcacaccttttttggactcgtagagagtgcatgatctcatgagcaatgaacacattatctgtgatgtatctt

SEQ ID NO: 12143 - DNA, 227 bp, Arabidopsis thaliana landsberg
tgatgctctgaagatacgcagacatgcgaatcttccagtacgggtaattggtcccatcgaagaacggaggtttgccaacatcttgttccatgtagcctacgtggatttcgaaccgattagggaagggaaatccttaaccggctctgataccaattgtaggaccggaaaggcgaccagaggggggtgaatgggagccaatcgaatttttgtctccaaacactgaaaat

SEQ ID NO: 12144 - DNA, 985 bp, Arabidopsis thaliana landsberg
  unsure (1)..(985): unsure at all n locations
cactcaccaaccataatcagacatgtttatttaaaacccctaaaaattatattctaatttcgaaaatttgttaccacgtagaagaatccgacgtcccgacatgccctgtccagttttccgactactttcacaacccccgcatcctcagccatgtcgaaatcatcacatttggccagtaaaggactgatgtctgcaacaacattatcacattaactagtttagttagtgaagatttttgctgaaaataatgaatatacggtttcttacgtaccgataactggtagtagggatttgaagtctgtcaccatttcaatattaaggaaatgatagaaacgctttgctcttacgtacgtaaagactactttgcgatgatatattaccataaatggttatctcatttgtataaatacacattaaaaattgtcccttaggatttctaaaggccaaacggagcagcccacgtgggaaatcatagagtgatctgttatcagacatatatttttgtcactcaaataaactgtagtgatcgttattattcggttttataactttttaaaataaaattagtaatttcttagtagctttaatgctttgtgattggtttgttgaatacatttttaaaagtttattcgcattttagataaaaagtaattaccaaagattatacaaatgtttatcatcacgtgtaagttagtttggaggataatgataaataaattaaaaagtgagtgatccaaatcccttgataagagtttgagcattatctaattatgtttgtggcattgttcattcttatcagatattgcggaaaaaagaaaacgcataaactcaattcactaaataagttcgttagttaattagtcaacaaacatcaaaagcaacaaaagtagacggcacctagctccaacaacagtaagaatgacacgctggtagctaagacaaattccaacaagacggccgncggcgttagtttgccactacatag

SEQ ID NO: 12145 - DNA, 545 bp, Arabidopsis thaliana landsberg
tgacgtcaatatatgtatggaaatagatcatgacatacatatgctatgcattcaattttgcccttaaaaacgagtgtgacactggggaggtggccgggagacgcgccacgtatgtgggcgcatccacggcggggcgtgcaggtcgtgcgcgctgacaattggagaggacgggactaacaggcggggtacacgggtcagcgagaggggcgcacgagtgagtgggcgacactgacagacggggttgggccgacagagaacgatggggaaatgggtgcgcgcgcgggcgaggggatcgacgctgacaggcaggccccaccgcgcgggtgccgcacgtggtgtgggcgagctgggccgagggaggggaggctgggctactttgaccttttcttttattctgaaatttctaaccattttctttttattttctctaatggatttaaatctaacgaagccacaaattcaaatttgaacatttcaagcatatgcatcaaacaaaaagcaaagtctaagctcaggatgatgcaacatttcatgtctccaatagg

SEQ ID NO: 12146 - DNA, 951 bp, Arabidopsis thaliana landsberg
attctgctacagcaaattcaaatatgcagggtttttttttttcatcataattttctcaatcttgcctatttatcttctgtaattgacctttcttttaatcttactagtaaccgttaatttttctatccacctattttctttatcttccgcagttcgaatagttttctttgcttctgtattaactttctcgacgctttcttagaatcattagagtagcagaagaagctaataataatgcctactcgttgaagataaactttaatcatcattcataagcttaaagttctagaacaagtatgacacaatgattcaaataaatatatgcatattgaataatttgagcctaaaaaattctaatttttctttccaactccagtctaatttttttttgtcgacttctagcaaaatacattaggtgttatatctataattggttattcagataataaaaaaattgtaatgagaccgtccgtggtagatggatttcttatctcttgtatacaaaacacgcaccattttcttcaagtaggtccactaaaacaccgtaaagcagccactatatctgctgacgtgtcggccaatcaaagtctgtcacgtaaacgtggctgtgacaagcccgtgaggttagcactcaaaggagtcccagtgtttttcacgcgtttgaaggtgagtaaattctgattggtaatcaccaccgtcccaaatcgtacgacttcgttttgtcacgtattaacataaaatcaaattataatatttttaggggtcgattttgttgaccaacatttaatacatgcttctcattccacaaacagaaacttccttttcttcttctattttatgttgttgctctaacaaatcaagctaagtttaatagtccgacttattttataactttgtaaacacaaaacaaatttcttactttgaattaaaacagaaatgattgtggtatca

SEQ ID NO: 12147 - DNA, 936 bp, Arabidopsis thaliana landsberg
aatgtcccatattgcttaaagggcataaagctggttaaaagctgtaatcccccacacatcaaaatctgtcatttgcagagttaagaaacacgatccagttcctacttcgaattagggatctaactctaccagcgaaataaggaattagggaagcaaacaaaggaaaaatcgaacctttcctttggagataaaggtgccagagctggttcgaacctcgctgaatttgctctctccactatcattatcagcaacagcagatctcttcaggctcgcttttgccttttcaatagtcaatacatcgaaatttagagtctttagcagagaaaacaaaataaagtttccaaatttaagctcaaaaccgaagatgaattgaaaactcacaagggagaccatatgatcacattccaattccgtgagaaacccttcatacacaaacgccctgaacacaagtaaaaaaaaaaaacgaatttttcaaaattgttaacattcaaagttttgaaatttcccaaaatcactttaggggttttgaggaaacctgggtttcgatgaaacctgcttgactttggaaggattgacgaagacgctagaagaactgatcagagaagtggaagattgaagcaggacggagaagatagcgaagaacgaaatcaataatccacgtcgagccatcgataccgcttggatctagatgtacaagaaaggagatcggaagagagtaaaagtttatatttttccggaaaataaaagatagaagctttttcggaaagtgtcacggtatccaactttaagctcaccaaagatatccgcaaaagtatacgtgctgcgtttggttctttcagaactttggtccgacgaatcgaccaaccggctcctcccattagcagctcttttaaaaattaaaaaaaaatgtttaaagtggaaacatttacaaaggat

SEQ ID NO: 12148 - DNA, 1051 bp, Arabidopsis thaliana landsberg
ttctatttacaatcgagtaaaagttccaggattgtctctttttagcatatacaagtatgtcggaagctgctcatatccactttctggactatccctaaagaattgtcgtgcataccttaatgtccgatatgccttccaataatccatctacacattattattttacagtgagtattagcaatactataaaaatgcgattaaaaatagaaaagaaatagtaaatcataccttgatttgaaagcgtttattcaacgcttcagcaacatggattggtacaaccttgggtccaatcccaccaacgtaatccttgtacaacagtccaagtatttggtgggttgcttgtcgggaacacgatgaacgctttctaacagaacatgtatgttccgacttaaatactctcacatgaaacttcgtagagtcaccaactggtgttgctcgaaccctccacttaaaacctttaacccaatacttgacgatatactttttggagtcgatttatgaacatcaaaatcaaaattctgtaatacggtaagtatcttcaaacgtttctccaagtgctcctttgtttcaaaactttgtccaacctcaagctccaatgaagacacatctagagtagcagaagtagcttcttctttttcttcttcgatgaatatacctaaatttctttttttgagtggtaacttaggtttttcttcttcttcatgtggaattccgtacatgctaaagttctcatcatcgaaatcggttctgtaagaatcgtcgcagtaatcaaatctactttcatcatcttcaccatccacataaatattattaacaccagcttcttccatgttttcactggataaatcgatttctccctctacctcatggactatattacttggtcgtaaagaacttgtcaaagtgcaatcaacgaaaccatcaagtccttcctttgtggtttgaacgtttactttctccttcacctcaacacaaagccgagaagtttctttcttcatatgcccaaaaaatcttgaaactgtttattattatctataataactggtggtgt

SEQ ID NO: 12149 - DNA, 708 bp, Arabidopsis thaliana landsberg
agactaaacaatcgattaaccatatgaaattaaaattgtcaatatcgtcttcgttgcagagaataatggaaagttgggaactttagtgcttttgataaaacaagtgctaacgttaacacaaacaccaataacgactactaacacgtgccgttttagaaagaaatagaaggttatgatttgtgtctcttgtgtgtccgtgaatgtggcagtgtaataaaatatgccgaaaaaaccacaaaaaaaattccaattatatacaaaatcaaaccttttttttttctttaattcaattccaaaatgggctttgttggctaatgggccaagagaattacatagatacaaaataaaagagacccaaatctaaaccctagaaaaacaagatttgaagaaggcaataaggactgttcctttgcggacaagatattgacaacaaacctttgattggagctagcaaatcccgctgcaaaccaagccgagaaacaagccaaacccaaaactttcttttcgggaaagagagcaccgccacaaccgtaacccataacctcttctccccaaccaagcaagaagagagatatcgaaactaaccattatttccccaaagctattccgagaacctcgccaaaagccatcacctcatgacatccgggaaagaggaagccaaagacggaggtggttgatggaagctcgggtcagacaaacaatcaaaaa

SEQ ID NO: 12150 - DNA, 736 bp, Arabidopsis thaliana landsberg
  unsure (1)..(736): unsure at all n locations
ttttcaaagcaggtttcttatccagcactgtcttttgatatggtccattgtgctcaatgtggcactacttgggatatcaaaggtaatcacatcaacaggtcttgcaagcgtgtctagttgtttttgaacttttaaagttgagatctcctaatatgtttaactttgttctgatatgttgacgttctgtttgtcccttaagcagatgcaatgctacttttggaagtggatcgtgttctgaaacctgggggatactttgttttaacttctcccacaaacaaagcacagggaaacttaccagataccaagaaaacgagcatctcaacacgggtgaatgagttatctaagaaaatctgttggagtctaacagctcagcaggatgagacgtttctttggcagaaaacttctgattcaagttgctattcttctcggtaagtgtgatcctgaagcatattcttggcatttaaagcgtaagcttggctttcctgtattgatgctttttctttcttttctggttggtctagttcgcaagcttctatacctctttgcaaagatggagatagcgttccgtattaccacccattggttccatgtataagcggaaccacgagtaaacgctggatttctatacagaacaggtctgctgttgcaggaacaacctctgccgggcttgaaattcatggaaagtatttctttggataaccacttcgntggttctttctcaatggttaaattttac

SEQ ID NO: 12151 - DNA, 627 bp, Arabidopsis thaliana landsberg
taatcgacattgcagaagaagtgtgcactaaacgtggacaatttcgatatgatcgtcgtcattttcaatttgaagactttgttgactccgtgcaaagaggctggaatcgaggccgatcagatagtcatggtggatactatgagaagctccattgttgcagacaagaactagcaaagtggaagagaagaacaaagacgaatactgcggagaaaattgagacgctaaaatatagagtagatgcggcggagagggaccacacgttgccacaccaaacaattcttcgactcagacaggatcttaaccaagcttatagagacgaagaactttattggcatctcaaaagcagaaacagatggatgctactaggagatcgaaatacaatgttcttctatgcctccactaagcttcggaaatctcgcaataggatcaaggcaatcactgatgctcagggaatagaaaacttcagagatgatgctataggtaaagtggcagaaaactattttgctgacttgtttactcaactcagacttcagactgggaggagattatttcagggatacccctaaagtacagagcagatgaacatgagctcttcagagtgtactgacaggaagttgagatcagtgt

SEQ ID NO: 12152 - DNA, 780 bp, Arabidopsis thaliana landsberg
tcgtttaacaagtgggaagatgctcgaaacacaaccacaaaattctgattgtggattccgacatccacagttaccatgaattagtacttcatattttatgctaatctagccgttaaaatttttattgtgattttattcaaactttggaagtttagaataaatcaattattttcattctgattctaacataattgtatattgtagatttcaatcgccgtgtggaccatggtgactttgacaatgcgaaacagagaagcactaatgtatggtttgggaatgcaataatcataatgtttttattactttcttgtagttcgattttgggaatttaatagcagaacataatttatttaattaaaaacatagaaaacgtaataaatgaggggtttgtaagatttttcttgttattcttatggtcataaaattcaccatccgattgatgaaccatgttcgaatcttttttttttttgtaagcaaaagttcgaatttgtatagtatggttttaatcatgattgattgttgtatatatctagattcataataaaaaaaaactctaattattcacaatcacataaaattagctgtatgatcggtttctgatcctttgttagaaaatgaaaaaaataaatacaaaagctaataaatatgggtgactacaaatgtggttgtggaggtgaagtaacatgggatcatacatactccctgccacttacttatctggaaaaaaaaaaaaaaaagagtggcacattttgtttttctgagagcttatctattgatttt

SEQ ID NO: 12153 - DNA, 751 bp, Arabidopsis thaliana landsberg
taatgtcttcatccactgggggtactctaaaacccactcgtgtgaatacaatgccctcaatatcatagaaacgacatatgaggtttaaaaggtgatatattgctttgaattctttatattccaaccttttatcatctgtatggtggaaaaaaggtgccttacaaccgtaacctatgtttggacagatctcacacgcaatttggataaatttcccatggtcgttattttattttcagaaacgatgtggcaaaatgatatgtggtggtttacttgagtggacataaacaccatctaggtatgccttgaatagaggggattataggaaacctggtatcacaaaaggtcattagctagcccaataacgtcttcatccactagttatactctaataccgtctaatgtgaatacaatgccctcaatatcatagaaacgtcatttgaggtttaaaaggtgatctattgttttgaattctttatattccaactttttagcaactgtatggtggaaaagggtgtcttacaaccttaacctctgtttggacagttctctcgtgcaatttggctaaatttcccatggtctttattttattttgagaaacgatgtggtataatgatgtgcgatgttttacttgagtggacataaacaccctttaggttatgccttgaatagaggggattattggaaacctggtatcacaaaaggtcattagctagcccccataacgtcttcatccactagttataaactaaaa

SEQ ID NO: 12154 - DNA, 935 bp, Arabidopsis thaliana landsberg
atgactcaaagaaatgtgtggaggtgtgttcgattattaccattacgaactctacaaaagcaatacgagtcgagtgttgataatctccaagcagcctcaggcgataaacctgtattaacaacaatctaattagtgaattattgcacaaaagaataacaactttgttgcattcttagcaactacaacattgttcacctctccgcagaaggactcaaaaaagatcttcacgtctgattgagtcacctataagcaatttatacacaagtgtgaaagggagatacttcatcaagtacggttaagttaagagaaatgattcaagagagtcaccttcttgtctatgttagtacagtagatagttcttgcacacatctcacgctcatcttcagtctgcatagacaagactaaatcattttcctcagtcgctaaccatcagaaactttgcatagtagaggaaaatctcaccctaggcaaaaatgtcgggttaaccggtgctatagctgttttggatggtaaaactttcacaggatagaatcccaacatagtccccgataaatttagagcagtcatcgcaccctctgaaaaccaaagccacaagacatttaaccactgtagtacactgatgatactccagaaccgagaaaatgaaataataccttcatcagtgaactctatgaatgcaaaccgaaggaccgagtttgggtcaccgcatatgcgacagtcaacaacctgttaaaaccaaacacagtaagacacacaaccaagcacaatgatggagttcatagatgagagcttcaagaaaatattttcaacctgtccacagctcacaaacaaaccagcaagctgctcttcagtgacccataacacccaaaccacacaaagaaaacgtcaaaaatgaaaaaaaggtcttgaggacaatcatagaagagataaaaagt

SEQ ID NO: 12155 - DNA, 1025 bp, Arabidopsis thaliana landsberg
atatgcataaaatgaaatttataaatagtgacatccattgttgtatttgaaaaacctattacgaatattaaaaaaatatatgcatattcaaattttgaaaacgtacagaaaagttttgctgtttttatgaaaatactaaagacattatataaatatatatacacaaatatatatatatatatatatatatatgattattaatctatgatatttttgagaccatatttttatataaaaatttaaaacaaattattattttattagcttatcgattttggttaatttttacactgattaaacacttgaccagcaaaatttatttatttatcgtgtatattaatttatctagtattaatttgtagaggtttgactgcagttaatcgacaaagagcttttgcaacctcatgtcaacatggtttcaggttttccagagttcttttgtttccctgtaacgataagattctaagtttccgagagatcaggaaagaaatctaaactattgccggtaaagctatgctatttgtaaaaccacttttgttaggaatatccatatgggatatgagagatgacatatactagcatataaaaggaaatgaatgaattcacttattatcaattagttttgtgttgaaagccaataaaatttaacacctatttgaaatcgaccggctcccaaattagtacggccaagctaacctaaaatcgaccctatattagaattcagactacaaaagccaccattttgaaaagacatcaattagttttaaagtataatttatcagaaaatataattaaaatcattaaagagacaaagctaagagaaaatgtgtgaagtaagatactaaatcaaccatagttaagaggatcaaaaataacgaaatagatgttttttttttccattctatagtgtagtatttattatttgtgtaggtataatcacaagactcatgtgatcaagtaagcaataaattccattcgatgtttcaagtggtctcataccaggaagtgtcaatcacattgattat

SEQ ID NO: 12156 - DNA, 990 bp, Arabidopsis thaliana landsberg
cgtaataagcgtcgataaaaaccatcaatatcataacaatggttttagaaaagggttttaatcatgggaatcacttgctattgaacttagatacctgattattgtcggaaaaatcgaaataaagatttgacacatatcgaaacaagttgagttgagacgaaatgcgactcgatgacaacgacgttaaaagtttcgggcggaagagacgagagaaagagagaatagccacgagaattaggttttcttcgttttcggataaacacctagtaaaagagaagacagttttttttcccaagatgaacaatatctgggaggaaaaccaaaatgttcctcttagtgacgttaataatgtggctttatttttttttctctcttaataacgtgatttatcattatttcgttaattatttttaattaaaaaagaataaaaatgttttagctaaaaaatactaatcaaaaatattaattgtaattatataaaagcactaatatatgaataattttcagaaaatgtaaatatttctatatttagattgatgaataaacttaaaagcatcgcatgctcatgtgttggttagtgatgagtttggactaaagttcacgatgaaccgtggttttgaggatcgtgatagctgcaatatgagaaaaagtagggttaagttttgtgatgacagaatatggcgaattctaggtttgaggattgtaatgataagaatatgcttaaccagatttccaaaaattatttacttataatgacaatagtatgttgggaaaaaaaaatgttaaactatgctttacaagtttttactactggtatgaaagtcgagatttggggctacgagtttgatctctctgacaaattttttgttgtatcatattattttcttctcatttttaaaatggatcatctacaaatatttgtgtttagcaatagtttccatatcaaaaaattactaatgtcgcggaaggaataacttagcaatatattgt

SEQ ID NO: 12157 - DNA, 561 bp, Arabidopsis thaliana landsberg
ttttgagtggtcgcggagatgtctgcgccttctcaggtgctaggggattgcggctgtcttagagaaggcaggatgcgatcacgtgaagattctggcccaagccggagatgtgtttttcattgaagatacaaaagacccctcggccgaagcaaccttggttggtggaaagcttttcaccgacatttgggaaaatggtggccgagggatggctcacgaaattataatgaaaagtgaaaaagatactcacgatgctagagaagcagcaagggcagctgaaaaactgtagaagttgaaaggcaaataggtatttcataattacttttgactttatgttttatttttgtgactttgaacttatttatgttttgcattgcagctgaactatatcctcccccggagcctctcgagtcattagccaatcccgaagcaaaaagtgaagatgaaattagaaagatggccaaagctattatggacaaagttgtaactcaactactaaacgaagctacagaagtagttttaagagaagaatagctactgttgtagaaacattcataatattga

SEQ ID NO: 12158 - DNA, 546 bp, Arabidopsis thaliana landsberg
  unsure (1)..(546): unsure at all n locations
ctgaatgctgttcggtttacgaaatgtaatataaatgataatgattatgatttacatccgagtaccagtaacaagtttgaatagatcggtattagtttttaatgtggtatctaattatggttggacataaacaaacatgatctaatgtgttacaaatatacaatggtcattctagccaaagatattgttgggatcaacaaggtcagctttgctacatgatacaattttttaaactttaacnnnnnnnnnnnnnnnnnnnnnnnnnnnnnnnnnnnnnnnnnnnnnnnnnnnnnnnnnnnnnnnnnnnnnnnnnnnnnnnnnngaaccaaatatcagggtcctgctcgtccaaaacaattattagtattaaaagttcaaagttgcaacggttgtatatatatttatttgaattgaagtctgaagaccgtaataatgtcactcacgctggcattaatcatgtacgtgcggatcccggagatgcttaattgtgtcagcgtgtacatcgaccgtcgcaagcagtacagcagggcccgcacgtatggctat

SEQ ID NO: 12159 - DNA, 491 bp, Arabidopsis thaliana landsberg
  unsure (1)..(491): unsure at all n locations
tggggacggttttnnnnnnnnnnnnnnnnnnnnnnnnnnnnnnnnnnncagcggcgaagccgaagcttttgaggaagttttgagtggccgtggggacgtctgcgccttttctggtgcaaggggagtcgcatccattttggagaaagtaggatgcgaacatgtgaagattctggcccaagccgaagctgctttctctattgatgacacgaaggatccctcggccgaggcaagcttagttggcggaaaattctttactgacgtttgggaaaatggcggccgagggatggcccatgagataataaagacaagcgaaaaagatactcacgatacaagagaagcagcgagggcagctgagaaagctacagaactcgagagacggataggtattgtctaattgtttttaactntatgttttatttttgtgacttcgacttatttatgttttgtatcgcagnnnnnnnnnnnnnnnnnnnnnnnnnnnnnnnnnnnnn

SEQ ID NO: 12160 - DNA, 1191 bp, Arabidopsis thaliana landsberg
  unsure (1)..(1191): unsure at all n locations
gagatcacatttgttcccaataagcatttttgctactgttgtattagaatgagctgcaccaaagattcatcattacgggcagactaactctaaactcaacctatcacaatttcaagctcaatagagtaaagatgcaaacatgaatcaactaatcatnnnnnnnnnnnnnnnnnnnnnnnnntgataatcataaacctaaagaagtagataaatttgacttgactttgaatcaaagtcttaagaagtcatcataaatcttcagatctaaaaattctaaccagcagcatcactatcgctatgattcaatcctaatccaaatccaatctctactctattcaaaatcaaaactcagatttacagatctcacttcaaattgaataaattcactcaaaaatcggagatcgaaacacatactgttgagctcatcgagccagcgaccgacgttttcgaaagtggagctacgagtgatatcgtagacgacgagggctccaacggcgccacggtaataagcagatgtaacggcgcggaagcgttcctgaccggcggtatcccaaatctgagctttgacctctttgccgtcgatgagcatgctctgagtctgaaactcgacgccgatagtggctttggaattgggattgaactcgttacgggcgtagcgagtgaggagattggatttgccgacggcggaatcaccgatgataacaatcttgaagaggtactcttcgcctctctcgtcgtcgtctgacatttctccttcttcttcttctctgtaacgcctttgttggagaaagagagctttgtttggattttattaggttgtttgtgagcgcaattaatgagtattattttgcgcatgaaattaattccatcataattaaccaaaattcatattatgatttatttctattttaatttattaattatgtatttttttataagaatcttttctaaattgatgaaataaacttcttcaaagagtacacattttttttgtgtgtgtgtgtaatttacaacttctaaaataattggtaaccaagtggattttccatatgagttttcaaaagaaaaaataaattggtctgagtacatttatttccttgaaataatgaatttggttcaattaaggttttattttatatacatttgttgaaaacaactatgatcctnctgatgtttttctgagatttttat

SEQ ID NO: 12161 - DNA, 550 bp, Arabidopsis thaliana landsberg
ttgctcttcgatcatggtgtcgatagatacaaggtcatcaacatttgtgcacatgatgtgcaacttcttgataccgtaaccaacgggtacaagctttgatgctccccaaaacaatccttccatctgaatggatcttacagcttcctctagcttcttcatgtccgtctcatcatcccacggcttgatatccatcaaaactgatgactttccggctgattaagaaaagaaagaaaccagatgagaaatccaagacatcattatatcgtaaactacaggtgtaaaggcaaaaacacaaacttacattctttcttctttgtagatgccttcacagaagctgctctctcttcagcagctttcttttcctcttcggtctcctccccgaaaaggtcaacatcatcatcatcttcttcttcagcagcagtatccttagaatcagctgcagggggagtagcaacagcctcttctgtgataggtgatgacccttcaacaatgacaccacttccttcagcagagacaccactgtaaatagagagacaggttataagaaaac

SEQ ID NO: 12162 - DNA, 778 bp, Arabidopsis thaliana landsberg
  unsure (1)..(778): unsure at all n locations
aggctgctgctactccccctgcagctgattctaaggtatgcttgatcgtctctatgttttctcataatgtttttgtaaagttgtgcattggggagatttcatatgaatgtgtgtgttttgtaggatgctgcggctgatgaagaagatgatgatgatgttgaccttttcggagaggagaccgaagaggaaaagaaagctgctgaagagagagcagcttctgtcaaggcatctacaaagaagaaggaatgtaagtttgggttttgttctacccttgtaatttatatgaatgatatgaagatgtcttggatttctcattgtttttattattctttatcagctggaaagtcctcagttttgattgatatcaaaccgtgggatgatgagactgacatgaagaagcttgaggaagctgtgaagtccattcagatggaaggtttgttttggggagcatcaaagcttgtcccagttggttatggtatcaagaagttgcagattttgtgcaccattgttgacgaccttgtctctattgacaccatgatcgaagagcaactcactgttgaaccgatcaatgaatatgtccagagctgtgacattgttgccttcaacaagatatgtaagtttcatgaacctattcgtaattctttttaagctgtgatcttttgttagataatgtggtgtgtaactgtctatgttggattgaatcataatgcaggaggatggagaaagcttcaaggaatgtctgcgttcatgtggnctggntcttcttcttcttctatat

SEQ ID NO: 12163 - DNA, 1039 bp, Arabidopsis thaliana landsberg
  unsure (1)..(1039): unsure at all n locations
tggatatacatcgattgtactttgaatccttctaagttcatcatcactagtcttacgaataaacttctatacatgactagatatacatacgacatggatatatatatcaatattacgtatgcactcaaaacttctatatacccttaatacgtcacggcaacgtatgtaattctttcgaggttggaaaaaaaaaaaaaaactttattttattctttctcacttcaaacgtttgatgaatcacgtcgttctttttttatatatataagaaaacgtcgatcttaagacttatgtacgaattatataacaaacttttgcaggatttattgagttaaagtggtttacactatatttacaaagattgttgtgacttctctgatatcaaattaaattaaagttataagttactttttatgaaagagaataaaagcttacaacaagaaagtagctagcaaaactaattaaatttggctaataatagtttattattcatatcaatagttatttttcaactcttctttaacttgtataactattgatatttattagtataattattattcaatatttgaattctagttcttaaaaagaaagattacgtctaattccaaaaaataaatttaggatattacttttcttagtacacaaaatagaatcaaaaatataactactatcataggtcagctaaaatgatgttcgtggtcatagttaatggaagtgtttttttttggatatactatactgtgtatttttatgaagaaaaatcaatatataataacgacttaaaagaaaaaaaaaacaagatgtatttccaaaactaaccatataggatcggattattacttttcaaagtacacaaacaacgaataaaactgacgtcctgcactattgacagaaaacgatgggttccaaaactgtcgctaataaactcttccaattaaccctataaatagcatgcagaatatgagttaaaaatcaccaatcaaacactttcttacatgagncatattcaagaaatggatatgatattgagtatctcttt

SEQ ID NO: 12164 - DNA, 618 bp, Arabidopsis thaliana landsberg
tctctgttgtgccgaagactaagaaaatcaagtgttttgacccaccggccaagatatattgaaacggccatagtgccaaaatttggtgaagagacatcttccgctgccgaagcggaacaagctgctcctgccgctcggagcgctgaggaagcgactatagtgccgaagtgcttatagttgagccagtcgaagccgaagatggggcggccaaaaagccagagtttgaaaaaacaatagtgctgccagaaattctgagcccaccggtagaagcagaattgctgaaggttgcaaaagctcccgccacgactcccaagaggagaagaatgactagcgtactagacgctgtcatggagacgacaaggtcactaactcctacccctgtgaagatagttgccgaagctgtagcggttcgtgctaaaaccgaagttgggcgctcagcgtgatggaagcagaacctgccacaactaagcaaggggccggagaagagttccagatgctagcgtacgtttggagaagaatgtgccaaagaagtcgaatccctgctcccgaagcactgtcagagatcttgactatattatcgacatgcttcgggggaaaattatcgcagaagaggtccga

SEQ ID NO: 12165 - DNA, 1252 bp, Arabidopsis thaliana landsberg
taaaggagtattaatcttcgtccaccgagccgctaaggttgtcatagctcacatcatagaagtcactatgtacagtcattgtacgtctgtatttcttgaagatctcgaacatcactttctcgatcatgaaatcccacatctcatagatcaagtgaagacatcccctgtcagtgtcacagaatctaaacatgtcatatatgggtcttgtgaaatcaattatataaaacactttctcccaccattcatcattcacaatctcctctttaaccaacattgctttccccccactaccctctttataagtcgaccactcctcacttatgatcatagcttgaaggcctcttttgataagctttaatctcttaagcatcacaataatggaagcaaaacgagtatcgaggaccgaaagcaacttgagaggagagaacttactgaaaattgacagtctcatgttttggttcatgatgaaatattttattgcgagcgcatcttcatgaacttctgttatccaattgcatccccttccacattctttgctgcacaaatattctttaaaacaagattatgggtatgcaaaacacatggagtccaatagatatgaggatacgtgcactcaataatctctccggccgccttacaatttgttgcattaacagtgatgatttgcgcaacgttttgatgacccacttcattcaaaacatctttcatcaaatcagaaatgaagaatttatctttcacttcaccaaaacaattcacggccttgagaaacaaaggaccattttcagaagtagcaatgaaattgatcaaaggttttctcgtaggatcactccaaccatctgacacaatactcacccctttttctttccatgataacttaactggttctagtaactgctcaacatgatctctctctttgtgtaacaaatttgttcgcagcttattataaccaggaagcacataatcatcaattttgttgtcagtagcaaactgaaaggacctttgataatgcggatttcctgcaagattaaatggtagtcctcctgtgtaaaacattcttgcaatttcctgatccaactgatctctgacctcaataccaaatgctctctcaagaggggagatgctagactttctcttcttaaaggcagaagaagctacagaacttgtttcccaaggcaaaggaaccgctctagctccagactcgcttttcttcttctcagactcgtcttctaacccccgcataccgagcctttca

SEQ ID NO: 12166 - DNA, 1343 bp, Arabidopsis thaliana landsberg
cgacgacgaaataatgatgaaggcacgaaatggagaaaagagaggggcttttcaaagattggaagatgtttaaagtcgacgtatattcaacgtgcgaagatggtaatggcaaaaggttttaaagacaaacgacggagatgagggtgcttcgtcttcgtctttgccaattattttaatataatatatttttagacaacgacggtgggggcagttttttgttttgttaataattggataatgcctctatctaaatatctttccatccactaatgtcggattaaaagttaaaactactcggtggattatgttaaaatcttagccgattaaaattagatttcattttccaaatgaggattactacatttatcttagccgattaaaattagatttcatttttccaaacatgtggcctcaaaacctcaccaataaaatcttcgtccttagctgagaaaataagcttgttcattctaaagtttttcatacctttccatagccctagcctagcaagaacactagcatcaagtttacaacacttcatcatggtacatgtaataaacataagaagctattaaaaaaatatagcaagactaaagacatctccaaccccacttactttattttagaatgaaaatacattggagatggtctaaaaacgtttcaaagatatacactatttgttgacaaaatgagcaaatcaattgattgctattaaagtaccaactaaacaaaccaaaaacgtttgattcagttttagttaatctcaaactccaaccggctcatcaccaaaacacaaaacaaacaaacaaaacacccctaaatacacatttttgttgggttttagtaatcgacaaaacacaagaaaatatatttaaaaaacttttcacatgtcattctccaaaaatttcctaaaaacttttaagatatcaacaaaagtaaccatgccaacgaaacaaccatccttctcaaccacccacgcgtagttcactcgatgagcaaccgcttggatcatcactgccattaacgagctctttggattacacactatcgcctccgacttccttgccattcttgctgagctactcatcgaccgtccatacgacgtcgttctcactggagcttcttcctccgacgaataacccgacgacgtcgaataagatgagagagaatcgaaaagcgacatcaaaccaatcaatcctttatcctccaaacggttcctaacgatctgaacaagactctccggaggatttgctccgtctatgtacgccatcagatctccagcggagagcgtcgccaccgccgcagctgctgtctcgtcgcagcaggttaatgtcatgcgggatatt

SEQ ID NO: 12167 - DNA, 2558 bp, Arabidopsis thaliana landsberg
  unsure (1)..(2558): unsure at all n locations
aaaagctacaacaatcaaaggcgtcatccagtagattgacaagagcctgcccattcgctgtggtaatttctcgacaaaaaaagctcatgaaatattcactgatcttgatgtataagagacttgtagcgacccttgaagacagcccatgtctccccttctcttgggtacacaatgaatttacctgcgctacttcctttattgcaatgaaccaagtgagaaaaccttgtgtgatctcatctttcccaaatttaaacctaccaacagaaacatgcaagtctttttcatacctttgtattggttcctcgtcatatgaattaggcttaagccacgtaacactaacattaaaaccagaaacaaaaacttctttgatctgagcatacaatctaggcatcccatccactgtatcataaagagcccaggtctggccaacttcaaagtgtacttcttcgctcagcttatcaaagtcattgaaagctaaaacatgctttgctctttctggttcttctcctgcttcttccttgcccaaagacccttcaccatttctgttgctctgtgcaacgaaagcttgccgcttgctatacacagacttctgagactgctctcctccatcaaaacataaatcttctatagctttagtgtcaccaacaataataacttcttcattctcgctgctgtttccagcttctctttctcttctcaccaatccttctctctttctcttctcaccagatttctgattgagatgaagtggaacctgttcgagaccagatgaaggaagctcttgagcaccatcagggttagtcttttccatcacagctttagccttgagcggctcctccaatatgatctcaacttgatcagggttagtcctattcattaacaacaatgaacaaataaagtaatcaaaacccaagctaacgtcaaaacagtatgcacgagattaagaaatctaagcatttattcctcagtaaaactttgaaaaaggcaagacaagaggaagtaaacaaccgaaaattctaaaattccaaagtgtcctactaaaagaacccacatttgagaaaaccctacaacatcaaaaccctagctatgaattgtgatagagagaacactacccgaacagtaagagaatcaaacacagcaggagaatccagaaatgcaaagtagaccgacaaaacgattcaatcaagatttatgcaacaccggaaaataaatttaaaaatatcggcagcgagtttcgccggataacgaanaaaaaaaaaaaaaagacgaagaataaagcagattaagaagtttactctgtctaagcggccgacgtcggagataacggtggtccggcgaatgttacgtcgtcgctgaaggagaaggaaaatctaagctctttcactttttctctgccaagttacccctcttctcatttcacggcggtaaaaaaccctgttggcaatatagttatagcgggaaaaacgtttcacccgagaagaggataaatgggccaacgatcattatgagcccaagaagcccatctaactatttttaatttcataagtatatgactgcatatcttatctccttcaaaacaaaatggattcaaaatataataattattctaaattagtccagttttgaattttgaaattgttcatttccttctctctaccattccccctctctcttcccaaatcccaaactcattcaacaacggccattgattctctctagagctgacaaatccagaatcggatctcaggagacttgaagctcgctcccacgatgaatcagtaccacatctacgaagctattggacatggcaaatgctcggtaattttgaatctgataacttttttcctttctcaagtgttttgtttagtaattttattgttcaaatcggttcgtagactgtgtataaaggaaggaagaagaagacgatcgagtattttgcctgcaagagtgtcgataagtcgcggaagaacaaggttcttcaagaggtaatttaatcaggcaagagtgtcgattaatgcttgcgttttgcttgaattgctttatttaaaggaattgacctcttgattatgacggattcactttagatttgtcaaatcgatgctctgaagtttctatttctgggtgatgtttgcgaattgatttttcaccatctgtggtttttgaagtgacatggatactgaaaatttggtaattatgcacttccttttcaggtcaggatccttcactcgctaaatcatccaaacgtactcaagttctatgcttggtaaaacttactagctattatctaacaacaattatttggctccatatatttgtttctaattgtcgccttcttgttgtggtcccaggtatgaaacttctgctcacatgtggttagttctggaatattgcgttggcggtgatctcaggacatnnnnnnnnnnnnnnnnnnnngtagtttggctatgtcttttgataatatatggtcacaggttttctgaaattcactcgttctgcaggactgtaaactgccagaagaatctatctatggtcttgcttatgatcttgtcatagccctg

SEQ ID NO: 12168 - DNA, 1021 bp, Arabidopsis thaliana landsberg
atttatttacaaactcaatgcttccaccttgatacctaacattaattagataaatcgcctatcttgagtacatcaaataaaaacgaacaatataaaccaaaaagaggctttaaattcttcttccctttaagagttaagacaaaagccacttaactgtttcttactacaacgaactaaactatcctaacaaagacatttagttaatgtcacaaaatgaaatacatacaactcacttctctctctatacactccttaagaagaggtgagtctccgcttacatctccttcgagtcccatcgccctctttgtcaggagtatcttctacaacagtttcttcttgtacaaccaaccctcggtttctcgatagttttcttattggtgttgtctgagtatcttgtgtgaagtctgctgatgcaggggctgatgcagcgggacaagaagatgaagcaactgcagtttgtctgtgtggcattagctcctcgcccagtggcaccatttcagacatcaactgtttgacatatatcatcacatcaacataaatcagacatcttcaggacataatttaacaatctagagaacgaaatgagattctattttattaccttccaatctttgaaatctaatctaaacacaaaatggttataaatgacttcacccgacatcaccacgtttgcatcaggtgcatttctcggcactgaggacacattaggagatcaagtataagtgaaacgaattaaatatcaaaaccagacacaagagagtggacttgtgatcttactggcgaaatgagaaccacttttgtcgacaatgatctcaactcgtccatctttggccaagaaagatagagcaaacaaattctctacagtctgtgcaaatgaccgcctgttgagcaccaaattctcaagctgcacgcgcttctttttccccaagatgttaaacattattgtcatattcttgtctgtatcagttttttcttctgattgtgaatcatctacctggttattattatgcgtatgcaaatc

SEQ ID NO: 12169 - DNA, 743 bp, Arabidopsis thaliana landsberg
gttgatttggagaacatcgtcccttcaagactgtgcaaagagaccacagtgacgttgagatggccaaacaggccgcccggccggaccgcgccggtgaagcccggtcaaaaaccggccgggcctgctgagccatcgggcttaattttctgtccaagcccggcccgtgcgggctaaacgggccggccggcgtttagcacaaaaatgggccgaaaagcgggctaaacggaccggtaagcacattttagtgtaaaaaacgagcttagaggtaaacgggccgggccgggctagcccgccgtgcctagtttcctgtccaagcccgcccgcttattctaccgtgccgggctcggaccgggcccaaaaagcgggcttcgtgccgggctcacgggcctcgtgctttttggccatctataggggcaaccatgtgacgtttggtgatggtcttgcaggagatttcgaaatagcatatgggttatctccagcaaattctcaatagcacttattttaaacttcactctgccagcagattttctatagcacttattttaaatttcactctacgaactatataatttatagtgcaacatattgttttacacgctccaccggagcgtcaacacatttgcatggtatgttggtagcgccaaatgcttttgtgaaatcatttcgagtccttcctatgtgtacattaaactaaacatatttgtacatgagtaatattttgacaacccaatcacgagagaatt

SEQ ID NO: 12170 - DNA, 1313 bp, Arabidopsis thaliana landsberg
agggcttctattttgagttctgttcaaaggagggcgacctcgtttcttttttgcaggcacacttgaggatgtagggagctctgctgggtgaattgggagatctgaatgctcttcaggttcagtctggacattatcaacagaggctctcaagtagtcttggtttgcttttatggccgcctctatcatttgagctgcagtctcagccataagatctctcgcttctccttgaacaaccctgcgttttcgtgttgcgctctttgttggatcagcacaactggtatattgaagtgtaacctctcgtagttcccccataagttcttcagtagtaggaattggcaaaggtggaggggggggggggtaacctctgcttctaagtttctctctagatgtgagcgccttgttcttgatgaatctgagttttcaattctatggctgtctcttgatttgcttttttctctacattgcagattttgcctggagtcactgtgagagtatctagcaggatacttgtgagcctcttctctggtggatgcataggatctggggggcgatcttctaaaaggtaaatcttttggctcatatcgccttatcccagaagatggctgtgttctgtaacgtacatcatcatttccccgtctgctggtgtctgtattgtgcgaagtgatatgatcagagtaatgactttttccttccactgagagtctagagtaatctcttggtgtgtaagagggttgagatttagttttgctcgcagctttaggaggaggagggtggctcttttgtagagaaacttttgaggattgaagccccggacagtcctttttctcatgggacaatcttaagcagtgtaagccatgattcttgagatttttatactccaaagttactaatatctcactgccatcatcaaagtctaccattgtctcctttgttattggtttgagaccgtcaattatgacctttatctttgctgcagctggtgttatttcgtggtccacgacttcccctatctcggatccaattgacagaagcatagaaggtttccagaagtgcataggtagtccctggagctctatccagaatggaatctgagaggggaaagaagcagagatgacaggttcctagcgctgaagaatcaccatccactggtcgaaatgatacggtctattatccaagactttctgtagatcttcctcatagtcaaagcgggattggaagcatcctctggctaggtcaaaacttggtgctttgcctttcaagtttcaacggattgagagaaaggggatgagggaccacagactttgggtctctgg

SEQ ID NO: 12171 - DNA, 864 bp, Arabidopsis thaliana landsberg
  unsure (1)..(864): unsure at all n locations
tttgcatgatttgagagtccaatcatttaccgtgatttcaaaacttctaataaacaacttgattcggtaatttactaattttagttttttttttttttttttcagcgtacaaaattatcctaaatatattcttcaaaaatatattttcttattattacatgggggttttcaggattttactgcaaaactctcagattttgggttggcaaaaatgggaccagaaggatccaaatctcatgtcacaactcgagtcatgggcacttatggttatgctgctcctgaatatgtttcaacaggtttatacacaatgatttcattgtctgttttttcagtatttattcaaatcattagggtcctttaaaaaaaaaggatatagtttccttctcatatatatatcttccattgctttctcttacaaagagaccattttgatagagtcattttgaggattacacagaacatagaaataagtaaaacatataaatctgtaatgtgtcaaaatttgaatnnnnnnnnnnnnnnnnnnnnnnnnnnnnnnntttgattaatttttctttttttaactcaacagagctttattaataagagtggacatagtcatggactcatggtgtaatcaggatctaattttgattaattatctaacgcatgtgagcattattttcagggcatttaacaacaaagagtgacgtgtatagttatggcgtcgttttactcgagctcctaacgggaagaagagccacagaaaagtcacggccaaaaaaccagcaaaacatcatcgactggtcaaagccttatctaacatgcagccgccgtctacggtgcgttatggaccagaggctcgctggacaatactccgtcaag

SEQ ID NO: 12172 - DNA, 624 bp, Arabidopsis thaliana landsberg
tgagaatataaattcacacacgcaaaaataatgctctagcatgtagcgaacaaacaaaaaatttattttaataaaaacattatttgaaatgtttaatccgtataaatgtcctctaattcaaataaatagcggacaaacaaagatatttttatttaaatttcaaattagaatttctcaacaaccaaacatacatgaatgcattacactagctcacatttagtttttaattacttagtgcattctaggcgatagaaccagccattcatgaatatgtcgcagattcaggtcgtgatgagggtaagcagtagacgatagcgcctaggacgagggcgggtgcggtgccgaggccggggagaacaggccaggcaggaggacgtcagaggcagtagcgtctgcggtgagcgcaggcaggatcacgagcggggaggacggggtgggggcacgatatcactgtgcacggctacaattgatgcttaataggtagtagagatttagttaattatatataaaagtggagctttaatttaagatctggtgaggtatattgtgaacaacaaaattatttgttttaaaaaatataggatcactattttgtaagagagtagagaatgtaatgattagtgt

SEQ ID NO: 12173 - DNA, 627 bp, Arabidopsis thaliana landsberg
tgtcctaaccaaaaaccatactcatctattatatcttgaagctgcttttcttgttgacctgcagtcttcaatccaaaaggagtatcttgaagctgcttccttgttaacctgcagacttcaatccaaaaaaaacagaagttggtagagtgtttagcgtttcttcggaggtttcagtatccctcctgatctttgcacatagttctgttgattgagattcccaatcctctctgaccctcttcttaaatcccgaacatcatgtcttcttgaggattgaccaggttcaaagtgtcttctatcagttaggtattgtggttcccttcttggagttatggagtttgaagctgaagacaagtcttgtctgaaattgcttgattctccctcacatctgatgtggtcattcctacctgagtccaagtgaggataagcagctacaaactcatcatgattcagtggtgggtgggatattcttggtggtggagtctggggaattggaaatgaactatcagtcatctgagactgagagttcatggaggaacgatgcacactatccctaaacagagctctttcccttgcaatgctgagaggtcttggtcggtatggaacaataagctctgtgtgagtgaactg

SEQ ID NO: 12174 - DNA, 521 bp, Arabidopsis thaliana landsberg
  unsure (1)..(521): unsure at all n locations
gcgatgttcccctgggcgtatcatcgagcagcaatcgacgttgtcgtcctttcaaaagctctacgtgggttaccccgtgcgcgtcgtcgggactaaacactgatagtgcgcgtacaaggaacaaagtcctaatagaactcgaggaagatggttctaacgactggatcagaaaatcagcacatgaataaaaaacctttttgattttttagaaaagagtttaaatccaaatccaatttttagatgcgaatttaaattcacacacacaaaaataatgctccagcatgtagcagacaaacaaaatatttattttaagaaaaataatatttgaaatgtttaatccgtataaatgtcctctaattcaaataaatagcggacaaagaaagatatttttatttaaatttcaaattagaatttcgcaacgaccaaacatacatgaatgcattacattagctcacactntatttntaattacttagtgcactctaggcgatagaatcagccattcatgaatacgtcgccct

SEQ ID NO: 12175 - DNA, 588 bp, Arabidopsis thaliana landsberg
  unsure (1)..(588): unsure at all n locations
nnnnnnnnnnnnnnnnnnnnnnnnnnnnnnnnnnnnnnnnnnnnnnnnnnnnnnnnnnnnnnnnnnnnnnnnnnnnnnnnnnnnnnnnnnnnnnnnnnnnnnnnnnnnnnnnnnnnnnnnnnnnnnnnnnnnnnnnnnnnnnnnnnnnnnnnnnnnnnnnnnnnnnnnnnnnnnnnnnnnnnnnnnnnnnnnnnnnnnnnnnnnnnnnnnnnnnnnnnnnnnnnnnnnnnnnnnnnnnnnnnnnnnnnnnnnnnnnnnnnnnnnnnnnnnnnnnnnnnnnnnnnnnnnnnnnnnnnnnnnnnnnnnnnnnnnnnnnnnnnnnnnnnnnnnnnnnnnnnnnnnnnnnnnnnnnnnnnnnnnnnnnnnnnnnnnnnnnnnnnnnnnnnnnnnnnnnnnnnnnnnnnnnnnnnnnnnnnnnnnnnnnnnnnnnnnnnnnnnnncctggaaattgtcgtccgcaggcctccgatgtggggggttgccatacctgcgggagtggaacggagtccgtttgtaatgcccttgagtgcagtgttttgtcattgtggctgcgggcctgaacactaggtattgacgcaatangtgttc

SEQ ID NO: 12176 - DNA, 904 bp, Arabidopsis thaliana landsberg
tgttatattttgaagagcagccgagacgagtgaagcgggcagggaaagagtggccgagactgtcaaggttggcgaggactgcgtaaaagcgacgtccgaaaccggaaggagtgaagcagcatggaaatgattcgactgcctgctggtcgcccttttctcctttggcaatcttggcacagatgcttgcttcgtgctcgtaccaatagatgagatgctgcatttgcttcaaccaatgcgttggcatggatacgaagtctctgctgttgcttttgttggcattgctgcttactcagttctgcacaactggtcctgcctccttggagtgttagtgtgcccattttgcttgtacgtctctgcgtttggcaagaaaacaccagttcctctgttgctctattttcctggtcgcaaagcagagcaaactatcggcatgaaccaatattaaattatgtaggtcgtgtagctataatacagcactataattgcatatgcaggcgaatgctatcagcgagggtaagctttagacagacactttagtcagaaattggtgctccatgcacggtgactatggaaaatcagcaagaataagttagaactaagaattttttataacagtcctaactcatttatgtccactctatataacaccatctttcgaatgcaactaatttgtctcacaataaataaattggaagtctatttctctcttctgtcacccaatgtcaagatggggttgttgaatgtcttgtctggtacatttatgtagcgcctcggtttttgactccaaggttagaaaccctaacttcttgatccccattaaaatctaagcctcataattatttcatttctcatatgcacaaaccatttttgctagtagcacttcgctcacccagtctcatctagcatc

SEQ ID NO: 12177 - DNA, 458 bp, Arabidopsis thaliana landsberg
cgaatcgaccgttcgtgcacgacgcccttggtatggaatagagtgtgtcgctgatttttttcggcctgggcaacctgtgtgctgagaacacgctgcacaacaagactctcatacctatcggcgtcgatgggatcaacgtggacttcctcattttctgcatggttagtggcaatcatagcatgactagtttcctcagaatcactggctgaagagtactcaccattgtcacgtataagcaaggtacgcttgtttgggcagtcccgaatcatgtgcccaaaccctctgcaacgatggcactgaatatcccgtgtacgtcctgtggaagaagcggcgcctttggcacggtgcgccactggcttggtcgtccctgtgcgcgatgtagtgctaggcgtaggaggtgcatggctggaaggagtgagctgtgtgttggaccccggccttgcaaagagttagtatat

SEQ ID NO: 12178 - DNA, 1064 bp, Arabidopsis thaliana landsberg
gaaagtgatatgtcatctgtttattctcaaaactactcggatgaaatatgcaattgtagaaccataaatgtaataacaaaagacattgataaaaaaaatttaatagatattattgacaaaattgatgatccagaaactaaaaaagaatacttattcaaattgaaagatttagtacaaagggaaaatcaattatccactccacaaccatttagccttaataaaataatcaaaaaatatccttcacccactttatttaaacaagtaactactggagaattacaaggaaaagtaaaaagtttaaaaatgcaaataaaagaattacaacaaatagtccaccaacatcaattacaacaattacaaatagatgctcgtccaattcttatagaaccaaattatccaccaacattcaccctgcacaaagaatgaaccaaccacaagtaataaattatcaaaaatggtacacaaaaaatacattacatattggataatgattttaaactagaaacaatagcacttctagacagaggagctgacaacaactgtattagagaaggaatagtcccaacaaagtattatgagaaaatatatgaaaaacttagtggcgcaaatggaactagtctaaaagttaactacaaattacctaaagcaaaaatctctaataagaattattgtttcaaaactcaatttattctcataaaaaatttaagtcaagaagttatattaggaactccattttttacacaaatctattcatttaaagttacagaattagaaattagtacaaaagttgtaggagaaaagattatctttgataaatatggctgatataaaaatagtataaacttataacgtatctgttgataaatgtgatcaaatgtgatctcctccataatctccagaccttcaaataaattgagttttgaaacaataatataaacttctcgagaccatagtaatgcaaatatcctcctccgacgatgaagacgacgatactcaagataataatccattcagtgtaccgctattttaagatacagtatttgtaataaaaaaaaaaaaaaaag

SEQ ID NO: 12179 - DNA, 541 bp, Arabidopsis thaliana landsberg
tgatgtggcgttacagaaacaagtataaagatcaaatgttgtatctttgttgacaaaacagagcaaaaagattctcatcgattttgacggttaagattctcatcgattttgatatgtgaaatcaaatgatacaaaaacctatttgtgaggaaactttctttacaagtcatcactttctctcttttttcttcaacagtctccattaatcttgaaacactactcaatacaattgtgaagttgttcgtcgagaatcagagtggctcatcgttcgagattgaagtggatcacaaggatacggtgttagagttaaaacagaagatcgagaagtctcaatgtatccccgtctctcctgaccagaaccctaaccacaatcaaaccgagcaatctcctcccccgtcgaactcaccacaacagatcatcgacggtcatcaagattcgactgtgataggtcagaccgagcaatctcctccaccgtcaaaaaacaacagaccagactcatcaacgctcatcaagattccactgtgacggctcggacagatca

SEQ ID NO: 12180 - DNA, 1345 bp, Arabidopsis thaliana landsberg
tcacacatggacccttgagcctatggggctttgactcacacgtgcgtgcctccacggtgactggacccatccctagagaatattaacacacacacacacacaaaaagctttgtttagaccatagcttagtttcaaaaagatttgcatagatattaagatacgagtaatgaagtacctgtggcaatgaataccatgaacaagagaagagcagcggagataaaacgcacagagagcttcatttttgagagggatagagagagatttcgaaagaagtgataagtgtgcagactgtagaatgctaatgaggaagtgggcactatataaagagactggaaaggtataagaacgctcgagataattgaacttttactaaaagaaaacgaatatctttttattccattatacagtattcactttttatttctgccactgaggtgtgacgacgacttgtcgttttttttcttgttcttatttttcctgattttttcacattttcttgttttgcaattttgtcgatttatttgcttgaccgacactgtagtaaatgtaatttttggtcttaaatggcagtgacaagattaaagcaaattttattttatttaaaataacaaaaaaaagacctataaaataagtaaataattgagttagtcagataatgaggagtccacactgactgagtcgatgatagatttttggtattataaacgcagcacttttttttgcttttttgtcaacaatatactacacttgtgcttagccatctcgcgaaaacaatttttgtttgttcgtatgttccaagctctgctcctagacttcgatcatcgccgattcattggtattttagattcaagacttaactctatgattgcataaatcacatctgattttgttgaaatattttcatcaagcaaaataaaattaaaaaaagagagaagaaaatcaagttaaagaaaaaactaagcagaaaaaaaaatcaaacaaaaaaaaaaatagagcgaaaaaaatcatgaatgaaaactgttacaatagaaattagtaatttactatttgtgtgttagaatcataactttataaataaaatgattgtgttagagttttaagtatagacataaaaagaaaaacagagaaccacaatgaaggaattaataaaataaaatgaatttttttacagacatccataatttaagaaaaacgtttttatacttcatattgttaacttgaattaaaattctggcatatttgcaaccagaacatatattcgaaccctttattttcttttataaaagccattatttgatgtaacgttacattaaaactgaagacacacaaaccaaagacttattca

SEQ ID NO: 12181 - DNA, 1256 bp, Arabidopsis thaliana landsberg
gcatcccatgaatcttagcaccatcctcaccgttgattccatgacctaagcttctattcctcatctatcccaaatccactttatgctttgtttttgttttgcctttctcgtttattatgtatttttacattggtgctttaattagtttccttgagttatgttgtgagttttgtgttgttcatcaataattagtcaccaattgtgagctgagaagtaatattcaacaatcttacgaatgttcactatcatttttttttgttcaatctttttatttaaatttgtattaactagttatatgtttttagtggaagcattcactaaacaatataaacatagatacaaattcaaacaaacacccgacgaagcctatccccacttcataccgaagtggaaggctttctctcggcgatgagatgtatgattgaagttgataatcaagatgtagcgttttttcagactgttcagatttggtgaagattgtgtcttctccaaccgaatggtcagcgttcttagtgtatctgaaggagatctaaatcgacaatgatgaattctcttatttttctttatttttagtttctctttgtgcgaatataaaaacggatttttagcacgaaacattcgtaccaaaccgtatcatgtcacttatataaataatattcctcataaatggttcgtttgagtatcattaattaagcggatgacaaacaaaaaagaaagaattcaaacagtcacgtggtcgagccggccctaagggcagccaaataaaacaattgtatgaagcccctatttttgtgggtcccaattaggattttggttttttttttttttagttgtagtatgtaactacgtaaataaatgttacatacctaaacaaaaacaaatatgactaaaagaaaaataaaattattgttttagtgtgaatccttagaaaaattaaatcacactttactttttaatacattttatcaaacaaaataaattaaatgaatataaaaattatataataatacaacatattaaataccccccccccttattgggcccccattttgttttgtatgtggccccaattttctccggactggccagttagttgtcggtactaaatgatactcaattcgttgttaatttggacattttagtatccacccactcaaactaaaaagccattctttatcctaattcagatttgaggcccatttaactctttaatatacaacataactttttttcttaaattttgataactaatatac

SEQ ID NO: 12182 - DNA, 988 bp, Arabidopsis thaliana landsberg
cattgaattgaatcaattcttcatctctgaggttcactcttttcatgtaacttgttctcttcttagagttgacgtgccggtatacaattatgagcttttcatttggtcctcacccaaacacaagtatttttttgttacacgctagcttggtccacatttagtagcccttagtcaaaataatatttagattcccaatttatgttaaagttgtacgcctattttattcgttagtatttgtcacacacataagtttttatttgatgattctacgttaaaccctctattcagttgctccactgattacacttgctttctccaccactttctcatcaaccgacagctcatgcatacattttttatttttatttttttggtttagagcatacattctttctgtaagttgtggattgaagattatagatgcagatcaatatacgtaaacaaatacgttcactttatagaattagtaacaaataagaaaaacaattattacagaactgaaactcacttcacgatctcttctattcttacgtcaatgataaacgcttgcgatatcgcaatctcctaagacagaatttagtcctacggtagtgtacgtagctttgtgtaggtttctattttgcagaatataactatcgatttctgttttgacaccgtacagagaccctagcaaactctattttgaaattctcataaattgatttggagaaaaaaaagatgagaatcaatccatctttctcccatttgtttctcttgtattgttcttctctattgtctctctctctctgtttttcttcatcgtcattgtctcttttgtattaatgaatcgatgtttgattcaaaagatgtttctcttctctcaaccggtgtatcgatataatctaactaagagacgtgatctaatttgcacaaaaagaagggcatttacataaatacaaatgtttatgtaaataaacatgtttatataaaataaacaccaacataagta

SEQ ID NO: 12183 - DNA, 1371 bp, Arabidopsis thaliana landsberg
acaaaatgtaagtcgggcaagaaaaaaaaactggtctataaccctctcttgaatacgacaagagcatgttctccacatctcatgtatactcgtctagttaaaagtttgtcaaacacaaaaagggagtggaaacttggctacagagcaaatagcaaaggaaaaaaaagaattgttattacgagaatataagcacacaagcaatttcacaaagtttggtaatgtgcctaattctcaataactttttattaaaacatatgtagacaattaaaccctaaactttgcctaaatggaatttcactaagacacccgttagttcgacttcaacaaattcctagtgaactttagacagttacattgatacaaaacctaaggactactctatttctctcaagaacaactcaaaatgctttttattggtgtttgtctctgtaatggccgggcctcaaagaaccttcttttctttactttttatcatctactttaatttatgctctctttaatctagaggatttgaaaataaccaaattatctttactgtaccacaagaaaacaatgctataagatataaatttattaattaactataataatatatcccatggaaatatttcagtaatatttctcggaaatacgttctcttggaattcttttggaaatctcggtcctttagatatccctcggacatatttgtccctaagaaagtcctcggaaatatggtgttcttgcaaaactgaaatgttggagcatcgggggtgtgtgtcttgtgctctaacgcattagaaacatgagaccatctcttcttcacttctgattactctttcgaagtcttgtcagctcttgccaagaacatattcagctcaaggtacacaaatgtctggccatcgatcgttctctatgtcttccaaacctcgatccacacattatagagagagaaaaacaaaatgcggcatggtccgatggattgaaaaacaagcaaatactcatctatcatatattcaagctttaggtgacaaacgtcgttgtagaaagggaccgttagtataattacaatgtggtttggttctagaagttaaaatttgtaaagtctttttaaaaaaaataattcagagtcaaaacaacgctgaatgtaaaaacgttactttttctttgaattttatttaatattacatacaaaaaaaaagagagaaaaacaaagtgtattttaggaaaaccttatgtttacttgtagatatcttttaattcgttagttaatactattaactcatcatcctacatattcaagctttaggcgacaaacgttgatagaagggaccgtacgtgggattctagaagttaaaacttgtaaaggtcttatttatgatttgaaaaaaa

SEQ ID NO: 12184 - DNA, 570 bp, Arabidopsis thaliana landsberg
tctgtcccacagtccagcccagcgtacactccccctttgtaatgaccgaaactgtccgctcttgcgttaatcaacaccgagacgggctgtcttcttacggcctcgagcaacgcacgctcgttgtggcttggaaccatttgaaaccctctaatctgtgtatgtggggcgcgtctggcgttggcacgacaactctcctttttcacttggtaagggtattccgtttctaaagaaacgcctccgttttttattatgtacttgaaagcttcttcaaattctccgccattgcaaccaccgtttttctctatgtcgcaatctattagctgttgttcggacagtgttaatagatttttgccagatatctttgtcaaaccttccatcgccccaatcgctgagaacgcccaacaacttcctgcccatgtatatatatatattggttacttcattttgttagtaaacaaatcatctgttagccctaaacctaaaataaccctatcttggggattaagtttagcgaaatgtatttttttgtatgtggaatgtaattttgacattaattaaatgaccaatcca

SEQ ID NO: 12185 - DNA, 731 bp, Arabidopsis thaliana landsberg
tgcagactaaaagcttccaagttattgaagtttcagtttctttcttaattgttctctctgttgtagagtggagttcctgcttttacagtggctcaacctgatgaagcaatgcgtgtactcaatgaaaaagcttcaaaattggaggtaaggcttcacaaaacaaccaaatcattagatggttgagatgacataaggttatctatgaattagtacttgttgtgaaggtgaatcttcaggtggtggaaccgttggactcaagccagagactcgggcttcaaggcgaacatcaatatctaaacgctggtcttgctgttgcgttgtgctctacatttcttaaagagattggtattgaggacaagaatggtttggatcagacagtaagttgaattaaaaaaaacattcttgagttgtgaatttcttctgttaacaagtaacggtattttcttacatgaaacagaacggtttacccgaaaaattcatctctggattgtcaaatgcttatttgatgggacgagctatgatagtgcctgattcagaactccctgaagagattgtgtattaccttgatggagctcatagtcctgaaagcatggaagcttgcgctatatggttttcaaaacagatcaaacaaaaccaagaaagaaaccagaaaagatcagagcaggtaaagatttttaaaattgtgtcttaaagatttcaaaaaattctgaaaaagttttgctaaagtggta

SEQ ID NO: 12186 - DNA, 634 bp, Arabidopsis thaliana landsberg
  unsure (1)..(634): unsure at all n locations
tccgaggttctccgaactgacattaccacaacaagaatctctatagcagcctaaatcgtattccctaaatccaaaggaaggctcaagcttaacagcactaaccctagggagaatccgtcagtgaaattcaactacttggaaaacaaggcagacctcgacgcatgcctagagatggttctgcatcttcaacatgtagcgaggtctgagactgtcacgttcttcttggggacacaagctcatgataagcttgtggcgggtgacgaagagcttaaaagcttctgcataaagaatgttagaacttattatcattaccatggtggttgcgctgttggatctgttgtggacgaggagtataaagtgaatggtgttaagcgtttaagagttgttgatggttcaacgtttgaagaatcaccaggaacaaaccctatggctactgttttaatgctgggaagatatcaaggaatcaagatactcaaagaacattaggaaaggttgtttagcccttaaaatattttgaaccaaaacgatgtaaatgcaaaaatgttcatgaaaaagattttaaaccaaaacgatgtaaaaatgtttcatttatagttataaattccaaaatgagaacgtgaaantccaaaatgct

SEQ ID NO: 12187 - DNA, 359 bp, Arabidopsis thaliana landsberg
ggagccactgcagctgactgttttgttgtaggtggaccatttggtgaccttacactcttgctatctcacggagcggcctgcgcagaaggtaataaactcatactgcaatccctggttattccaactaacattaccacaacaagaaccgctatatcagccaaaatcgcattccctaaatccaaaggaagactcaagcttaacaacactaaccctagggagaatccgtcagtgacgttcaactacttggaaaacaaggcagaccttgacgcatgccaagagatggttttgcatcttcaacacgtggctaggtcaaagactgtgacgtttttcttggggacacaagctcaagataagctagt

SEQ ID NO: 12188 - DNA, 1191 bp, Arabidopsis thaliana landsberg
  unsure (1)..(1191): unsure at all n locations
atcgtccttggtcccttgaaaccttgtggtaagaataaattaggaaaacactccttgacttaagattgtttagtgtgaggagatattggttgtttgaagaaccagataaatagaatgagatttgagtgtggtgaagaagaaaaacgttgaatatatataaaagtatatttaggagatattcatgtaaattaatgtgtgctttactctgatttgagtttgcttaacgtttttccaaaatttaaataggtagcattttttaagtaataaacaaaagaatgaattggtcttactttatattaatggattcttgattaagtttcacctgttttttcactttggagcaacaataatggcagcgtttatcagcgttgactttcagaactgtttcatcttcattctcctatgcttcttctccctcctctgttattctctcttcttcaagaaaccaaaggactcacgaggctgtgatctacctcccagccctccgtctcttccgattatcggtcatcttcaccttctcctctcttctctatcccacaagtctttacagaaaatctcctctaagtatggacctctcctccatctccggatctttaatgtccccatcatcctcgtttcatcggcttcagttgcagacgaggtcttcaggatccacgacatgaacatctcctctcgcggtgctgctgcgatcgatgagtccctcgtgtttggatcttctggtgtcgtctacgctccctatggagattacttgaagttcgtgaagaagatcattgccactaagctgcttcgacctcaggtgttggagcggtcacgaggtcttcgtgctgaagagctacaacgattttacaacagaattcttgataaggcgaggatgaatgagaacgttgagatcggtaaggaagcgacgatgctcatgaacaacatcttgtgtaggatgagcatgggaaggagtttctcaaaggagaatggtgaggcatagagagtcagaggcttggtggctgaatcatatgccttggcgaagaagattttcttcgcatgtgtactgcgcagactgcttnnnnnnnnnnnnnnnnnactattcaagaaggatatcatggatgtttccaacagattcaatgagctgctagagaagattctcgtggaacacaatgagaaactggacgaggaacataaagacacggatatgatgga

SEQ ID NO: 12189 - DNA, 835 bp, Arabidopsis thaliana landsberg
catcctgagagttttaccttttcgattgggacttcttgacgtatgcaccatgcaactgtgattctaggatccaggtagttgatcttagacgtgcccagtgccactgttttcaagtcctcttttgtatgcatgtctcgttccattttctcgatcttagcactctgttgagcaatcttcttctcccacctgcattcaaaggacgtagatcttcaaaacgagatagatatctagagaagtcttttgagaagtaagagggaaagttattttacgcgtttggttctaagcttctaatcttctttccatcagaaccttccaatggtggttttccctttttagcccggtcaagattagttttgagctctttaagaacctcctacagatttagaaaaaacaaacaaacggaagggcattttaaatgaatccagatgaaaagcagagaacttcaaaaaagttttcaagagtttatacaggatttgtaccttgagttcttctattctcgcagtcaatttttcaatttgcgcaccatgtgtctttgatacagtacgctgatgattgcagattatggcaacctgaaagagtgtgaaccagtatttcatgaatctgccacatggttatgtaccaaacaagaaatcaccaggaggatgaacaaatcttttacctccttatttgctttctgataaactactattttttgagtaacatcgccatctttggtttcttgactcagctgttacacacatcaaaacggaccaaagctgtgaaaaaatgtaaagaaatatatatacttgaaattgggtttctatgactaaattgtatagcagcataaatctgatgt

SEQ ID NO: 12190 - DNA, 583 bp, Arabidopsis thaliana landsberg
ctttggaatagaacagacaaggccaagaattcattttatctgggaaaaaatcaccatataactagcttttgatgaagcaaatgatgataactgcttggcaagaacgaaacaatactggtattcgcctaggatccatcttcaacaacagatattactgctctcatacgaagaaatcatcaggagtagagaggatacaacaggtctctacaagatcttcatatttctatcacaaattatcatcactagtagtctagtggtcaagacatatgactcttctggctccgaggaccaagggcatgttaatgtctaatttagcttcaagctctgttgtgatgtgggatttcatagtatatttgtctacgcctctcacttctggtagatcggaggtagataatggtaagcatgccaaagggtggaattcagtgtagttctgctacataaaccccaggtatgtgtccattcaggaccgacctttaccatatagcttatagtgtatccaaacttgttaaaggactatcctgagttaattcagtgactataagcacttacatttccgagagatgtatgcgacacaagcatagag

SEQ ID NO: 12191 - DNA, 671 bp, Arabidopsis thaliana landsberg
  unsure (1)..(671): unsure at all n locations
gaggaagcctacaggtattttgagatgattaggggctttggaaggaagactccacccgaggcatgtcagaacgatccacaatcccaacacaaatgatgacaggtccaatcatacccagagcagccagcaaagctcacaatcttcgggaatgcagcaaacttcctataggtcaccagccccgagaggcagaggagggaggaacttcggaggaaggtttggtactctacccaggagattgttctgcttattctatggggaggataagggacacacgactaggacgtgccgagtcacgatccaaaagaaggaaatcgcttaagctgaagcacgatagaaccagccgaagcaggtctcgcatactgcttcatgctattccccatatatccatgaatatgtgggcaatcagcaacctacggcgtttgttgcttcgacgagtcagtcccaagcttcttgggctcagttgccaccatcaccaccattggcacctaccttagcccataatcaacagccagaagggcatcgtcatgcgcagtaacagcgcgacactagggaggagccgaagctcgcacactcaacacactgtgcccgagtcaaggcatatctactgaaagtagcacaacgctccgactanagagtgtcgtaatcaatgtatttttactttttgcctttat

SEQ ID NO: 12192 - DNA, 854 bp, Arabidopsis thaliana landsberg
tgttactaatatcgaaccaaccttaactataattcatgcattttaggttaagatttaaagttttttccataactctttttatctatgaaacataatgtgcgaaggtcaaaagcggtttaaggcaaaaatttaaattgttgccttgaatacatatttttcttttaaagacaagagttttttttaccatttttcaaatattctcattgaaaatgagattttgtgagttaatatcatgaaaatcaaaaataattttcataaatgttaatgttatgattttttttaaaaaaaatatccttaaacactaattttaagtaaatactagccttaatttttataaagatgtagcctattaatattatattgttgatctaagagattagacattctacttattttagtagcttaatatgatttcgacataagcttcacgctttacttacaaaatgtttagattcatagcgagtaaaacgtcgtagaatcaaagctcaaagccaaatcttagtcctcctcacgagcaacatttttgctatgatgttgagcttactccggatctttcgtttcttggcttttgatcttacaatacaataagatttggatcaacaaacccacacacagaccataaaaatcaacaatcaatcatatattgctctacagtcgtgggatggcgacggaatctgtgttaccatctccgttcggctcgcattgtccagactcgtcggaagtcctattccgaagaatattcgcagatctgttggccggcggcttttttggattttccgattgaagattagggtttcatagtagatcggtttagtcagtttattagctcgggtcgattttgatttaagagcttg

SEQ ID NO: 12193 - DNA, 895 bp, Arabidopsis thaliana landsberg
cgcttctcaccgacttgatcacttgtttataataagctcagtgctaaacccaaaacagaaaaaattagaaagcatactacaccaaacagagaaagaagaaaaagaaagtaagaaaatttgttttttgtatgtaaaaatgatgatgatgggcgattcatttggaagtataggctcaagcatggcaagtttgttctttctttgggcaacaatacaacaaatcttccctgaccacttgaagatcacaatcaaagagtttcttttgtcttcattccaacaactctgttttgctcaaagagttttcgatcatttcaccaacctcttctctccttatgtcgagatccactttccggaaagcgatgagtacagtttcaaccaagctttctcggccattgatacctaccttgactcaaaagcaaccgacaagaccaaacatcttagaggaagccaagtaaaagaaagcaaggtttggtattgaaacgaaacgaggctaaagtcagagacgagtacaaaggagctaatgtctggtgggagagagtggttgataatgatggaaaccgatattataagctcacttttcacaaccgcgcaaggatccttgtaaccaattcatacataaaatatgtggttgaagaagggaaatctattatagtcaagaacaagcaaacaaggcttttcacgaataacttaagttcgcaatgggtttttggccagaatatgtggagatctattgaatttgagcaccccgcgagctttcagacactagctatggatccaaagaagaaagaagagatcgtgaatgacctcatcgcctttagtaatggtaaggagtattacaagaagatagggaaagcttggaagagaggttatttgttgtatggaccaccaggaaccggta

SEQ ID NO: 12194 - DNA, 748 bp, Arabidopsis thaliana landsberg
tttcagtgtttgcacggtaaagtttttggttgataagagttcataatcaaacacttatgtttcactcttcccaactgacaagcacacacattgagagaaaaaggcattcttcactaaaaacttttaaaaaaagatatcacaaaacgagtttgatattttcaagaaaccaaacaagagaacctaatatgcttaaataaccttaaaagacttcagaaaagtttggcattagttaattctaccaaaacaaaagtctacaaaaaaaaaagagtgagagcatcatcagatgatgatgattatgactctcagtagcttccaacatgttgtctcggtagtcctcctccataactccccgtcgtgcctctgtaagagccacccatgtactgcccttgctcttgcggcttagtagcgcctggacactttgcagaaacatgaccactgtttccacagacattgcagctagtagtagcaccaccaccactatagtgattcccagattgacccgattgatgcgcatgtaaaccgaaatcccttctttggaccgatgagggatctctggttcctgagcttcctataccagtattaaccacatcagcattgtaatcggatccttctgggttaatggaaagagaatttgcatctctggtcctgagtttatccatagcacctaacatagtcctggtatctgctgaatagtttagcttgtccactttcacaactgttgctttcacacgctgttagtcgctgaaga

SEQ ID NO: 12195 - DNA, 612 bp, Arabidopsis thaliana landsberg
acgacccgagttttattggcttaacttaaaccaagactctctggtgatagaagctctggcgaaatacatgacggacttagtggactccgggggctatcgctaacccgaccaggccgatacaatccaaaccccatgaaaaagaactccattggtatcaacattgcatgtggttgctcttctgtcaccattgatccacaagcttgcacctgcaattctaaaaacatcaaagcatgttccacgaatctaaaagcctgaatctttagtctcggagagaagttaagagctaccagagctgtttttacattaaaccgcatacctcaaccaaggcgctgtactttctgtccaatgctgtcaccatgtgaagagtttcagagtggaaaggagattggtcgccaacaaagatgagtgtacggcatttcaaactcttcaatccatcagttaagtcatgtctcctgttaactgcttctagaaaccgcataagactactaccgtgtctttcacctagcagctgtataaacatgtcgtatcaacaacgtaatcaaggtggtgaaaagcagtaaaatcatctggaaataactactaggtttaggcgtttagcactcactcttctgc

SEQ ID NO: 12196 - DNA, 1357 bp, Arabidopsis thaliana landsberg
tctaagctctggtgtaaaaagaacagatcgcgtcggctacattgttcactgacttcttctctttgacactcatgtatattctcattcactccatcgttcatcaaaagtttcagggttcttgaaatatgtgaataagcattctcttgaaatatgtgatcctattgattttctcttccatctccccttgtttctctttaatatgatgtagtgagtttgcatcaatgtaagattgtttgttctgatatacaaacaccacaattaggggtgtcaaaatgagttgttagctcatgaactggctcaactcgacttgattatttatgagctcgagttttatttttaaaagatcatttaataaatgagtttaatgattgagttttatttagcttgagagttatacgagcgagcttaatgaacatgaggtagctcatgagtttgatttttttctgaagtaatatacaaaaagttaacaataaaaaaatatattttttctattaaaaagagaaatatattttagaaaatatatgatttacagaataatattagaacatatataatttatttatttgcattagctaacgagctagctcatttagcttgcgatcaagatgatctgagtctaaatttgtattttaaaacttatataataaatgagctgagcatagctccctttttctccgagctcatcatgaattgagctaaggtgagcgaacatgctcattttgacacccctaaccacaatatgattattgtttcaatatttttagatattttcaacagatgtatgagcagggccggccttgacattttgtggaccaaagcccaaaacaaaattaaagttaatttagaagttttaaaaatttggggccaattattggaaaaatgaataaaataagggttgttttgtaaataagttttgctgaataaaaatggaggccacagcagatgtttcattttgttgtgtccacggccagccctgtgtatgagaatggtaaatcttgaataactaggaagattagagaggccattgatatgggtgtcatccggaatgtttcgcttagtcttttgccttttcacaacctccagaattttttactctaaaagataaacaaaaccagaaagttcaatattaaattgtttaattagctatattagtatcagattttgtctaaagaaaaagcagaaaagaatatgtctttgctaaactacccttgaaatttggacttccatttttttagaacatgtacaaaatgaagaatacaaactctaatattcgtaaaactctaagaaatgtattcttaatattttaaacgaggttttatcttttaaaaatttacttttcccaattaaattacaaatt

SEQ ID NO: 12197 - DNA, 832 bp, Arabidopsis thaliana landsberg
gggaagaaatattccaaaaaggaagtttccgaaattcttttatattattccccaagcaaaccattcaatatcattgattattgatataaaacccatataaaggtgtctctcatcatcctccattcccatacatcactttcctcgatctcactttctctctcttatcatcatctcctggtattctctctctctcatctccgtgatggtgctctcccacgccgtatcggagtcggacgtctccgtccactccacattcgcatcacgttacgtccgtacttcacttcctaggtacaaaaaatataacacaatcttgatcacattatacttctatattttcgataaaaatggagggctaaaaacgtagatatcaggttcaagatgccggaaaactcgattcctaaggaagcggcgtatcagatcatcaacgacgagctgatgcttgacgggaatccacggttgaacttagcctcctttgtgacgacatggatggagcctgagtgtgataaactcatcatgtcctccatcaacaagaactatgttgacatggacgagtaccccgtcaccaccgaacttcaggtatatatagttctaagtcatgactttttgaaaacgagatttaatcataactatatatatcggcttatgtatggagaaaaatgtttatagaatctttagattgtttttttccaaacgactttgtgatagaatgtggtcgagttatgataaactcaaatgtttggatgacccgtccattcatatgctggatcgagattatagaccattattaatcagtatgattgataattaagatgcttgctattaaaaagaaaac

SEQ ID NO: 12198 - DNA, 557 bp, Arabidopsis thaliana landsberg
tttatccctttcttttgtaaactggttgtgtttatgtaacgcattgattgtctgtgtttgtatttgaatttaaataagattgtcattgatattggatgtttttttttttttttgattttaatgttaaattataattaagaaaggataaacgtttatatatatgcaacatttttttaaaaactaaatcacaatgagattctatactattattatccttgtctcgatgcaaaccacagtagaatacatatttctcatcatctcctttccttagagtacactaccggttgcagatgttcttgtcaatcagcttcactatcttttccatcggtgaaggttgctatccatgtctcctatcatttctttctcatcatagggaatggatcatgttctggaacacacatacctatatgaatctagtcgtggcgtcataatctgtatttgctagctccttggtaatgtcttgccattttgccgtttagatccctccaaggatcctattaaccagctcctcccatatcattctttcccctgttgcaactctgtgtttcataaccaac

SEQ ID NO: 12199 - DNA, 693 bp, Arabidopsis thaliana landsberg
atcaatctcctaaaaaccctataaataaaaagatttcatatttttcttcctattaaatttacattttccgccacactttcatctctcccactagtctctcctcgagactctctctgtatgtgtgtgagaaaagagagagttgttcgctcacacgctttctctattttctcggaattcacaaaacagaaagtttcatcctttacgagaattaagccgaaagaaacaatctttgagtttgatttcttcttccttccttctctctctctgctctaatggattccagagacatcccaccgtcacataaccagcttcaaccaccaccgggaatgttaatgtctcattaccgtaaccctaacgccgccgcttcaccattaatggttcccacttccacatctcaaccgattcaacaccctcgtcttccttttggcaatcaacaacaatctcaaacgtttcatcagcagcaacaacaacaaatggatcagaagactcttgaatctcttggatttggtgatggatcaccttcttctcaaccgatgcgattcgggatcgatgatcagaatcagcaactgcacgtgaagaagaagcgaggaaggccgagaaagtatactcctgatggtagcattgctttaggtttagctcctacgtctactcttctctctgcagcttctaattcttacagagagggtggtgttg

SEQ ID NO: 12200 - DNA, 740 bp, Arabidopsis thaliana landsberg
aacccaacgaaaccacagaagaggacgggaaggcaacgaaacatgccccggacctgatgcatcgaggtacctggacattgaacctaacttctgacaaacgcaatcgcaaactaactatagacgacgctctactcgatactcaaaagaagtaaacgaaagtacctttctatgagacaagaccatgactcgatctaacggcggaacatgatctaagaacccatctcacttttgtgttaagatggacttacagatcgtatttgcagagcttgacggcgctcttgtttttctctttttggtatttgacgtcgggcttagccgtttaggtttaggtttgtgaggtcgataatgactgacttgggtttatatatataatgccaacgcttccctatttaaccttacaattttgtttagtaaagaatatatatgtttagtaaagtataacaagaacaaaggaaacaaattgaactatttattttatagaataatctttgtttgaataacaatttccccttcttttcagttgactttatactttacaaaatattcaattcatttctcttagtcaaagagagaatccaaacatttcactttttaccatatagagtattcattatatttagaatattttcatattgtgtatgatatatgcatagcatagatgtgtgtaatatatatatagctacataactgtttcaagtgaattgggtgattgttctctatcaatgacaccaaagcactcc

SEQ ID NO: 12201 - DNA, 719 bp, Arabidopsis thaliana landsberg
agccgctaagcgcaatatatcagcacaagagacaacaccaggacatgctgcctcgagctgcctcttggcatcgtcaatgacttcaaaaccatgaaggttaacgtttgcgccagcggttctttcagagttaggtcccgataatagcaccgaaccatcacaaccttggacaaagcaatcatggttgtgcattctcagtaaccccggtgcaacctttggatctgaactaaagtgagatgctacagtggtccgaacaatcgtctcggcattagggcacgtggtcgagtagaacccgatcctcgtaccttggccatacaccgcgatgagacaactaaggaagactaagaacaaagcaaatgatctgaccaagcccatttttctttttgttggtttgtgttttagataaagatcgcaagtgtgtttcgagttagtagatagagtttgttttagatgcatggaaagtgatacgagaatgcgagtaacttatagagggattgagaagtcaaatggtgatgttgaagtcagcgaaaggggctagagtgttgaggtaatttgacgaaacgacgacgttgtaatccattcaaaactgaaaaccgcgttatgtgattggtcatgagctggcttcgcgcgttgacgattgcagatcatgttgggtttgtttttttctcttttgttcgtttctatcaaattaattcctaattaatagtgtgtaatcatttata

SEQ ID NO: 12202 - DNA, 1445 bp, Arabidopsis thaliana landsberg
tatttataaacaaccaggacttgatcattccttgctcaaaaaccacacaatccaggtatatatatatatatggtttcatctgctacatacattttagatttttaaaaatgtgagttttgaatctggctattgtttttgttaagatgaaaccatcattatcaagacatgagctaaagaatcaaactagcaacaacaaaacatataagaaggacatagaatgtccatatggaactattcctgtattgagaacacaaaagaattcaactccaaagcccaactcttggctgccaagtatttcaatccgttatcagctgatagccctggaacacatgtacgcattcacttttctgttaataccttagatctaattatatattacaagtgttcatgtatattggtagatcgctggggtaaagcaacacggtggtccatatcatggtatagaagctaagtttaatgcatataacctaaacattggagaagatcaagcctcatatagtcaaatgtatttaggcagtggacattatggcgaagtcaatttcatttcaacggggatgatggtacgttttacattttattgttcttttttttccttaaaatctattttacgttatgggtagtcttacagtagtgcaagtctttttaacagataaatccaggcatttttggtgacggacgtctttggacatatggattttggatggtaagcatgtgaacatattatatatgctgaaatcattaaccaaataatatgtaaatattacatatgattttgatagggtaaaggtggaaaaggatgttataacatggcatgtccagggtttgttcaagtatcgaatgtggttcccttagtcaaacccatgtaccttaagccaggggagcctgcatcgttgcaatgggccatccatcaagtaagtttttaattttctacacttcgtttgttttttaataatatgttttgaagattttttgtttgtttcaattattttttaaagtttctaggcaatattttcatgtcattctcacttagtagtgaaggatttatgattcttaaaactaatcattaatataatcaaatcagtgatatcagactatatatagcctttttggtccaaacactttgattagcacatgattttactatgatgttttttttaataaatgaattttgttttgtctcttaaaaaggatgaacaaacacgaaactggtggattatacaaatgtcgccttatacatatatcggttattggccaaaagagctattttaccttatggataatggtgctactatggttggagttggaggtgtagttcaggcttcaccttctggtttaagccctccaatgggtaatggtaaatttccggcaaaaggtcctttgagatcagccatgttttccaatgttgaggtcttatattccaagtatgagaaaggtaaaataaatgc

SEQ ID NO: 12203 - DNA, 644 bp, Arabidopsis thaliana landsberg
agaacatcttctcagtggctcagggacgattcttgatcacttctggtggtttaaatgggtttcttcttggttgtttagtgataaggaattcttagcgcacaaggatcggagaacaaagtggtttagaggagctattatggtggaagaagatatagaaatagaggatcacaggggatttgttcggaaattgttggtgttaaaagagcagaaagagctgagcgaagagacggttgggggactagtctggaacatgttaaccgcgggtgctgacacaactgcagttgttatcgaatgggctatggcagagatgatcaaatgcccgaccgtgcaagaaaaggcgcaacaggagcttgattctgtggttggatccgaaaggttaatgactgaatcagatatccccatactgccatatctgcaatgtgtggttaaagaagctctccggcttcacccgtcaacaccattaatgcttccacacaaagcaagtgaaactgtttgggtaggtgggtacaaggttcctaagggagccacagtttatgtcaatgtgcaggcgattgggcgggaccctgcaaactggataaacccatatgagttcagaccagagcggttccttcaggaagaaaccgatgttaaaggtcgagacttta

SEQ ID NO: 12204 - DNA, 1108 bp, Arabidopsis thaliana landsberg
atagttgataattctctactttcaacttatttcttgtacaaaccgtattatgtaatgtaggtaagcttattctcatgattagctcatttgatctaattttaatatttatataaaaaacttataaaccctaataaaaaaatatctgaccaaaaaaaaaaaaaaaccctaataaaaaacaaacagtacactgttttttctctctataaagagaaaatctccaaaagcaatgaccaatgagaaatgtgaagttgctcttccactaaagttgaaatcagaaaaaccatcaatggcttcttcatcatctctctttctcctccctctccttcttcttgtctcccaagcttcaggtattatattcttccttttactctatttttaacctcaaatcttctaaatttaaattcatagattaatcacatcaaacgaaagtaatgacatggcttttagcctttaaggttaagtggttaactttacttttgtttgtgatgataagcttcaacggttatattttacaacaagtgcacgtacactgtctggcctgggatccaacctagctccggtcagtcattactcgccggcggcggatttaaactgtcgccgaacagagcttacactctccaacttccaccgctctggtccggtcgcttctggggccgccacggttgctcctttgacagatctggccgtggtcgctgcgccaccggagactgtggtggttctttcctctgtaacggagctggcggtgtacctccggctactcttgccgaggatcaccctcggtcatgacatggacttttatgacatcagcctcgttgatgggtatgtctcacttaaaaccaattttttcaattcgggttcggcttaaattttggttcagttataagaaaaaccactatttaatcgtatttttaactatcaatgcaatattatattttaacatattattgaataagtaatatgaatttgaatgaaaaacgattttgtttggccgttaacgttaataaggagtgaataaaagatgagaattcttaaaaaaaaaaaaatggaaaccggttatagttttcatgaatcaaaccagcctatgaaatagtttttaaaaaaaaaataa

SEQ ID NO: 12205 - DNA, 930 bp, Arabidopsis thaliana landsberg
tcatctgattatcggggctatgttcttttgaatcagctcgatttcgactccggatcgcattttttctcatgttgatctgcttctttttttttggcagacgtcgaggccggagtataatcggattcttgtggagaaacccggtggatctgacatctggccgttttaaatgataagaagaagattttgtgttgaatggttagttcttggtttctgatttgagtactactcatgtttctgtaggacttgtgtgcttgtatacgtcaatgaacgcttatctttcttctcttgtacatttcagtttgttcaataggtcaatgtaattctccttcgtttgtgttttgattaataataaaagtttggtttcatctactactctcacttggtttatagctatgcatatgttcatcgtattatctgggaatcacaagaaattgatctgtgggaatgtaagtacatggaatttagaaataagaatggccttaagaaagaagtagccaaatagtattacagaatcactaggcttggtttgtgatctgatagagggagaaacaagtcttgagatatttagcagagtagaagccaagtacaatcagagtatgaataagtttagccaatattttggttctgtgttgctgctgttctctgcttgttggttattttcctctctataacctggctgaaggacgtggagtgtcccattcggtggtaatgtggttacgggagatttcctttagggaccgacacccactcagtgccatggtcagctcgaactcatcacgtagcatttgaagcacctttctaactccagcctctacttcagctgccaatgagaataccactggtcttccaatctgagattgagatggtataataacaatgtgttaatttcaatggtttgaagcagcttttttggtaacgagaatatgatgc

SEQ ID NO: 12206 - DNA, 949 bp, Arabidopsis thaliana landsberg
gcttcatggccatatctcttatcctagattatttcttgcttttccttacagatcttttgacgacctaagttcttgctgtgaattgttaaacagccattagcctgggcttgattagccaaccctgttaaggcagggtttgaactaaaagtgagatagtgagatggatgtctcagcacttttaacgtctgctgggattaatatagcgttatgcgtagtgcttgtatctctttattccattctacgaaagcagccagccaattattgtgtttactttggtcgattgctttctgacggaagagttaaacgtcatgatcctcgttggtatgagaggttcgcgccctctccaagttggctcgtgaaagcttgggaaaccactgaggacgagatgttggctgctgctggtctggatgctgtggttttcatcaggatggtcatttgcaggttaatgatacttcacctataacatgcttactgtaattgaatagacaagcatggtgttttctactgtttctatgtttcagcacttgttttatttctatgtggtatttgtgagtttcgttcttcacaactctcacagttgggttatcgtgttttttttaaactctgcagcattcgtattttctcaattgtcgcagtcgtttgccttgcctttgtgttacctgttaactattatggacaaaagatggagcacaaggaagtccatttggagtcattgggagtattcacaattgagaaccttaatccacgctcacgatggtaaagtggtggcatataatattaatattgtcagataatatgcatagcctgtatttctatctgattatgtttctctgtgcaggagaagatagattgccagtattttgtacaatgaagtgctgatccttgttttactatttttataaacaaactctgggttcattgtctctcattgtacatcatatcctctgca

SEQ ID NO: 12207 - DNA, 785 bp, Arabidopsis thaliana landsberg
agcgacttctgtcgagtcaggaagcagattagcagtgagtaatcatcttacgatttctatttgataatccttttcctatatttgactgttatctcggttttgaaacatgagcccttcacaattttgcaactaacacgcaatttgttgatgctgcagaaggcaagaatgtgaagaagcgagcatgagagagagctttacattggtaggttttgaagatatgtggtgggcgcaaactcctttttgttgtgaatgaattggcaaaaaaattccaatcgaaaaacgctttttgtaaaaaattccgacaatgcatataagcaaagtcggtcggtccataaaataggtaggtaggatgaaactataatccttagaaactgattcacttttgtgatatcaaaaactcatgtgaatatcttaattttggttctaacggctatggcttttggttatgacttatattgaaagatctctctatttatataaatcgcagtatcgaagtgaagtcttgaaagtgatttcaccttaagaagagctcccatgagaatcacttgtggaaggcttctctctctatatatatatgaggaatgctaatagtacaagatcaaagcttattacattgtatgatacttttgagtgctgttggataatcctatcattgagttatgtacagtcttctacgcttaaaccgaaagctgtgcttcaatggctttacctaccaagtctcggttattatgtctccagagagaatcttgatcgccagacgaagaaatggccggttgaatttcact

SEQ ID NO: 12208 - DNA, 1074 bp, Arabidopsis thaliana landsberg
agtgaaccacctgggtatgttgatccggtcaacggttgcatctgcccgttgcaagttttcctcggctcgttccattcccttcccctattgatcacccaaaaaaaaagacatgaaattgtacctattaaagcagcagttttcaacattatatatgcatatattagtgtgatgaacttacatgtagtgagtgggagaaatgccttggaagaagactcgggtttgcgaaacattaacattttgatcaacccattgaccccaagtggtgagtcctttgttgaaagcatcaaggcggtccatgtctctcatcagtgaagacccatctcttataaaatcccacctgaaaaaacaacaattgaaatatagaagatgagttttgtcaactaagcatgtcttaatcccaaaatatatggtgatagctctaagtgtaataataatatggttcggacccttgagactgtactcctgtgtgagtccaccagtgccaagaattgaagacgaggaggtccatatttttccaagcatcagctccatcttcaatggctccaaggttaagcacacgcccgacactttctttggagatgtccactaggtatggtgttcggtataggaatagtgtgacgtcatattcctgataaattaggaatttaaaagatataaattgagtgtttttcttaataaaaccccaattacagaggtaactttgtaaagaacgtgaaaaccaatataaaaacattataaagttttgaaggtaacatgttctatagatttaaaaagaaaaataaaatgaagaaaacaagttggttgtcattagctgtcaggtctcctacatccttttcctgctatgttctcttctttttgtttctttccattgtctttgttgtttacatattaattgtgataattcatttatttatttttaaacaatgacacgagataaatgtccaaaacactaagtcaaagcttgaaaacaaaggcaaaatgatatacggtggagggaaaaaacgtattggaggtccacaaaaaaatgcaaaatcggctgataagtattgacacatcagtttcatgggtagaatt

SEQ ID NO: 12209 - DNA, 1010 bp, Arabidopsis thaliana landsberg
  unsure (1)..(1010): unsure at all n locations
tgaccggtcacgagtttcttctgacgaatcttgagtcttttctggttttcgtcgaggtatgtacttgtgaacttcttgtctgaaagcaatgcagagagaaggtactgtgtttgagaagacacgagaccgaaacttgacatttttgttgcagcggaaacaaccatttcgtcgttggagtaaattgctcctacgcgaaaacctggtaaaccgagatctttggaaagactataaacaatatgaactcgtttggagacttcgctgttctcgaggttcttgtcttttaagacatccatgacacttacaaactgttcaaacccaaaaacggtacctgaatagatctcgtcgcttatgagatgaatgtttttggaagtaatgaagtcaacgagaaggttaagttctcttctggtcaacattgtgccaagagggttagacgggttggtaacaagaactcctttgaccttaagatcaagcttttgagcttgttgataagcttgttgaagagctgactctgttatttggaacccattagagcttgagcaatgaataggtacgatctctgctcccgttctccatttcaagtctctatcgaatctgtatgcataagcgaatcaaatactatcagctcaggtttcttgtgaggcaagtaattaaataaaaaaacctaaaaaattaccctggatagtaaggagttggtaaaaggaaagcgtccccgggttcggcgagacaaaacatgagagtttcgttggcagatgttgaaccagcagctaggacaatcttgcttggatcaaatgttactctatttcctctgatttcctccataaactctgccagagcctatagataaataaaccctattaagtaagttactcgcttcttgatcgagttacttatgaaggtgaaaaaaaattaattactaactttaatgnntccgggtaggccttgatagtctagagaaaggaagagctctttgaaaaaggataggccgaccttttttagtccggctgcggccg

SEQ ID NO: 12210 - DNA, 1057 bp, Arabidopsis thaliana landsberg
ctgtcggtgatgaagttgcgagtgtggttatgaacatcgatccaggaattgtataaacgaatgatggatttgtggttgagagtgctgaggagatgaacctcggagtaaagcctctgtagatcaacagaggaacgcagaacctccttaagcttcacctggctccatgctacttctattcccagcttctcgtcgattgctttgtacactgtcttcatcgctccccttccaagaatttctgcaaactgttccaacataaaaaaccaagtgttacaacaaggttttgatccatgaacatagaatctgtctccttacttacacgtccatagcgaccagttggatcagtttccacatactctgcaacttgattcatattcatggttgaccaaaaaccgattgatgatcccaaaaatgtttaagaggacacagactttcgtttttataacagagaaattttccggtggccaaaagtcgtcctgtttacttcttcgtgctacttcattaaagaagcgtcagcagaaaatatgttgaacagtcgttggcgtcaatcacccatttgggataaaaagaataaagacaatttgccttaaccttgcttgcatcacatatattatagaaaatcatatatttatttttattgacccaattgtaaatctaaaaatcgaaagtttgacaaatcttacttgccaatacaagatactcaaaccacaaaaatgaaaaaaaaatcatcaaacgtgtaccacattgaaaacacatggctaaatatgctcaaaagatgcccttgtttattttgtgaaccacaaacacaattgcaaagaggataagagttaagaaagtgtggatactgggaaatgcgatattcaagaaagagttttgtttcttgaggaaactgcacaattttcaattgaaccaattattagttttggtgaacacaagcaatccaaaataaatagattgaggttaacaaaaataaaacgacaaagaaaaggggaaaaggtcagaacagaagtggggaacatgaaagaagttgtagagaatagagtgatagtgacatcaccgt

SEQ ID NO: 12211 - DNA, 772 bp, Arabidopsis thaliana landsberg
actcttttttttttaacttttaactgggaaaataggaatatagttgctagtggtagtgaagacaaaaaagtgaaggtttgggatgtggctacggggaaatgcaaggttactatggagcatcacgaaaagaaggtatgaaggtgaaactgtttccatgctctttcaagctagcatctgtgcatgctcatggtttatttattgtgtgttgtttggctaacaggttcacgcggttgcatggaacaattatactccagaagtactcctcagtgggtctcgtgatcgtactgtagtattggtgactgttttgttccatttatgtgttgagtcttgtacatgaaatttttttatcattatgttgatcagtcttttatatatatatatatatgtttcagaaagatggaagggacccttcaaactcgggtttgaaatggtctaccgaggccaaagtcgaaaaattggcttgggatcctcacagcgaacactcctttgtggtgcattacgctttctttgctcttctaacacaaacatctgaatgattcagatatctgatgtgaatcgttaacttttcttcttccatcttaggtgagtctcaaagatggaactgtgaagggctttgatacacgtgcttctgatttatcaccaagtttcattatccatgctcatgatagtgaagtctcctccatattatacaacatacatgcccccaatgtacacacatatatctctctttctctcttggctcctaccatattcatagtgtagtcggttaata

SEQ ID NO: 12212 - DNA, 519 bp, Arabidopsis thaliana landsberg
ggtatttttcagatccttcatacaataactgtaacatttaagacttctcttggtgcattagttactgaacttcattcatgttctagtattagtcaataacgtgtgttttaaatttcagcttgttgacccgaagactggtgatgagaaacccattacagtttctgttgatgatggtatccgaccaaccacaactcttgcttctcttgggaagctgaagccagtgtttaagaaggatggcaccactactgctggtacttttcccgaatcaattgtttcattatggaaaccacagttcttattatcacaattttaaatccattgcttcatttgttctgtcgcaaacaggaaattccagccaagtaagtgatggtgcaggagcggttctcctaatgaagagaagtgttgcaatgcaaaaaggacttcccgttcttggtgtattcaggtgggtaataattaccgaaaaaactgcagagaaatgtgatttccatttacacagatatgctagtatacgtggaaaat

SEQ ID NO: 12213 - DNA, 618 bp, Arabidopsis thaliana landsberg
taataattcctaccaaaactatctatatacacatatatcctgatatattgagcggttgtcaaaatcatcttataaaaacattatctagctatcaacgtttccatcgttccagaaccaaattctccggccaattctctcatctacaataatagaaatttgaaatattatatatatatatatatatatatatatatatattaaaaataataataataatactatatatatgaaaactatatttgttataaatcatttttttctcagttttcagcttttggctcattcgccactttaggagctgcaattggtgcactgttctgcggtaatctggcaatggtcattggcagaagaggggtaattaatttaaccgtttcacctttcatattcgtaaatttaccattcttctaatttttttggttctttcgtgactataattttcgtatagatgatgcttataataatatttttgctatttatgatataatagacaatgtgggtctccgatttcctatgcatcactggttggctctccatcgcttttgctaaggcactactagttattttctattcataaacatgtttttttttcattcaaacattatttcttagaaaataaac

SEQ ID NO: 12214 - DNA, 938 bp, Arabidopsis thaliana landsberg
tgagtcaaagagttcgattctcgttaacttttttgactccaccttctcctcaaatggaaattaaattagtcttccaaaaactcaataagatacaggacataataaacagatcaatagccagcaaaactaaattaattcatgttaagggctatttagagtgaacctaattttcgggatgatttacggagaagctctagtaaagaattagcttttcgtttagctctctctgtaccgtctcttgatagttccatcaatggaacaacagctccaagtctaccaatggagatcagtttttcagtatctctcttgcaaagacacagtagtatcgcagctgcgttctctcggtttcgcggttgatccttctggagacaatctatcaaaggtggtattgcgttggctctcaaaatcgcagttttcgcgacttggttactagctagaaccgagagtatggtcaaggcttcatcagccatcctctcgctcgaggagtctgtcagcattttcaccaatggctttactataccggctctaactgctctgcctttgtttccctggtaaatacacaagttgaacagagccgtagctgcgtctttcttccctctgacgcttccatattgaagcagatccactaaggccattatcgcacctgatgcgcctataatgatcttgttctcatcagctaacgaaagactaaagagagtagctgcagcgttttctctagcttccatgcttccagctcggaggactagcactatagatgtgactgctcctgcaagcatgatcagttctttgttgtgttcgtatatggagaggttaagaatgcaagtgacagcattttcctgcgtttcagtgtcaccatctgaggtcaaaagcttgaccaaaacagggatggctcctgcctctgcaatcagaattcggttgtctgtgcttctttttgacag

SEQ ID NO: 12215 - DNA, 1069 bp, Arabidopsis thaliana landsberg
ttgagcaattttttcctgtcaaattgcttacataattaagtacgtactaatggtattgttagtccatcgatattcgaagaatcagtttttgttaacttctcctcttttttttttttttttgccatttagttgagaacttgagattacttgagctataaaaaatgtgagagtttgaatatgtatcctttgcagcttgtcgataacaactcctcatctttaagagacagaataaacattgaacccttccttagcccataatcatggactctggtttcgactttacgtagggttataaatcattaaagcttcttctacaaacaacggcactagaaaaggttctcgtagcccatctctctacttccacatgaattcctacataattaatcacacatttaacaaaactagtacaatcataagttaattaatatcccgctactatttgaaggacgtgtgtgtgatcgcccttacttacttcgtggttaaccgttagatcagattcacatcaagacgattttgtatgggaacagcaatcatatgacatctgcggtagacatgatatttcaagatgtctaggttaatggttttaaacaccttttcttgtacattatatacactctctgtaaatttctctgtaagttgtatatacaccttttcttggctccaagatccgttccgttccaaaaattcggagtttcgggttcaggatatttatgatgtgataatgagtcaaataaaacctatttatggcgatagtcgcattgaaacagtgggacttgcatttattatcagactacgagttacattattaagtacacactcacaagcattcggttaaccaaaaacatagaatggaatgaacgagcacgaacacttttcttcgaccaaacttagagacgtggttatagagatcgcacggcgccatatagcgcatggaatgactgtctacagctcagaggctgaactggtgttgcttaaacctaattattgagaagcatttgatcaaaatgccacactcctgcagttttcacaccggacggtaatttaatggaacaccctcaccaatgtgata

SEQ ID NO: 12216 - DNA, 965 bp, Arabidopsis thaliana landsberg
aaacaggggatttctccaaatatagagcaatcacacatcaaccatacagaccgccatgaattaaatatgccatctatccagtgcatatgtagcttatgagagtgttctgttgatttcttgtcacctccctctgatgatgtatcacctccaatgtcaaatatgactgcaacgcgattcccattcacctcatagacctctccacgttgtccactagataatggcctgtaggtatagaaattttggttaaagacaaaccctagggcatttacaatccttcatccataatatttagcatgccatggaagtttataacttccagagcaatgagttcaaaatgtgttcctaaaagatcaaatgttacatttgcaggcatgtcaaattgctgagaaaaccatggatagtgatgataatggtaagcacgcaaaaacaagtcatttagttaagcaaaggtaatgcgagttgcactgttcacaaataaatgaataagtcctatagataacaattgtggcagcagtttcatacacatccaatcctataccagaactactcaaattactactaatatgaataggcagagcaagcagagatcaagtcaaataatatgagacagagtcataaaagatattagagcgtaatattcttcagcaaggttagagaataattatcacacaagtgaatcagtaaactacctgtgctttgcatcagccttcttagaaggtccaacatattttacacgatctcctgcaaaaagcgtaaacacaaatagaaatgaggaaaagtgaaaaaattgaccacacaaagagaacttagcagtctgacaagtagaagaggaaagagtgaaaggctaagatagaaagacaataccaggaaaattatgactagatagaatacaaaattactaaatcaaacttatttagcaaactgatacattcaagtgtacctagcacttgaatgatgaagatgcc

SEQ ID NO: 12217 - DNA, 1394 bp, Arabidopsis thaliana landsberg
  unsure (1)..(1394): unsure at all n locations
ggtaaaggctacatagcaaaggacatatcattcgtgaattctgcaggaccggccaaagcacaggctgtggcctttcgaagcggctctgatcactctgccttttaccgttgtgagttcgatggttaccaagacaccctttatgttcattcagccaaacaattttatcgagaatgcgatatatatggtacaatcgatttcatattcggcaatgcggctgttgtgttccagaatagtagtctttatgctcgtaaacctaatcctggacataaaattgcattcaccgctcaaagccgcaatcagtcggaccagcccacgggtatatctatacttaattgtagaatcttggccgcacctgatttgatccctgtgaaagaaaacttcaaggcgtacttaggtcgaccatggagaaaatattctaggacggttatcataaaatcatttattgatgatcttatacatcccgctggatggttggagtggaaaaaagattttgcacttgaaactttatattatggagagtatatgaatgaagggcctggggcaaacatggcaaagcgagtcacatggcctggttttagacgcatcgaanaccaaacggaggctacccaattcacagtcggtccatttatcgacggtagcacatggctaaattcaactggcatcccttttagtcttggtttctaatcgttaaatttgataataatgaagcaatctgttgtaacaatcatatattgtatcgtaaacattggacttaaacttaaaatgttttttgtcaacattcttgttaagttttattgcatgcatagtattggtgtagtactgttttaaagctgccttggattcaatgcgacatgagtatgtaaatatagctatggctagtctatcgatattgtggcatagctatatttacttagccatgtggattcaaaggtcgaattaccaagtgagattttgtatattgtggcagattaattgagttcttaatttcagtctgatattttgagtgaatatgatagagaaaaatatggtagaatttaaagtattaaactagttaaatgaaaaaaattatattagaatttggtcaaagaaacttatttatttgtccacatgtgtaatttaatatttccgatgaaatttgtagcctttaccatctgttttctaggttgttcaataatggaaagacttttacagtgaagcagaaaaaggagaataagaacatgaatccaaagttcggtttttatatttttcctctttatatcgtgttgttttgttttggagggtcataatgcatgtggaatcatcacagaagcgcacatgataagtacgacattcccatcctctccattattattattcaacgccactctttatacttatacatatacaaacataca

SEQ ID NO: 12218 - DNA, 796 bp, Arabidopsis thaliana landsberg
catacattagcggtatggaacttggggtcctaccactcacttaaatttccctgtgagttggatctttctggtcccgtacctagctccacttctaactcctttattacatgcaagtgtgttttatatatgtacacttatatacatgcaacataacagtttccttacttatttcgatattttggatcttgaatgtaatcattttccgattttattgacttgattttgatggaactacatagatttggcttgtgatatcagttcctttgacgctcttttattcagttgagtaattacgaaaaggagatcgaggaactcaataacatgaatcggcaagaatttgttgccatgttgaggaggtaattactcaacagtgggtttgtaatgatatttatggaccttatatagtcatatgcatttaaccattaacaaacgctttgtaattacatatcataatcataggaatagcagcgggttttcgaggggagcttccgtgtatagaggagttacaaggtttgatttggacatatatgtgaaacttgtatatatttatatatgtacatgtacatgcatggaattagatcatgatgatcatgcatgtataactcatgtaggcatcatcaacatggaaggtggcaagccagaattggaagagttgctggaaacaaggactggtaccttggaacatttagtatgaaccacttctatacatatggaattatatcatagcctttgaattattaaatatcacattttgtacctatgatgaaggcacgcatgaagaagcagcggaggcgta

SEQ ID NO: 12219 - DNA, 811 bp, Arabidopsis thaliana landsberg
  unsure (1)..(811): unsure at all n locations
caaaattctatatatatatatatatataaaaaaatttaaaatataaatataaaaatataaatatgtttcattatagaggtttggctaaccagtaaactttcaaattaaaacttcctatcaacaaaaaaaaaaagagagaaataagagaatgaccaaaacccccaaaaccaaaccttaaagcaaatcatcaaatcttacatcattctagattatttatcgttgatagtaattgcttcacatacgcttcatgaaaaagttgatggtaaaactagtttcgaatagatatgtaaaggcaatttgggcgagatgatctttgaaagctcatcattttcaagtgatgttggctcacctctaattgtcgaagcattgtcaactcttgctaccgtcgaagttataattgaatcggatatcaagatcatttttttgtttctgactttctaatccttgtcaaagcaattaatcaaaagcttcaagtgaaaagagtttcaagaaattcttcatgatatccaatctctatatttttttcgatgtttatatttttaatttaatctctcgtaatctaaatcgtagaaaggatgttttggcgaaagagacttgctcatttgtattaaatcctaaattatcaatcggattagatgtttgaccaaacataaggagaatgaccaagatggtttcattcatgtaaacaagattgattttgtatttatgtaagttaaacagtatataattataaataatatctaanaagtatatctaaatcccataccaaagtttaaaatgatcgggattagcatatcgtctcttctttatc

SEQ ID NO: 12220 - DNA, 983 bp, Arabidopsis thaliana landsberg
  unsure (1)..(983): unsure at all n locations
ctaacaggtccattgataaacacaataggcttataaccaccaggtctcccaaatttagaattgatctcatcaagcaatcaaatttatctgtttctctacatcttgaacatccttacctgaactacgagcaggattagtaatctgcacgagaaccactttcccacgannnnnnnnnnnnnnnnnnnnnnnnnnnnccatcgcccaaaacttcaagctaatacctttgaacatatccaaatcatccacacctaacatcacaatgttccccttgaacctttctctcaatctcttcactttctctgcagttttctccgaagcctttatcgattcaatctgccccatatgaatcccaacgggcaatatcttgatgctcaccgttcttccaaaatattcaagaccaatgtagcctcttttagattcgtaatcaagaccaagcatcctactacaacaagacaagaaatgcctagcgtaatcaaacgtgtggaaaccaaccaaatcgcaattcagaaaccctttgagaatctcgtctctcacaggaagagtacggtaaatctccgacgaaggaaagggactatggaggaaaatcccaagctttatccgatgaaacctgttcctcaaaaaagtgggcaaaatcatgaggtgataatcatgaatccagacgtaatcatcatccgggtttagcacttcgaagatcttatcagcgaagatcttgttaacagtcgtgtacgctctccaattcgaacgatcaaagagagagccttgagcttgcgtcataggaagaagatagtgaaaaatgggccagagatagtgtttacagaaaccatggtaatacttgttgagcaagtcactaggtaagaaagtaggaacacactgaaacttctcaagcaagaactgagagacgtcctcttgctctgaaggtaagacgtcggcgtttaaagatccgacgtagacgactttcgtcttcggaggaaacccattttgag

SEQ ID NO: 12221 - DNA, 617 bp, Arabidopsis thaliana landsberg
  unsure (1)..(617): unsure at all n locations
cagattaaagcaggaatttttatttcaacaaaagcacagttactagtactagtacataatcaagcacgtaaaaaagactgaacttatgtgcagacacatacctgcatatagatcagctcaatcgttccaccgttacccgtaggagtaacatggaggatatcaacacgccgacaatcgcgataccacgatgcgcgatccttaaggatctcggcaacctaaatggaaattaattaggtgtcgcacagctgcagaagataaaaaaacagcaagaccaagaagaatcagcaaacctttgtgggctcgaggctcacaaggccgcaagctcgtgctgctacgccgctgcagttgtgcgaaacagcgatgattccaacggaatccggaccaggctgtaatcagcaccgcgtttggaatcaggtcagagatatcagcatagttttcgccacgatattgcattgtatacaagtactacacgatgtaagaaaacaagtacatcaccttcatcccaaccatctgcacccagttgacagcagttccggtcgccttggacatgaactccgcaatgtncctcagcaatagcgagtagactgggaaactacattagacaggcatagagtttg

SEQ ID NO: 12222 - DNA, 758 bp, Arabidopsis thaliana landsberg
atgtagccaaccaatgagcgattccaatgattagtaacactaaatcttttcgacttttctaaatttgttgaacctgttttgatttctttatccggtttgtatagtaccattttttggttatccttcaacaaatttaacaaaaaaaataaaaaaattgcatttacattatgtagtagtctaataaaatataattatagataatagaaaagtcaatagttctaatatgataacaacaaaagaaaatgtatactttaaaatctgaaaattaccattcttttatttgttatcccaaacataagccatgtactataattaggttattgtaatttattataaaaaaaaagaaagaatattcctgtacttcatgatttctttttgtaacgaagtacataaaattttcaaatcacatgtggtaaccatgattaacaaaaattaagtcggtgacaagcaacgaaacataattaatcgactttgtcaaaatatgtataaaaatcgactttgtatttagagaacaaggtcttcattatttttcttttttgacattagagaaagagaactaaaggtctacttcaagaaaacaagaaactaggtgcttagctttaataatatatcaaagaaaaatgggtcaaaaaataaattattaatgagtggggcccggccggccacggaagtaagacctaacgaccagcgcaaccggtcaccagtcaagactattagaagccgggccgtcaaaatcgttgactcggcttttgattcca

SEQ ID NO: 12223 - DNA, 1099 bp, Arabidopsis thaliana landsberg
atcctaataaccttcttcacttcttcaaccttcttcaattcttcaactttcttcaatccattcttaggcatttcgtcgataatagtaattactgctttctgaacaggagggactagtaaagcctcctcttctgtggcctgaagaggctccaaagaatcaacaatgtcacgcattaaaggccgagccttcgggttacggttcaggcaatggtaagctaacattgcagccttttgaaccgctttaaccggatactcacagttcatttttgggtctacaatgttcaagactttcttcttctccttcaacaatggaagagcccaatctatgaggttttgctcacgtgttggccgtgatttgtctaatgattttcttcccgtaagaagctctaacagaactacaccgaaactatacacatcactccccggtgtcaaatgccctgtcaccaatacatatctaatcagaaagaatccaaatacaacaaactcattgtgttgtccttttagctttaaatagctaaaagtgtcatgcttttagaagattagatttcaaagagcatagtacattctacaaatgtgtaacttgtgagttagtagactggatttcttacctgtcatgatgtattcaggagctgcatagccatacgttcccattatacgagtggaaacatgggatttatctcctacagaccgtctttagcaagtccaaaatcagataatttggcgttgtaatcctgttacaacagccatatgaaacctccaccacaggaaaagagaagagctttgatgtaatactactatactactactactaaccatatctagaagaatgttcgaagttttgaaatcgcgataaatgacgggtttctttgcttcatgaagaaaggcaagtcctttcgcagctccgaaagcaatcttcattcttattgcccatgaaagaggaagcaacactcctaccagaggttaaacatagctcagcattcttaatccattcaagagtaatgtccagcgagaagactaatgagtgtaaagaactctaaaactcacttgagaaaagattgttctcaacgctaccacgagccatgtactcatagattagcact

SEQ ID NO: 12224 - DNA, 965 bp, Arabidopsis thaliana landsberg
tttgcatcacaatctcattaacagtgtggacatttggagtcactccatctttgcatcttggtggtcttggtaagtgtgttggtaaccagttatcattccaaatattggtgttctctccatctccaataagtactcgaagccctttcttaagaagctctcgcccttctaatattgatcgccatataaaggatggtttttgacctaaacctgcatccaaaaagttagtagaatcaaagtatctccccttcacgagccgtgccagcaagctatctggattttgaaggatcttccaagcttgtttacccagcattgctacattgaagctttcaatgtctttaaatcccaagcctccttccttcttaggcagcgctagtcttttccaagctaaccaatgcattgacctttgttccgatccatttttccaccaataccgagcaagaagagtgttgatgtcatcgcagattccttttgggagtttaaaacagttcattgtatagactggacgagccattgccactgtcttaatgagtatttctttcccaacatgggagaggtagcggttcaaccatccttgtgtccgatcattgacatgtttgactatgaattcaaagatttctttcttctttctgccaatctgttctggtagacctaagtacttgccaccaccaccatcattatggatattaaggattcgtctcattctagtcctcacatcttgtttgattcgtgaaccaaaagttattgctgacttattcaaattgactgcttgacctgaaacatgttcatattctcgcaagacccgcataatagtagaacatgacttgggatgagcgtggcagaagaaaagggcatcatctgcgaagaggagatgatttattgttggtcctgaggtacttatcttcattccttttagacaattgatctccgaggcatttgtcataagatgtgacagaacttcagagcat

SEQ ID NO: 12225 - DNA, 608 bp, Arabidopsis thaliana landsberg
cgtaattgttttccggcgagcctttcacttgaaatgactttcctttttctctcgaatgcgagccactctcgtcgcttaccgtcgtcttcggtcgttttcctccttctgaggccaccttgtgcaccaccaccagagcctccatctccgccaactccaccggaaccaccggatccaccagattctcagatctgcttcacttttgctgattcttatgctcagtcgttgagctcctcttccctcccagatttggtctcgctcattctccatatctcctccgccatatctgaatctccgtcaccgacctcttcgatcactgattttttcagtgatgttttccttctcgccgacgacaccacttttcttcctcagtatttcgctcaggtttgctcttactcttcgccgtatgtttcttctaagattggaagggtttggttgttgatagagtttgtggctctggttttgtggaatctgggtttgtgtaattcatatgtagctcatctagtttcgattggcttggatacttttgtgctctcttgtagcacctctatcgctttgatacgatcacttaccacaatatgtggatgtcttaattcgcctttgtaaaacgt

SEQ ID NO: 12226 - DNA, 569 bp, Arabidopsis thaliana landsberg
  unsure (1)..(569): unsure at all n locations
acactctaatagcgaaccaaaccctaacaaaaccaggtaataataatagaagacattttttaacactgatgaagatcatgaggaggaggaagcagagtttgtgaaggaagaggtccatctttgacgataaaccccattgctaaaccccacgaagtatgttgttctagatgacagtgaataaaccaaactcctggattatccgcatttatcctaatcgccgcccatcctcccgtcggcactgcaaaagtattcctctccggcggatccaccaagttgtaccttttcggatccttctccgggtcaaaattcccaaatcctcttcccactacgaagaaattgtgtccgtgtacatgtaaaggatgattctcgatgtttaagaaactcgttccctgaaacacgatctctaatctcgatccgaattcgacttcgaatagcttcgtaccgaattctgtgttcatgttttnnnnnnnnnnnnnnnnnnnnnnnnnnnnnnnnnnnnncggtggtttctcagggaaatcgagtgagaaaactcctttgctctgtttcttatagtagctttcgaggat

SEQ ID NO: 12227 - DNA, 457 bp, Arabidopsis thaliana landsberg
atcgcatcttttgcttgttcgagctgtcccgcgcgtaatcttgtgcgcatcgcacatcaccctcgagcgttgcgcgttccgtcacgcatcagtaaaccacttcaccaagaatcgctcgtgccaattaactacgtatttaaatgacgattattcgggtagcagcacaatgagagctaagtaatgattttattggtgcatacgataattacttgttagtacgactaggtcgagttaaaaatattatggttaagattcgcttagcatacccgtgttatcccttgaccatagttttgaccgtttctgttcctttctcgcgtagtcgtagatgcaagctctatgtcacattgcatatttgtttgatctatactattgtatggtgtattatttctttctgtttcaagaatgttgaatgtatgtttgcgctcgcatagattacggtctgtttgtggagccgagg

SEQ ID NO: 12228 - DNA, 959 bp, Arabidopsis thaliana landsberg
attaatacttaacaatttttgaagtatagcatatattgtcagatttataccaagtaaatgaaagaggcataatatatgtatatgtatatttgctttaatattttaaaaacattaaataaatcgtattgaatgttttgttgggggaaaacgtttttatggcattagacattaaacattaaaacaaattgcaataaaataggtcaataataaaatgatttcttctagggtcataaatttccccagccatgcttaaaagtaatagacgcatcgttttcgaaagctaagttttgaattttataacataactaattcaatgtaatacaagatatatacgaacttttacctgagagaacaaacatgcagatgaacagataagaacacagtagttttgccatgacttgggaatcaataagaagattacgttaatctaacaattgtttgtttcgaaaaattctttatattgaaagatgagatgggaaaagaaagtatttatagattataagtgatgtgagaaacatagaagaaatatactcttttggcaacatatttaaactaatgtgaaaagagtcaaaattattattttggcaaaaacatttctccataataattagtttgaacgttgaccaacaaaatggaaaaaaaaaagagatttctgaaaagtaacaccatatatatataatattaaatatttggtaatggtcaacatataatttctatgcattcattttctatggaaaattgtatagtaatataattactcatccaattatggaaagaacaaaagggaccaaaaatatttacaaattaaaaccattacaaaaaaattattaaaaaaatcattaaacatatagattcgatgtataataagtgtacaataaaattagaaagaatttaaatataatttcagtttactatttaaaatttaattgtacaacttaatgttgataaaaattaaaaac

SEQ ID NO: 12229 - DNA, 750 bp, Arabidopsis thaliana landsberg
tcactagagcaatagtttttgtgtaactttagttcctaaaaggagcgagtctaataagtgcataaacaaggtatatactaacagaatttgggaaaaatagtgtaattaaaaaaaaaggtgcacaagaacacaaacatagatagatcactcaaaacaaaacaaaacaaaacaaaacccaaaaaaaaatccaatcaagatttgtatttcaaaagcaaaatcccaataatacttaactggatataaatttcaaaacagcttgaaaatcaaacggctggagggttaggcgcacgaggtactggagatccaggcactccaatggaatcatcatcattatcatggtagatataagcaaaaccaccatgacctgctaaatccattcctcgcatttcatgctgctccgagatcctaagcaaattgagcttttcgaggatgaagaagagtgttcccattgtggcactaacccatccaacaatcacaattatttgaaccagttgtgctcccaatagcttccctcctccgcccataaatagcccgtagtgccttcctgggctcgcgccgtaaacttcatttatatacttctcttttgcaaacagtcctacaaatatcaaaccccaagcaccacaccctccgtgtagttgtgcggcctcaagtggatcgtcatattttaagagctctgcgagcttgttgcatccgataaggacgagggaagccacgaagccacatacgatcgctgcccatggatcaaccaca

SEQ ID NO: 12230 - DNA, 1835 bp, Arabidopsis thaliana landsberg
tattatcggttgcatgagttcgagttaactactatagcttcaatttcccatacaaatggaattagggtttctaatagagtttaatgaaataagctttaacaatcagagtttaatgatagtcttgaaagagaagacatgataaattatttttctggtggggagggttgaagaattaaaaagtgtgaaagaatgaaaagctggtccacataagcacaacaaaacctgcacttttatttatctccacatgcctcatgtctcatttttcagattctttgtttcccacagctgtgtagcacttttatgatcatcttcatttcttaccaaatattgaaatcaatcaatgggaatagattagccatatactaaacttttattaagagttttgaatgttacgcgtgacatcttagacttttaaattcgtctctctgaataagagtaatttcttcctataactattttaagttaaaagaaagcaagggttgatttcacatctgtcttggcaaaatcagatccaagctatctaccacttgatcaattgggccggatgagacattgggccaagcccagtacaagacagaaacaaaagacttggtaaataagccatgcttctcaatatccaagtcaaatgaaaccccatacatgatacatgtttacaacagtcacagaaatataatccgtggaatacagttaaaatacaagaaggatttttcttacgtgctccataatttacagacacaaaataactcagattaccagcaagtgaaacttggaaaggaagtgatgggcatggaaaagcttcttcgtcacaggatcatattagctgcccgattactgaaatgattgattgcaacaaatcacacttcaacgataactaccagatatagaagcttcagtgataaagtatcgtcatgttacttactaggattgatactattgctagataaacaagatacatcaagaaaagataaatactttatgattcttgttttaagatttgggagatttctacttctagaaagcattccaaacaaaaaccaatccagagaacttaatgtcaaacaaatgttatactcctatcctttctaatcatgtaactgttcaaatttccaagtcaagcatgaaatcttctataaagaatcaagtttgtctatgtaacataacaattctagttactatcaacctaaaaagagaggtattgttaaactattaccaggcaggtgctatttggtcttacgagactcgattagtctccacatgtaccatgaaccaacagacctataaggacgccatttctcacaaagctgctccatttgcaatggacctggaagatttttcaaaccataaagatctttcacacctttcctcacaccaagatctcccacaggcaacacatcaggtctatgcaacgagaagatcataaacatatgaacagtccacactccaattcctttaaccaaagttaacatatcaatcaactcttcatcactcattttcagaatcaattcatcagaaagcacaccgttgttgtatttatcagctagatcgtggaggtaactagcttttctcccggagacaccgatcttacgaagatcaacggcggagagtgagatcacagattcaggaacaacacctgcttctccaccgttgaatagagagatgaatcgatcgtagatacatttcgctgctttcgtcgcgagttgttggtataggattgatctcgctaaggagagaaacggagtattacttgagtcgaacactggaggatcgttgtgcgttgtgattaatgctccgagaagttcatcggagctttgtagtgacgtagagcgatatcaaca

SEQ ID NO: 12231 - DNA, 263 bp, Arabidopsis thaliana landsberg
tcatgagactcatcatcattatcatggtagatataagcaaagcctaccgtgacgtgtcatatccatcccttgcatttcatgctgctccgagatcctaagcagattgagccttttgaggatgaagaagagtgttcccattgtggcactaacccatcctacaatcacaagtatttgaaccaattgtgctcccaacagcttccctcctccgcccataaatagtccatatgggcttcccggggtgggcgcataaacctcggtttaga

SEQ ID NO: 12232 - DNA, 755 bp, Arabidopsis thaliana landsberg
cgacctttgaggactcctccatccttgttgagttcgaaacccttttcttcaaaatactctttgacgcatttgatttcgctgaaacggtgtttaagacgatgaaccgcgaaagcaagatggttcattgtgtagccgtagacaagcgtccatgcggcaaattcgctttctcttcatcatttataaaaatttacaaaactcaaaaattaaattagctaaccatcaaagatactgtgtgattattgattataaacttagaacatatacttggcaagttgattgaaatcggtggatgttggcttctcccaaattaaagaccccaaagtacttgaaagaacagcttgcttaccaccttccggtttcaaatacttccttattatctcctagttaaccagaaattaggaccaacaaaaaagttattatgtattattaaagactcattataacaacattatgtttgtgatcactaatacctgtgactcagggcttagttcctccacaagaagctcagctataacaagtcttggcaaagggccattgccaataccgtaaccattatcggggaagtgaacatccggaggagaaagccagagaacttgtactttcttctttggaaaatcaagtctgcctccaactttatatccataatccatgaaaaaactcgccagggaatcaattccataaccatcgacctaaacccatacccccaaagcaaaaaaagaaaaatcaatttacacaatcaggccggccccaagtat

SEQ ID NO: 12233 - DNA, 1036 bp, Arabidopsis thaliana landsberg
ggatattttgtgaatcgtagtacttaataaatcaaagatatattgagattgctgctttggaaccatatgcgtgatgttgcttactctgtgttggtcgttgggtgtgttgatatatggtaggatgctctggaaccgcatatgagccgggaaaccttggattatcactggggcaaacatcacaaaacttatgtagagaacctgaacaagcaaatcttaggcacggatctagatgcattatccttggaagaagttgtgcttctttcatacaacaaaggcaatatgcttcctgctttcaacaacgctgcacaggtaaatgccatattgctttccaccagtttttcttaagaaaaataaagttttcatgtaaaaggtagactgaaaaccccataagtacactgtattcgtgtaagtggcaatgtcagtgttaaagaccttcaggttatgtagaaatattgccatagataggtagagacattaaaacgtaacaagaaatcacttagttacttgcattgacatgatacatgtagtttcttgtgaactgtggattggacaagaaataacatccagggtaagtgggcaaaccacctgacgattcatatctttaatcagattaggaccatggtcatagtggcaagttttcgtaatgtgagatgggttgattgaatgtaaattaaagatgtatgaggggcttgcaggcttgaaaccacgagttcttctgggagtctatccaacctggaggtggaggaaagccaactggagagctcctcagattaatagaaagagattttgggtctttcgaagagtttttggaaaggttcaagtcggctgcagcttcgaattttggttcgggttggacatggcttgcatgtgagtgattttatctttgttcccttttcaaatatgcaaaaccccaaattacttacatacttaagcttctggatcattgatgcagataaggcgactagacttgacgttgcaaatgccgttaatcctctcccaaaggaggaagacaagaaacttgttatagtaagacgcc

SEQ ID NO: 12234 - DNA, 1230 bp, Arabidopsis thaliana landsberg
taatgtatcacaaagattttttgaactcaattttttgctctatcatctttttttttttttttttcgtttccccctctctctcgtatgataaccaagttaatgagtattttaagtctaaaaaagagcagatattatacaaaggaaaatttaatttatactttatacaaagataaaagaaagaaaaaaaatcatctttaactaaattttctaataacaaatcattcagctgtcctaaactaaatactatcatcttttgaaggttatggccatttttccatacgtttgacaagcttccttaaccattcagatttgtttataaactttatttactttctaataggatccgttcgaaactttgaggtaatctttgttaattaattgatacaaaataaattttacaacattgttatcctatataaatcgtcacacagccacaaatttattaggcttatcataaatgacatcttctaaactgggctgcttcgttttgtgggctatacaaatattggatcacattcatactaaaacactctcacttgctaaccaatcacaggcttcaccggtcaacacgtgtccgacaatgatcgatccaacgatcattatttcatcaaaagatcctcaaagtatatatttacgtacatgccactccaacttcaacgtcctgattctgaatctttaagtgaacgtcccgagtccgattgtttaagcgaaggaacgataatacaagatcgtcccgtacctaagaaaaggtcagagaggtaattatccaaatcttcaggggcaaatttgacttcctcccaattttcaacgtggtacttttcataaaacgacgtcgtaacaattgttaacttctccgtcacggaatcttttaaatcgtctctaagtttcgaatccggtacgacccactcactctgtttctgaaacgcttcctcaaacccttcgttgaaccgcatcaaccgctctttcgccacgtgttcttcgagcatttcttcgttggaatcgaaaagtgacgttatcacttctccccaagcaattttctcgtatttttcgaggtactgagtaactttcccttcatgattcgttacccattcgtcgccaagcacgactctcagattcgatgtacgtaccttggagatcacgtaatgcagattgttggctaggaagaggtatgaaagagccatgtcgttgtacattcgagatttcgtgtcgattttacagagcaagacgagg

SEQ ID NO: 12235 - DNA, 616 bp, Arabidopsis thaliana landsberg
  unsure (1)..(616): unsure at all n locations
gaattcaagaagcaagtgagaaaataagccaaggaaacaagaatttagtcattacaaaacaagcaagcaaggaaccagagaatgggacacacaagcacgcatgaaacaaaggaagaaatcaaagaattaaaagcaaatcaagtaaccaaggaatcaagaagcaagtaagaaccaaacaactaagcaagaaatcgaaacaagcacgcaaggaaacgagaatgaaacacacaagcatgcatgaaacaaaggaagaaagcaaagaagtaacaccaaatcaagtaatcaaggaagaaatgaagaaaacaaacaagcacacaagaaacctaggaagaatcaacaagcatgcatggaaccaaggaaggaaacaaacaagcaatgaagcaaaaagagaaaacaaggagacatgatcgtaggaatcaaattattatgcaaaaacgcaagcaaaacaaagcaaacaaaaaatagagcaagcatgaaaataattgtgaatattcaacaacatcttgcggattggaaacatcaaaagccttctgaactttcaaacagttgtatactattacagaattaaaaagagacacttagacaagaaaaagcannacacagtgatatatttcaa

SEQ ID NO: 12236 - DNA, 889 bp, Arabidopsis thaliana landsberg
cgatcagaaactttatagatcgatgattggaagtctcttatatcttacagcaagtcgtccagatctctgtcacagtgtgtgtctgtgtgctcgctatcaagccaatcctaaagtgtctcatctgaatgctgctaaacgtatcatcaaatacgtgaaaggtacaattgaatatggtttgtcttatactaaccatactaatgagaatcttgcaggttattgtgatacagattggtcaggatgtattgatgacagacgcaacacatcaaggggatgtttctttctggggaataatctgattgcatggcacaacaagaagcagaactgtgtttccctatcatccactcaagctgagtacattgcaataagcagctgttgcactcagttactgtggatgaaacagatgcttgcagattatggtatgaattctgaaattctgttaatacattgtgataatactagggctattgatatcacaaaaaatcctgtgcatcacactcgcacgaagcacatagaaatcagatatcatttcatcagagaacttgtagaagggaaacttgttgaaatgcgtttaacagatgtctgatcgtagttgtgctagacagaaaacatgtgtttttgcataggttaaagaaacaaaactatgttcttgccttgtattgctttggtttttacatgactgtgcactcaagcagggggagaatatgggagaaccttgatgtcgtggatccagttaagggggagcaaatgtgtagtgtagctttggtcttaattctatatgcactactgaaactgcatcggtctcctttgatatctgtcgtatgttgtgtgcttctgaaccttgatcgttttcttggttttatgctaatgaatgtatatcagattcttgtgg

SEQ ID NO: 12237 - DNA, 514 bp, Arabidopsis thaliana landsberg
catttgccccttccttccttgtgttttaaatgcttcaccttatctgatgcattaggtgataggagttgtgtgataaacaattgatgcattaccattcctgggaaactccttaatcctgattttataaaaagaactgataatgcttagccctgcttagaaactgaaaaatcatttgttttcaaaaagaatgattgtggaacattggttatgggcctttcatttcaaaaatcaaagcaaacttatggtgatgattccacttcggccggagtgggttcgtcattcagaaaagagtaccctatcgggtaccaaaaatgggaaaatggtttgaatacatctagaccagacactgagcggacatggtcacccgtctgtgtcgattaaggatcgttcgatgtaggcctgttgtggtggagactttgcaactatccacatgctccggtaagcctgaacccggctattccatacgtgaaaagacaaccgcgtactgggcgtgggagatggtgggagtagcgtg

SEQ ID NO: 12238 - DNA, 1207 bp, Arabidopsis thaliana landsberg
gtgtaggagagactgttgaggtatgagtgacttagatccttaaatacctaagtacagaggttcttcagttggccgaaaacactagcaaagatttaaaagtgaagaggataactccaaggcatttgcagttggcgatcagaggagatgaagagcttgacacactcatcaaaggaacaattattggaggaagtgtgatccctcacatccactagtctcatcaacaaaacaaccaaggagtgatttgtttcttaagtcaactaatatgatgtgatatgctagttaagtagcttatggtgtttcagttactctagttttggatcggagaagtagtttaactgttaagtcttgagacgtcataattttacgtctcatctcgtaaacgatatgagaagttctttgctcctagagttttggtgctaaacaattcacagtgatatgcaatccatgtggctccttaaaacactcaaccatgcatgcacaagcagtggaccatcttcatattcatgactgactaaaatattgtcatcaatgcttactaatatgtcaaattgtagtaactcggtggtttagttgaagtttcattgttatatatatggcgtataggcctaaagttgtatgaaattttgattgatgagttaagacatcgtattatataaagtaggattttcaagttactaactcaactgattaagacacaagtcaagtactttgaggagatatcgacatgtatcaaatttaattttgttaatatatttaaaataaaaaatagaaaattttctaatcctttcaaaaaatatatacataaatcacattattaataaaatgggtttaaaaaaaaattaggaacctattcaaaaatgtttttttttgggtgtatattttaattcgatatatttcagcttgacatattacacaactgtattttacgaaacgagacatgtttcaaaatttcaattaatcaattagattttaatgcgtgttttaatatttttcagttgtgaaacttaaataggcttatccttttattttcttaagaaaaacaaaaaataatattgaatacatatccatgtaaattacaatatttaattataaaatatatatgtaattgtgaaaatagtatcaaaatgaatgggggattaaaaatgtagtcgtcattttttagtaagacatttaagataagctaatgatttcaatgttttgcttacat

SEQ ID NO: 12239 - DNA, 1019 bp, Arabidopsis thaliana landsberg
ctgtaacaacacttgtggcatattgcagccgctcctccattcatagaagggttctactagtaggaacttatttgggtttgtcttactgagactcaaaagctctgtgatatgacctaatacaagaagccaatcattcgatttgtgtaatgcttgaataatctcataagtagaaagcagcaaaagtcactctgttaagttgatgatgaatcatacattcttgtgcccattcccagcttcgtaatttagcataaaagagagaatttacctgagcaaaagaacgtctactatgaaataagacagtaccttgtgaatcacgtaccgcccaagatgcgcccaagaattgatgttgtttagaccattcaaacccaatattacatttcaaatcaccaggcaaaggtggactccagtgcataatcctcataattttctcatcttcatgtctataaggctgcgctaagaaccattgattatgattgtcaaaagccttgtctgcaatagtagttgtcatagaggaaatacctccaaacaacaacttattcatgtttttccatgacgaccacataatccatggattaacaaatctcacattgtgaagaacaccatgatgctgagttaagtcaaacaatttacttatatttgcatacagagagctggaaatcccggatatgataaatgagaaattgcccatacttgtcgagctaacggacattggagtaaaatgtggttgatggtttcattttcttcatcacacattaagcatccgtcagcaataatgattcctctcgttctaagcctagcttcaactgagagagccccatgtaatgccttccagaggaaaattttgatttttggagctgtttacaaagtccatactttgtcaaaaagagagttcaaagaaggagcaatttcagcttcttggtacatcagatgatggacttgtttattgatcaactcgtatcctgatttaaccgaatataaaccagaattagaatgtaacccacagaaagaatctttcttta

SEQ ID NO: 12240 - DNA, 932 bp, Arabidopsis thaliana landsberg
gttcgcggctccttcagaaagtgcagcagcggcaaaattcgaggcctgttgagtgttggcagtctgacctgtagcggcagtctttgcaatgtcagtatttaactgagcagcaatgtcgccaccatacttttgatttcctgccattaactcttggacgtgctgttgatccgttgcatttcctgtagcggccatttgcgtaatttgatcagcaagttgcttttgtcgaagttctgcttgctttccggcagaggcatcggattgtgcgagagcacgatacatagcctcaatacgcttagttccttggttagcatcttgacgagcaccttgattcatgtgacgaatcgtcttgatttgtgctgtcataggtgcgccaacgtctccgacaccaccaagaagttgcttaatatcggaggcagaataacccgctacagaaggagtatttgcagcagattgaatagcatcaaagagttgagccctcatttgctggatagcgctagggccgcgattcttattcttggaagacgaagaactgtcgtcagaagaaggagacggatgatatccgtttccggctccgtagttagtgttattgccttccgggagaggacgagttccatcagtattacgaggaccgcccgaagccttaatgtgaatctgaggatcgacataaggcataacgggttgacctgacagcatagcctgcatctgagcaagagactgagcagcagcatccatctgttcttgcttagacatgccggaagactttttgcgacgcttaccaccgccgccgtcgtgtacgtaaaccattacttcttccccttagcaggagccttcttcttgttatcgtttttcttcttattatcgtccttcttattggaagccttcttaattgtactagatttcacaggagccttcttagaaggagaagaagaacc

SEQ ID NO: 12241 - DNA, 1095 bp, Arabidopsis thaliana landsberg
agcaaccgaacctcacatttgaggtagataataatcgagcggaagggaacaagatcccgtcaattttaatccgaagagggtagaaaacaatcgggaacacgagcatcaaatgaagcgcgtagctaactcgaaccgcatcattaaggatagaaccaaaagggattccaagatcagtgtcaaagtttgcaaggacatcatcaagagtatcatcaccaaacaagaggaacccgaaaatacttgtcattatgtaaacagatgagcagagcataagtgctgatcgaacaacaggtcttatctgagaggggtcttcgagctcgttctgtatgcggtgaactgtaacaaatcaaacaaaaccaagaaccatgagattattttccattctttaaagctatgcttccaaattaagaactaagcacatacataccattgtaatggcaaatgaatgctgtgacaagaacaggtacaactgtgaagagattccagaaagatgttaagtcagtaacatctggtagcaatcttggcatcgccacaccgccactgatcaacttcataatcgaaattcccgctgtaattatgagaaatacaaccgccagagccacggataaggcagatgtaaatttcaaagaatctgcaaagaaaagcataatcataaatcagcaccaaccattaaaaatacacaatctaggaatatctacgacaatgaccgaatcagacactaaccgattcgcttgaagcaagccaatggagcaaacacaccaagagtagtaataagaagaatagcagctcttccattccaccaatggtgaccaaaccatccttcaagaacaccgaaatgatggataccatcttccgtctttccagccaacacatcaccttcaaacacaaacacaagattcaacaacacagtggcaatataacatcgaaaaactcgaaaaagacgagaataacattacaataatacctataatgatcatgtaaacaatcaaaacaccgatgttgttaactaaaaccgcgacttgaagcaaaatccttccaggattaccaaaagaaccacccattaaaccaccgtaagatcgattcttcccagctttacta

SEQ ID NO: 12242 - DNA, 1238 bp, Arabidopsis thaliana landsberg
aggcgagcacgaggagcggtacatgtcttgctaatggcgccggcaataccaccttcgaggagattctggaaggttcctagctttggctgcggcttaatctgcgtcatgacgacgctactatgaacagtggttgcagtgttaagagcactctgagctccatcgaccgcaacaccgactctagcgtcaacattcatatctctctatcactgtttctatgagtaacccgtttctgggtttgcgagtttggaatcgaaggtcacatcaattgaaggaaactgaattacgatggagatcggagacatcgacatgggagagagagggaaaaggaaaactctttgagaaaccctaaatcttgcttggagaaggagaagggtattttggtaaaacagctcagatactgagatacccggaatatgcgtaacagtttctcaagttgtctttttttttccaagacttttcttctttcaattttttttgttaatgacaatttgttccgacaaatttctaaatggaaatatattttgggttactagtaagcgtaatgcgaatacaaatattgaacaaagtatgttggcactttttcataagaaatttaaatcttcaactttaaatttatcttttaaccaaagaaaaaaatctaacaccaacattgattactaatgatttttaatgttagacttaacgacatatacttagcattgcatgtcttgtttatttagacgtcgacggatatggacgaatcaggagagcccttggcttggctgcacacttttgtaaggacatctctttgccacaatcacaaagacacatatattggcagcgattacaccagcaagaaaccagtagaaccggtccaagcggctgctgtttaggtcctttccgaaacaactcttccccgagaaattctccgcgagagtatcaacggctgtgatcaggagattgttaaggaagctagccgcacctatcacgcttaggtaaaacgctatacctaagcttctcatggagtcagggacttggtggtaaaagtactcttggagtccaagtagtgtgaaagcgtccgcaaagccaatgaccatgaactgaggagctagccatatcacgctcatgggtttgttattgttggtacggtccaatcgttgtttctcaactagagctgcaatgatcatggtgatgagggagaaaatcataccggtcccgattctttggagaatgttgatgcctctttgcttccgtgtgat

SEQ ID NO: 12243 - DNA, 892 bp, Arabidopsis thaliana landsberg
gatgtgacatgcaacttcttctccttccggtcaactacttccctctttggtttttgattagctgtcaaaaagtttttattaggaaagatgttgttgttagcgtcttccacttatgggaagcaagaaaccccaagaaaggtgacttacttatgggcctcaaggttttgcttatcaaccaatcgagattagccatatcatttgttgccatttttaaagttattttagtcttccatattaagtttttttttgtataaaggaaaaaattaatatatatagaaataaaaaaattgttcggttagacctagatctcacattataaataatatgcctagggacctccattccgatcgttctttagttgtcacttcattcatgttttttcctgcatatatttttgatttttaatatgattttttacctctcaggttacgatgatgtggacatacaatcatcaaagtgtgtttgtttcatcgtacaaaaagtcagtctctaatctaaactatgttttgtattttgtcatgaatttacatcccttttttttactgctagaaagtagaaaccctaacgtatacttactttctaaaacacacaaatctgttatgaagctcaggaaaaaaaactgaagtccgctcgctccaaagtcattatcgtctctggtggctctctaaatggagaacgatgtctagattgtaaaggtatgtctatcgtgatgaaattgtaaaatagagtgtttcttattgaaacaatcccaccctttttaaaaaaaaaatataattaaatattctcataaatacttaattaaaccaactaatagagcaacatttaaatcgcaagtcaaaaatactattttatgaataaataaataatttaaccaacaaaaccaagaacgact

SEQ ID NO: 12244 - DNA, 367 bp, Arabidopsis thaliana landsberg
gaaagaggaatagagcccagaagcgatggagacggaataaaatcgagcccacaaactatggagagagaggctctaaaaatcatggaaggggagagagagagaaggggggagagagagagagagagagagagagagagagagagagagagagagagagagagagagagagagagagagagagagagagagagagattttttgttattgtgtctcttttttttatcttgtttctcttcttcttattctctttttttttttttttgtgtcttttctttcgtttgtctctctctatttttctttctctctgtctctatctctgtctctctctctctcactctctcttttacgtatttgttttttttttttc

SEQ ID NO: 12245 - DNA, 562 bp, Arabidopsis thaliana landsberg
  unsure (1)..(562): unsure at all n locations
tgcgtggtgcaaaagnnnnnnnnnnnnnnnnngagcaggcagcggcttttgagtcgctcaaacaacacctatctgacttagcaactctgacaagtcctaacccttcacttccactgcttctctacattacggcttcacactgtgtggtcagcgcagnattagtctaagagtaggatagagacggcaaaaaccagcaatgctcggtgtactatgtcttcgaagtcctcagaacctccaagtgcaacatgaccgagctcgagaaaatttcatacgcagtggtcatggcttcgcgcaacgtacgacactacttcgaggcattcaaaatacgagacactttggacaggggtctgggagaattgttcaggaacccgaaggtgtccgctagaattgcaaaatggatagccgaactgtccgggtaccacatcaattttgagcccagnnnnnnnnnnnnnnnnnnnnncttggcagacttcatcgtcgactggacaggacccatggggccatagcaagaacactcagaaaaagtttggactatcactgcgatggccatggtcatgcgggg

SEQ ID NO: 12246 - DNA, 642 bp, Arabidopsis thaliana landsberg
actccaaaacttgcttaattttcctttttgctcaatacctagtcacaggtccatccaaaacaccattttactacacaaaaacttccatagcttctacaacttccaaaattgctctaaagtagccaatcatataactcaaaaacaatcatatatgctcacttattgataaaagaaaaaacaccattttagcatacttaaaagcttacataccacgaaaaatatcatatttactcacataatcatctaaaacaccattttagtcatagcttcaacaactacaaagttgctctaaatacaatatttaactcagagagcatcatcatatttgctcacatattcatacaaaacaccattttagttacacttaaagcttcaatagcttctactaataccaaaattactcggaattagcctatcattcagctcagaaacaatcatatgccctcacatgttcatccaaaaacaccattttacttacacttaaagcttccatagcgatagaatcataaattttagattacgaattaaaacgagaaattgcgcaatcgaattgattttaccttccatagaccaacttcaaggccatatttcttggtaacttcttcggcggaaggaggaggaggagaaggagacaagcgcgaa

SEQ ID NO: 12247 - DNA, 1808 bp, Arabidopsis thaliana landsberg
aacaagtccttctcgctacttatctccttctccgtctcactctgtctcttccaccaccactaccactaccactactaccaccaccacctcttcttcctcctcttcttcttcctctgcaatactcagaactagtaaacgatacccatctccttcgcctttactctctcgctccacgacgaattccgcttccaattcgatcaaaacgccgtctttgttacctaaacggtctcaatcagtggaccgtcgtcgaccctcggcggtttcggtcactgtaggcactgaaatgtcggcggctacgaagatgcttatcacttccactaggagtttgtctgtttcgtttcaaggtgaagccttttctcttccgattagtaaaaagaaagagactacttctacgccggtttctcaccggaaatctactccggagcgacggagatcgacgccggttcgagatcagagagagaactctaagcctgtggaccaacaacgctggcctggagcctcacggagggggaattctgaatctgttgtgccgaattcgctttctagaagcttagattgtggtagtgatagaggaaagcttggatctgggtttgttgggaggtcaatgttgcataattctatgattgatgagagtcctagggtttctgttaatgggagattgagtttagatttgggaggtagggatgaatatttggatattggagatgatatccagagaagaccaaataatggtctgacgtctagtgtttcctgtgactttactgcttctgatactgatagtgtttcttctggtagcactaatggtgttcaagaatgtggctctggtgttaatggtgaaatctctaaatcaaagagcttgcctcgtaatattatggcttctgctaggttctggcaagagactaatagccggttaaggcggttgcaggatccaggttcgcctttatcctctagcccgggtttgaaaaccagtagtatatcttcaaagtttggtctttcgaaacggttttctagcgatgctgttcctttatcatctcctcgtggtatggcttctcctgtaagaggttctgctatacgctctgcttcaccaagtaagctttgggcgacaactacgtcatctccagctagagctctttcgagcccttctcgagctagaaatggagtttctgatcaaatgaacgcttataaccgcaacaacacgccttcaattcttagtttctctgctgatattaggagagggaaaattggggaggatcgtgttatggatgcacatttgttgaggcttctatataaccgtgacctgcagtggcggtttgtcaatgcgagggcagactctactgttatggtgcaaaggttgaacgcagaggtatggcttaattatgagtttttcatttccttttgtggtcaatcacagctatggtttatacttttagccactgctgcagattagatagggtatgatttgttcatctatatttaggatcttgatgtaataagtgagcacttgtggaaacttatcatttaggctcctaggtgccatcatcccacagataaatcaggtcaatttggagattaagcatgagtttgttaatcttactggaactaatatagtggaagagtagtttttgtttaaggatgactaaatctatactattagcggcgtgcacataactgtaatttgactctcttgttttttctctttgccagaaaaacctgtggaatgcatgggtatcaatctcggaactgcggcacagtgtcactttaaaacgaatcaagttgcttttgctaaggcagaaattgaaactggcttc

SEQ ID NO: 12248 - DNA, 216 bp, Arabidopsis thaliana landsberg
tatcgacaagtgagcatatatgattgtttttgcagttatatgattggctagtttacagcaattttggaagttgtagaagctatggaataaattgtgtagtacaatggtgttttggatgaagttgtgattatacattgagccctaaagacgatgaaggaagccatggagcgaacaagacgaccaaatcaaacaccgatgcggctaccgcgctacttg

SEQ ID NO: 12249 - DNA, 1024 bp, Arabidopsis thaliana landsberg
ctcgtaatcatctggtacaccccaaggatcccactctgcatatgcaaaaagaacaaattacaactccatggtgaagaacatgttgtaaatgacaaaatcagaataaataagccatcattctaaaaccattggaagtatattgcaaccaaagaatgtgataagtctcaaacaatagctacttgtaacctcgctcacatgattatgaagattcaaaagagagtacaagcaataacactaatgtacaaataactacaaagcaagaagatgaccacacacctacattgaaagcaaaagccgttccaaactaaagtgaactatgcaaccattcactcatagccaaagttagcaaattatataaaaacctaaacttttgcattcccttacttgtatatcagttttcaacacacacttaaactcaatagcccaataaaagggtcacctttgcaatgctcagtgttcagattttgcaacctaacaatccacaaagcctcaggattcagattctcaattacaaaacccatttctcaatttgagtgattatcgcaacaaatcaatctatattccaattgttctcaaatcagaaatcaatctatataggcaacgagagtacgaaccaatcattttcccaatgagtgtgagctcatcgcgagcctcttcgataagctcttcgacttgaccacaaccaagccgcttctcaatcatctcccaatcttcttcttccttgcacacattgagacgttggcgcgtgaatgattccaccgctttacggtacccttcatcctccggcacagcttggatctcctttagggttttgctgtagagatcgatcagcaccgctctcgcgttgggaacaacgtcaagcccgacgatccccgtcgtctgcttcactttagccaataatggccgtccgattgcccgtagaaacatctcaaccgttggatcgttctctccctctccttgactccggcgcaatctcagaaatgttgtttgtagttgtttacagtgtcaactttcacttttcaga

SEQ ID NO: 12250 - DNA, 706 bp, Arabidopsis thaliana landsberg
gtgctgagtatatgcggtagagaaagtttacttactcttccgtcatatgataatgatgcatttacccaaggctcacgggaactccaagcaaggcctgtgttgttaattaaacagtattaagtatttgttcggttcacaagatagaatggtaatcataaggtgtaagggattttaccatagacactgtcttcatagtcagtgtatgagttgagcaacgggttcacacgctgtcgtgtggattccacaggactgaaaaagatggtaacaatgaaatcacaagtgttggcaaaaaatgaaaatcatcggtgcaaggatgtttaggagatttgaaataacctttctgaggttttgtcatcactggatgttgctgaagcataccacaggttgacaaccgaatctgttccagcgctctgtattttacttgaatgattcagaattgacacaaattataagcgtgcaaattaaaagcagaggctttagtttttctaagctaaaccataggatgtaccgaaaataaaactgcacatttcagctaaaacaactgcgactgacatacatagctaccaagtggaacgttttgattgtgttcagaagaacaaaggagaaagagagtagagtaccaaaatcagtccatcatactcagggttacacctgacagcccaagtcctgtaaaatttgacaaaaaaacatacaaaggcacaaattc

SEQ ID NO: 12251 - DNA, 865 bp, Arabidopsis thaliana landsberg
gatcttcttagaaacctgaaaatgtgtttttaccattaactacatatataatttctttttttagattaacaaatttattttgtattatacgatatactctaatcagagccggccggtccaacgttatcaaaggtcctaatcataattattgtttgttgtcacttttgaatgtcataatcttataaacgaaaagaacatggatgaccaaaaaaaaaaaacgataagaacatgaaatggtaacgacaaagaaaaatgttaatcatcaaaaccagactacaaaagcaaatttttgaatccaaatctcaccatttcacccaaaaaaattaaaacaccaattctaactttcaatgatctataaaattttgggccataatccttggtttatgtgacttatgcactataccggcctcgactccaatttcatatttagatagttaatctgattgtcatcttttgtgtgacggatggattcttctgtgtaacgtttgcatgcatgaaaaccggcggaaattaaaaacaagaatattcgccgcgcgctgtggcagagtcatcgtagcatttatctcactgatcctcgccggctcaggcacatccattgagcacgtgtcatgttaacatgtaatcatgtaattgactttgtattttgttgttggattaggaaacggattaaatttgtcggccaaattaacttggttataatatcatatgatatcaagtccagtctatagtattaaggatcttgtattatcacacatataattaattagctcttatattcccgaacttttttcttttaaaataaaacttgtagagaagcaaatctctagaaacacttgtgtggtctagttatcggttgagtgtaatt

SEQ ID NO: 12252 - DNA, 1385 bp, Arabidopsis thaliana landsberg
gattgctgtaaccgtttatcaattttgagtttatgtatatcgtttaaatatgtgaattctattatctttgttattcattgtaaaaaaatattttctcttctaatattaaatgtttaagtctaaaactacaaattttataacatatatccaaagcattaatttatttagatcaaatttttttaactcatatttaaataaaaaaaattgaacaactaaaacaaaactttctatctagaaagaaatattattttacaatatagattaatatcactataaattaataaaataatatgatcccaacgttattaatttatagagattttactatactatttgttatttgtgaaaatgttaaatatatgtagaccctataattttgctaagactaaaaaaatagataaagttaataaaattgacaattggctttattatattgtaaccactttaaataggaaacttcattccaatacaaattccaaatgaaaaaaataaaaatttaattccatcagtccgagacgatgaaataatgtctataatatcaaaggcaacacactccatatttgaattaagtaaaagaaacaaaaacacacacacaaaaaaaaaaacttgggagtaaaacgcaaacatatccaagtctggttctggtttgagttttcgttttgtggataaaactcaaaatctgatgaaccctttatctctcaagctctctacagtctctttaatgctaacttccaatggcacaaactcaaccccaagagactctgctttctgtttagacactttatatgttggaatatatatcttttcatctgcacacctacaacaaattttaatttgattattttcaaagattcttttagttatcaatttctagaaagacaaaaaagagacactaaaaagaaacactaacttgtcagggagttgaaaatcagggtaaagatcatgcaaaatgttaacaacttcagagtaatgagcaactctctccactaaacagtatctcccatcagcatctggattctcaaacgcttgaatatgagcgttcgctacatctttaacgttaacccacccgaacgtcgcattaggaaacgtttgtgctcctgaaaatgtaagccaatgtttaatattaggtaagtctttgaatcaaatcaatgcttatgtattttttctttacctttgatcaagcttagtactgcaccagcactagtgtttagcgttggctgtaagagaggaccaatcaccatagctggatttatcgaaaccagctgtaagtcgttctctttcgcaaatttccacgctgcgttttcagctaatgtcttcgagagtacataccatagcttttaagacgaagaaaaatagtaattcagcaaaaacagagtgataacttc

SEQ ID NO: 12253 - DNA, 829 bp, Arabidopsis thaliana landsberg
aggttctagagatattgaagtttggggaaattaatgacaagacagaattagagcaaaccaagcacttcttggagttaatgccgcatcttgaacagctcaatatatactacgatacatcagttgacgataaccttgttaaagtatccaagcaacttcaggaaattcctggagtagcttcagcaaagtgcaaggtccaagtaatctccgataacctcaccttgtcagttactttaccctcttcctcatcgatttaatggattgctcttattttttagaagaatctttatatttcaggcttcttaggtctaaaactgaaaaccaagtttctcttgtttcagccttttattcttactttggtgcatatctatttgtccttttgatggtgaatgttacttatcttttgtttgctttcgttcttctgttgtattgaaaaaggtttatgagtcattatctccttaaagaattatgatgtgattacagtttcttggtgataaggagttatattaagcaagcttgtgagtatttaacatgttttagtatggttgtgtcactctgttttaatgcccatatggtggattagtgacatagaagttgaaattgtgaacatgttttcatttgtctcaagctttcctgatccatttgtagtcaaagctgtaatacgatctcgagtctaatcgactttatgaaagagatggttgatattatagcccctaacattgatctcatcttgaatgtggaataaagacaacaaaatccaaaataatcagaatggtttttgtttacaaactcttttcactgtaacctctaacacttggccatttcaaacccg

SEQ ID NO: 12254 - DNA, 989 bp, Arabidopsis thaliana landsberg
aatttcacctgctcttgattctgtcaagcctgtgggttcttctgtcttttaagttgtgatgtctgacaaaagtaagcaagctgagagttcgacggactcggattctctccaacagaagtctgatgaaaaggaagagatccttagtccaagatctgctgaggaaactaacaaagaaatcaagaatgtgaaagaatatgaagtgccagaatgttctaaagaaaaggtataatttccttctttttttcttgcatcctctacttgaggttatttttcagttttctgaatcttctggacatatgtgcagagtcttttgccttctggtccaccagtttttcgaacgtcgtggttgagttgctgcggtttgtttgatgtaatggcaggatctgaaagataaatacgggttagtaattcttttataaataagttcagtaaaactttttcacttgactctgagcatcctaacattctagtaagctaagtaagagggttcatgggcttgagcaagaatttcggatagtggatgggctcctaggtatagtactgcttagctcaagagtttcaatcagtttctctatcctcattcaaacccttctcagaagtaatttcctactatatcttggtcatgtttgttcttgctttcaagtgtttgaaattggtttgaaccaatgataaattccaagtcatctaataacatcacctatttggctaccgttgaaacctagcactgtaggattctagtctctgaaactttgattcctttactcgaaagctacctccatgttgtttacatgggtaatcagttaacttttacccaccgttcaaaggatcagagttttctagtattctctccactcttctcgaaggacctagttctgatctttcttgatattatgattcataaagtgtagttaaaaaatatatggatatgtatcattttgtctcatcagtgtctatgtgtgatgtgaagaacaggaggaggataaaattgc

SEQ ID NO: 12255 - DNA, 1230 bp, Arabidopsis thaliana landsberg
aacgcaaaaccctttgtagttttgagttattgtgttctctatatattgtttcaaaacttttttctcttcaccataatatacttggacacaagacaaacaaacaaaaatatcttagtgagcttaatcaagaacagcaatggcagacgaggtgattcttcttgatttctggccgagcatgtttggaatgaggacgaggattgctttagaagagaaaaatgtcaaattcgattacagagaacaagatctgtggaacaaaagcccgattctcctcgagatgaatccggttcataagaaaataccggttctcatccacaatggtaatccggtatgtgaatcactcatccagatcgaatacatcgacgaagtttggcctagcaaaaccccacttcttccttctgatccttaccaaagagctcaggccaaattttggggagatttcattgataagaaggtaatctatcttccaaaataagcttaaaaatcaaagccttcttaggcaagacatagacgttaatatttcgtataatgtgcttaggtgtatgcttcagcgaggttgatttggggagctaaagccgcagagcatgaggcggggaagaaggagttcatcgagatactcaagacactagagtctgagcttggagacaagacttactttggaggtgcaacattcggttatgttgatatagctctcattggattttacagttggtttgaagcgtatgagaagtttgggagtttcagcattgaagccgagtgtccaaaactgattgcttggcgtcaaaaggtgtgtggagagagagagtgtggctaagtctcttcctgattcggagaagatcattaagttcgttcctgagctaaggaaaaaacttgggatcgaaatcgaatagattctacgctgatatgtttttatgtttctgtttgtgatgctgtttatgctctgtttcatgttctgtttcttccctgtttgggaaatctttaagataatgtcatcaaaataatgcaaatatttacttgaaaattcggttggggtggttaagcatgcgtaatacgttgcattagcttcaattttttagatcttcattgcgatgataagtctagtaaaccgaattaaaccagtaccaagaaaatccaatccaaaatctaaaacaatcgatttgttttattttttctttcccctaaataataactattatagtattatcgaaacaaagcgtcaaagaaaaaaagaac

SEQ ID NO: 12256 - DNA, 427 bp, Arabidopsis thaliana landsberg
  unsure (1)..(427): unsure at all n locations
ttaagaggaatattcggatctgaggccctttttgttgattttctggaagtcggctgatgaacactatgagattttcttcaaaagcccagtagcagcagagggtcttggccgaaattagnnnnnnnnnnnnnnnnnnnnnggcggatctaggggactggcgacggagtttttaccgagaaaagatgtagaacggcggcgatgttgagttttcttcgaaattctaaactgaaaatctagaaatcgataaagaattcgactccaagtaccgtcggcccgaacctattacgactctaagactaaattccggctatctactgagttcagacaagattcaagaccaatagtaatagacggaatcgcaaaaaaaagagagagaatcgagattgttacctgagaaaatgggtgagtccggttgcctataagagat

SEQ ID NO: 12257 - DNA, 558 bp, Arabidopsis thaliana landsberg
tccaacaatctttgggacaaattgaaattctctgaaccatcttcaagccagcgttggttcactatagcgtctctcatacttccaaactgtgatccatctctagtaggtgccattgagtttgagaatcttgacaattggccagacccgcgttggacataggacctttgtgttctcagttggcttgatccgttaggatgcgttgtctccgtttgtgtagattgggtagggattttgtgcggtattgcccttcagtggttcgatccggaagccattgccagaatctccctcaggattaaacttctcactaatgcttgtccggttagtctcccctagacgtttctttgaaagggaaaaattccaagtaataagatagaagcataggcatacatacacacaaacacacacatgcatctgtagactaagaaattacctgtattgatgccagtaactcggcattggcactaggagccggtacagctttggactctctagccaaccgcttctgttcattctgtttactgctcgaacctttccgtctgttcatgagaagggtacgag

SEQ ID NO: 12258 - DNA, 535 bp, Arabidopsis thaliana landsberg
gatacagtctgctcattctataatggacttctttcgattttgtccaagaagagaaagcatgacgactccatggacgactgtaacaaaagagtcatggagtggatagccgaagtagtccacggcggagttcaacatctagatgttgatgccaaaacgtgcgggataattcaatctcatccagatatatataagagcacaatgtgttcaccttctgtagattccatgcctaaagtatgtttatgtgagcaagacagtggtgtctttaaagctcgtaaaggtagggcatgatgatcccaagtttgttgtttctctacctagtctcaagatgatgcatctagaaaacattctttacaagaatcatggtgttcttttgattataaagatgctcctctcaggctctcctgttcttgaagttcttaccttggtaagacattttgattgatgataataataactctaaacttctgtcttttaaactcatctacttgcatttttcgcaggactatcccggattaacggaggcaaaataaatctt

SEQ ID NO: 12259 - DNA, 906 bp, Arabidopsis thaliana landsberg
gagcgactgctctttcggttcctttggcactgtccaccgtgctgagtggcatggctcggtaagaacttttttgtcagaatttacacagctgaattttttttcgctctaaaaatttggttgtgacttttggatctgcttggtattataaaaggcaaagttattgtatatgagactctccgttctgtcagaaattaaacatggacaaaaggtgtcccattttagatgtatatgtgtctttatatcataaatttgtcttcctgtttgaattttacaaagctatcactagaagaattctaattttgattattgcagtaatattctctatcaatttcaggatgttgctgtgaaaattctcatggagcaagacttccatgctgagcgtgttaatgagttcttaagagaggtgcacaaataaaattttctcttgattttggtaatgaacttgttgtattaatgcctccaatgatcttgattcgctgtcaggttgcgataatgaaacgccttcgccaccctaacattgttctcttcatgggtgcggtcactcaacctccaaatttgtcaatagtgacagaatatttgtcaaggtacaattacttggatttggaaggtttgatgtactgagtgtagaattttggcctataatgactctaataccatgatttctttcaaacagaggtagtttatacagacttttgcataaaagtggagcaagggagcaattagatgagagacgtcgcctgagtatggcttatgatgtggtatgtttaattccttttgttacatgtatgggtgattacttcctgatcttggtgtttcttcacatggaactttctttccaattctctgtcacaggctaagggaatgaattatcttcacaatcgcaatcctccaattgtgcatagagat

SEQ ID NO: 12260 - DNA, 1238 bp, Arabidopsis thaliana landsberg
tcatgatttattcatagtaacgactaaaagaaagaagatgatgcattgtttgttagtacagcgttttttttccaatagtttcccacgagtcaggctgagcgttttcctctcgaatgactctacctcatttagtgacttcgttttctttcaccttaagaattggatcatcgagctgaggtattgaaggctctttcttttcctgtgcacaaatagaaaaatgagcaacgatttctattgaagttcactcacaagtcaaatgttaaaatgaaacagataagagtcgagaggtgaagaaataaatatacctcacccttagattttggtgctgattgttctgtgatatactgtaagatctcaaagaatttggtctgcccttggttgatttctttttggagatatatcattgccatatccttagctcgggtctttaccttcaccaagttgcggtcaatttcattttcatgctttgctatatatggcctgaagaaagaatcgtaaacgtatgttgttccctgacatgatataacacataggtaataaaaattagagaaaaattcagttgaatcaaaagatatataagatattacttactttagtctttggaaaccagagataaatgaagaaagccaacttcgcctcgctatacattggtaaccttcaagacaacatgaaaacataagaatgataagaatactatacagtaaaactctttgttttctaagtaagtaatataaacaacctaccaagaaacaagagcatcaccaattctttcgaaaatcgtcaaagcagctacaataatcctgcaaagatgttttgagaggaaggaaggaagcaggatatatataggaacctaaaaaggttatagataaaggatagaatgtatgcatataccaatactggcaccagaactgaagttgttgaatttcaggcttgttgagttcgaccgttttgaagcactcataagcaggatatgcatatccaaacaccattctgtcaataaatagaaagattcattacttagtttgattgaaagaaatgtgtgttttattttttcaaaagaagagatcaataacatacaaaagccctcttgtcagaaacgatccaatcattgtgatcacctgctaaaacgttttaaaaaaacaaaagaatctgcttgtcagaattaaattctcgaccccgattctttgaaatgattatatcatccaaaatacaaaaagacagagacaaaacattcaact

SEQ ID NO: 12261 - DNA, 1121 bp, Arabidopsis thaliana landsberg
actcataccatttgtctcaatgcgtgcctacttatgtatgtgtatgtataatatttaaatgtcttctatttacggcagatccattatctcctggatcaatgcatcatggaggacacaagtttcatgaggttttccaaatgaaacaggggcgttatgatcttcaagcttcaaagatttctgaaatgatgaaatcaagtagcttagatgtattttctctatcttgttaatgatgaaactatagttttcttttgaagtctattgataatgtcgtgggcttgtgtttgatgcacaatgctcctacgcagtcattgctaagcgtcttgaatggaattctagatgaaagtatcgaaagaaagaatggtgaaatccctcaggtacttgaatgccaacaattattaagatcatcacgtctataagataccttcctttgtgcttttacttcttgggaaatgttttgacaaaagctacaatgaacagcgtgtggcatgcctgttaagaaaagtcgtgcaggagattgagcggcgtatatcaactcaagctgaacatctaagaacggtatgattttgtttacttaggaaaaatgcttcctagcaatgttcaagttctggtttttgtgaataatttcgtttttttgtttatgtgcagcaaaacaatattttcaaaactcgcgaggaaaaataccagtcaaggatcaatgtccttgaagccttagcatcaggaactggtgtagaacacgaggtatcatttgttatgatcttgtcagataacattttactcatgtgttacatatcttctgctctattgatgaacttattcattgccagattgcaacacaacagcttagacagatagaggtacattatacttgtgaactgtttgagcgaaaatggtatttgtaatttggcaatgacatgaaattaagttttgacctggagttttgtgtatgttagacagaaaagtcaatgtgggaggaaaagaagaaacacgaagaggaagatatggttaagctaatgaaacaaaatgatcagcacaacctcgaaatttctgcgctgaagcaagaactggagacaactaaaagaaaatatgaacaacaatactcgcaaattgaaagccaaacaaag

SEQ ID NO: 12262 - DNA, 1048 bp, Arabidopsis thaliana landsberg
ctcatgcttgtgctgaattgcatcgcagcagtgacaaaacttggcccaacaaaactttcgtgcccgcccttcttttctgtgattccagatactacagggagattgatggacaaatttgttgggtttgttccacttcctcagacctatcattcaatgaaaacctttggtcttcgcagagaatttcttcttcattttggacctcgggcagcagcatgcagagtaaaaagtgactgtgatacagatgaggttgtcttctgggtagatcttatacaaaaccaactgctgagggctattgatcgggagaaaatatggtcaagattaataacgtctgaaagtatagaggtaatgaatagaaacttgtagaggacatatctgaacagcttttagaatctctgtacagtatggatgtgagctcgtactatttgaaaacattaaagaattatgggcaagggaaggatttttatgacacagccacccttccatgttgaaatcattggatatatcatttgctgtaccttttcttataagtgctatttagattataaagaacatagccgaaacagtttgcaaacgtaaatgacactatctaggatcttcgtagagtggcacttatcgaaacagaaatctgttttatcttttagttttataactcatagagtgtttagattgttgaaatcagtaataaaagttgacttgcttggaaatatcttgggagcttatcatgacttgttggtgatgccttgcaggttttggatagagatttagctatttttggattcttcattgccttgggcaagagcacccagtcttttttagctgcaaatggtttcagttcgctggagaatcctgtggaagaccttgttaggtgactcattgtttttcttctgtttgcttaccatactctttgatacaccctatcacttagatcttctttatttaggcacttcattgggggaagtctcctacaatatcctcagctgtcagccatcagttcttaccagttgtatgtagaggtaggcataaatcataccatcactggttgaaaata

SEQ ID NO: 12263 - DNA, 959 bp, Arabidopsis thaliana landsberg
  unsure (1)..(959): unsure at all n locations
ttcattaccacgtatcggataaaaactcacctcctatctagaaatcatcacccaagtttccgtttaaaactcaagacaaagaacgcaaatcagattgacaatttactcaatgttctagttatagttaagaaaatttcatgtcagtttcagaaaacaagatgtccgtgcattgacgacgtgctttgcaaatcatcctgacctaaggtttccgctgtttatgtccgaacagaaacagagtatttcatttcaaacaataagaactaatctcgatgatctaaaacttgtcagaaaaaagaaatagaggttgttgatttaacatgactacaaagctatgtaagattcgctaaaccagatgacatcaagaacatgatagattttggggtaagaagtagcacattacaacactctttaacatcaaaagataacaaattttataaaattgaaacatagagttacttcttcaagcttcccctgataccaggtttaggtttcgattcagctactggtgctaaaacagcatggagattcacgagctttgattcctcataaatgatattaggatgcttcgattcgtgatggatctgcatcgtcttaagacctggagccgtaattttgcaatgaggacactcgtacttagcgtgacctcctttctcttttccggtccgatcagcgattccagcttttcctccgcctcgattcgtcaacgcagcatcgattttcgcttgaatctccttcgctgtatgcttctttggcttcgccttacnnnnnnnnnnnnnnnnnnnnnnnnnnnnnnnaatttgccaggaagggagaaaccctaaccctaaccctaatttgtgctctactcttctgattttgcacgcgacagccgatatgaatatatatatactaattttataaataaaataggaaataatcttatctgcttttgtttttgtggggtgttagagtgtgggaga

SEQ ID NO: 12264 - DNA, 768 bp, Arabidopsis thaliana landsberg
  unsure (1)..(768): unsure at all n locations
acaaaatattggttggtaacaaagctgatatggatgaaagcaaaagggtaagtaatctttagttgcatactttactttcaagagtttaattatagtgtactgatttgtgatcttcttgttcaggctgttccaacagcaaagggccaagctttggctgatgagtatggaatcaaattctttgagacggtgagctagataaaaaacagaacatgtctgctgtttttcattaatatgctcttgaggttactaatgtgattacaattgttgcagagtgcaaaaacaaacctcaatgtcgaaaatgttttcatgtcaatcgcaaaagacataaaacaaagattgacagaaaccgacacgaaggcagaggtaagaactgcaggaatcaaccattaatactcgatcttcatattcttataccgacattttagctgagtaataaacatatgtactgttcttgttactttgcagccccaaggcatcaagatcactaaacaagatactgccgcatcgtcttctacnnnnnnnnnnnnnnnnnnnnnnnnnnnnnnnnaggagtatgattgctctttttcgcctgcaccgggttttttaaatatctggccatctttttcatctcttacgtctcaaatcagagataattctcatgttgttacctagaacgagtaggaaatctcattgatggttgtgatctttatgcctaattcgtcatctccataattcctgtacaaaaatcttcaaaatatggaagactatgttggtcaaaaaactatg

SEQ ID NO: 12265 - DNA, 1066 bp, Arabidopsis thaliana landsberg
tactctctctttttctctacatatatatctataaactctttctataattattgttcttattcactactaatagatatagtaatgaatccaagaataacaaaaccgtgatcaagagtttggtttcttgagatttatggtgatctcaatctctccagttgaaagctctcagacttagcatcttcaacatcttccatgctactatctccaccagttgttgttgttgtagacggtaactgcaaaggaccttgaggagaatctgattgcgcattgcttctcttcaatgattctcctccttcacatgtctcttcttcatcttgtgctgaagaattccacaagttaaaccctaaaacaactgctgattgtttctccgcattcgaatttggcttcctgatgtgtaacctgtatttctacatataacagagaaaatgagttcttagtaacattcactgtaagactcaaagatctcaactttttgtttctttttagttacctgtaaatgactcttgacttcatcattggttaagccttcttcttgcatatgttctctaatttgtttaggagttgccactgttattaacacaacaaaacatacaaagatatcacaacacattctgtatcaggtaaccaaactcaagaacacaagaagaagatcttttatacctcccggtccacctagctgttgcaatgcatcgacaaatcggcgatgcaactctggattccaacaccttctttgcttccgtaaagcttgctgcttaagaaatgctggttgttgtggtactgctggtgttggtggttgtggcatagagttagaagtaaagccacatgaggcaacaatcccttttcttcttatcgaactcgaacttaaaccgaggcctaaaccagtttccacctttggaatcaacaacataggagatttctcctcatttctctgcaacatttagatcaagcaaagtagcaaactcagtcctttgttcttaattaatcacaaaacatatcatccaatctttccaaatgctgtctcaattccagagttttaattaccttaatctcaagcttgctcttgatc

SEQ ID NO: 12266 - DNA, 600 bp, Arabidopsis thaliana landsberg
ccccgagtgtcgtatttgttaagaaaggatgttcctgaaattgtttgacacagagtatgattcaacatttcaatggatgaaaaacatgcaaaagggattatataaaacaaaccatcagttcctttgcagagcttcgactgttgggctccttctgcaaactggatgagagtgtagagtggaatatgttaacttagtaaagtaatctcagtaaaagagggagcaggaattttttgagagattaccatgtggagatgaatgaagataactcaggggagaaatttcctgaaggaagagcgggtggcggttggtcaacaatggcttccatcaactcgaaaacactggtccatgtttcctcttgattcggaggtgcataagggaactttcctgttgcacattcgagtactactaaacccaagctccatatatcacttttatttccgtacttgtttccaacgattctctctggctgtaaaaaggaaaaattaagattctcaatttttataacactcgaaaggggtttcaaactagtcaatgctcaagagacaaataagatacttacagacatataattgtaagtccccagaaatgtgtttgcaaacc

SEQ ID NO: 12267 - DNA, 906 bp, Arabidopsis thaliana landsberg
gtagtgtgacttgtgagacaagtaaaactcaaagaccagtccttaacagtgactagtatgttcagctaacacaaaagaagatgaagaattgacttaattagccaaaccttgaacaaattaggtaaccgttgcacgtaaaccatataagacaagtggcaggcgcttctctgtgaatgtaaatagctttcttggactttaagtctctcattctcctgcaaaatcaacgttttttaatctatatattagatcacaaaaagtcttagtagtctacactaattagccacttacattgaatagtgtctatcagctgctgctcccataacgagtttggtgactccgcgctgagatatcaattggaggatacctttctctaccgaatccgtttcaatatatatgatctctgcagtgacctaattcacaatttgactggaaatttaaaaccaaacatctcttctaccatcaaaacacatggataagaagtaaggatatacgtagatacctgcatttgcctgcatatttgaaggtacttctccaaattcttatgtgctttctccttctcttttctgtagagacgcaatttctgctcgtgaaacatctcccccgcttgaaatcaagaacacaagatactccaaagttaaccaaataatccttaacctctgcataaaaagattcttgtggatgtttaattacttacggataggttgatgaacatggacgatgcaaaactctttgcctccactgttctgtatcgcccaaacgagactagacttgctttctagatctttctctgtcactgctacatagatcttctcttttttggtgatttccattgattcagcgatatcgatgccatgagatcttaaagagccaaccattttcaccatctcttggatcggaatctttaat

SEQ ID NO: 12268 - DNA, 755 bp, Arabidopsis thaliana landsberg
  unsure (1)..(755): unsure at all n locations
gttaacaactctgttaaggtaacgtcctaaaagtttcttattatattgactgaagatgtaaaactccaaggactatctacgtttgtgatattgtttctagaaattgggacttacatccaaatctggaagaacaatcttctaaacactaccaacaaagtcatgagattcgatgagtaaactagggaacaatgaaaactgaaaagggctcaacctaggcttcgctgttgctacaatttcgtgaaaacattaaagcacaatcagatacgtgtagacatcatcataatctaatgattcaaccctttaatgcgtttttagtgcgtcgttacatattcagtgtttattggtaatatagcaatattcctgataaagttcattggtcgtaagtcgtaacgtttacatgttttattcaactcttaaaaaccaatagaaaatcttaatgtacttggccttcttattcttgtcggcttaatgtacttacttaaatacaacgacttgaattgcaataattcgatacacgaaggagaagccaacttagactaagtcaagaaacacattgaatcataaacgtgcgcgtgtctcacacttcttctcctctccttcctcgtaaacactctcttactcacattcatatatataactaaaccttgcagaccaaccaaatcaacaaaaaannnncagactaaaaataaattcacaacgaagaagaagacctaaaagatcgggacatgaaactatgatcaaatcagaaacagatc

SEQ ID NO: 12269 - DNA, 969 bp, Arabidopsis thaliana landsberg
  unsure (1)..(969): unsure at all n locations
tttatacataagttatcaaacaaactatacatgaaagcaaatcaacatgtccaactttttctgaatacaattcaaccataacaccgtcacatcacactgacggcgacaaaacaatgaaaaagacataataaaaacaaaacattagaaaaaatcaaacactaaaataatgttcttatcaaaataaatttacaaaaactaaaaccaaacacatgcactctcaagtaaaagacaaaaagatcgatttcagacaaccaattttcctttccacaacttttttcttcatgaagaagagaggaaaaaaaagtcgttttctctttctctccggtagtcctgtcggcgataatatacgttacgctcgttcttcaaacaagtttgtagccaaaatgctattaattgctaattagtggaaattaatgataaatattaataacgttatgctttcatttacctttacaagtgaaaagaaagaaaaattaattataaattcttaaattgttaatacgaatataaaaaaggctgtcatttggcgttaattttatttcctttttaatggaattattttatactatatgttaaaaaaacataattcgttttttcctatcatttcatttgtatactgttttctcaatcaatagaaaaaaaggcttctctgtgttgttctctgtggtcattcttctttcttttcacttcttcttcttcttcttcgctcttcttctcactgtcgggttccatttggcgcgaaaagttcttcactttttccagcttttttttgttctctgacagttttttttttttgtttgggtacaaataaagatgccagtaagtgtaagtgtctttttataagtttagttctgaagtctcttgtctttcttttactctcttgtccgaaattgcttgattctcgattntgacgaagcttgaaaaacanacccagttcgttaatggtttctgggtcttcgtcatttcact

SEQ ID NO: 12270 - DNA, 1396 bp, Arabidopsis thaliana landsberg
cgactggatagcacgcggatgttacgaatcatttaattttggttgcgtaataacccaattgggcttattgggcttaaccaattagggcatttatgatgcatttgaatttaagcttgatatctgcactgattaaaacttattacagatttggttcagttacattaaaaaatatttccataacaaacaaatattctataacaatatgacaaaacggatatttatataccaacctaattccatattttccgttgattaaaacataacttctctccttatattccttatattcaattttcagttaatgtatttctataacaaacaaagctataaatttgaattagaaaaagcataattcaaaatttatcctacaccaaactaatcccatatattccgatgattatggaaaacttatctttttatatttcaaaaaaaaaaaatcaattatattcgtactggaacaaatcaagcatattccatattaatcctaattcaaaaatcttctctttggtgttaattttctaaaccctaaaacaatctagccgaccattttaactataaatatagatgcataattccattgaagatacacacaaaaattttcaccacgaaaaattgctattggtactccttataataaaatggctgcaaatcttggcaacaatggagatgattatggcgtttacatttgtatgtatagattcgattttcactagatcttttactctttacagtcttacaataatcattaacagatcctattattaatacgactttattcttttctatatagggtgctttgattcatgctaatattttgattcatgctaatattaagaaacatcaagtgaacaagctttaaagattcatcagatctgagagtgtagaattatggaaaattttacacttacatggggtaaaaataactaaaaaacacacaccaaccaacaaaaaaaggcacatcaacagctttcttcttggtcatagcatccatagatgaagaaaaggttttcatctcttactatatcttataaatccttcgttcttggtctttgattttggcgtctctcttcatcggagattagaagagaaaccacatcaagaaaataaataagagataatgtctgatgagcattctgtgaaagagaaacgaaaacgatgacttgatgagggtgaagttggagagagaataaaaagaaagttgcttcctttcagttttgtttttctaattcactcatttattcatttttctatgtgtcacaaaagtattaaagtgttctattttatactttcgattggtatcatatttcattttttcatggtgcgtcgttatgtacacttttgtcaaacaaatatcaatgcaccgaaaaacaaagtatctacaattagcgtggacgat

SEQ ID NO: 12271 - DNA, 849 bp, Arabidopsis thaliana landsberg
cttggcatcttccttcaaagatttaggctttttgagttctgatttcttttttcatttggtgtaggttgctgcgtacgatgggacacaaggaaagatggctttctttgatccctcaagggctcaggacttcttgttcatttctggcactaaggtaaataaacacttctcaaaccaattgggacataatgtaactaagctcaagtgtattcaatttctgatcaaagatttgatggttgttttgatagatgagagcattggcaaagaacagagagaacccaccagatggatttatgtgccctggaggctggaaagtccttgtggattactacgacagtttgacactaaccggaaacaccaaacttccggaaaagattccggtttaagaccgataaaaccatttatttgtttttgtttctcaacataatgattattccttcttgttgtaagatttagaaagcttatatgaacaaaagtaacacaaatcttacatacatataaactaaaaaaaaaacccagtatgaatctaacttttaatccctgatcgttcttcaatctatcactacgacttcattttttatttttttggttaaagtgacgatgtgatcttcgtcattgcttcttcctctcttattccctgaatgaatcacaacatctaatgtttgctctatcttcacaacaacatttttatctattcggtagacaagatcagttttagccttcgtttacatcaatgcacacaatggaatcgtcaccgatttcttctgcacaatcatcattgatatatctgtgaccactttcctctctagccattttttatagggctctagcacctacacctacataacaatc

SEQ ID NO: 12272 - DNA, 641 bp, Arabidopsis thaliana landsberg
  unsure (1)..(641): unsure at all n locations
ttgtaactttccgataaagacccatctttcaatttcccctattttaccttgtttttttaacctagattgtttctgataataaatcatacgtaacgtctcagttgatgtagcagcattaaacactatatttccatttcactcactatctttccttctttcacaactttctttttccaagtatctctctctctattagacaacaacaccacaagacaatcgaagatctctctctctctctccacaacgatgaagactaaccggaaccgtccgatcaacatcctcatcgtcttcttccttcttacgaccgcaagagcagcaacaagaaactggaccaaccgaactcaccgaaccgtccctaaggttcaacacgcgtactacgcatatcctcaccgttcatgcgaatctttctctcgtccatacgcacgctctatgtgcattgagctcgaaagaatccacagaagcagtcgacaaccgcttttctctcctccgcctcctccgacggagattgatcaaaggtacggcgtcgagaaaagacttgttccctccggtccaaacccacttcacaactgatgaaacccttcttgtgaagaaaaggagctagctagggttcttctcaatnttctggtaaatctttcttcttt

SEQ ID NO: 12273 - DNA, 954 bp, Arabidopsis thaliana landsberg
ttttttatgaagtttaagaaaaaaaacatttgagatatgtatctgataggtcacaaaatactgataagatggggattacaattgttgttgttttcaatgatttgcatgtgttatggggatggtaaagaagttaacaaaatcaattctaaaaactgaggttctgtttgtttttttaatgttttaatgaatttctcaccgttcgttgatttggtagattacattagaattttctcttgaaaaaggatagtcaacaataattgattttgtcgcgttgaatattcatttaatcattttgatcatactctcttatcttagtattttctttattaaaataaaattcagaatgggcgatgcatgcctgaaatgtatttagtttcgggaaaattgtttttgattttgtgaatttgtatgatacttacatgtttaacttgaaccaaaatttcagaaatggattgaaatggatcattaatctgattttgtcattttgcagaggtttatggggaacacaaaatgaaaatggagactgatccgatccgtcacattcatataactttaaaggtgctggctacagactgagtaatgatgatggagttcacgaagggagaatgttacggaatagagaaatcaaaatttgaaggtgctagacgggtaataatgatttgagtatagggatatttacaaatgcttgtaagatgtgtgatgagaggatgtatgtgtagtgtgtgtaaacgtatcattgtatagatgagataaatgtgcaacgttgtcggatggcatcgatgtagtgaatagcctggccgcacaaaactttttgggctgctgtagatggatgcggatgatgtcgatgatgaatgtgtcggatgtggatggcatatgtgaatgtaaaggctgaggattcggtaagaacaccaactcgcaaaagcgctcctgttggccccacactgaccacctgat

SEQ ID NO: 12274 - DNA, 579 bp, Arabidopsis thaliana landsberg
cgacatcttgcatatcttcttacgaagttttaagaaaaaatcattttttatatgtatctgataggtcacaaaaggctggtgagatgggtaaagaagttaatgaaattaaatctaaaactgaggttctgtcttttgatgttttagtgaatctctcaccgttcgttgatttgatagagtactcttagaatttacatcatactctgtctcgttctaagaaatacattggttaaagatcactgaaaacgattttgttataatgtacatagaattttgtttaacttgtaccaaaatttcagaaatggattgaaacggatgatcattaatctgattttgtcattttgcagcggtttatgttgaacacaaaatcaaatggagtgtgttacttacgtaaaggcttaaaaagggaaaatgatttgatccgtcacattcatatcctttaaaagtggtagacggagtgatgataatggagtcatggagggagaatgttacggagcagagaaatctaaatttgaggtgcttagacaggcataatgatttgagtatatggatatgcgcaaaatgcttgtaagatgtatgtgt

SEQ ID NO: 12275 - DNA, 630 bp, Arabidopsis thaliana landsberg
aatgtttacactttaaaccaagtaatgatattgtggtgttcatccgttttgttgatataggcaaagttaatccttaatgaacattaatcattttcatggcaccgtataaatatatgtttccataaatctgaaatcgtttggttaacggagaataagtaacaagcgacgatgatcaccacaatatcatatcgatcagactacatctacatacatataataatgatataaatcgtcaatgatcaaaaacaatcatcaagtggaaacgaagttgaatttgctagataatttactttttgaaagttgacccgatacttatgggatttgtaaagataatttattcacataacctatagtaccaaacaacttatgatgcttagggttttattggatattacccacacaaaaaaatactaattgcgagaagagtcatcatttgcattaaaaattccgcatcaaaaaaacgagacctaaaatattatgggtgtgataattagtaccatatatttaaaaaaattagctattttgtcaacaccttgattaattttaaaaggttcaagaaatcaagttggagaaatattatttacatacatacataatatagtgtggctattatacgcgagtattccgtac

SEQ ID NO: 12276 - DNA, 929 bp, Arabidopsis thaliana landsberg
tttatttttccaacttgactttttgagccttttggtatggatgaagttgttggtaaacaaaaaatagctacattttttaatgatatggtactaatcacacccataatattttaggtctcgtttttctgatgtgggattttcaatgaaaatgatgatatttctagctattcataatttttctatgaaaacctaagcacaaaggtcgtttggtactatcggctatgtgataatgtgaatcaaatatttgcaaatcccataagtatcgggtcaactttcaaaaaataaaattacacagatgattaaacttggtttcagttgatgattgtttctgatcattgacgattttatgccactattatatgtattgtggtgaactggtgatcgatgatattgtggtcatgatcatcgacttgttacttattttttgttagttaacccaacgatggaaacatatattaacacggtgacataaaaatgattttgttcatcaaggattaactttaccttgatcaacaagacgatgaatcattacttggtttaaagtttaaactaattgaaccatatcaacatctttcattttcacttcttttagaaatactatgtttattaaagagaaattaattataaaattaaatagtaaaacagaaagttagttaagttagacgaatttggattttcacttttgatctcaaatttgcgtcaaactctatttgggacatttctaacgttagaattatacgactgagaaataccccttatttaattaaaaaatatatatattatccaaacctagtcctattcggtccaatcttgggaaacccccccggataataacaacaaatttatttctaaattaaggtccccattttggcggaattcacccaaaaaaaccacatttaattcaccaattgaaaaaaactggaaaaatc

SEQ ID NO: 12277 - DNA, 1142 bp, Arabidopsis thaliana landsberg
gcctagtcaacgaaatcaattttcagtttataaaagacggtagagagataatctgcaactgtatgaacaaaacaaacccagaaagaaaaatatcactaacctcattcaaagagagaatggcttgtaaagaaaagcctcgtgatcttcaagttcttttgatcatatctatagttttgagttgttcttttgctgtttctgcaacggtggaagaagctaatgctcttttgaaatggaagtcaactttcacaaaccagacaagttcatcaaagctatcttcttgggtcaatccaaacacaagcagcttctgtaccagttggtatggtgttgcctgctcactcgggagcattatacggttgaatcttactaataccggtatcgaaggtactttcgaagattttccattctcgtctctccccaatctcacttttgttgatctcagtatgaaccgtttctctggaaccatctctcctttatggggacggttctcgaaactcgaatacttcgatttgtcgattaaccagttagttggtgaaatcccacctgagcttggtgatttgagtaatttagatactctccatctagttgaaaacaagttaaacggatcgattccttctgagatcggtcggttaactaaggttacggagatagctatatacgacaatcttttaaccggaccaataccttcttcttttggaaaccttaccaaactagttaacctctacctctttatcaattctctttctggttcaattccttctgaaataggaaacttacccaaccttagagagctatgtctagataggaacaaccttaccggtaaaatcccttctagtttcgggaatttgaagaatgtaactcttctcaatatgtttgaaaatcagctctctggtgaaatccctcctgagattggtaatatgaccgctttagatacacttagtctccacacaaataagcttacccggtccatcctctcctagacataacctaccgtttattactgatactatggcattcccgactagactgataatgtgttgaatatgaacactacgcctgtccatttgcagtaccctgaggtgtctctatatactttgtcatcacggatgtacttcaagtacgctgagtgccacactacgtctgcg

SEQ ID NO: 12278 - DNA, 2686 bp, Arabidopsis thaliana landsberg
ttttgcattccggtggatctattggatcgatattggtgtgggaacgtcacgatggtgaggacattgtagttgttggaatgcttagaggtcacacagagtctgttctatgcctcgcggttgtttcggacatactttgtagtggctcagcagataagacagtgaggttgtggaaatgttcagccaaggattattcatgcttggctatgttagagggacatttaggtccggttaagtgcttgacaggggcatttcgtgattcgcgtaaagcagatgaggcttcttatcatatttatagtggaggactagactctcaagttaaggtttggcaggttttggtgccggcctaataaaatagttacttaattatttcatttggattgttttctttcctatattgatgagtttatgagtttttgtatgagttcatcttttgggataatatgtgaattagtgtgtaatatgtgatgtactatgttcgttggatagaaaaagagggcttctatcacatcataatattgccattcccctgtttttttggtccaatttcggacaatacaattgcggacaatttggtatcaatataatctattaaaaccaagtaggtaacatctttgttaaagaaatatattctattggagcaaatagcgtataaaatatacataaaggaagacaagtagtttgtctaatcttgtattatttcattcaaaagtattttaaagaataattaagggtaaaagccatctctttatggaatttgctttagacaaaagtagtagagtttacatataaaaaatctgttattgttattcgttccttgtggttgtggaacatgcacccaaccatatgaggctaaaaagtagaaaactcaagctttttcgttttaggttgataaattactacccatattggaaattgcgtattaaatgtgaagttttatttcactttacggctcgtaaaatacatgatcgtacacaacatgcatgcatgcaaaatgaccaaaacaatgacccgaagtgtacgtgatctctattttataacatcatatacgggtataagaaactagattttgtatcggataccataattcaaatacctgacgatttcaactaaaaagacaaaaacgtttattaaacacaagatagacaattggaggccacacgagcaggaaaggaataaaacgtagtaaagaaagtatagattgtgggaaaatgatgtcatacaatataatgtgactataacctactctccttttgttcaacactgtgtcttcttttaggattctttaaattttgacataaaacaaataaattagatatggataagttaggtatccaagtcattatcaacatttccaagattatcattggtaatttgacctctagataaaacatcatttttcttcgtatggatacaagtagagcagtcacaaagagattagagacttgaataatttgctgacagcactaacatttttctaatttctcaaagttagaacaaattatgttactaattgccagcgacaattatataggatatacaaccgaagaatgatagagaaccaagcttttacctattggttaaaataataaatcaaagttagtagcaagttgatcctaagctttagtgcatactttgagctttatgggtagttatgttacataggtcatggaaatatggaattgtaattaagttgtatggcaatttatttatttttctaaaaattctctctaattaatctgtccaaaatcaacttacgtttcaacagagagcaacatcgtaataatatgatcttgaataaacaaattataaaaaaggttgacttattcattcctaggccatgcttctatggactcttcaaaataccttagttataaattaaacggactgaaagtgacctccaagaaaagtgttacatatttgctttaaaatttatataaattaaggttaaaaaataagtgatttgacatcattataaggataatttagaaggagtacatgctatttatgtgaggcagaatggtctttacgacacacaaccgttgtttcctgtccgtacggactttgtgaatcaactgaaaacatagttgcaaaatgtttcattcaaatcagaaaacccagcatcaaaatacaatcattattctaggattatccaacaactttcaaaaacaaagtaaaatgtaaagataagtcactgaatcagtaccataatgatattgcactcagcttcactgtttgaatcaaaaaaaaaaaaattaaaaaggaaaagcaaaagcaaaataaaacaaacaatgtttcttgcaaaatggatctccacctctaaattctcctcttgtaaacctgcacaaaaacctcattgttactttcaagcgtcctatttgctgcataatacattgtaacattgttaatagtttccactaaccaaatcagcttcctccactttggttattccaattctctcatcctcctcagtgagaactccgagaagctcatgtgttaaagatgctggatcaagctccaaacaatctgtgggagcattcttacattctttacttgtaagcaactgataaacaacttgatgcgagaacctgaacagttctttatttgggtatgtaccctgattcgaatggcgacaaaacacagatttgaattctgtgactacatctagcggtccaccgtcacacctttt

SEQ ID NO: 12279 - DNA, 1343 bp, Arabidopsis thaliana landsberg
tgttcacgctgattcagtggtacgacatatgtggaagtttttttaacacgtctctctccgtttacttggttacaaaacttccatatcaaaaccaaaaatatcacgaactttctaaagaaaatatagaggaattaacgatttctgtcacgttcacaccattggatcaaattaaatcacaattcacaaacacatctcttctttcgaaactcatcaccacacttctgtttcaatggattcaattcaacaagacagattatctagtcttcccgacattcttctaatcatgatcatctctttcttgccgttaaaggaatgtgtaaggaccagtgttctctccaaggggtggaggtctctctgcttggagaccagaaacctttcttttaaggaatctgattacgtgaatcctgatatcaccgatgctgaatattcgagaattgtagcttatcgttcattcttttgttctgtggataaatgggtctctatcactcaacatcaagtcgtcgaaagcttcgagatttgtttctcccatctggtgggtttcgaggataagatcgacgctctgatcgaatacgctgtctccaaacgagtgaagaatttagttgttgatttgtcaaacccctcttggagaagcaatggtgatatatcatatcgtcattttatttatacattgcctaaaagcgtttacagtctaacaaccttggagtcactgaagatctacgggtgcaagtttgatccttcgaaattcgtaaacccggtattgctaagaagcctctctattggttgggtcagactcgaaaacctccactctttactatccaaatctccttccctccagagtctaagtatcaaaaattgctggggcgttgatatcacgtcgatggccgggcagttcagagagctagtcattgagcattcagacttcagttacatgcaatgtgcctttgagctgcctcgtatacacagcttcaagtactctggggagttgttcgagttctacttcgacgtaatgaatgtgatcataccaaatgtgtacttggattttggagaagagcgagtatatgatctacaaagccaatcatcaagaatatcgggtgaggttatttcccgtatcattaacgaccttagagcagctgagactttaactgtctgcccttatatcctccaggtatatttaagtgttcacatttttacattacatttttatagtaaattataagatcatttaagggttcttgaaatatttgaattctcacgatatagtaggagtagtagctgctgttggaactagaaaagaattatcagggtgaatgtgcattaatttttagatcataacatatatagct

SEQ ID NO: 12280 - DNA, 1204 bp, Arabidopsis thaliana landsberg
tttgtctttacacacaaggaatgattgtctttttggttttcactcttttcctctttcttcacattcttcatttaggtatttatttttatttaaaattgttttctgacaaagttttttaattttatttcagtaaaaaaaaaaaaagtgttttgcttttttgtttgtctgtatttgaattgtccttttactttggtgcatagtaggaggaggaggaagaacaaaagagcagcagacttctgagtctggtggttatgatgatgatgctgactttctcaccatcaataagatgaacgatacgacgacgtatttgtcacatcatttccccaaggtataaataaatttctcttttgtcaaccggtttggaaatttaatgttgcaaaacaaaatcaagtccggttatgagttctaaccggtctgattgagactggtcaaatccaaagggattgagtccggtttaagtactacttgtcattgaatctaattagtttcatataaatggcatttaaccggttttagtccggtttggtaactaattttgtcttttggttcattagggaacagaggagtggcgggaacaagaacacgaagaagaagaagaagatttgtcgttgtctctgtcgttaaatcatcatcattggagaagcaatggatcatcggtggtgagcgaaacgagtgaagcagcagtctcgacttgttcagcaccattcgtatccaaagattgctttggttcttcaaagattgatcttaatctgtcaatttctctcctcggtagctaaataagtaatgcaagatttaggttcagagaaactattcggatgtgtttttgaaactaggatattgaatgttagtagagaaacctagaaaatttaaagtttagataaattatcaacgcagcgttttgatcgcctttgaacggaaaattaacaaacagagccaaacgcagtgttttgatctttgaaggataaatcttaaacgcagcgtttctatatcaagatcctacggtttagaatgttcattgttttttggtcggcaatcctacggtagaaaaaataatctcgcagataaaactcattaaacgctgcgttcatcgttggaggataaactcattaaacgccgcgttttaccattcaaaaaatttgaaactaccttataaccccccagacgatgaccaacgtcgtcaacgtcggccaagtcgaatctatcg

SEQ ID NO: 12281 - DNA, 1382 bp, Arabidopsis thaliana landsberg
gttgccaacatttgaattcgatgtcctcaccttgataccaaacagctggctgctcgaagcttttgcgcgttgtttctaccaaaatggggaatcctactctttgggccttctcattacctcatttagtcattaacttcctcgtcctttagcctcctcttcgttcatcgaaccttcacacttttcatttctaaagcaatctcatttattaatagtcggcaacaaatcatttattagtgtataactactagattagttaccgttttttcttacactatagttaaaaccaaagccgcccaaatctttcaattccaataacttttagataccttatcgttgtactacgattaggattagtcattttccatgatatattatataatgtgaacaaatttacagtctgatgcaattaaccacgtgcgtaatcaaacactcacacaagttgcattttttacgatattatataggaggaaaaaaagaaaaaataatccattttaagataagaataaaactaaataaggaaaaagaaggataattaggtcatcttcaccttcctcgttgtctcctcacactgtaaaagacttgaaactcatataaaatctcaagcttctatctatttcttctttcatcatcatcatcatcactctctcttcttcttctctctattccatggctttagtacgtgaacgtcgtcagctaaatctccgtcttcctcttcctccaatctccgaccgccgcttctccacctcttcctcctcagccaccaccaccaccgtcgctggctgtaacggaatctccgcttgtgatctcgagaaactcaacgttctcggatgcggaaacggcgggattgtttacaaagtccgtcataaaaccacatcggagatctacgctttgaaaacagttaacggcgatatggatccgattttcacaagacagttgatgcgagagatggagattctccgacgtacagattcaccgtacgtcgttaaatgtcacggaatcttcgagaaacctgtcgtcggtgaagtatcgattctaatggagtatatggacggcggaaccctagaatcactacgcggcggtgtaacggagcaaaaactcgccggattcgctaaacagatcttaaaaggattaagctatttacacgctcttaagatcgttcatcgtgatataaaacccgcgaatcttcttctcaattcgaaaaacgaagttaaaatcgctgatttcggagttagtaagatcttagtccgatcattagattcgtgtaattcgtatgttggaacttgtgcttatatgagtccggagaggtttgattcggaatcttccggtggaagctctgatatctacgccggagatatctggagtttcggattgatgatgcttga

SEQ ID NO: 12282 - DNA, 721 bp, Arabidopsis thaliana landsberg
cacagcatcaattgcctgtaaaaattaagcaacataacgtcatcaaaacaaacaagaacttatatccatatgaagaataaacaataggaacttctgaaattacctccatgaagctcttgtagacagctaaaaacaaccgaagaacatcagggtgatcttgttcgacattaagttccttagctatgatctcctttccaaaatgctgagagtaaaacaccaacattcagaattcgaaattgacatattcatagaaatatcagtgagaatgagagcaaacactacaataccttgtaaacaagaccagcactactgagcttagtgttgaagccatgtccaaaaacctcttcaaaacctttctggtgatgatcataacggtcatgctccggatcataaacacctccaacatcaagcactgcatcaagttctgccaatatctacatgtaccgtacaacaacatagaatcatatcctcctcacaattaacccagatttacatcaaaaacccctaattccaaaattaagcagtcaatctctagctactaatcaatctcctaatactcatttcctaagccagagctacttcaggaggattgttagagttaccttagggtcacgagaacggacgatatcagcgccggagaatttatcgacgaggcgaatcatgaaacagccgagagcttcgtcgcagtgaaagcttccattatgagtaccaactttcttga

SEQ ID NO: 12283 - DNA, 649 bp, Arabidopsis thaliana landsberg
  unsure (1)..(649): unsure at all n locations
catattgatcttctttttttgtcttgtatcttccaattgaagttatcaattagcgattcctgagaagaacaaagaaggaagacaaccggcgccgtgaaaatttaccgttgaaagctatttggcggagggagtagctgcgtccccggcggattttgaatcggattcggtgtcgggttcgggtatcactggtttaatcattaatgtcaaggaagggaaatgtaaagtagaagattcaaaaggctacaaataaataacggatcaaatatgggctttaatagacctcttttaatgtgggctttcttattctcaagttgagcccattcttttttcttttagcctctaaaattattcttacatatgcaaaatgggagatgaaagacaaaccataggatgagaatgggagacgattcaatgcccaaagagttgccacgttcttctccttctcaagtgacacaaagtatgaaccaagaggagaccaatgtacatccaacgctcctgcacaagacaaatagcattacnnnnnnnnnnnnnnnnnnnnnnnnnnnnnnnnnnnnngagcatcctcattgcatatcttttatgggtgtctttaaacttttaaactacttagaaaagggggaaaataataaatggatgtgtcttaatagta

SEQ ID NO: 12284 - DNA, 881 bp, Arabidopsis thaliana landsberg
caatctacaggcgctgagatatctccgatccatccaaaatacggctgaatctggtcctcctgagcttcctggtaccaccaatgttgttatcgatgttgttgagagcaaaagccctatcaccggtcaaatcggaaccttcactaaagcagaggtatcactttcgttttcttatttcagtggattaggatacttaggtcttggcaggaagaattagatacatccattgattgatgcatagagttggatttgttgctttatgaggataattctggatttggatttcatatatagacttttgtatgtcatgtgttttagtgatttccagattaagtgttcttgtgagaatttgaaatgttgaatgttgttcataagtctaatgttcttgtaggctcggtcatcaagccttgaaggctctttgaagtacaagaacatatttgggtatggagatatctgggacgggtctcttgcttatggctgtgatcactctgcagaggtcggcttggggatgtatttgccaaggttcagagggcgtcctactccatttacgtcgcgggtttacctttctacccaagattggcttaagttttcgtcttataaagaacgagctcttggtctttccctcgggcttatcgctagcaagtatcatgagctggcctataatattgcatggcgtaacctgatagacccatcgcaaatggcatcaagatcaataaggagacagctgggtcataatttggtttctgctctgaagtacactttcaaatttgaccagagaaactcatctttgaggccaacacgaggttactctttcatctcgacttctcaaataggtggtcttgcacctgatagtcgaactctccgctttttgcgccagatttgga

SEQ ID NO: 12285 - DNA, 1193 bp, Arabidopsis thaliana landsberg
tattttctctcccttcattcctaatcaaggtctctctcttgtaatttttttcctttttgacaccatttttgggaaaaatagaaattaaaattatgcacctaatttcttttttgatgtgtaatgaaaattctgtggtataaattatatattgatgtagtgaatttgctgtaaaaatatgagtttattagtctcatcaaaacacctgattggtaaattatgtgttattaaaacgaaattaaactaacgtgttgttggcctagtggtaatctcccaagtggaggtgatgggttcgacagttttttctaaaggagatgaatttaacttggagtggatcccgcttgtgagaaatatagagcatttggttgaacttttagatattcaataattaaattaaaacatcaatgattatagtagcatttattaaattttctgagtaacttaaataatataagaaagtaatataaacttaaacatatttaaaatttcagcattttgatatacatctacaactagattttgattttaactgaaaaaagaaaatataaattaagaaattcaaaaatattacaaatatagaagaaattaagaaatattttttatgatattttattgtataaaattcagataataacaaaaaaatttctcccattattattattttttcttgtcaacaatttttctcccattattcaaattgatttaagacaaagaaaatattgttttttttttttaatatagttgtagataaggcccacgtggataaaagcccaaaaaggaataaagacgaaagagataaaacataaacccaaacttgctttcttctctaaaattatccaaagcatcaaatccttaacctctctgcaaattcactcctgaagaagaagaaagaagaaataaactaaaaaaattcctcctttttctggtcattgcttgtctaatgccaattcctgaattgggttctcttcatgggtgattcttctcttattccatcgccatgggagctcagaagagtatccacgctggtagaggtcatcactcttatcttagattctcgattttttttgaattttgtgttggttgttggatcaaatattaaattgtgatacttggtgctggaaaaatgggtaacaatttcttggaaattttaatttgtgggattttaaacctttaaaccaaatgggaggggctttttg

SEQ ID NO: 12286 - DNA, 625 bp, Arabidopsis thaliana landsberg
  unsure (1)..(625): unsure at all n locations
aaacacggattatttaaatacttagaaggagactgatatttcaattaatcttttgaatttgtattgtgtttagactattggactttttggggcagaagtttctgaaaatgcaattaaattcacttatatgtcagaaggaactcactttatagttaatacatagtgtctcccaactcccatcttgtctatggttctctctctcttacgactacgaatatggattaaggaaatcttgcaagttttttttgtctctaacaacattttcagttcatgtttcaacttaaattataaaatccttgttcaagataccctaacgtttttttttttaatgtaatgttaaattagattcaaaagaaaaatgttgtttgtacaacaaatgtatagtgtgtttgataagactaaatacatttcttagcaaaaattctaaatttaacttctagttgcatagaaaatatattctaaatttaataaatgcataacaaaacttgtgtaactgggggacagacctatcaagataaataaattaaatcaagtgacgactttagtcactttaaagattatntaaaacagaaaggactacagaaatttactaccaaacaaaaaaaaaattaaccccaataaatca

SEQ ID NO: 12287 - DNA, 567 bp, Arabidopsis thaliana landsberg
catgagtctttggcttcggacaccgaaagaagtgaggtgtttgctgctgaggaattggttgacacctttctattatgatcaggggctcttcctctattctccgagccatctctttaacaagcttgatcaaagcatgaaccgcttctacctcgttccaaaacccttcgtcaccaaccatctctctaacctccctagccatatgatcctccattaaaacaaccttgcaagcatcatcatgtactaccaactgaattgctctagcggaactcaacacatcttcaagaagattaaacaacggctcgtagaaacaaaccttgttactaccactactactactactacaacttctacgttcatcgtcgtaatagcaatgtaaaggcaacctaagcattatcgattcgccatgttcctgcaactgatacttacagtgagcgttacgtatctgcgcggtgttattgatgaacttactagtctcacacagttttgtgaaacggattttgataaaggaagctcttttacgaaatctttgatcaaactgtgagtccctgaaactgacaagaaagattc

SEQ ID NO: 12288 - DNA, 475 bp, Arabidopsis thaliana landsberg
cgacgttttgatgtgtttgtagaggctgaagcgaataaggccgcaagaaagtacgacaatgcctcaatagattaccaagtagagttctacaagaaggaaggtttaacaccttatacggaggctaagcttccaataacaagtggtaatggttttaaccatatgaggatgataaagttccacaattttcttctgttcaatgatcacaattgaaacatttcaaatcgtttggcagatgtccctgaaggttgtaccatcataagagaacacataccgatcacaaaccttttcacatgtgtatggttcaacgaggtagatcggtttacttcaagagatcagctaagctttgcaattgcgagagacaaaataagagagaaagttgattggagcatcaatatgttcttggactgtgaaagacgccactttgtgaaacagggtaaagccgaggaaactacagttttggttcgggtttgaattg

SEQ ID NO: 12289 - DNA, 741 bp, Arabidopsis thaliana landsberg
gcgtggcacctgacaatagaacccaggatgcttccagtggcattcccgttgttttcttcaaaaccagtgctcgtcttctattctcaaactcataaaaacccagcctttcttcaccctttggatagtactcaccatctgatcttcatctatcacccaaggaagtcatgatgtaccaagaagcagcactcctcttagctctcctcttcatctcttcgaatgtcgtcttatcggccccagtccgcgatggtagtaactctagttaaagctcatttcaactcaaatccgagattataaattaacatttcttaatattttttgcttcaggtttattaccaaacggcaacttcgagttgggtcctaaaccctcccaaatgaaaggatccgtggttaaggaacgaaccgccgtaccaaactggaacataatcggctttgtggagttcattaaatccggtcagaaacaagatgacatggtcttggtcgtaccgcagggttcctccgccgttagactaggcaacgaagcctcaatctcccagaaaatatccgtcctacctggccgtctgtactcaataacgttcagcgccgctcgaacctgcgctcaagacgagaggctcaatatatccgtgacgcatgagtcaggtgtgatccctatccagacgatgtacggcagcgatggttgggactcatactcatgggcttttaaagctggtggtcccgaaatcgagatcctgttccataaccctg

SEQ ID NO: 12290 - DNA, 843 bp, Arabidopsis thaliana landsberg
tgtttgttttcttttttgctaatccatatataaccgacaggcatcagattcagataattgatacaaattatagtcaaattaaaaaagtatttgatatatattctccatatatatatatatatatatatcgaaaattaatttgcaggccaaagcttgcatacaaaatgatcaaaccctaattaacaatcaatatcttctttttttgtttacaatcaatatcttctttttattcaccaattatttatgcatatgatatcaagataaagaaacttggtacacaattgtacatcatatatcttagaataataatattaaaacacccatacaatcttggatcgaatctttatgcatctatatataatatatcaacatgaaaaaggttgagaggatgacaccaaatgtctagctagcgcgcttctgtgtagttcatcagggttgggagttgtggtaataacaaaggtaagaggggtcagccataggagctccaatctgagagtgaggctgaagaatcctcacctgccgtttcaagaacttggtgtaacggatggcttcgtcgagcatggaagctgtgtccatcttcgcaccaccaggcacgatcctcttgagaattcggatcttctcgctgatcctttcccgacgccgacgagcaaccaccgtctgaggatcgtcgcttatccttacgttacggcggttcggcttaaggaccgtggcagggtcgatgtctacgggctgcatgacggcgatcatgtactgcatctccttcatcgcatccatgtcttaatcgtactcttcgtcttcgtccaagtgaaatagggtttcgggaggtggatctaacatgagatg

SEQ ID NO: 12291 - DNA, 1076 bp, Arabidopsis thaliana landsberg
gaaaaatccggagcacggttttttttccttttcggaccaatatgattgtgaggggcaaccagttctataaccattcctgcagcagaaagctctccaacctcggctaacacaaaaccgattacttgatttattgtaacgcagttttagcgtcgatggcctgtctttttcatctattagaattatctcattgcacagtttactcgaaccacttgatgtggtaaaacctcttggaagatactgcaaagaaaatttccaaagttgacagcaatactaatttcattccataaatataattctaaagaagttatagaatgaaggacttattacaaatgaatcaactcgttggtttgaggctgtaacagggaccacaaaatcagtgtccactgattaacactcattttttccgtttttcttcaccgttctagatcttgtaacctttcctgaatcagaagcagacccacaagtaaacatcaacagtttcctcttttcgtatttaacttgaaagtactgtaaagaacttaacttacccgtcgtgtctttgacatctttctcgtctctctgtgagtaaagtatctcacaaaaactcagtccaaaaggtgtgacatgaaacaagagatttccttcgtgtctgaaaacaagaatgtcgtcgacctgaagattgtgagccaccgcaaattcttcccaccctttggtcattcttcggccgtctatctttattttccaagtgatctccgtggcgtctgatctcagttctgcagcgtttccctcttgtcttccctctaagtagttcgagtaaaaagctttaggaataacctgcaaacaaagaaaaacagagtaagaaaaacgttaaaagaaaatctaacaacatgcagagagtaagagagagagagagagattacaatataggtttcgaagcctggaagcataggcttgatgaagtgtggcttggccgaagaagagaacattgcatcagtcattgatgaacaaaatgtaaacaaaaatatctcaaacactcttcagatttcagagaacatatatgggagaaaaagaacacaaagcttgtcggggtcttttcg

SEQ ID NO: 12292 - DNA, 1766 bp, Arabidopsis thaliana landsberg
gaaaattatttggaacattccaggtcacttatattgacatacggctaaatttttaaatagaaattcttaccttactattaagttttgtagtgagttctaaccttttgtgataagtcccatgtttgtgttgatttgttttaaagataaaactgataagataaaacatagaatttaagatgaaacaaatcaaatgcttaaacatcatatattaacatactatgaaaatgaagtatgagtgtaacattgcgagagatatggaagtcatgagtcatgacaacaattgctatgacatactgtatatctcagtatatgagtgaagctaaccaaaaattattcaacaaatctatcattatatatatatatattctaaattggttccacgacaaaagaaacaaaaacggaagcaaatacaatcacaccattatataacttggtaatttttctattgttcttaatttttataagataaaaagaaaacactttaaaaaaaatacgaattaaaagatgaaattctttataccttaatttgttttgggtggttaaactgaggatctctcgttcggttgatcatatttttagaaatggaaaatattttataaataagtacaaccactgagaccgactaaagccacctaacagaaataatcaagaatgcttcttataagtcgatcgaagagaaggcaaaaaaagaagcaaagaacaaatttcttgttgaaaggaatcgatggctcttgataccataaagatgttttattcaagtgatgattttttatacaacagagaggaatttatacagaggaagagagctagggtattacaagaatagttaatgagaatactcagtttgtacataattaaacccataaagtcagcaatcaaggatattgtaatggaatcaatcatggacatgattgtatccttaaacgtttttacgcagacactttaacgtttttttttttttgggaaatggaaaatattacaaaattaagtttaatcaatggaggccgattaaacctgcttagacagacaaagagaataaaaaaatatctgagaacaatttagtgtttaattttttgggaattttttgcatgtactcgaaagcttaattcaaaacaaaatatcacatgacttgaagcaatattacagattaaaggtaaggttaactacaatctaatatgctttgtaatgaacatttttaagagcagtgttttaaagtgtgacatatgaagggatattcaaaagtgaagagacacaaaattttcacttttgggcctgacccggtccaaggaagaccataaagacaagtccaaatccttttgggcttctctgacctacaatggaaattttaaacattcaacgatcaaaatgttattttgttacaaagtccaagttaattcaaatgtaataaaaagtaaaataaacaacacacatcttaaaaaaaggaaaaagctctcgaaataagtaacaacattacaaagataaaatatagaatactccgaataaatactggagtcaatatggaaatgttttatttcaatttgtttataaaatatgggagtttgttttaaaatattttatctgatatttatatactgtccaccaatatctgtatataaatgaaattttatcaaatttggacattatataattaccattgaattattattatttttatatttttttggcaaagtgtcatcgaatatccataaataaacttttttttatgaaaattataagtaaatgtaaatgctattaatggttgcttc

SEQ ID NO: 12293 - DNA, 975 bp, Arabidopsis thaliana landsberg
tttcatgatgcatttgagatctttcaagttgcctttgaggatctcaacaacctaattaagacaaaagatatcaaaataaaggcgtggtttgtttacttgttaaacaagaaagttagttatgtacctgactcatttcaggcctctctatcgatgattgttggattgataacgcagcagccaaaagcacaagttttatctgcctccattcgtactcacccgccagagatggatcgattagctctctaattttgttcttcttcatcaatggtttagcctaggaacacaaaaacaaaaggaaccatgaacaaaatgtgggaatggttttctttgctctagaacataaaagcttaaactcaatatagctaaactcacccatagaacaagactttgcttggagtaatcgagagctcgtcgtccggtaacaagttccagtaaaagtacacccaaggcgaatacatcggtcttttcatctactatcccatgtgttaagtactctggagcaagatacctgaaataaaagatgcaaactatatctagctctgagactcccttggtaaaaaccaatatgcaatgaagaatacacttaaagcgtagactcaccggaatgtgccctcaaatttggaaacaatgtggtgtgtccaattttcaggtaaccacttcgcaagcccaaagtcacatatctataacccccaaacattttcattacaaggaatacattaaaagtgtatgttttctccttaagagcatcatttatcatacctgaggagaaaaatcatgtgtgagaagaatgtttgcggctttgatatctctatgtataattctcctatgacatcctctatgaagatacactagaccctccgcaactcctaatgctatcttgtacctaatgctccatatcataatctccttggagcctataatataatcaagtaatcaacaattgataaatattttaaccattaagatgtaatcatg

SEQ ID NO: 12294 - DNA, 1383 bp, Arabidopsis thaliana landsberg
acactatatattcctctatacattttaggggtgattggattagacttttaaaacttacgaagtttttaaatgttttcaatgctttttatttcaatcaatttattttgtctttcatatattttaaagcttttgaagtctcttttttattttatactcctgttttcatatatttttaataagtcgggtatatgtgactttagaaataaataaataaaaagcgtatagttttcttctttttttcttcccagtatgtatataaactctcataacattcacaaataaattaatttttgaaaaattttaattgatttgaaaccgatttttgttttgttcttttaagatccatttccccatatatttgatagttatttaaaatcgtaatttttatagtcatagtctttaccaatcgggtataaaatttatgtagttaaagtctttatagcaaaagtttctacaacaaaatttcttacagtcaaaatctttacaacaacaattaacagtcgttatcaatccgcccctttattggtaatatacaattaattatcattcagagaatagccaaaaaaaactcaaagatagaagagaggagacatgatagaacatagagaaaagatggtggtcaagaagaaaaggaaaaaaaagagacaaggagaggaaacatcggagaaaactaagagaaggaagctcgacgatcaaaaacttcaaaaaatagctaaaaaaaatagttaaaatctactattttaaaatctctttgcttttttcaggtttctcgaaatttgtatctgagagagtcccgtacctacgcttttgagagagtctagttaatttttttcattttaaacatttagatgctatattcttacaccccacattcaagcattcgatttcaaaatccaatctacgttaagtaatattatatgtcagttcaaatccattaaaaactcaaatccaataacgtcctcttagcaacatttgtatgtggcttattcacataaagcgtctttattaacagatagaatatcctcaaatattagtttgaaatactatggatattcttcatgtatctagaagaatcccataacatattgtatctagaagactttcaatatctttcacggtattagagcgcagctctttctaaatcgcttcttctctgattaaatctttttcttctctctttctcgtcctctgttctcttcctgttttctccaaattctttcaatggccgccgcagccaatccctctaacaagatctatggagtctctaacatcaagtctcacatccctgtgatttttgatattgaaaaaaaacaactaagatacgtggagagaactttttctcacccactgtctcagctattgacgattctcggacacatcgac

SEQ ID NO: 12295 - DNA, 1049 bp, Arabidopsis thaliana landsberg
ttattacaaaattcaagaccattatctgtccttagaatcttaactcttttatttacctgattctcaacttcttcgttccattcacaaaatctctgaaatgtctcatcttttgttctcagaaacattaaccacacttttcgagacttggcatctagtgatagacagaaaatactgctctcctgacaatgatggaggcacgtttgatgaaccccacaagtcagcgtgaacataaccaagcacttcttcaggatcatgtttaccaacattgaaactcacacactttgatttcacacaatgctcacagaagctcaactcttttacatctttcttatcaagtaaaccttttccagatagaatcttcatgctgttcaaactcaaatgaccaagtctgctatgccataaatctgtactatccttggttttctcaacaatgcaggtttcctgcatcacagtttctccttctaacagatacaagccattactaagaaccccggttaaagttgttgtttggttcttgaagtatctgaccttaccatctccaccctcatgcccaaagccaagcttatccaaagttcctgtagaaatcagatttcttctcaactccggaacatatttcacatttttcagaaccttgattgaacctccaaatgtgttaatacgaatggaaccaattcctcttgactcaactgagtgatcatctccaagtagaatctttgtctttccactttcctcaaaatctcttctagaactcatgtgagaagtacaccctgagtctagtatccaaatgtcatttatcagcttgtcactgacactcaatgccttaaaatactcaagagcttctgtaataactcctgcttctccaggaccttcattttcaagtttctttttcctagcaaaacaatccttcttcacatgtccctcctttttacagaaccagcatgtcagctttgattttgacttgctcctgcttctgcctttcccattctattgtgatttctagactgaggtcttcctctttcagcagtgtacaatacagttgatgagcctct

SEQ ID NO: 12296 - DNA, 959 bp, Arabidopsis thaliana landsberg
  unsure (1)..(959): unsure at all n locations
ccattgtttagcttaatcaagtgagcattgtaattaccattatgtagaagattatattttcagtaatttagggtctgttatgtgtcatctttgatatgagaacagagtgcttaaatgatcatccgcattttacatttacatgttattcttagattgattatgtttatacttaggtttgatttccaaatcgtgaaacttgcttgtaatggaaaaggttgcttttttacgcagtgtttagcttagtcaagtgagcattgtaatctcgcagtgcttctggattagaaagttatttaggttctcttatgtgctatctttgatgtgagaacagtatgtttttgctttgttactaggtttgtcctgtctgcacaaagaaggtgggattggacattgttggccatataacaacgcaacacgggaacgtatttaagatatccttttgaaactttgatattctcttttaacggttttagtagagtttgaagagtcattttgtgtattccttgacgtgagagattttacgtgcagcgaagaagaaggttgcgtaaaggtggatatagctctacctatcttactcttaaaaaagagcttcgagaagctaacttacagtctcttggagggtcttccactttcattccctcttccaatatagattctgatcctctactctcatcctttatgtttaaacccccttcggctatacctatcactgaaggagactcggtagcacaagtctcacctaaggacacctctaaaaggtataattccatactgtattctcaaaaaaatgtgtcgcttccgtttgttttctcacagtgcctgtttttatcattcctttacagcaaaatacaacaagaatcattctcaaacgaagatcaagagaaggcaaagaagagcaagtttgtgcggngcttgctttggtcaaccatgcttgaagacaagttctaatttatctagatatc

SEQ ID NO: 12297 - DNA, 817 bp, Arabidopsis thaliana landsberg
tgaattcaactttgacacatacctgttctgttactgcaagggctcaatatggcaaacaggcgactgcaaaagtaatagctgaggtactgcggggcaagtattctaacgggtctggaggtccacgcacggttgaaattccggatattgttttatctgagctgaaagtgtctgtcacttacatgaaggcctggtatgcacgagaggctgctatcataaaaagcagaggcagcgaagaaagcagctacaagctgttggctgtttatatgcatttgctggagcaaggaaatcctgggacaatctacaaacttgaacatacacaaaaggcaagtggtgtgcaacagttcaagtacttgtcctttgcacttggagcgtgcatatcgggaataaagtacatgcgcaaagtaattcttgtggatggaactgctataaaggctagatttaaaggcgttttgttggcagctagtatgcaggatgctaatttccaagtgtatccaattgcatttgggattgttgatggcgagaatgagccatcatggacttggttctttcgccaacttagtaagatagtaccagattcggaggatttagtacttgttactgatagacatcgagctatttatgctgcagttggtcagatttaccccaaagcctttcatggcgcatgtgcagttcatctagaaagaaacgtcagagtcagatggccgaagcatgggattccaggacttgtcgggaaagcagcacgggcatataatgttgggcagtttaatgagtactataacgaaattggcatccgcagcagtaagtgtcatcagtactt

SEQ ID NO: 12298 - DNA, 888 bp, Arabidopsis thaliana landsberg
  unsure (1)..(888): unsure at all n locations
agttctcgtatgtagaagaaataaacaattttgaaagattatatatatgatactattgtccattgaaatcatctaactgaaacttttttttttctttttttcattttagtttctaagggatccttctatcttgaagcaaaaatgcgaaccttagctcatcggctggtagagaagttatggtatttgattttgccaacggaaaattttatagagtttatcaagtcattttcagggctactctttgatgctgcggaattgggaaatgttgagtttttagttattcttattcgttctcatctagatctgctatggatagttgataataataaccgaactttattccatgttgctgctttatatcgtcatgaaaatatcttcagcctaatctatgaacttggaggcatcaaggatttgatagcatcttataaagaaaaacaatctaaagatactttgttgcatcttgtggcacggttaccacctatgaatcgtcaacaagttggatcaggagcagcacttcatatgcaaaaagagctcctttggttcaaggtacgccaaatacaatttagtaatggctaatataacatattttagacttcggtagaaaatctcctggtattctcgttatattggtaagttactatttgaggtagtcttaaaatccttcaaattacattacaggctgttaaagaaatagttcctcgttcatacatcgaaaccaaaaacactaagggcgaactagcgcatgatatattcacggaacaacacgaaaacttacgcaaagaaggagagagatggatgnaagaaccgcgacacgatgtatgctcggagcaacgctgatagcaactgtggtctttgcagcagccattactataccaggtggaaatgatg

SEQ ID NO: 12299 - DNA, 895 bp, Arabidopsis thaliana landsberg
tctatggtacattaaactaaactcgggggcataatttacatatatccgctagttcttagtgttgtgtcaaatatatactatctggaaagaacagcttgatttaagctctgagatcttattgtaaattgtgtatgcaggtattgaaggagagttttaaagtgtattgtgccatcaatgaaggaattatcaatctagtagagaaggtaggccagttttttcttttcccccagagttactctctcccttcatgtgttttttgatttcttactgttttatacatgcatatattgcagttctttgaaatgccaagacatgaggccatcaaggcccttgaaatatacaagcgtgcgggtttgcaggtaatgttgttgggttattttctctgttagatcaatttagatttcacttaacaagggttagtttatcaatgcaggctggcaacctttctgccttctatgaagtatgcaaaggattagaacttgcaaggaatttccagtttcctgttttaagagaggtatcagataataacttgtttgttacatttaaatttgtgatggcaggtactttatcaatactaaataagtctatttttgtttttttcaagcctccacaatcttttcttacaacaatggaggaatatatgagagacgcacctcagatggtcgacgtcacatctgggccactggtacatatatactctcattgtggtcctactcctacagaaaccatgatttttcttttataacttatttctaaaaactttgtcaacatacagcttctgacctatacgcctgatgatggtcttacttctgaagatgttggaccttcacatgaagaacatgaaacatcatcgccttcagatagtgcccgtgttccctcttgagaaacgcaactt

SEQ ID NO: 12300 - DNA, 422 bp, Arabidopsis thaliana landsberg
aatataagacatctaattgttgtccacaaccttaagtttcattggttgtgttacaatctttaaaaatttgagacgaaattattttctcctatagtcttcatcgcaaaaataaacagttaagaaagctttcttttcactttctccaatggcttattctaaagcatgttataaactcaccaccattacaattcttcttctatccttcacattaccctctcttgccggtaacgctgaaaacgcagatgtaagtgaatgcaaagctgaatctggagatctatcatgtcacaacaacaaagaagcacaaaagcttaaaatcattgcaatcccatctatcttagtggcgagcatgatcggtgtttctttaccgttgttttctcgttccattcctgctttaggacccgatcgagaaatgtctgtgatcg

SEQ ID NO: 12301 - DNA, 1389 bp, Arabidopsis thaliana landsberg
ttggtcagaatattgcttaaaagcaattctaaaagcagcattttcacaggtgaaacctgtggtctcctttcatggggcttcacactgccatcgattctgcaaacctcaaaccccttctcactgaagtagtaatccataatgtccaaaagtttcgtccattgggagaagataaggacctggtcatcagcaaatggatcatagaagttctcacagggaaatgagctactagccatgggtttgtgaaacatactttgtgattattggcaaataaccgaacaagtaatctctccaataagcggactttaccacactgtccaacaatctcttgaacaggagggtagagatctgtcacgaaatgaaacaattagacagaacagtctgacagaagtttttcttacgtttcttagaagaaactgacatacatgaaccatctatttgcccctggagaaggacaggagggttgcagctctttcgaagttgaccgaccaggttgttaagctttcccttccagccttgacctgaagtataggggatgaacaaatcaatgcaaaaaatgacataattaaacaaagtattaaaaaaaaagatagatcatgtacctcggatggcattctctccaagatgtgcttccaacgtgttattcaccagatgttcctggaactttttctgatgatcagtcattgtagcatacattataatctcctttttccgtggaagtgagagctcaacatcacatttcattcttcgaaggatgaatggtcgtagtataccatgaagtttggaaacaacctagacaagatgtacccttagcataagacataaacacaatcaaagaaataaagtaaaattgatataattgtacatacttgagctcttcttttctcttcttcttccttggttgcttcgtttttgttcttttcagaaaaatcaaacctgtagagactcatctatcagttagatactaagaaaggaataaatgtcaaaaagctgccaccagtgttaacaaaaaaaaaaaaaaaagaagactagttagggataatagtagaaaaggaccatgtttgtaccatgattcaaattcatcatgtgatgtaaagatgtcaggcagaataaaatttaacaaagaccaaagctcagaaagattattttgcagaggtgttcctgtcagcagaagtttgttatccatcttcaagtgttttagttccctcaacaatttacacttgtggtttttcaacctgtggccctataatatacaagaacaaaattatcagttagagagatcatcttgatcttcaaagcctagtacattgaccaatctcggaatttacctcatcaatcacaacatatttccatggatagtgccgcagaattcttttagcatcattcatggca

SEQ ID NO: 12302 - DNA, 803 bp, Arabidopsis thaliana landsberg
ttgattcagctccatatatgagatggagaagcacttttttatcgaaatagctgcccaaatatcccaaagcacttctagtgaaaacagtatgtatgccttctaacacttggcgttgaaatgacgatgctggctcagttcttgccttcttagctaattttagtctgactttgagaacgagttttacttattttggtagatggggacaaagatcgttatcaaattgaaggattgatggaaagtcctgcagtagatgatgaagtagattgtttttcgccattgtcgctgaatgcgacctccataaacgtcgaagtctactataacaaggctgtgaactatacattgatggtcacttttgtatcctttgttccaatctcttttccattccatcagaaaatgacaaacacatggcagttttagcggattccttaacttgttattgtacctaggtctcgttcctccaggttcttttattgatccggcaaatggagcacagtaacacacaatccgtaagattctcattgtttgtttatctgatctttctaagagaagagactggatgctaacttttggatgactcttcttgtatacaagggtgctgcaaaggtctctatagtaatgatcgggcaacaagccatcatggattcttatttatgccttttacatctcacagctgggattttagttggtatgtattttaaatataatctcgctattcttcacaatgtgccctctttgttttgataattatcttcatagcttgtcatactctgtctaagaacagttctcaatgattgtgatggaaa

SEQ ID NO: 12303 - DNA, 1054 bp, Arabidopsis thaliana landsberg
tctgtttgtatgtaaagcttatgaaatcaaagttttatttgtttttgtgaatctttccgtgtcctggatttttgtgtacctactatgtaacatgttcttttgattcatttactggttgctagatttttggttactagttgctagcctttaaatttgtagtagaatttcacaagcttggattagtccacaaaagaagtataactttatataataaaatatatctgacgttataatttgttcattcgaattcttctctaggacagaaataatatcaattaatcatgttctagttttcgcaccaagaaattgtaaattataaatctattaatcttgtcatttaccacattaaaaactttatattgtatataaaaagtgacattttgtatctatttattttgtcaacggcaacatatttattgtggaaaaaatcaaaaaagtttccaaatattttcttttgcaatttagctctctacatcaaataaatgtaaagttaatactccaatctcaaaagtcacacccaataaaacatttgaacttgtacagattttacaaattgtatgtctctatatatagtttatgaaaactatgtcttttgtccattttcccggtttgtccgtggatgtggcaagttgctttaccgcgcatgtctcagagttatggaactgccattgaactatcttatgtttgttcttatcaatgttttcaatgtcgtaaacttccttgctttagatgaactcttaatctttgtaatccttttgatcttttgaatggaaaacaaagtttttgcccaaaaaaaaaaaatcatgaggaagacgaagcaaaatctatcaaggaagaggtctagatggagaacgagctgtttgtgatctaatgcatgagttctgcatccgatgctggtgatgtcactatatccttcgacagcgatgagtttcaatccaatcagtggatggctacgaaaacagtgacgcggatggctgaattctctggcgatccggattttggagagagaacagcgaggttctcgtgttttggttgccgaaataataattgcaaa

SEQ ID NO: 12304 - DNA, 1392 bp, Arabidopsis thaliana landsberg
cgaagaagattaatctaattttgtttaatatctacattctacaattagatccttatttttaatatatcaatgtataaatattggtatccttaccatagtaatgaatattgcgatgttttttttatatatatatacaaacctcacataagacttttcttcttattttgtaacaaaacttttgtacaatcaatacatgacaaatcatttttgacagatcttgcattttattcagattttcaaagactaagatttttatccataaaatgcctaattttgtaaaatccataaaagttgagtcggtttagaaaattgatttcatcatctactctaaaagccttaaacaaaacagtatcacaacgtttggtaataataatgtcttataacaacggtttagaaaaaacaccaaaccggttttaaattggttctcatcagttcttctttgtgagattaatgtcttgaggaaggagagtgtagtcgatgtgaaggtcctccaacattctcttaatggccaaagaaagttcggttcttctaagattcctctctctgttttcctgaaacgtgatggtgtggtcactgtatagggccatcttcagcttgttcatgttctctatctccttcaccaccaccgagtgaaccggtgcccaatgttgcgggttctgctccaagtacctgatccacaaaccaaagaaactcattcaaagacaagatctttaggctcagtggttaacaaaacagattcaaggtacttactcggcgattctttctttgagatgtgctatcttagagactggtgtcgagaaagagatagagaattccactgtttctcccatattcggacttctgaagtaattgcttatcggtttcgtggccaaaacagcgttcggataatacactttctcgttgttaagcttcaagaacactgtcgttaagagattcatttcttccaccagcatctgaaaaacccccacaagaatgtgtttgtatagagtataaaaacatatatatgagtttaaaggatctttgatgttgaagtttaattaccgcgacaccgtcaacaacacatcgatcaccgacatcataaggatgcatgacgaatacgaacacaatggattcaaagaggtttttgcatgtgcttccgattataaaagccagagccacgagttgagtggagaagaacagctaaaccttagaccgctgtacttctagaaggagcagccaaatgacaacggtgaccaccatcaagattgctgtcacaagtttgattaactgcttaaccgctgtttttgtgtcgtctaaggaatgcgctatagctatacggctcgtgtacaccttatcctgatcaagatgcaacacatcataagtcgttaaaaccaagacacacatactctcaag

SEQ ID NO: 12305 - DNA, 726 bp, Arabidopsis thaliana landsberg
ggttctcattgatctcttcgtcgtcgattacgaagaattttccgatgggagaggggtgaacttcatgaatcgacgaaattggattaacctagaagacgagaggttgtttgtgaaaattatgagaatttgggggaaactgttttcgccttctttattttttattttaaaggatattaaatgtaatgggctcgaaagtagtgtccaacgaccataagccaacattattgtacattcttaatttcatttaaacctttgtctctctttcttttcaatcttgtttgaatggttatcgcagtcgaggtggacaaatccgtttgcgattagtccgtttcatctacaagatggacaacaaaccgctacaaatcaattatatttgtatgtaaaaacaatccattgttagtttacaatgattttttaggtaaatgagaaacgttttaatccgtatacggatttgttcgcttcaaccattatattcatttgcatgaagactgaaccgcactgtgtgatataattttaatagtaaaacaaatatttattactattagaatctcatcgcactttatcataagaacatttaacataaatattttataaatatgattatattcaatcacatgattaaaaaaaaccagtttttagtaaaatcttttcatcatttgccgataacgtttaacaaattatcatgtactattttttttttttttttttttgctgaatttgatttta

SEQ ID NO: 12306 - DNA, 889 bp, Arabidopsis thaliana landsberg
  unsure (1)..(889): unsure at all n locations
aaaactaaaacaacatagaaaccatactttaaagaaattgagactagcaattgatttaacatgttacaaacttttttttgtgattaaacatgttacaacgatgtgatgaataaatatgtcgaagttgtgagagacgacagagtaaataagtttaagatgaaggtctgggatcaaaaagttatatatcgaatgttatatacttatatatatcaagcatcttataataaaataaagggaatacatatcaagtttaaaaacaaatgacagtgaaatatagtatatagatgtaacacgttaaccaccaacgtaccaataaaaccttgctaattcggaattttgataagcaatgtttgttactcgaaaagccgaattatatatacaatgaaaaccactctacttaattagtttctgccatataacaattataaagagattattgtgtacgtttctatcagtttctgtaacaatttcatatttaatcatatgttgataagattatatataagacgtccacgaaatatttactctacttatgttaataatctctccactgcaagcaaaatatataaaaggcaaattaaaataaagtgacgaattgataaggatggataaatagagacatcgatctgtttctagaagaataaagaacctgaaaagatataataatcaattgaggaaaagaatctagagagcagagatacaatgacattcataaataacgctacatacatgtaaaacgtaactgaccatttcttttcttttcttattaaagattgaccacgacgnatatatatatatatatatatatatatatatntttttttttttttacgacgtttatatatgtacatagtatataaggaaaacatactaattcattaactacttc

SEQ ID NO: 12307 - DNA, 511 bp, Arabidopsis thaliana landsberg
aacgttacttgtcgtcacatttcataatcgacattcttgctgttcttccgcttccacaggtgattcattgattggttttgtttgcatttccaaatcattagcttacttctttgagtaatgtgagtaattgtgtttttcctcagatggtgattttgattatcattccacatatgagaggttcatcgtctttgaacacgaagaatatgttgaaattcattgttttcttccaatatataccgaggtttataagaatctatccgctctacaaggaagtgacaagaacttcaggcatactcactgagacagcttgggctggagctgctttcaatctcttcctctacatgcttgctagtcatgtgagtggcaaattggttttaaccgtcccaaccgttctaggatcagagctttctgatatataacatttttggtcaaaaccggtaaatgtgcaggtgtttggtgctttctggtatttgttttctattgaacgcgaaacagtgtgctggaaacaagc

SEQ ID NO: 12308 - DNA, 612 bp, Arabidopsis thaliana landsberg
gaccctgcccaggtccttccaatcgtggatctgagcgggtgtggaggtgctccaatcatactcgagcagattcggacagaaagaggggcaggttacaaatgatgaggttgtcatcactcattcccccaagctaacaggccagctaatagtcagcaagccatagcttcggtttggtctcccctgagtattggtgatagtagtcggcgcttggaaccgagccaggaacggtgccctacagatggctcagctaaagacttgcgaactcagtggctcgggagaggggcttcaatcttccccactatcgtagtgaccaccccaccgagggtggtagcggtgtgtggtgtgttttctgtcgttgtggtgtagccgtccaccgagacggtcgtgaacaccgtgattctgacggttgtcgaggaggcggtcttgtactgcgggggctctctccctagtgggcttggggtggatcaaggcctccctctctaggagagagggtcttgtctagtgctttaaggagggctcccgaaccaagaggcagatctctcggcctgctagaccgcagacactctagaagtcccagatctcacgtggagattggcgtcctcggtggtggat

SEQ ID NO: 12309 - DNA, 726 bp, Arabidopsis thaliana landsberg
gcatgtttagtttatttgtaaatcggtccaaaaaatagactcaattgtgtaactggtaacgatgatctatctaggatatagtagccccggtggtgacacacccgcccttgatgttatagctgattccaacaggactgattatatatgcagtcatctctgttttctccgtaaggccatcaagtgagtggattctactcttcttcctctcttcttctacttaatttatatatatggatgtatgatcaacaggaaaattgtctctaatgattgttcctgtttttagggagtctggttgcaatgtgaaaggatactttgcttggtgtcttggggataattatgaatttggcaaaggatttaccgtgagatacggacttagttacgttgatttcgcaaatatcactgctgatagagacctcaaagactctggaaaatggtataagaatttcttaaacggtacaaccaaggtccctgatgagaaccaaaatttcctccgctcaaggctcttcttcgagaaccgtgatcagaagaaagtcgcagatgcatgagtgaccatggctatcgagatcaatcatgtctcctttttctacttgatccatagaaaggagctttcctatcattctatgcataattcatctagtcacactgattttggagttatatagtttattcatttggtgttcgcttggaacttattttgaaaggctttgttaatgctcgggagctttg

SEQ ID NO: 12310 - DNA, 1111 bp, Arabidopsis thaliana landsberg
ctactagatcagttaaagaaagagcatatggaaataaaagatgttttttaaactcacttgtaccaagcctacccaccaaagtgctctaacaaatatgtataacctccgaaacctacaccattcatcaagcaagtcatactcccatttcttgacatgcaaatattctcaaacaaatgatagcagaaaggcacagaaccaaaaggtgaaacaaaacatagtggataagaaatctattgctaatggatcatctgttattaagaaaaggtgtcaacatggattcatttcaatgtctatagaaaatgaattcttccaattcagacagctaaaacctgatcgagcagatgggttgttcaatatctatctaataattaaagcagaaagtaaatttaggagcatggaattggattctaaaaaaaaagcaagcggggaaacgaaccagcgcgggtgccattagcagcagcgcgcttgagacctttcttcttcaaaatgaagctggaacctatgaagacgctcgacgacacagctaatatcaaacccatctcattgtccgacaccatctcgtttatctttccttattattgtttgcagcaaacaaggtgttaattcaaacagaggccccaaaagaagccctgaatcgtatcccaaaaggcaattaatcgtttggtagaagaaatctgattgtttttgattttgatgatcacaaaatcccccggtacggaaacaggaggaaggaatgagaatcgcaggatttttggagtcgtggtgaaataattcaaatggggggagagagagaaagagaaagagaaatcccccattcctcctctccagagacgacagctcatgagagatttcgtcgtcttttgtcggaaactattaaaatataatataaatctgctgcttcgcggaccaccttcttatattagccagtagccatccgtccgcttcttcatttctgttgttaatcaaatctttaatccttgtttatttatagatgtaagatgagttctttaatccttgttcacaaacgtgatattttccaaaaaatgaaaatttgtgttaacaagcaaataaatcacaccagctatactatatttatttctgggcttttacc

SEQ ID NO: 12311 - DNA, 1207 bp, Arabidopsis thaliana landsberg
tcttgaattgtcgtagaggttatttccgatcatttcagcggctggtgaggaggaggagccagagaggagcatggaggcagcggctgatgtggtggaagccatggtggtggctgagagtggaagagagtggctgtgtgttccttcataggttgtgattagtatagacatgtcatctgcacatctttggacctaaaacatacatcatcgaggacaaatagttagatcgtttctttttatgtgtacactggtcacaaatgtttcttactttctataataccatggaaacgcaaaggcaaacgcaaaaaataaaataaactgaatgatacatttttatcttaaattatgttgttcagtttaaattgaatgatacattttaacaactaaaatcagatccaactcaaacggaaatgagaataaaaccagacgaaaaattcacaccgattttttattccattcttaaaatagactatatagaatacgaaatatacctgttttctaacgggacatccaggtgcaaccgtgcagcgataatatgctcgtggacatggatttcctttcgcaatcttttgtccatattttctccattgacaaccatcattcatctatacaacataattaataaacatgtccgaatcaacattagtcacatataaataatcaaatcttttaattaacgttatagatcaacttatttaatgtataatttaaaggacgtaccgttggtgtgtcacatcttgctctaacacaaactctagctctcttaacatggttttgttgaccggcctcaccgtcagcatcgccaccggaggctggtgctggagagcttctcttccccgtaactttacctggcgcccaagcttcttccgagccagaatttgcacgattctccatagataaaccctctttcggttcacctccgttgccattattgatccctaaggtcaagccggccttagtcaactcttcgtcagcgttgacttctgcgctgattgcgtccgttttctcttcccttttggggacgctatcacttggggaagaacttcttctccctagtgaaagcgatacaagctcgcgttcttggtcaaaagaactcaaatccgtcgtcgttggcttgggatgatcaaccatgttttgatttttagttgcggtgtttgaaggttcttgttgaattatgtcgaagaatctgagcttgagagatttgtaatcc

SEQ ID NO: 12312 - DNA, 1064 bp, Arabidopsis thaliana landsberg
tattgtatatttgaactacatgtgaatacgttagaaacaaatattgtcataaagaggccataattgtcataaattattataaggtcacgtaattaacttattaacgcttcttcaaaacctctatggtcgaggaaaaaggtcaaactaaacctaaacaatttgcttgatgttttttccaacccaaactctagcattttgcatttatgaacttgaaaagatattttttaaaattatcaatttgaattatataaccgttaaccgattttcacattgacttaaacggacctgagtaatacgagaccaacactctgacaacttaaggcgtgcatgggataaccgtgatgcactgatgaatgaaattgtcataaccattgcccaaagtgtaccaaaataataggaatcatggagggtttgtttgatggattcaagcaatcgtggctagtgcgtaaagttggccatgtaatggacaattatcctaagggtaatcataattatagagagtgtgggcagcggggccacttcgtacggcagtgcaccacctccaaaaaacatgtgaaagtaaggagatcataacttgggaattctaccaccacctgagtgtataaagtagcaaacgaggataaggcaaccgattgttggtaagtcttcttccaaaaaaaacaaaattttaagttgttttcttcctttctatgtgttagtagagcttgtagttgttgtatatttcttcgggcgctgaggaggatcatgcaatgttgtttcactatatcacttgtcgtagatcctacaacagctcctatggccacttctggttatgattcgagtccatcgccttgtgtcaaggaggaggtttgagataccatcgccttgtacatatctaccttcagggaatgctagggaggagcagagtatcacacgtgagcacatcaggagacatcatggacagtagtacaactcagacgattgagcagatatgtagagaacaaatcaggctggcttacactaatcgctatggattgcttttgtaatcattcggtgtcctatataccgaccagtatacgtttact

SEQ ID NO: 12313 - DNA, 550 bp, Arabidopsis thaliana landsberg
ctagccaacagcgcttcaaatagaggaagtaactaatttcagtagcttgggtatagtgaagtataattaccttccaccacacatatccgtagcctatcaccccaacgataatgatcaaaccatagtttctaccacctgtacattgaaggaaagtgttaactgttttcttccgaattgagatcaacagtaaacaaagaatgatgttactctaagtctctaatgtaatgccttcctaaatgctacaaagaaaagccacttatcagaacaaagtatgtcttgtttgatgcgagaaaagtagcaaaagagaataaaacctgaaatataatttcaaaatacaatgtctagaaatctaagtatgcaaatcctttattcaagtttcatatcaaaccaattttgacatttctagtgcagaacagaaaacaaaacttcaatataagagcatataaaaactccagaggacctgatcctgaaggtgaaccatggtgataggtctgtttgccccagcaactgtatctcatgcagtagactgttaacgtcaaacatcaataga

SEQ ID NO: 12314 - DNA, 620 bp, Arabidopsis thaliana landsberg
agtcccaatatttaacgagataatatctgtacaaaaaaaatcaacacggctcacctccaccaacatcctttgcaaggcttttaatctcgactttaccgagctttttatatagaaagcatccccagaaacacatgagtgcaactaggagtagcgcacctacagttgctgatgcgctaatcagcagcttaccagagtttttcttttgattttgacctataaagtagaagacaccaaataaatataactttactgatagagagccacaacaaaacctgtatatcacaggaaattcataattgcttttacctgattgagaatgtgatgaagggtttccactatcatcttggcacacgacatcaacatgctttccacacaagttaagatttccaatgaagctgtagtagttatgcatcagtttgagaatcttataatttcagtcgcactgatacaatctagctaaatagttatgtggttcaaaaaatcatctcgaatataagcgaaatatgaaagatcagctgtataaatgtaactttagaggctttattttcctatccctacaagaagaaaagggtgtttattgtcttacgagttcttagaaaatccagaaagcactccgtctg

SEQ ID NO: 12315 - DNA, 643 bp, Arabidopsis thaliana landsberg
taagtccttcctctagtatgtttcgaaaagtatcctgatatagtaatgtactcacatggagtcctttgcctttaggagggatgatcataaatcaggaagtgaagacaattgaacaacaaaattggtatagaagagagatccacctccaatatctgaagaacagaagaaaatttcactaagtggcatttttttttttccatttccaaaaacagatagtagtcttgtttaaataacgtcattactattctacaaacataataatgtcgctatagtacttcttctctgaaaacaataactcattaacatttcaataaataatgttactcattaattagtgtgtgtgttttatgaatataatttgagtatttaattctctaatttttttaagaattattagagcgcataatctcccgtctatataaatatcctccggcgaattcttttagttctcatcatccaaacctctctcattctctttctcgctctagttttctcgttgagagtctcttactctgtttaattacttgtttccgggaaaaagattctcgggaaaacaaaagaaaaaaatctcaagaaagattcatcttcgttgatcgctacaatgaaacgtttcttatgctgtctcaaaggaggaagctcaagt

SEQ ID NO: 12316 - DNA, 951 bp, Arabidopsis thaliana landsberg
aacagaagattgcattggcgacgagttgaatcttcgtcctcgtcaggttgaagtctggtttcaaaacagacgagccaggttagcttataacattaattatttatcttcattttcttcctgtgtaaacggtttattttcttcattggaagtatatttttttgctatggttaatttctgaaaagagggatgaggacgaaaaacgcatcacgagtaataataacaaattgtcgcatgtctatccttgtcatttttcgtgcaaaagtagtatatcacttccgctcatcatttccatatataattgcttatagtgacttattcacaaaaagaaaaaaattcataatccttctttatataatttgaacccaaaaaaaaacgtcttctttaatctttacaaaaacaaagtctcatattgttggtgggggttatgtgattgataaatgataataggacaaagctgaagcaaacggaagtggactgtgaatacctaaagagatgctgtgagtcactaaccgaagaaaaccggaggcttcaaaaagaggttaaagaattgagaaccttgaagacttccacacccttttacatgcaacttccggccactactctcactatgtgcccttcttgtgaacgtgttgccacttcagcagcacagccctccacgtcagctgcccacaacctctgtttgtccacgtcatcattgattccggttaagcctcggccggccaaacaagtttcatgaaagcacctgcgaaatacagtttgagcaaacggtcgagctagagtggttttaaaagttgtcttcttgtgtatatatttattttacttttcatattttattagagaccgctattttgaaagacgaatagattgattatccggttagcgttttgtttttcttagataggaccgaataaaaaacagatggagcaaaagggttgacatgttttattgaat

SEQ ID NO: 12317 - DNA, 607 bp, Arabidopsis thaliana landsberg
tcagatgatctgaatggtgttctgatagtacagtaaactaaagaagatccctggtgcagtgcacattgctcgccggcgacccccgcgcctagatttgcgcctgtgaggtgattcgtgctcattggtgcccgaataacgcttcaaggtaacaagatcttcgtcgcggatgacgccaggggctagccgccgtacctccttgctttacagccggctcagataagctcatcggagttggccgcctgccgatcgggtgccacgtaccttgaagcttcaccatgtcgcagtaagccattctatattgctggctcgtcgccggtaagcctgccacggtgaaagacacgtagctattgcgccagtgctcttccctctctccgaccgccagcacgccatgaccaaattgggagccaccgctctgggatactataaattgagcacacccctagctccattaagtcatcacgaagccaaagcatccgctactgcctccgattagccacagagagctcaatttctttcttccccaaatcagttttcgcacccgtgaacactcgtcgtggcagacgctacaggttagttcaagatcttgcttgatgttctagctcattag

SEQ ID NO: 12318 - DNA, 929 bp, Arabidopsis thaliana landsberg
ccggccgccggcgcacgagctactactaccatttcacctactcctccggtgaaatccccaccaccaccatactactaccattcaccggcccctcccgtgaagtctcctcctcccccatactactaccattcaccgccccctcccgtaaagtctcctcctcctccatactactatcactccccacctcctccggtgaagtccccaccaccaccatactactaccattcacctcctcctccggtgaagtctcctcctcctccatactactaccattcaccgccccctcccgtaaagtctcctcctcctccatactactaccactccccacctcctccggtgaagtccccaccaccaccatactactaccattcacctcctcctccggtgaagtctcctcctcctccatactattaccattcacctcctcctccggtgaagtctcctcctcctccatattactaccattcaccacctcctccggtgaaatccccaccaccaccatattactaccattcaccacctcctccggtgaaatccccaccaccaccatactactaccattcacctcctactcttgtgaaatctgctcctcctccatattattaccactccccacctcctccgtgaaatccccaccaccaccatacctttacagctctccaccaccacctgtaaaatctcccccacctcctgtctacatctacgcttctcccccacctcccacacattactaggctcatcaaattcaacaaaatttccccattattcaagtaagtcctatacttatacctttacctcataatccgttttaataattgtgccctaaataaaatcggaatttcttctttcacaggttttcttttaaaaaatgaaataatggaagggtcaaagtcaaagagaagaagaagtgatccataattaaggatcag

SEQ ID NO: 12319 - DNA, 672 bp, Arabidopsis thaliana landsberg
ctattaattaactacataataacgaataaaaaataattataaattatcaaaaacaatcaataaattgggtgacaagtttcaaaacaaactcacgcttcacaattttcaaaacaaacccacgctacacgtgggtatttatctagtataatataaaagacatgaaaacagaatcacatttcaaagactgtttgtactcgaaaaatcgaaattctaaacttgcagtgatctgaattccaaaggaaccgaggtcaaacttggaagatggacacattgagaaaacccaagagagaaagaatctatttgaatcttcttgcacaagtctcccctcgcaataaagatgcaacccactccagtttgattgtcgtcacaacacaggataagggtcatgtcatggatgaagtaactaatatcagaaagctgatggaatagcgagggaaaatcaggtattgacaatgtcatcaagtttaaccacaccacgttattactagagttaatcttgtcatttgttacccaaatctctgtattacttgatatacgagattgctttaacaatgcaaactgatcgcccttaaatacagtgaggacaagtttatctcgtaagccagaaacatgctttccacaaggaaggagacaaaagtgcatggatatttctgtggagaaatcaaagcttca

SEQ ID NO: 12320 - DNA, 1840 bp, Arabidopsis thaliana landsberg
  unsure (1)..(1840): unsure at all n locations
aaatttcttagaaaaaagaagtatatacaataaataagaaattattttgtttatatattcaaactctttttattaatatattaaactattaacctctttctattaattttgttgttgttaatatattaaaaaaaagaagttaaaattctttattgtatcggaaataagaaaatgaaatttgttaacaaactattaaactaattttgttattttgttgttgttaatatatactccaaattgaattagttaataagtaaaaggctttagaaatcttttccaaattgtcaagataaatgaactctaatcttcagaatagagaatagtggcttacaaagagctctcaaaaaagttgcaaaaaaaaaaaaacgtaaaaataaaaattaggtctctatgggttttatacccagttaaataaaataagttatgaaactggataaaaaaaatctaatcgtagcatcaagaactggactgatagatctagtaggtggaccgcttgatcccaaggtgtttgaaaaacaatcttcgacgtcgtgacacttagttaatcgatccactctttgggatcaatcaatcccatcccttctagaaatctggtgctcgacgattaaaacccgctctttgtgaatttggcacttagatgggtgaaggttggaccgctcggtcccttatgacctctcaaccacaaaggttcagtcttatcgcatgaaatcaattagtaaactacaattcatcctaacaaaaagaaagctatagtagtccatatattatgtagtttttgcttatgagtgcacataatgatgataacacaataaaacatggggtttcatacatgagcggagtaagaggtgttgtactagactaaagattagtttagcgatttagaattagcaaatagtgttaaaaatgacacaaagaaaaattttgaatgtataatctaatacatgattctcaagcctctaaatgagaaatattaaatctagattaagtttaaatatataaaatttagcttaaatctaaatttcaaaatgataggaactactataaaatcatatagtgacaagatacaaaaaaacatccatgtgttaccttaagttatatttattccctttagtaaccaacaaattttaactttctttcacgacaaaacttttgccgtctacaattcacacacactttcaactttgaagcttacatacaatacggtggcagcagtaacacacaccattatactgcaaacatcgatgattggttatcaataaccatatcgatcatttgacaaaaccacccatggagtaaccatatcattacaagtaaacataatgaaatttttgcttcaagtgaacatgtgagtgtgttatcggatttagctgttgtcttttctttttatacgaaacaaaaaataaataaaacctttatcaaatttgtacaaacctctgggctttctttaggcccaataacaaaattcggcccatatttgagaattcacaaaacctagatatactcttactataaattagaacatcattgatctaatacaattaattactgtgttaatattatttatatacacaatctgaaatgtctttttttagctgtccaccagtttccaatctttgaaatacgaaacaaaaaataaataaaagtataaaacctttttctaatttgtaaaaacatttgttgggctttcggcccaaaacaaaactcggcccatatttgagtgttcacaaaaacctagatactctttactataaattcaaactagggttttaaagctcatttctctcttgcagtcctcatcgntggagcttagaagccgtccgcacaaggttcgtctttttct

SEQ ID NO: 12321 - DNA, 929 bp, Arabidopsis thaliana landsberg
ttcatgcctgtttggctataaagcttggttacacattgcagatccttaaaaccaagccctccctgatccttaggtattgttaaccttttccatccaatcgagtgaatttttttttgttgcatagtattccaccagaaatccatcatcacactggtcaaaattttgcacaaagtcttcggcagtcgaaaacaagtcattgcatataaagaaagagccagagcaataaatttgagtaaaacctctttgccaccctgagatagttttctagcataccagcctgtcaaacgagtgtgtagcttttccttaataaatccaaacagctcctttttagaaccccgtaaacagtcaggtaaaccaccttctaaagaaatttttcagaccgatgttttatccaattcttgagatcatcaccaactttggccccaaaagtgattgcagatttatctaaattaatcagttggccagaaatgtgaccataattagataaacaattcaatagttcctcacattcttcctttgtggccctacacaaaagcaaggtatcatcagcaaacaacaaatggtttattgatattccttcagcttgaaactgaatttctaaaatttttcctttcttttcagcttcattaagaatatgaattaaagcctccgtgcataaaacaaacaaagctggagagaggggatcaccttgtctaatacctctttctggaataatgtgaccataaggttgcccattaatcagcacagagtaagaaacagttgttacacactgcataatctaggcaatccatttcctgtcaaaaccaagagccttcataatagctttcaaaaaaacccactcaaccctatcatatgccttagacatatcagtcttgaaggccatctcttctcttgacattctatcattagttctaagactatgcaccagt

SEQ ID NO: 12322 - DNA, 1075 bp, Arabidopsis thaliana landsberg
tgatgatctatttcaaactgaaaggaaaattataaagcaacgttatgatgtttttatatatgtttgatccttaattgtctacgtgcatgtataaataggggattcttgatcatttgtaagatatatcccaaattaattcaataatatcttcttctagtttctctttaaggtcgttttcattttattacttgcttggcaagaaacctcgtaagcttcttcttcttttatgtatcttgcccacaagtaaatgattatgagtgattaacgaaaaactcaatcataaatctgtcttatctcttttatcaattttacgtaccaatagataactaatgtgtaaacaaaaagaaagaaaggatcttgatgaaaaatatagtaccttgggatgtgcttctaacacttgggccatcttcataccggttgaattctgttgtcttacacgaagatgcatcgtcttcatgcctcgtatgagtaaatatgcagcgttctgctttttacaaagaaccaattatccaaaggttgaataataggaccgatcctagctaaatctaaaaagaagaatgtgaaccaaaattgtctaataaaaaaccaaaccgacaaaaactgaaatttcaacacatttacaaagtcatatcattcgaggaggatcaatcattctaaccggattaagcgtgcctcccaaaagcttatgcaaattgcgaatcttggaaaccaactccattgaaccggatatgcttccagctagaaactgagaagacacatggaacaaataaatcattcttcgataaccatttttccaaggaataataaggttacacattctgatttacgcacatcgttgtggcctccaatgtacttagtagcagaatggtgaacaagatcagcaccaagagcaagtgtcttttgattgataggtgttgcaatggtagcgtctatacaaacaagagttcctcttctatgacagatttttgaaactaacttaatatctacacatcgaagaaatggatttgttggggactcggtaaagaacaaagaaacctgaaaaaaaaatgatcacaagttcatatattgattacca

SEQ ID NO: 12323 - DNA, 901 bp, Arabidopsis thaliana landsberg
aatcgcagatcatctcgacgttaatgctcaggatgtacaggtctgtttcaaccaaaattagggatttttgttatggaggtgtgatttgttttggttaaacattgcgattaaggagtcattagctggatttaatggtttagtatgataaaaatctatgctttagtggttttatactgtattgttgagaagatcaattgaagagcaaaagtgtgtttggattggttgttgtaggcatttattgtgggagagcatggagacagctcagtggcattgtggtcaagcattagtgttggaggcattcctgtcttaagctttttggagaagaaccagatagcttacgagaaacaaactcttgaggatatccaccaagctgttgttggtagcgcctatgaagtgattggactcaagggttacacttcttgggccattggctactcagttgctaatctggctcgtactatcctccgtgaccagcgcaagatccacccggttactgttcttgctcgtggattttatggtgttgatggtggtgatgttttcctcagtcttccggctttgcttggaaggaatggtgtggttgctgtgaccaatgtgcatatgactgatgaagaggctgagaagctgcagaaatcggcaaagactatattggagatgcagagccaattgggactttgaatatccacatctatatatgcatcaatttcaattttataactagtatcccacgggtgatagtgtcgatgttgatcactatatgttatgtaaatgcttgttcatgcagagtaatcccaactttgagttctattttgaaatagggtatttgcctccaacacacttgagttaccacttaccagtaaaatgaaaatgcgtggttttggcatgaaattattgtgcatgttgc

SEQ ID NO: 12324 - DNA, 991 bp, Arabidopsis thaliana landsberg
  unsure (1)..(991): unsure at all n locations
tatgaagcaattgttgcttgggtgtgtgcattgttttaggtgtggcgtgttgtaccgtgacatcaagtgctcaaatcttctgcttgatcgtaacaataatctcaagattggtgattttggtctttctaatttttaccggngccaacgaaagcagcctctgactagccgtgttgtgacattgtggtaccgcccacctgaacttctgcttgggtcaactgactatggagttacggttgatctatggagcacaggatgcatacttgctgaactctttactggaaagcctcttctacctggaagaaccgaggtatagttttcttcgtgaaacacaatttcctttttaagatttggcatgttggctttgattacgctaaacaagttaatcgttttatgttatcttaggtaggcatatagacaagtcaatacagaaaatgaaattcaaaagaaccttttgtttcttatatgaacaggtagaacaaatgcacaagatctttaaactctgcggatcaccttctgaggagtattggagaagatcacggttgcggcatgcaaccatctttaaacctcaacatccctacaagcgatgtgtagctgatacatttaaggatcttccttcttcagctttggccctccttgaggttcttctagctgtagaaccagatgcacgtggaaccgcatcttcggcccttcaaagcgaggttgacctatgaactttactccggtactagattagggcttcaataccttttacccacttttcgcctacttttcatgttttagctgagaaatcattagcattgtagcttagacatatatgttgatattactctctctttcagttctttacgacaaaaccttttccaagtgagccatcaagtttaccgagatatcagccaaggaaagaatttgatgccaagcttctagaagaggaagcaagacggtatgattcaaagcttgtacacattttgtcaccatttgcaagtttatctta

SEQ ID NO: 12325 - DNA, 1032 bp, Arabidopsis thaliana landsberg
acatgttcccaaccaatatttagttcctcgcattataaatagtgcatatatgtaagtgtataactaggaaaagtaatttccaactaaaaaaactaggaaaaaagtcttcgttgattttctatgtacattccttcagatttagaaatttgttgcgtctgaggattgatttgagttgagtaagacagaaaacctaatatataatttgacgacataaaatattgtttcgaaaagataatttttagaagtttactaattaggtgaaatgtctttttctgtagtttaccaaaatgcagacaattgttatgtgttaacatgtaaaatatttcaggttctgcttggacattcctatcaagaccgttcgcagaatattgtataataggttatgacaacttaccaagaacactgcttctctactacacaaacttcgtttcatccccggaaggctattttcagacgcttatatgcaactcggatgagttcaagaacacgaccgtgaaccacgacctccattacatcgcgtgggacaatccgccaaagcagcaccccaagatattagggacaagggattacagaaagatggtaatgagcaaccgaccattcgctaggaagttcaagagcaatgaccccgttctcaataggatagaccgggagattctgagaaggaaacggaaacttgggtcgaaacccgatcttggtcctggtccgggggctagaagattgaagagtttactaatgaggcttttgttgagaagaaactttgtcaatagacaatgtagataggaagtgtgacttacacagctctatatggagatactttttattttgatcttattctttcttgaatatttttttggggggttggtgtttgttctttagtgattcataagggaataaataacgaagaatttacatataatgtgttggcctggtttggctttggacttcaatcaaagtcattagcatgtttagaatgtctggtgggctagattgtgatactccataaccatgttataaagcttttccccaatttga

SEQ ID NO: 12326 - DNA, 540 bp, Arabidopsis thaliana landsberg
acacacatatccccaattagagatcaaaatcacaacaacgaaaccaacaatgaaattgattaaaagggagcattttgattaccaggataaccagcaacagtgattccaaagtaatcaccatacttgctacgaatgtgattcaccagatccaaagcacaagcaaatcctccttcaacctgaacaaacttatcttgtccatgaggaggatctcctctaagagcaagcacattctgaattccattagatctaatcgtctcaagcgcgtgatcaatcttctcaatcggcatgttggtacaagtgagatgcatcatagtctcgacgcagataacattctgcatcctagaagcaatctcgagagtgagatcagctgtggatccaccagcaccccaagtgatatcgcagaaggtaggtccataagagaccaatcgatccattcgttcaaagagattctcgacgccatcttctgtcttcggtgggaaaaactcgaaggagaaagctgtttggccttgctccgtcacggatttgatcttatcaaccacc

SEQ ID NO: 12327 - DNA, 713 bp, Arabidopsis thaliana landsberg
ttttttggtttcttctttgtgcagaaagtgtaagaaacaataataatgatactttacgagtttagtattcatttgttctaatctttctcctgaattttgtaacttttgattcattgatttgtaatcttggaaaaagaataacaaagagtttgtaaccttcaagcaatttcttctctttactacaattcatttttctccaagacccaaatcataggatacaaataatgtaacttagctatttacaatctaaaacgtagtggaaacttacagaagattcaggttgagtcgacttgaagtttgattgacatgtagaggagggtgagaagagcaccttgtggaagaggagcatgtctagctaaattagagccaacccacattgctactaacacaagaaccaccacgctgctgcttgctttcccacagagccagcttgcaaatgttaagcagagagtaagaaggataccgccttttccgccaagtatccaagcgatcatgaatccgactttgtaacccatgtcgagttccttgtcgagcaacgctgtgaatgtgctaaatgtgagagatgctaggcaaccgaatgtatatagaagaaacatcgataagaaggcggatttgagagcttcaacaaatgagtctcgctggtctggtgctgtttctactccttcttcttgcggctcgggcctcagcgtataaatgtgagtttggatatgtag

SEQ ID NO: 12328 - DNA, 598 bp, Arabidopsis thaliana landsberg
gaaagaatgaaagctgaaggtccaaggcccaatgctgtcactaacagtgtgatcattgaaggcttgtgttttgcacgtaaagtaaaagaagccgaagatttcttcagtagtttagagcaaaaatgtccagaaaataaagccagttttgtgaaaggttactgtgaagctggcctttctaaaaaggcatataaagcattcgttagattggaataccctctgcgcaaaagtgtgtacatcaaactattctttagtctctgcatcgagggttatctcgagaaagctcatgacgtactgaagaaaatgtcagcttatcgagttgaacctgggaggagcatgtgtggcaaaatgattggggcattttgtaagttaaataatgtgagagaggcccaagtgttatttgacacgatggttgagagaggactcatccctgatctgtttacttatacaatcatgattcacacctactgtaggctaaatgagttacagaaagccgagtctctttttgaggacatgaagcagagaggaatcaaacctgatgtggtaacatacacagttttgcttgataggtatctgaagtttggatcccagagcatcatga

SEQ ID NO: 12329 - DNA, 970 bp, Arabidopsis thaliana landsberg
ggcaagatatatatgatagataacccttcattacttgtattgaaatctcttctgcttcaaagctttttgtttatactacagccccaaaatgcccagtgggtaaaatatccttttttgacagttcggttacaagtgtgactgccttatctatgtatccttcgtgacaataagcagatattagacctgtgtaagccacgatatcaggctccaccccactgtctatcattcaatcaaaaaaattagtggcattttctaggttgttaatcttgtagtgatgatctatcaaaactgtatagcatacaacgtctagtccaaaacaagcatctgcgaattctctcaaaacttcagctttcctttttcgcacttcttcttgaacagaacctgtctcatgatgctctggatccaactatcaagcaaaactgttaccacatcaggttttattcctctttgcttcatgtcttcaaaaagagaatctgctttctgtaacttatttagcctacagtaggtgtaaatcataattgtataagtaaacagatcaggaatgagtcctctctcaaccattgtgtcaaataatagtcgggcctctctcgcatggtttaacctacacaacgccccaatcattttcccgcacatgctcttcccaggttcaactcgataagcccacattgtcttcaggacgcgaagagctttatcgagataaccctcaatgcagagactagtgaatagtttgatgtacacactcttgcgtagaaggaattccagtctaacgaactgttcaaaggcctttttagaaaggctagattcatagtaacatttcaccaaactggcataattttctgggcatttttgctcaagactctctaagaaatcttcggcttcttttactttacgttcagaacacaacccttcaatgatcacattgtgagtaacatcattgggctgtagaccctcctctttcattaattcataa

SEQ ID NO: 12330 - DNA, 524 bp, Arabidopsis thaliana landsberg
tgagcgtgctggtgcccttctggctactggcttcaggtcagagtaggtggtaaaggtggtggtggtgggagctgacccaggaagcttgagagtggtttgccgaagcgacagaggtcgtaggctgttggttacctacataatctaggatgtagggagaatcgcacgacgcagtatgtaggacctgcttcggttgattctgccgtggctcagcttcgacaatctcttttttgtcctcgccgcagaataagcaatatagtcttctgggctgatctctgtatcttcgtccgaagcttctgccccctctgcctcttggggctggtggcctgaaggagatctgttgtggccctgatgactgggagctgtgctgttgcctgtggggttgacttcctctatcatcacgtggattggcattatggattgacctgacgtgcctggggtgaagtcgcctccgaagcccctgaccatctcagaaaacatgtaagcatcctcccttcgcttggcaaaaatcattatcagcccggata

SEQ ID NO: 12331 - DNA, 997 bp, Arabidopsis thaliana landsberg
attcaacagatatgttcagtttcagtagcatatgaactaaggaaatttacctgagttacgagtgcgtaaagaggaagtgtgatgtagctgcaaagacacaatactcctaaactgcaagagaaaaaaggaaacaagattagtatatgatcatgttgtgtagagaatttcaagattagataacacttacgcaatcgctacttttacaagtgcaatcttgaaattaggatggtagcaagaatctgatccaaaggaatactgcattacatcaatggatgtaaacagaggattagctactcttgtaaccaagaaaatgcattaaaaagcaaaggaaaatctaaagtgttacccatatccagaagaaataagtgatctgaaatgcgttctgcaaaataaaaacacgatttaagaaaataatcgaaacagaaaagagaggatttgttattgtgttgtgagattttctctgtttattaagtacctgaaacaaggcgaaatgcatgagatggagaatcaaatggggacgaccgaaccagaaatactcatcgttgccttgtacaagcggcattccttgaactaccgcatgtctatctgtgataccaagagccatccttgtcataatcgcttgaagctgtgtccctacagctaaaatgatggtgtaaacataaaagcaaggtcagtttgtcagatcctgtgagtccttacagatattattatttggaagatttctacgaattacgtgtaagataactttctataaccggtattgcacgtgccgatgaacatcatcttgaagcctgaaatccgcaagctagttagattataatcctgtccactgtcaggtgttttagggtgttacctcctcccggtgtctatatagtgaggagttctatgctcggaacatccccgcaagtcagggctgcgataaggctcgttctttagtgatgaaagagttttattctaggtaagtaaatgagtgttatgagttatccggtctgccccg

SEQ ID NO: 12332 - DNA, 1088 bp, Arabidopsis thaliana landsberg
tcatctggcaacctctgcaactgagacagtattcgtaagaacattcttcttgaacatttttctctacgtgttgatgtttccaactccattctcctggttgcccgaacattgtcgtcactccacatcctcttggttgcgcgcagcaatacctctatatatatcatcattgttagagaattgatcttttattacgaatgaatcaggatgaggtgacataattaagtacttacccaaacattgctgttttggctggcattgaagttacagtcatggttatgaatgatgcactccgtgacttttgcaagtttactttcagggactagcctgcctaccaattgcttggcggttcgcttttcctcagccgggttcttggcgattccaaaggttgtgttgtagatgaaacactttaaagagtagccaccaaggacaatgcttacgaatatcattgcatagatgtagattgtgaacatacgttttgagtgacaacagattgcgtaaagagcaaactgaggaatcaccagcaagagcaaaccaatgacgacgaaactgccatccgtttctcggatacatttcgagactgtttttctgtaatataaacctgttcccgtcattgttaagcctatgcatataaggattatggtcgccattgttaagaaccctgttcatatctctgacattttttgcaaatcaggaaatctaaaatgactcgtagagtatatgatgttttgacttgtgtgatatatgaagaggttgtaacaaagagacaaggaatcaagaacagagaggtatcagttttgtttttgagttttaagaccttagtttagtctaaagacagctttttgaaataggttaaaactgtttaacggttggtttttattccttattctaaaaccattatttctaaaaatagagattcaagttaaatcaagatatatatagtacaccaaactcttttgacatgcaacttcgataaacaacaagcaaactccgaaactccagttattaccaaactatgtacttgaaaataaaagaacctaacttctgtctgactttttgtatttgccggaagattttaattcagcagcgac

SEQ ID NO: 12333 - DNA, 481 bp, Arabidopsis thaliana landsberg
  unsure (1)..(481): unsure at all n locations
gaaaaaaccaaaacagaggtattctcagatacttacccgctccggaccaaggccagtcgtgcttgcggggagacccctcgggccccagtccccgcaggcgctgccgagggttgccccgacgctagcttcggcgccgcttccgcctcggacacccgaggcgcacgagggggcggcctgcccagtcgttgtcatgaccaggggaccaacctcctgtacagccggcacgggcacttgctcttggaggacgggcagatcggcgtgactccccggagtcgccccagttacctcggccaaggggtcaagtaccccctcaacctgcctccgctcctcggactaggacctcggtgtcccggccctaggcaccgatggcgccacgcacataggaggttggctcggcgacccctggcccagcctcgggtctgggctgaggncaagtcgagcatacatgtcatcgtcctcctcctcatcatcatcatcgtcg

SEQ ID NO: 12334 - DNA, 1392 bp, Arabidopsis thaliana landsberg
aaaacataaaagcttgcttcttctttgatgttttaagagctagagtatgtgtcataccttatgcagatagagcttgacattgccgatgatgatgatgatctctgtttctaactcatttgttacatacctaagagccaataaaaataatatcagttttagaaaaaacattgcttaagcataatcagagaaatacatagaggtaaatatttgttttctacaaacctaacattgtctcctttagactgaaatgaatcaggtttggttccaagtttcataaacttcatttttttctatctctttaataagttattgcacacaagactttcaagatctttagacacaaaagagaaaacaaagctaaggatcttagaagagatctatgcacaatcttgttttcaagaaagcttaaaagggtcactttaaaaagaaacattgttttatatacatgtaaacaaatatataatttacagagaaaacttagagattcacaacaacacacccaccaacctctcaaggctcgaaaacccaaacaccacgcttgtttttttttttttttctttttttctaagtgcttggcacatgaactcctctttttggttgcccattgtgttgtaaatttgttatgttaaaatataaacccgaatccaaaagttgcatctttcctgcggtaatcagaatttcttggaaacatttattcaaaggacaaaacgaatcaaatctttttgtatgttttctataaagatggttagtgaaagcataacatcagagaagtcagagatcgtttctcgatacacatattttctacttttcaacatactttaaaatttaatcaaggatcaaaatcgtggagtggttcaaagaaccctaaaagaaaattacaactacaaatatcaaataccaagtgtagttcaacctatataagtgttatgtttattagaatgttaagttaggatattcttacgctagtatataaagtttatggacttctgcattcaaaaaacaaaacaaacacataaaatattagcgaaagtctctcatctaatgagaagcacatagagctgataaacataaaaatcgaaactttatttatctttgttgttctctttgggtcacaatagaccggcccattagcctagtcacaccggcccattagcccagtcaactccattgtagaagagaggacttgattttgggtgagattgagagagagaagaagagaatcgtcaagtgtttatggtggtgaaagttataagaatcgttaaaatttgacgaaagggtacgtaaaagaacttcctttttgatgatttatctatatattagtagttattgattgtttctgatttaagtatcgtggcattgtaaaaatttataggcacgagacaatgcacacca

SEQ ID NO: 12335 - DNA, 977 bp, Arabidopsis thaliana landsberg
ttttataacttgtaacatttctttacgcgaatcttgtttcttatcgaaaccgtaaagtttgtatattttcaaagtttagtgaattaatccatagacagtaatcaaaaatatattagtatatgctaaatccggaatataatgtatattctataactgaaaggtagctaatagttactaattactgctaaaaaaagaaggttacaaataatcgttaatgtcattgttgctattatttgtggttgagaagtcattgttgttccattttcctcaaaaatcatttaaacgatttggttactaattaaaacttggattttttccgtccatgagtgatatgctgataactttgcattttattatctccgatattattcatccatttataatttaagttacatctccatataatcaatcttgttaacatttcacgaaacagtagaaggagatgtcttcaaagaaattcacagtatgtatttatgagtaagaaattaatccaatgtttaattaaatcttgatcgagattcgagtattgtgaatacgaacttatgtatacatcaattgcgatgaatttgttaaaagtttcacatttaatatggaacatctcttttactgttttacatatgtcaaacggtagtacgtaatgtaatagtcatcacgtattgcagttgttgttcttaataggttttgctgttttgtgcttaatatagtaaacttgtactagtttggttgtgttcccacaagaataaaagtttcaaatacttagcttttattacaatctgtattgaacaattaattttacatcttaaattattcaatgattcagcgttctaattatgaaatcaatatgacaaaaatttagggttttaatagcaattcgagtcacttatttcttaggttcttcttctttcttctcttacttcttctcctctttcttttcctctttcttctcttgcttcttctcttctttcttctcttctttt

SEQ ID NO: 12336 - DNA, 842 bp, Arabidopsis thaliana landsberg
  unsure (1)..(842): unsure at all n locations
ccctttttcttcttctcccctttctgttttctcttcttcagattcattcctttgacctgttcctcttgttcttcttccttcttcatctgcagataaagagcttccatttcaagaagctttaaccattgcttataagccaacatctgactcgcttgtttcaacaagattgttatcacacggtctttctcagcgcaagcttctctcgctgctctctctgcttctcttgccctggtttgagaatgccttagtgcttctaaaagctgacctttgcttagatcatcacttctaggggaagaccttggactcgtgttcttgctctctgtgctaccattgtaactcaaagatctctcaaaccgatccttccaaactccttgcttccatggcgatttaaccgctgttttaaaccctttttctccactcgaggagtgaatactcttgtggagtttttgaggtggaggaagatcacaattctggatattatgatcaaccgatttagtcgccaccatgagagctaattcatctttatccgtcgtgcttctccaccacggtgttgtagcgtcagctttcttgctaataaagctgtagtcttcttcttctcgtattccgattaagtcgacaaattcatgcaatttcttgcatttggtatcttcaagaaaggagtttgtaacctcctcatcaaaaccagttgatcccttaagccaccatttggtatcacaagagaaatcagagaattctccaaaactttcggaagaaaagctgtttttttcggtgctgcccgaagaagattgttggtgttggcaaacagctaacctncgagccatcttagcatcctcatgaacaac

SEQ ID NO: 12337 - DNA, 1306 bp, Arabidopsis thaliana landsberg
ccctaaacttgcgacttttaacaatcgaccgacttatcaaaattagggatagttttatatataaagagagacgcttttctttatttcattcatcgcttctccaaaattttcttcaaagaacaaatctcccaaatctaaaatctttctcttctctcttcgtttccataaccatgtctgcgaagaagattgtgttgaagagttccgatggtgaatctttcgaggttgaggaggcggtggctctcgagtcacaaaccatagcgcatatggttgaagacgactgcgtcgacaacggagtccctcttcctaacgtcacgagcaagatcctcgccaaggtgatcgagtattgcaagaggcacgtcgaggctgctgcctctaaggccgaggccgtcgagggtgctgctacctccgatgacgatcttaaggcctgggacgctgattttatgaagatcgatcaagctactctctttgaactcattctggtatgtttcttctctcgatctgatttgatttttccatcgaattttgaattttgggattctagggttttcgatttgggaaaattagggtttcgaaatttaggtgtttgtttcagaaattgaatctgcttgagattgatattgttagggttcttgtggaaccaatcattaattgaatctatcgatttggattataatcatatctgtgtttttggattcggattttgatctaatggttatgaatttgggatcttgtgcaggctgctaattacctgaatatcaagaacttgcttgatctaacatgtcagacagttgcggatatgatcaaaggaaagactccagaagagatccgcacaacgttcaacattaagaacgacttcacaccagaggaagaggaagaggttcgcagagagaaccaatgggcttttgaatgattgatcttcagagagaagaatcaaaagcagcaagcaaccaatttcttcttccttatgtttattgccgttttctagtgttgttgatgacttgctttataatattcttcatgaatcatgactatcttcttcctcttctttctttcttatcaagaaccaatgtttcttactctgtgtgggatggataatttgtgcttgtacataatcttcaagagtgatgctggtttgtcttacaaaataacttctttcgattgtcttgccaatcgccccagaatactaatttgcacgattcattttaggaatgttcatgtgtaaataaaaagaccctgaatttggcacagtctgcaagcagaaagaaaaggatcatgacgactactcattgaaaccaatggtcaccag

SEQ ID NO: 12338 - DNA, 1001 bp, Arabidopsis thaliana landsberg
ttccatattgctttctttatcctgttctagattaaacatctttaataacagttgagctccaaggaaatagtcttttggcaaatctatgcaatacgttagcattccttttacatataactttaataacttaacttccaccagataaatggaaaatcataaattaagctgtgactaaaactgggtagagatgaaaaatgattaaagaagcaaaaaacaaagtgtaaataagcattaaagcagaaaattcccctatattattcaaaaaccagtagaattcttctctaactttgcccatttcaccaaagtctttagaaacttcttcacctgcaaaaccacaagttaatacaaatagaacatacacaaaacataatatcaagaaattgttaatggtttaatgttactattacctcggatggatctctaagggagtaaaacgcattgctttctttcggtatagacgatactaggatgccgaaacctcggttcccatctctcagtacctgtaagattcatcgtgttgtttcgattaggcaaatcacaatcaagaagtaaccaatcactaaatgtaagtaacttgaaacattagttatatatataccttgaacgcatcttcatcggttgtgtcatcaccaatgtagataggaagcaaatcgtctttattgcttaatcctaaacaagatttgatcaaattacgactaatcatcggtctagaacaagaaactacgaaatgaaattataacaatgtatatatataccgagagattctaatagaaactcgaccgctcttcctttgttccagtctatcacaggacgaacctctaaaacctataacaccaaaaatgataatcaagaaattaagaccgatgattaaacttaagataagtatctcttaagctaatcacaaaccttcctcccatgagttagacgcaaacgagggtattgtttcaagtggtcatgaacacgctgagcaataataggccaatcctaaaaaacataaacat

SEQ ID NO: 12339 - DNA, 834 bp, Arabidopsis thaliana landsberg
gagcgtgatacaactcttatttggagctactcttagtattttggcatttggaagaagcgattgagaaaaaaacgtttgatgcgtatgtatgtttatttggtgaaactaagtatggtaaaaatagagaaaaaaatttatctaacaaaaaaggagaggcttaggtatggttccttggagaaagcattcccataaccgtggcagctttgaggaggtggaaagacaaaaaaacggttatggactctttcttatgcccccaaatataatagctgcttttacttagttatagtttgtttgttttaccataaaaagaagtgaaggaaaaggatattaatagcatacttcggagctctaacttttgccatctccgcgttgctctttaccttattcaaactcgagcagcaccgtctgcattttgagggtgaaggcgtatatcataaggatttgaaataaattggacaatgaaatgatggttactttcttttcattgtttaggattccttaacttataatctccaaaacttgggactagcatgtctttctttgtttttcttttttgatgtttttgacagaagatatgatggtgacagtatgagagagacctagatgttgtgaatgaagacacaagacaggatcaaagaagtccggctacgaagtcggagtataagtatggatgtcagatgaagtaaaaccattttggtaaagatgacagaccccattttatgtactatctatatgggcaattctaacaagtcactcactcaaattcatgaaatatacaatgcaaaaaagaaagtcccgtcgaatcctttgatgggtgttccatcgatattcggt

SEQ ID NO: 12340 - DNA, 744 bp, Arabidopsis thaliana landsberg
acatccaaacaatttttaatttatgggattaaggctcgaaacggctcattttattaagcctaagaacgaaggaaatatatatatatattttttttttggttagcatttgaaagacctaatctattttaaatagtttttaacatcgaatggtaacaatgtattaatttcggaaaagacattatatgcataaatgtgtaataagcaaagaaagaaataaaataaattgctgtcacaagaaatttcttatcaacttttacacgaattatatcatacataaaactatttcatcatgtcaaattatacacaagtcactatcccgtcagtcgtgtcataacaaggagagtaaaaaaaatatgttcttaacattaacttttagaaaaattaaatgaataatttgtttaaattctaagaaccagcttttatataatagccaaaaaaactagattttagcattaattcttaacaaatgtctctggaatccatgataatccgaaaaaatcgatctgaatccgtatccgaaaatttagatttattctattaagtcttaaactcataaatttgaatccgaatcaaaacctgaacctgaacccaaatccgaatgttttattcgaaaacttaaaattttcgcagaaatttatctcttttaacaaacccgaatatttacccaaaaataagatggttatagaaattctcatacgtatattgttttatttagtcaaattatgtatcaataaatagataaaa

SEQ ID NO: 12341 - DNA, 1101 bp, Arabidopsis thaliana landsberg
  unsure (1)..(1101): unsure at all n locations
tatcaaatcctttgcttaattaataaagtatctgattgtttgtttactcaattcgtctcatatattgaatcatagaatcatatgaaacggattacactaggaatgaacctcataaacggttagggccgagtcacttagtggcttggggcgggagatctcgtccgaacttaggcagtccagatcggggccttttaagttggtaccagagcatgcttggttctaggactaggtgttgggttaaggggtatcaccactcgtcgacttgagaatctcgcggtagttgttctttactcttttacgattttactatgagttatgtggattaactttggaggtttcgcagatgggtaagagcaacaaaacgggaaagagcaagaaggacaagggcattgttaaggacactttggttgaggacaatggttgatgagacagattcggccggacatgaggccggaaagaagtccataaatgaggaagcacaggagagtagcgatgcaagggacaacacagataaccggaacaatacttcaacgacccaagaatagtgggatttgatgaaaggaatgatggcgtaactagccacattaaccaaggcccgttgtagcggatctggtggttcaaagggttgataaccaaaagcatgatgacttagaagttgtggaagtgaatccgcaaccgaatcatgcgcgaaaaaggggagactatttgagccttctcgaacatgtctcaaggctgggcacgagacatttcatggggaatacagacccgattgtggccgatgagtggaggagtagactcaagaggaacttcaagtctactcgctgccctgaggattaccaaagggatattgcagtccacttccttgaaggagacgcccataactggtggttaagcatcgaaaaacgcagaggnnnnnnnnnnnnnnnnnnnnnnnnnnnnnnnnacgagtttaacaagaagtactttccaccagaggctagggacaggcttgaatgtgcgtacctcgacctagttcaagggaaccgcacggtacatgaatatgatgaggagtttaaccgccttaggcgttatgtggacgcaaacttgaggaggaacaagcct

SEQ ID NO: 12342 - DNA, 877 bp, Arabidopsis thaliana landsberg
aaaatgatcatagaactaaagaatggctagcaatagcaatgatttaataaccctttgacattccttttttagttcaatggattctaagcacactatgaaacaatatttttcctaaatctttaacacgactattttttttttcttaataggatttcattgataaaaagatttaaggtgaattataaaaagccgataagtatatgaacacttccgaaaacattagtcggcgagtacaaaaacattatgcagacaaaaaccaagcaaggtaaacaaaggggaaaaatgaacaaacatactacacaaacatccatcaatattttctggatcagaatctagaaacccataaaaagatgaacaaaacctaaactttaccaatttaacaaatcatttagaaaacatacaaacaggttacaatacaaaaatcttctttacaaaaagttaaaaccgaatgaaaacttgacactactaatctataaacatgagtatatatagtttttcttgcaaaatatcataaaaacttgattatttttttaaaaaacataagatagaacaatttagtcgagcccatacgaaactacgccgtatcattcggcccagccctttgattaaaaaattaaacgcactgtgagtctgtgaaatctcctcggcttcaacttccggattaaggggaagagatgaaattctgaaatcccttgagagaaagatttgtttcgcctctcaaaacattttcaattcccgccaattttcttctccgagaatacccccaaccttctagaaaccctaatttggtttaatttcattctccactactttctctgaaaccaaactcgagatctctcccccaatcatgcctgcgatacaatccccatcggggaag

SEQ ID NO: 12343 - DNA, 490 bp, Arabidopsis thaliana landsberg
  unsure (1)..(490): unsure at all n locations
tatattttttattactatgtgactttaatttgtattaccatgtattttttggttggtgcgatcaagtataatcaaagaagaactagttacattttattatttatcaaaagaatttaatggaaatacgcaaacgaaagaaaagaaaagaaaagaaaaacctggatatannnnnnnnnnnnnnnnnnnnnnagacttttaggataaatgaacatgaaatgtgggggaaagagttaaacaacatgattggtgacacatgttgttctttgtctttctctgttacttcagtcacgccatcataccattgagatcgaatttctcttatcttttattctctttttcgtaattttttccttaacatctactacatatatatatatatatatatatatatatatatataaaggcgaaatgatatcttttctattagcaaaattttatgaaatataacacttgaaaaataatgaaatgtggggaattggcacatgccgct

SEQ ID NO: 12344 - DNA, 1468 bp, Arabidopsis thaliana landsberg
tttcaattcagagatctaagaatctatgtatataaagattaatgtaactttactctgtttcgaagttcgaactttagtaatatttttaaatatttgtgtttgtttttgtcaatttaattacggacttgcagttatcaggatgtttcagactgatttggagtggctaacaaatcgaaacagatttatgtgtgtatataacttatgttttcttggtcttgaatagttgaattcacatcaaaaaatttcaacggtcttatgacgttatcatacttttaagggtaagagcctatatgattagtgagataggaatttatatagttttgagtaaattcaaacaatagccataacttagataataatacatgagggtggattcaagttaatagcgagaagacacgagggcatttaagtcatttactgtttgtagacgtatggtcaagcccgctttggtgttacgtgaagtgttggctcctatataacctcgtcttctccaacttgttcttccccataaatctgataatcaatatatatcaaatactcaaaacaaaagagaaagaaattaaagagagagatgggaaacagcctaaggtgttgtctggcttgtgttcttccatgtggagcactagatttgatcaggatcgttcatctaaacggctacgttgaggagatcacacggtcaataaccgccggagagatcctccaagcaaaccctaaccatgtcctaagcaaaccatgttctcaaggagttgtccgcaaaatcttgatcttgtctcctgaatccgagctcaaacgaggaagcatctattttctcatccccgattcttccttgccggagaagaaaaggcggagaaaggacgctcctcgccggaagaagaatctccaaaaccctagtgccgacgccgccggccgagaaattaaaggtgatgaggaatgtgtgaagttgtgtgagaagtacttagaagaagtagtgtcgtcggcgtcgacaggtaaagagcaccgtcatcgccggcggcacagcagatcggcgtcagtatccacgtggcgacctctccttgacagtatctctgaggatcttaattaattcctctttcctttaaatctcttttttttttgttgcttctagctaatggtgttttttgtccggaagccggatttttatcattctctttttcatttttttctctctttttttttggttttggggaaattttcacgaaaagagttatataatgtggataagatctgtgttaaaattcagttgtgatttcgagtcacctgagaatgatgatattcaatctgataatcattgatcaaaagcgaaacatatattgttgaacatgttaacattagtataaattacatggaataagaatcactacccagagcggttaaaggaaatttttaaaaggaaaaaaatcaaagaaccagccttgtgagagtgtgatcgaagtgtggagtaaataaacat

SEQ ID NO: 12345 - DNA, 1056 bp, Arabidopsis thaliana landsberg
tcagggaaatgatgtgggaacccaataccgttcagggatatatttctacaacccggagcaagagaaactagcacgcgagtcactggagcggcaccagcaacaagttgacaggaaggttgtgacagagatcttaccggctaagaaattttatagagctgaggaacatcaccagcaatacttgtctaaaggagggaggtttggtcttaagcaatcaacggaaaaaggctgcaacgacccaatccgctgctacgggtaaaagccttgcttctaaccgaaagcagaggatgcttccacttatctatgatagattatagcaattatcgttgaaaaataaagaagccgaggctacttatgtaacttgttcttgttcataaaactttttaagtgttcaatcctttaggtatatagtattgtttggatgttctcgattgaatttgttcttgtaagattcatcaaaactagtttgagtaaaacgtaaaatgattttttagtgtcttttactcagcatcagttttagttagtgtactaggctctaacttaaagggttaaattgatccaaaccaaagtgaactctaatttggaaaatcaaattaaatatgatagaaaacattcttcatccaaacaaatcaaaacggaaataggcaaaattttgaacattgcgttagggtggataaccttttaagctatcagccaactattggacgaggagattatactccaaattttggaattgtatgtttttctttttgggttttaaattaatgtggtctcaactaatatgaataaggtaagtaaaataagcaccgttcatacaaagtacagaagaaaagataatggaaggggaagtcaagcaagtgaaaaagacagaagcgagagagatcttgtgataacaaaaatctgcttaaatagaatgttgacaacgtgttgttcattatctctctaacgtgaatagcacgaattttaagttcagcctcgcaactctcttacgtggctttctctcagtcgcattttcgttaattaaatgctaacttatgattgagagttcatcggtttcgt

SEQ ID NO: 12346 - DNA, 574 bp, Arabidopsis thaliana landsberg
cctccgccgtatacggtggctctgttacggcggttgactctgttgaagaagatgttcagaatcagaagaaagtcgtttatagaggctggaaagtcatgccctttattattggtaacactaatttgatcatttgcttttcttttttgtgtccaagaagctgttttttctgttggtttcatgaagtttgggaatatccagaaaaactgtttaaaaaataaatctataagaaaaacataagtcttgctcgaagacttgtttctctgagcaaggagagttttgttagattctctgtgttgtctgaaagtttgacttagtcaacggtaatttaagacaaaaaagagtgagatgtcgaattttgtctaagattttagaacatatttggtcaacgatcaataagaaagtagaaacacaaatttcttctagttcttgattcttggtatggggtctgattatgatcttgtacatgttgttgttatcaggaaatgagacatttgagaagcttgggatcattggaacactatcaaaccttttggtttaattaactggaggcttaacctgaagaggattacagttg

SEQ ID NO: 12347 - DNA, 736 bp, Arabidopsis thaliana landsberg
agtacatgatcttttcttgtatttctgcttacatgatgtttttttattacaacgattagtatcagatgaagaaagaataaaatgatgagtaaattacatcattacaccagaagtgaaaaaaaataaatcacatgacaaagaagaataaataattcaagacatatacataccaagaaagaatattagctaatatcttatgaattaatcttctagtattagtaaaatatacgtgttttactatatctttgaaaaaataaagaaaacttaaagcaaaaattacgaagacaaatcagtggtgcaaggggtttggaccagatgggacgagtcgtttttcaacgccatatctcgggtcaatctcggatcctcccgccggcaaagctttccgatgattactccggcgaagatctttcaagaacggtgtgaagtcaaacgttttcaccgccaaagctcttcttcccggccggtagtaaagggccggcaaggtaataaccggagaaggaaaagggtttatgggtttggagctgaaattgccaaacaaccctatggagacgaagatgagaagagagatccatagaagaaaccctaagacatgtgagactctagtcgtcgccatggagattaaagatcataggaccatcgaagacataaatgaaatatagtgttaatatatatacgtatacgtatgtgtgtacagagggaaagagaaagagagagatgtgaattggagacagcgttt

SEQ ID NO: 12348 - DNA, 1318 bp, Arabidopsis thaliana landsberg
acatatgccctcttttctttataacaatcacaagtactagaaaaagttgatgtttgttaggtatttatagaagtagagcttaagcttactaatcaacatctttaaagcgttgtactaactttatcacctagaatcacataatgcatacttttcaaaactaagttttttctttcaatctgttttatgtaacttttgtaggtaaaacccgtgcaactaaacgtatcatatagcatgagaccctaccaaactaagtcctacattaaaagatatatcccaacatagaggaaaaggctcaaatggatgtaaaaaaaaagactgaccctgcattgaatataatgggtggcaaaagatatatgaagaaaagatcttcactaaagacgagaagatgcgagctttttcctttactaatcaacaaaatggtaacaccagtgcctagcccctgcaaacaaatagctcaaatgtcattcaagttggaactcagtaattactctttgcaattgagtgaacttacaatcaacaaggcggtgatggattcgttcatccatctattctcttccaaaagatgaccaagaacaatacaagcacaaagaagtgcaacaaagagattcaacgcaaccacagaagcgtgatcagatgtcgataacgaaggcagtttcgacactagagaatccaacattgttatcttcttctagatccaacaaacttcctctttccagatttgatccaagaacatgaacaactattcagattttggatcagcaaaatctgaagaaaaaaaagtctcttttatctttccgtgctgtccactgaaaccattcctgttttcaagaaaacagagctgaggctaaacagtgaagctgtgtaatgtatagaatgaatcagctttgactataaaaaacacaaaaaaaaagtgaatccaaatctgagacttttgatgcaaacaacaaaaagcacaaatcccacaaaaggctaatattattaaatgatggcaacataaaaccaaattctcaaaatttcctatttttggtaatagcacgaacatgaaattaggtcggaactttaatcacccagatttcaaatttcacccaacaacaaacaacaaacacaaaaacttcgaatgaaaaaaaaaaaaaaaaaatggtggatctgatctgaattgcttaccttgaacaacttctgggtaatctaattatcttcagtctgatttacaaaagagcccagaagatcaaaattcaaaattaaggaagcttcgaaagctaaaacctgagattcttcttcttcttcgtctacgaggaacgaaacagagaggcggggtcgg

SEQ ID NO: 12349 - DNA, 729 bp, Arabidopsis thaliana landsberg
ttggaggaattctgagaaaggataactttaatgtaggccacttcgtcaaaagatgctgtgattgtcccattggaaaaaagctcgtcacattctacggcagaaccaaaaggtttgagctgtgattcatcaaatccttgacttttcaaaagttcacgcacgaaagtgccccgttggtacccaatagttttgttaaattttatgagatctttccaatttgtaaccgttggttgcaacagttttactgtgaagaaagatgtgagattcgctgtatagctctgaatcagcacaagcaccacgaagcaccacaccaacaccacaaacctcgctaaattactcaccaccttctcacctatacacgcaaacaagttgtaagtatatcattattatcttgtttcttattttggaacatcttattgataataatttgagatacaatatctactatataaaaaccgtatttagagttctttcatcatctgccaatttttgtaacataaagtcggaaatcttgccggttaaaagtttctatagtgaccaaggttgaactttaatgatgatcatagaagatgggactcgtttcctagcggtatcccacaaagaagaataaactaagactcgaacaaataccactaggctattccgacttagttcttgattgatgttacttacggtgggcaaagttcatagtggagaaagcgaaccacaaactggtgcctatttggtggtgag

SEQ ID NO: 12350 - DNA, 567 bp, Arabidopsis thaliana landsberg
gccaccgctaatcgctagcagtccttcgccagagctcgcgaattttgaattcgccccaaatccctcttcgccgccgagaaccacaccctaccgtggccagccttccccaggtctgctcattcccttcttgttcctgttctagcatccttacatgatggtgatgctccccgacacctttaattgaaccggaccgccagggattaccgggaacacgtaccatttcttcatcgtccgcggttcacgtggacagagcaggatagtttaccaaatgagaaattaacttaggggaatcattcggggagagttcaattgagtgttagccgctcaggagcgccggtcatagccccattcggccagtacaggagctcgccggagcctctccacgctcgacgccgtcgaggacctccctctgcgaagaaaaagaaaccgagggagctttctgtaaactgtcagtgacacaagaaacagtaataggagcttgttttcagttaaccaaaaacccggggtcctctgtgcaaaacggccagcgcggaccgtttctgcctgggtctgggccgactgggttag

SEQ ID NO: 12351 - DNA, 1147 bp, Arabidopsis thaliana landsberg
  unsure (1)..(1147): unsure at all n locations
aatgtctttccctaaactagataatggaggaggtgatggatctctagtcccaaattcttcatttccttgagatccaggggaactcaaattgccatcactgtctctctcatcttggcttccatgttcatcatgtcctgagatattcagtaaacttatagatccagggcaataatagacttactcttcagattcaaagaggattactaaaaaagataggaaaaaacatccagcacttctgcaacttgcaagtatccagaagcaacacagagacaactcagacatgatgtgattagagtaaagtcacaaactttggaacaataattaaacagagattggctaaatctcaataccccatcagattcatccccacccaccaaaaattccctataaagtaggaccaaagcatcattcacttcgttttgtataataccaaaagaagaaactttacctaacaccagaaacccatttgagacataaaatcctgtaaacagcaactagaatcaccaaaatccatatcgatccagcaactccaaattttaagcgaaaaccaaaaacagtaacaaagccagtaccatgaccattgaagcctttgttgttggtagcgactccagtggcttcctgctcctgctgcttcttcttcaaagcctttctctttttggcaccaggcggcatgatcaatggatttacgacaaaaacagactagagatatcgaagataggttcggtattgtattgccgtattggttagtcgttcacttgaaagatttatggagcttgtgggtttgttggtttgtgtgatgtgggtggagttgtttctctcctttttgtctttatgttttggggaaaatcaaatgtcacactaacagtcacaaaagcctagagataaggctgagcccatttattaaacgtgtcggtctgcctccaaaaatccactgttcatcactattgttttttttttcattacaacttttttttgttcatcactagatttataggcttctaatattagattgaaaattcccattttgatcacttaattcatctttttcagatcaattgtatgttttagtagacacatattaaaaagcaaagncggtatggagatatccttaacattacagtagagttgggaaaatgcaaaagtagaa

SEQ ID NO: 12352 - DNA, 1214 bp, Arabidopsis thaliana landsberg
gtactgatgtcaaggataacaagtgaatgaacatttaagagaatgtccctacagtcaatttatacttctatttgtacttctacaatagatgtttggcttatagaaaaaatgtttaatgaattaaacttcactgacgttctattgctcgacttctacgtagtagacacgaatacatgatagcatttaaaagttcttaagcaatatcaaacacagaccggaaaataattatcttgggatcaaagcaattttccaacttggtatttagtaacagaaactttgagatagttgtagaagacattatcttaaacatactttcacttgttatttttgataaatgaactaatccccaaaaatagatagatgaggattcttaaatttgttgtttgtatcaaaagacgtcacataaagttttattcaccagaaactcgatgaacatacaattgaaaaataaattgtgcgtagacgtcgaaacgatggaagaagaggcaaaagaaagagaaggtgtagactactctcaactaaaggtaaatgaagagcttattgctggtggcagctggtgacagaatggcaaaccccagccagtttgagggttcaatgatgttgccactgtgcccaaacatgttccagcagcaactcaacatcattgagtttaatcagcaacaaccactgaacccaaacacgttccataaacaatgcaacatcaatgagttcaatcagcagcaaccattggatctaaagatgttccaacaacaatttaacatcaatcagttcaacaagcaacaccgaaaccaagatttttatggacaactctaaggaagttgacgtggatttgggaatcatatttatgtaaggattgaagatttattcaagttgttttagtttacgtttaaaaggtcaggttaagagagaagcaaatctatctaattgttcttcttagatagatccgtgagagggttcagactattgtgacctttttttttttttcaaaaattttgagcttttctattgagacttttttttctattttattcaatttgttaaatttcattgaaaaataatatgaaagtagtcttctgaaatgttctttttccgactagttgatgattgctttggtcaacgtttcaaagaatcataatttgctttagaaatccaagaagaaaaggtcaacaaaaggaagaattaaaggaaaatgtgactctttggaacattgacca

SEQ ID NO: 12353 - DNA, 674 bp, Arabidopsis thaliana landsberg
ccatgcagagtttgtgaacctacaagaatatgctttccagatatatacctttgagcagacaacatcccttaaatcttcaagagaaagcacagacaatctcctccgaagatcagaactcttgtgaatcgaaccaatgttagccaaagacagatcttgcaactgaagcaaaccagataaaaacaaatgtgagaatctagagaagcgtttgccaaaaaatattagaaaataaggaagagagtagatcaatgacttcaaaatccaatagtaacataacaaaaatacctagtacacaaaactacctatctattaattaaccatgattaccaggacaataccttaggtattttcttaaaggcaagtagctgaaacgccataaaacgatcgtaatgaaattgaagtgcttcatcatcagttaattgtgttccatcatgatcctttatctcaaacttttcgtagaactgtaacaagtcaactagttgggcgaaaagcttccctttttcatgtttgtatagggcactcagtcgacatttggcaacaactgctatatccgccacaagaggtcttaggtatctgtaataatcaagatgaagagatggagaaaggaaaaattaaggtccagtaaatgaatggctcagaaatggacagtgtagaatgaggaagcgtaacaagactaa

SEQ ID NO: 12354 - DNA, 393 bp, Arabidopsis thaliana landsberg
catctttttcaacaagctctgcaggccctgtttctgcggggactgtgggcccaacttcagcttcaacccgggctttggcagattcctttgtattctttttacccatgctaggtacttcctcagtaggagtcagtaccttcatcgaatctatgacagcgtctagtacgctgaccattcttctcctttttggagttactgcagtgatttttgacatcttcagcagctccgtctcttgcgacgggctcagagtcttggttgctctaccgatttctgtaactttggctcttcggccgtttttgccttaacttcggcagaacgcctcggtacttcgaccggttcagccttcctgctgctccgttaataccttcgggtcaggcacttcaacaacggagg

SEQ ID NO: 12355 - DNA, 1554 bp, Arabidopsis thaliana landsberg
  unsure (1)..(1554): unsure at all n locations
gtctaaagacatatcagttacttacaatgctgtttttcttttataacagatgggatgtacttgatggaagttgaccgtgtgcttagacctggtgggtactggattctgtctggtcctccaatcaactggaaagtcaactacaaggcatggcaacgtcccaaggaggaccttcaagaggaacaaagaaagattgaggaagctgctaaacttctttgttgggagaaaaagtatgaacacggtgagattgcaatttggcagaagagagtcaatgatgaggcatgccgatcaagacaagatgatcctagagcnnnnnnnnnnnnnnnnnnnnnnnnngatgatgtctggtaagtttcatttcttatattcctcattcttttttccttgctagaaacatcaccgtatggctctaataatgaatcttctctaggtacaagaaaatggaggcatgtattacaccgtatccggagacaagtagctcagatgaagtagctggtggtgagcttcaggctttcccagataggctcaatgcagtgccgcccaggatctctagcggttcgatctctggtgttactgttgatgcctatgaagacgataacagacagtggaaaaaacatgtgaaagcctacaagagaatcaacagtctacttgacactggaaggtaccgtaacatcatggacatgaacgcagggtttggtggatttgctgctgctcttgaatcccaaaagctttgggttatgaatgttgttcccacaattgccgaaaagaacagactcggagttgtatatgaacgaggactcatcggtatctaccatgactggtaagtaaaagattattccctcttctcacaacttctcaataactcattgtctctggtttgagagactctctgtctactgaaatggtttcaggtgtgaggctttctctacatatccaagaacatatgacctgatccacgcgaaccacctcttcagtctatacaagaacaagtatgtataactgttttgtgtaatgattcataacaacagttttttagaggtattttgagattgctaatgtatgaatccgaaactctttaggtgcaatgcggatgatattcttctagagatggatagaattctccgaccagaaggagcggttataatccgggatgatgtggatacattgatcaaggtgaagagaatcatcgctggaatgagatgggatgcgaagcttgtcgatcatgaggatggtcctttagttcctgagaaggttttgattgccgtgaagcagtattgggtcaccaactccacctcgactcactgaagttactttatttccggtgtgacctgacattttgatcaaatgatagagctttcgtccttagggaatgtgagagagctgcaaatcttgtctttaaacactttttgaagtatctatttattgatgttatagtttatttttgtttcccaatccaaaagcttggaactttgtggcgtacccttgaattctcaacttaatagtttatgcacaaaacaactatgtttcttcatctcttacaaactcagcttgtttttg

SEQ ID NO: 12356 - DNA, 971 bp, Arabidopsis thaliana landsberg
ctaggacagtggacccgtacccgatcgggtattacccgaaccgacccgcatacccggccctacgttatggctataagtgtatttactatacagaaaacgttaatccaaacaaagaatatggaaagcatgcatatctatgtagactaatgttaaggctattacaattggcaaccgaaaatttcgtgttaagttgtaatttagtatacgtacaaaatctaaaagtacaatagctttgtattaatatttgcaattttctaacttgatggattcagaaaagaacccaagaggtttcacttcacatacatgtatttttgaaaaataaccatgtcacttttacaattgttttttaatattaacaacggacggctacgatggaaccatcactcgaggaaatcgcgatcctacaattacatttagccgcgattcggtgagtaaacaaaccgagaacccgaacccgacccgccatctccagcttcgactctatttccactgttgacccggaccgatccgaattttgaaattgggcggcggagatttgagaactagaggccgccgcgagaggaaacgactgaacggagaaagtagctaacatacgcttggttcgacccgattcgatctcaccagcaggtacgaaggtataaccgatccggtttccatagtaaaagagctggattacattgttgtagtgtgagaaagctgcgcggttagggtttctaacggcggagaattgagaaaaggtgaaactaacggagctattagcgacggagaatgaaggaaccttgacgctagtgacggagatctcaggatctctcggtctaaagactgtgagataaacagtaagtgcggcgatgattaagaagactatgaagagcgtgcgacggcgcatgaagcgaggtttgacaagacttcgcatttctcggtggagatgtttggtacgatgattaagtgtccatagttgggataagagttat

SEQ ID NO: 12357 - DNA, 1365 bp, Arabidopsis thaliana landsberg
  unsure (1)..(1365): unsure at all n locations
cacgtggcctgccgcttctgatcctctcttctcttccacaccaactctgtttcatcacctgttctctatgttccggttagttctacgccctcttagaaacgtatgatttcaaacattaaaccacaagtttcgtgagtaataataaatgaaattttgtcattatgggtggcttttagttaagtcaagtttgtttttttcccgctcattatttgtcttacattgtttggttagttttatgctaacttacgcactctgctttgttctgtttttgcctttgttaccatatcacaaagcttctgtttttatagttaaatgaagtcttttttttttggcgcttaattgtttccctatctaacaatgtttctttgattggggtgaaattgcagtttgaggacattgttaaggtggaaagacctccaagctttgtagaggaaacattggttgagaagaaggaagattcgttttcgacaaacactgattcatcatcttctcatagccaattcaggagctcaagtccagtgtcggttcnnnnnnnnnnnnnnnnnnnnnnnnnaaccaccaacacaacctcccttgttctccctggaaagcacggtcgtccacgcacaaaacgccctcgtccacctgtccaggataaagatagagtcaaagacaatgtgtgcggtggtgactcgcgcctcatcattagaataccgaaacagtttctctctgatcacaacaagatgatcaacaagaagaagaagaagaaggccaagattacttcttcctcttcttcgtccgggattgatcttgaagtcaatggaaacaacgtcgattcgtattcttcagagcaatatccgcttaggaaatgtatgcactgtgaggtcaccaagactccacagtggaggcttggtccaatgggtccaaagacactttgcaatgcgtgcggtgtacgttacaaatcagggaggcttttcccggagtaccgtccagctgctagtccaacatttactccagctcttcactcaaactcacacaagaaagtggctgaaatgagaaacaagagatgcagtgatggtagctacataaacgaagagaatgatctgcaagggctgattccgaacaatgcctacattggcgtagactaaaacatagagaagatgattcgatttccatgcgttgaagtgattagatatgccaggagtaggaaagagtcagtgagaagaaaagtttttagctttagaagagatgaaggaagagagcaatcaattggagggattaaaagttagatgagaattgattgtgtttgtattattttgtatttgtagtgtgaatggtcaaaaaactcttgaaacagaggaaaagtaagttgaggaagagcagaag

SEQ ID NO: 12358 - DNA, 872 bp, Arabidopsis thaliana landsberg
gcttttgggttatttcgcctgttgaggtgagattagattttttttcttctcactaaaatccacacaagtcggaaggatttcaagacaagagactaccctctactatttactcttaagtctagtcatgtataaaattgacctggttagttcataaattgaagttccatacactgatacaagatttcttgaatttaaagacttatataacaaacaaacaagcattataaataattatccaaacattgactttgatcaccaactaagaggaaaaatttagactaatttaacatgtttcaattccaatccgaaaagaatatgattaaagtttaaaacttcataaaattccatacattgataaaagatttcatgaattcaaagacttgtacaagaaactatcattataaatatttatccaatgacttagtaagtactcgcaacaaagaagatacaaatttaacatgttctagtctccaacccgagataatatgggtaaaaggttcgaaactttttgcttagttaagcaaaagaagtatattagtccatataatagaaccgtagtggtaggctctaccatctcatctcttgacgacttaattactccctaaactgccaaatgtcatccacattccacatgggatcttgtgtaacatcctcgtacgctgaataaccatccgccacgtgacattccattgagatgtccgagtttaccatgtaatcctccatgccaggaacatatcctccgaattcttgaacattgccttcatggaaacacatcgagccatcgatgatattggtgttgctttgatccataaagtgtggaactgttgttagatgagacatgcaagtagaagttgaagaagaaccgtctatgt

SEQ ID NO: 12359 - DNA, 1226 bp, Arabidopsis thaliana landsberg
ggaggattgattcttcgtcgacacctctggttgcaagccatttgtattggacaaatcttcggacacgttcttgattctctggaggtagttgacgatgtctcatccattcttcagtgtctcttctcttaactctccattcctcaactcttactgacatcgattgcagagaagactttccaccaaattaaaaatcatgaagtctattgttagaaagacaaaaaaatgtctctgtattgaaaagttttgcagagtgatgcataagctctgaatcttacttgcatgttaccaatcaggagtgtgaagagaatcaacccaaaaatacaaattgttatacagaacaaggtctcgccaaggtatacacttgtggttatattctgtccataagaactgtgaaacaaaacctttattaaaaccaaaggaggacaatttaagcagatactggttagataaaaggttgtcataccttagatttcttaaaccccaccaaagacaatacaagtacttggacacaaaatctgttgtagcaacttgcgtggtaaaggcttcagcaaacattccgaatttgaaattggtagtgctgcttgtagcatcacaatgagaaaggacctgagtaacgttctgccaatactggcgctctggttgttctaaactcttgcaatccaagaagctaggaagacaatccaaaactctcaaagcgttgtctttcttgcatacgttggaccagcacgaaaactgccgcccgattgatgacagataccacattgctcctaacacctgcccacaaatagagattcttagcaacttaaaactgaagaaacctaaagatttgaaaaaaaacacaagataaagaaaacttacgtgactagcaaggatgtacaataggaggttgtatgcagctcctgcccaagcagtcttggcgataaacccggttgttttgataatcctttggttgagtgggaatatgatgaatgatcttggaatgtattgaacaagaacgataagtgcgagagtgctattggcatgattagcagttccatttgtggccgctggaattactagccaaataacaagctgagatcaaaagatagtcagaaacaaagcatgaggctcccaaaatatctctgttctttaatcttctagctaccgcctaacgattttttgaacattgatcttagctaatcgtaatccatatcattgctttcacattcaaaataagagcaaaatct

SEQ ID NO: 12360 - DNA, 835 bp, Arabidopsis thaliana landsberg
ttatcaggccaggccatataacgcactactgatccactggtagaccgtccttccgtggaaggggcatgatgacgataattttccagtggaacaacctttttccacgaacctccagcttctagtgcgaagacccagtgctctgacttcagattacccaaacgtggcaatagcgaggatatcgcaaccgtgcagactagtttgtattgatcactaacagggtcgtgtccgatgtaataccggggatgatgcttcgtttgaccttgttgaactacaatgtcggactttatggcgggtaaggtcaagagttgtttggtgctggggttatagatacgcgccttttttctgcgagagaaacacatcaagccacgaacaacgttcaagaagaagcctcccatccctgggatgctcaaatcttgctcgaccaccacgaaagaagtgttgcctcgagacggtgatgatatagatagcagtacacggtgcccgccgtcatcctttaaacacatgtataggcgtggttgttgtcgtgtgaccgtagtatataaaaggttgcaaaaatatcgactagaaatgagggatgaccactgcttagagacgcacttgaacctcgtcagggaggttaaaggaaatctcataagaatttccatcacatgatcaagatcaaaattctgcagtaagttctcacatatatcttcttcttctttcttggtgggtggcggctagaccaaaaatagtagcaaataagaacggtttaaacttataacatgaaaaccacaagtaaaaattcaaactttaagccaaagaaaataatcgctacgaatggcgtattatacctgaa

SEQ ID NO: 12361 - DNA, 1239 bp, Arabidopsis thaliana landsberg
ataaatttaaaccgatatatcttaaaaaaaaaaaaaccattacctaagaagcaccattggttttatcgatgatccagcgatgaatccaatataagttataataaattcatcaccatcaactaaactaaactaaactaaactaagccaaataatggtcctcaaccaatgagaagcacaaaatgtaaaaaacgtggttgacaagtgacaactaaaccagagagtggtgatgatttttatcaagtaccctggctaggtctggacccacattcaatcagccagccgaacccaattacatttttgataaagccttggagtaagtttccgaaccaaagaagcggtttagctactctaataccattcctgatgagcttcaacaacatgcaaacactacacctttagagtctcagagcatttgtagctgctacttgagagatttgagtgacctatattatagactctttaagtgtccgaacaagtatcaacctgttgtgttggtaatagatttttgaaaatccatatgattgaacagtaaataatgcgtcctgaaaactgtagttgacaaggtacatcagtgtaataataataacttaaaagagaagaaggtaatcctagtaaatcaagaacatcaaagccagcattttccaaacaaacaaaatacagagaaagtaactcattttaactggtgcatactagagcaaggttcagctggaatcactaccaagcaactccactaattcggctttcttcatctttgacaacccttttagtccccgtgactttgctatgcctctaagttcgaccagcttcaattcactcaagtctttcacggcttcttcctcagcttcatcactatcttcatcagcatcatcgagagactcatcatcatctgataacacatctaaaataccatcatcctctgataacacatctaaagtaacatcatcatcctcctcctcttgataaaatgatgatgactctggtttcagctctgaatctggttcaagcatagttgtcacaggcccaggttctgactcattttcaggctcatgctcatgctcatacgcaggctcatgttcaggctcatcatgcaactctactgtatccttcttctgggtccaggttacactgtaacttgatgattgatcaaaagttgcctcgctagaataagctggcggtgattgagatcttggtactggcgactttctttctgagcttgatgttggtctggaaaggatgatg

SEQ ID NO: 12362 - DNA, 555 bp, Arabidopsis thaliana landsberg
acagctgttttcttaggagtgagttagcaaaagaatgtatcataccgtaaaaatgtccattgacaaacacatgaacagcatgccctgcagaatccactgtaagagttggccattttcctccacgcaagaatgattctgatgccttaatatccacactgcaaaccccggaaacaccgattcattttccaagaacaaatcatgcttgagaagcaaagataatgttactattggatattcaaaatgtacctggttgtgtaccacaggtaatcagttgtatctcgtgtaacattaacctgctccaacaatccacgagctgtgattgtcccacggtttccataagtagcaatatcttcatcgtatctagcaaccgagtacaatatggaaccagatggcaccatttgcacatgtgatgtctttgcagcaacctgtccaacaacttcatattagcttcaacatgatgcaactaaaggctttcctacaaaacagcaactactgagtcattacttacggtcgcagtgttgaaacaacgtttctacaatctggaagaatgctgat

SEQ ID NO: 12363 - DNA, 1135 bp, Arabidopsis thaliana landsberg
aaatgttcccaccacatcaccttgtatcgaatatcgagaagatgttgtcggtccccacatcgacagaccaaaatctgacagctattctcataatcataagaaatacactcggtctcttatgaaaattaacatataaatcaaagctagaagcttacattacctgaggttggagctcaagtgatagaaggacgttagaagttttgacatctctatgaatcactggcttagaacatcggttatgaagatagtctaatgcttccgccaacccgatagctatcttgaatctctcttcccatgataatacatactttcccttttgcttacctgcagaatcaatcataacacatttcacactttataccaaatcaatcagaatcttaaacataagttgagagtgttgtgtttaccgtgaagggtttcttctaaacttcctgtgtttgaaagattgtaaacggagattagttcattgtcttggacacaaacaccaagtaacggtgagatgttttggtgactcaaagaagagataatgttgatttcatgaacgaaatttgtcattgcttctttagatgatgacttcaagattttcactgcaatgccttttccatcttcaagaatccctcggtacacttcgttgcatcctcctttcccaatcacattctctgtcatgtaaaagcaaatatcaatacaaactcatcaggagaagcagagaaaaaaaaaacagagtaccttgagagaaatctgatgttgctttcctaagaacattgtagttgaaccatttgttattgtctctcaatatgtccttgatttgtttctttatcaagcttgtctcatagtttagagtctgttgatgatttggaaaccgttcaggtaagctcatgacccaattgaccactgagacttttcgtgtgtgccatttgtgaacttgttgtggtgtccctaaacttgctcttttaagaaatggccaacctggtttctcgtctagtaatatgtctatcgatggaagtgaaactgatcttcctgaaattctcctcttttcttcacccatcttcctgaaacttccttctcacacttctcctttaaactcaatttcttcttttgctgcataagtaacagaggaaatcaaaccaacaaaaac

SEQ ID NO: 12364 - DNA, 665 bp, Arabidopsis thaliana landsberg
taatttctagatataaatttaaactctcggtctaattttcatccgttaaaaagtttatgatttcaggtatgttatttcccatactcaatttcaagaaatttatcattacacaatattttccgctaaagagtaatttgtatggaaacagtagtcgaggaattcgtgtatctattagcgactttgtgtatttctcagactcaatttcaagattttattattacacaatatttttctgctaaataccaattgtatatggaaaacaatgttcgggtgagttcatgattccaatagcgaatctggctaatttttgtagtatgcgtcgttgttgtcgtcattgtcacgagcacaccacaataatatcttaattttgtgtgtagttttagctgcataactatatatgagattttaataagttgaaattctatatggtcgcctttgtttttggctcatttggttaaggccaattgttaatataatttgatgttaatatattattactaaccgaaaataaatcatataaaaaatattggaattttttttcaatttagataaataattaaattaaatttaaaatgatcattatatattttagtttttattactaaaatttaattctagtgataaattagttaacttaatgaagggtttagttaacttggtttttt

SEQ ID NO: 12365 - DNA, 783 bp, Arabidopsis thaliana landsberg
atgtctacagctcgagtgttcaaaaaaaaaaaaaaaaatgtctacagcttgaaacctaaggttaattctggaagaattaaaagtttaggggcattaaactcaaacgtttagacatacgatggtgcgtcgtttggttaatgtagtataattaaaagtttgggtatggaacataacatctaacaagtataggggttcgcctgaaaagtcttgtctttgattcttggtgcgagactgcgtgcgagtcggtccagcgtccagcatttatatcgggtccctctcgtgcgcggctatttaccaaataaaaaaagtacataaagcattttattcgttgagacataaattgacagcgtaaaatctcattttctccatttttctgaaaatagtgacatttaaaatttatgaagataaaaaaaacttcaaaaagagagaattttataataaacgaatttgcttgcataagaatcgttaaactttaaaatgctcagtctctgggtttgagtacgctagcttaaactacgcttttaatacttaactaatgcagatatcgtcaaacctattttgtcgatttcatttgttggcgacaactacatcccttaaaatgtagtttgagatgactaatgacagagttcataaattctttgcaaaatttgcaaaaaagcatatacttcttgatatctgtatgacctgcataggctatagcacatgccaagtaaatattttttttaattttcaatgtccacacgtaacttattacacttgctaaatactatatctgataaaagc

SEQ ID NO: 12366 - DNA, 615 bp, Arabidopsis thaliana landsberg
atagttccgcagatgcaaattctttagaatcaacataccaaataacgctcgagatagacagttgttctccaagtactcatacaccaatatcaattggtttccttcaacacaacatccatatagcttcacaagattcggatgttgaagagctgagatcattcctatctcatttacaaactcgcgatttccctgcctcgattttgcagacagttgtttaactgcaattaatttcccctcagataattcaccctgcaccaagagaaggaccactttctcaatattcttccaaaatgtgtacacatcttctgtaaacaatttcgtatagagctaacaatgtcgcagaattcaagtgaattaccttgtaaacagagccaaatccaccttcaccaatctttcttgttacatcgaaattatcaggggctgcttttatctgccgtagagtaaaagttccagtttgaagatctagaccccttagctctgttcattcataaaaaatttgacatttaggccccagaatacataagaagttacataagattcaaaaacattacaacatcataagaaaactaaaccttatccctctgtcaatataatttttggtaccccctttttttt

SEQ ID NO: 12367 - DNA, 1370 bp, Arabidopsis thaliana landsberg
agttgatgaaaagaaaattttggtttctattattttttagctttaacgacatcctcgttaaacatattaccagttatatcgctggaccaaaaggtatctggatgtctaaataggaagtggtactggcattaatgtttgttgcgattgcagtttctttcagctgagcatcctctgggagctcaccttagagcggcattgcgaagagatggtgaacgttgtggatcagttcccgtttctgtcattgctacagttgatgcaaagattaacagtcgttgtaaaattatcaatccttctgtggagtcagatcctttcttggccatttcctatgttatgaaggctgctgcaaagttggcagactacattgttgcatctccgcatggactccgaaggaaaaatgcatacccttcagaaatcgtggaagcactagctactcatgtatctgattccctacatagcagagaagtcgcggctgtatatataccatgtatcgatgaggaagttgttgagttagatactctttacatttcatcaaaccggcattacttggatagtattgctgaaaggctcggattgaaagatggcaaccaagtgatgatatccaggtgattatattgtcttttttctattagtaactggagctttcttggtgttaatctggtatgaaagtatttttttcttttcaacaggatgtttggcaaagcttcctgtggctctgagtgtagattgtactctgagattccaaagaagtacttggataattcatcagatgcctctggtacttcaaatgaagactcatctcatattgaaaatctcggaatgcacgagcaagttacatttgtggcaagatattcacggggatgcaatcttggcatctgttggttaccgatggaagtccgatgatcttgactatgatgatgtaaccgtaaattcattttacaggtctcttctctcctaccgctcagttttatgtctgatttgtttcctttccacatcttcttctggaataaggattttaggaatattgcattggtgtaacgtctactaactctgaagtaatgcatttgatgtttgtctttgccttccaatgaagcactgcatatcttattcttatcatgcactgatgcatgacattggctttgtggctgctgcagaatatgttgcggtatgtcacccaatggaatctacaaaatttcccgacaagctgtaattgctgcacagttgccttttgcattcactacaaaatctaattggagaggtccactccccagggagattctcggcctgttctgccaccagcaccgactagcagaacccatcctttcttcatctactgcacctgtgaaatcgttgtccgacatattcagatctca

SEQ ID NO: 12368 - DNA, 737 bp, Arabidopsis thaliana landsberg
ataacccatcaagtcttctcttcaaacaatcaaacgagctgtcaaattctagagccccaatacactcccactcccacatttctacatatatatatatatatgcatttgtttagtgtttgtgatcaatatggttttattcattgttgtgcataaaaagacttccccattgtttgctcctccatgtgtaataacagcttgttgtgttgttttcattaattcaagattaagacatagattttctccaccttgaaggtgttgttcttcctttgacaagccttgtcttcatattaccaggagtccgtggctcaaatccttcaccattgtcaccagatccttcctcgcccttttcaacactaacacttcctctaattgacggtactaacccgagcctcttccaccggaaaaaacctttactcccaccactactcttcttctccataagcctctccagctggaaatgcatagcgccacactgactctgcagcctcaccacatcctcccgtagccttcttatctctgcttgttgaacattcatctcacgtttagacaaacaccgcgctgcagaacctccctcgaggtaatgtgaaccagaagcgtttgttggactcctcgtagtgctgcttatcgagctactattacagtcaatgtgacgacttagctttgtctgctcagtgaacaacactccaatgattgctctcaccggtaaacgatcattctgagccgcgtgaagagctgct

SEQ ID NO: 12369 - DNA, 765 bp, Arabidopsis thaliana landsberg
caagcagcttcgtgatggctcattgcttacttggcttttctcatctttcacctcttctcttgtcatctctctcctcctcctcctcctcttcctcaggttctctctcactctctcttataccatactcttcacgatatgaatcatcttgtgctgcttcttatctatgtgtgcttcggttaaatgtataaaagagggaggacgtgtatgacgatgacgtgagtgacaaggaagaagaaggagccgtgattggaatgtggagtgcgattttttggctaattataatgacacttctcgttgctttgctctcagactaccttgtctccactatccaggtgtgtgttgactagagctttttggaaaaatatgttatcaaaaatataatattttcttcaaaacgtataaaaaatatgaaatggacaggacgcagcagactcgtgggggttatcagtgggattcataggaataatattattaccaattgttggtaatgcagctgagcatgctggtgctgtcatcttcgccttccgtaacaaactcgtatgttttacttcttcttttttccctagattattacaacaaacaaataacatcaccatcttaatttttgaacaaaatatgaaaatgtacaggatataactcttggaattgctcttggatctgcaacacaaattgctttgctcgtggtaagcataatattagtattgatttctgtaaattagggaaaacaaatatttcttataatattcctcttagattataagcttg

SEQ ID NO: 12370 - DNA, 998 bp, Arabidopsis thaliana landsberg
gatcaaagaattcagatccaaggattcacgtaatcatcaaagatgggagctttaagtctagcctgaagcttagggttatcatccttcttaagaaactctacataacgtggcacaactccagattttatcacattatcagtaggtgggcttctatctgaacaatatataaaaccacaagactttaagagacaattcgagtaaatataagttcgtatctttttcaactcaagatcaaaggaaagtagagaattttaccgaatgatagagccaccctgaaccgagttgtgtactcaagctgcaatgaaggatcatccgagaaaaccccagtgatcatattcgctatctccaactacaataaccatcaccagagatctaatgtaatttaattacccaattcgaaagcattcgagtataatgagaaaggtcgtatcttttaaaacctaggtttcactaatccaaaaccaaagatcaaacttttaccaaactctcaaaggggtcgttggaaatcaacttgtaatcaggaggcaaaacttttacacgacgtttcttcatcaaattttcgttgcgtttgctcttgcgaatctcgactaaaaagtcttctcttcttctgcgtccttcttccgcatctacagagactttgtaacggattcgacggatctctgtcttcgtgctcggtcgcaaggacatagctttctcgattcttcgacctctctagatcaaaattgaatcaattgaagaaaacccctagaaatttcaactggaaagggatttgcaaagtgaagaagagaatgcaacaatggtgaagaagaagcgacaacagtttcaatgtgaagaagcgggagggttttctaaatatcgtttttaattgttaaccgtatttatacagtaagttaccatcattaataatctaaatttaagataaagtttacaatcataatattaagagctccaaattgaaataattagtcaatgattattataagctaaaatacttgaat

SEQ ID NO: 12371 - DNA, 1335 bp, Arabidopsis thaliana landsberg
acctgaaattctaaaaaacgccctgaattcattcttaagggatccactttcaataacatacatatcattcctcagtggtcgtagttccaaggaattaatcataggtgttgttttccctgtctttacaagacatacctgcaaagagttggatctcatcacgtggatgatctccttgattgctaaaatttcgttcaccgttgcccacttatttgatccgaggtacagatcaaagtttgggatggtattaagaccatcgtagtttccatatacgaaactagccctaatcagatagttcatgccctgtgtaacattgagattgtagcaatttcgaattccatctggaaagtatctcagcctcaaagatgacttaaagttgtcactttcttgccccttcccaattctaccagtttttccaccccggacatagccatcatctgacatatatgttaattcgaacatgtcgtcgttataaggagagtcgttgggcaacaaaccgcaatccaaactgatgaatcctatagtacaattatatatttatattagaaaagttgttcaatatctcgatcagaaaatataaatgtatgtacctttttgattttgagcttgaacaagatttagtataaggaaaaaaatcagaaaaaccgcacaatgtctctccatttttcttctcggctttccaacaacataactgaagcgaccctacgaatttataatatgaatccatggatattttatgagcctcttttcaaatcgacatttaaaaaaaaaattaacaatcactttaaagttttgttcaggtcaaattaaataaaaactacttttgccggcagagagcaagatgggaaattgtttatttttagaaagatgatacaaaatgtggtagtgtcgaaaattattccaattccgtaaggaaatgccaattactttatcttcccaaagccctcacgtttactctagacgtccaagtttacacgttgtaatttgcatgaagattataataacatttggaaataggggtgagcaatataaccctaaaccaaactaaatactacatcaaatcaaaccgatccaaacagaagtgaaatgttttagtttagtaagcttcttctcaacctgatttgatttcttgtttaccttaaaaaccaagttaaaggaaatccaaatttatagaaagaaaaaaagtttagaaataattacgtataagatttttatgatcataaaactggaacggggttaaaccaaactaacttgactctatgttgggtttgatgagtttctcacaccccgaactaaaccaaacttgattatcccctcctacttgggaaaagaacagaa

SEQ ID NO: 12372 - DNA, 1242 bp, Arabidopsis thaliana landsberg
cctctgtgtgttttcgaaatcaagatcatcgtcttcttcgtttccagtaggaggttcaaggacactaagcgcattcctctgcaactttacttctattccatttgtcaaaacctacaaaccaaaaagcacaacaataattctgattaaatacttttaactccataaacaagtactgacattgattttaatacttcaactcctactgttacttccataggaattctgggagacaagaactggtggaatgtgatatcactaatagtaaaatataatcgtgatactgaagaaattcgtaaattatatggattattctctaaagtttaaagctagaatatggtgaagttactcctttaggtccacatacacagagacactatcaaaaagatcttgcagagcagtttataatataaactagccaaccaaagcataaagattttataaagaaaagtaatcgacagaagtgacactgcttggggacgaaaatgactcaactaattaagaaagaacaaaaaagaagaaaaacctctaaaacaaatgattaacattaatcaaaagactaacaaatttcaaaaagccagcttggatccttaaggtggagaacaaaaatgtcaagaaatatgatggagaattagataacaagtgcatatttgttatgatgttttattgaccaggcgccaaaataaagttgcctcttttttggtttgcctaattaatgtttgcaaactcagaaatcacttatcccctatagatgattccttaaattgagcctgaaactcagcatgaagcaccaaaataatcaaagataccaaaatgtttcagaatctttatttgatgcgaactaatttttaaagaaaaataaaaatcactcaagggtttcatgaataaaataactacctaagaaccataaatacaaggttaaacagtgtaaaatccagcaataatggtgacttgaatgctatcatgcatgcaacaagttcaatcgccagatttcgaaaattttacagatttaacatttggtaaatacaaaagtagatttgattttcgatcaaactaacaattcttggtttaaaattagatgcgaggaaacataattattgacttgattagtgaatctataactagtaaatcgaagctcatgaatgattatatctaatttaaagttgatcatgttgagaaattcaaaggaaaaaaacccaaatttgaaatacaaaatcatcccaaaacccaaattatgtatcatca

SEQ ID NO: 12373 - DNA, 772 bp, Arabidopsis thaliana landsberg
aagttcttatggaagaggacatggaagataagccttgtatgtttcatgatgctttatctcttcaagcagctgagaagtctctctatgaagctctcggcgagaagtacccggttgatgattctgatcagcctctgactactactactagccttgctcaattggttagtagtcctggtggttcttcttatgcttcaagcaccacaaccacttcctctgattcacaatggagttttgattgtttggagaataataggccttcttcttggttgcagacaccgatcccgagtaacttcatttttcagtctacatctactagagccagtagcggtaacgtggttttcgggtcaagttttagcggtgatttggtttctaatatgtttaatgatactgacttggcgttacaattcaagaaagggatggaggaagctagtaaattccttcctaagagctctcagttggttatagataactctgttcctaacagattaaccggaaagaagagccattggcgcgaagaagaacatttgactgaagaaagaagtaagaaacaatctgctatttatgttgatgaaactgatgagcttactgatatgtttgacaatattctgatatttggcgaggctaaggaacaacctgtatgcattcttaacgagagtttccctaaggaacctgcgaaagcttcaacgtttagtaagagtcctaaaggcgaaaaaccggaagctagtggtaacagttatacaaaagagacacctgatttgaggacaatgcggta

SEQ ID NO: 12374 - DNA, 1055 bp, Arabidopsis thaliana landsberg
gggtacatttacttctcctaaactattgctttcatcttcccttaacagagaagagtagccgcaacttccaccgatcggattccaacccgctgaatattcgggtccattacctatccctcctctcttagccctcctaatacctacacaaagatctccattctccgctctcatgaagacaatcgaatctcccgccacaagcttcttctggtttacaaaattactccatccggttgtaagaaggtgacgccgaggcgtccctctataaatatgtctaaacttccaaacatcaccatgaacatccttagcaagaatggtctgaaccggcggctcggcgttataatccaacctcgggaaaatcgtctcagcgcaataacgaggaacagagaaacccccaccgttattagcatcagactgagtcaaagtcttagcaaacgaaggcgttttctcactattactctcgaaaccgttactatcttcaccatcaccatactcgtgatcaacatactcatcatctttcaaaggatcaatctcagtttagcgaaaacctcgtcagattcagcatcagccatatacttaatggctaaaacacgacacaaaaccatgggaggaatagggagattaccgaaatcgacacaatcgtaagcgttttcggcgtgaccttgaggaaagtaaaagactttagagttcataggaggcatacgagccataccaccagcacatgcatgccatagctgaggatctaaacctttctctgttccacctttcattggattcatcacatttatcatattttttgtgcccgtttttgctgcaacaacaaatacaaatgtatcagcttttgtttgagaacagagtaaccaaacaaaagcacaatacaaatgctttttatttagcaactcaagtcctttgtatcagtcaactttacctaacaaacgaaattttcccggaaaataaaaataaataaaaagattcaagaaaacccgacaaaaaggaaacatttcagatagtaagaagatttcaaataccaaatctccggagaaaacaaaaaatacaga

SEQ ID NO: 12375 - DNA, 878 bp, Arabidopsis thaliana landsberg
  unsure (1)..(878): unsure at all n locations
agtcacatattaagaaatatgattgatcttctatcacttcaaaagataaagaaagatgactttgaaatagacacttaccagggtatttactataatccatgatgtgaggtgtttcagtgtggtaatcggcagccatctcacagaagtggttggcaatgtcataagccacaggattatagcatgaatattcataatcgtattttttataagacaaaataataaaatcagagttaggatccattttttctagtaacggtatacgaaaaaaggagagctgactaaacaaattcatgaaaccttacaatgatggttattgctttggtctcttcatccatcattatgttcccatactgtaaatcattgtggcaaaatccaatattttcatcattgtcaaagagagatttctcaagcaaattaatttccatctccataacaccgagacgaaaagacttagcttcttctggtgaagccagtctcttgcatgcagtgagccaatttctgaagttacagaaaaacaaagtggagaaacagattacaaaaaagaacaaaatttcaatgatttattagaaaagcaaagtacaatctggtagaaaactaagaaatgtaccgtaatctgtcccaaagcaaagcctttttcgcaccaggcatttcaagaccatgaaactccttcatcctagttgctattcgaccagatatttcaggatcacgcaagtcacaagcagatagggtctgaaagttcatagttcagcanacaagttaccaattcagtaaacaaatacaaaacgattcacaagaattacctgaagaatgaaaaaaaccagggaagtgcanagatacctcaatacttaggaacacacagaatgagatataaaaaaata

SEQ ID NO: 12376 - DNA, 1315 bp, Arabidopsis thaliana landsberg
attgtccatacccatttcataacgatctttaggaaaaagggccaattaaaggttacaactttattaatctttagcaattaaagaatttagacataattaaggaagttatacacaaaaatttagatatacgactgttaaaaatggaaatttattgcattcttatataaatcaacttatctcaaaacattgtctacatcagtcagatatcagaattgtaagaaaaaacaaaacatattacttgcaaaacagtagaatgaaaattcatttttatttttttcactaaaatgatgaaatgacaacagttgaataaaataaactgaaaactgaagaatcatttcactgttctaaattttaccagtcagcaaatatgtgaggagaaatactgtgacaaattactggaaagtaaataaaaaatggttgtgaaaggaggaaaaaggctgtcgttttaaggggacaaaacgacaaggtggatcaaaccaaaaagtacttaatattaaaacgacacgttgttcaatggtctttgcggaccacccggatgtttacccgtttagtgcaagacacaaatcccctttttcgcgcctctttatttcctttttctctatttttaatctcgctaagtttaattattgtgtcaaactaagctataagcgacaattaattgatttaaaattctgaaccgaatccatcataaagtgatcttttatttcgtcggtccacgtgatcacatttgccaaaaatttaaatataaaatcatatagcttgatagcaaaatatcaagagtatattttatgcaaatttttacattttacaaactatctgaacttaccttatagtttcatgtgtattagtgtactgtacatcaattgtaataagaaaatagcatgcaatatttctcaatgacattttaaaagagaaatgtttaaaaatattcacaaatattttctcattcacaaaccaaatatatagaaaataaaagaatattggtcagcctaaaaattaaaaataatcataaataactcaaatcatcagcagagcccaagcggggcaaacgcccagacccacctttctttttcgacccgtcttgatccgacccgcctccacacacgaatgtgcattccacgccgcacaaattactaaaacacgagaaaagtccgttacctcctccttcagtgtgacggcgattatgctttttcttcaccgccggagttttcttcctcgagctttttcgtccacctacatttgcaacaacaatcgcgccgcttcctacatcgctgctttgatgactcgatcccagatcgtaaagcggcggaagctc

SEQ ID NO: 12377 - DNA, 1702 bp, Arabidopsis thaliana landsberg
gaaaaaaccattaccaaaaccaaaactgatcattcttaagtaaaaaccaatatattaccataccatcgacaaaaaccttagattcccaacttaatttgccatagattcaagcttgcttttctactctctccgttcgatcctcgacgaagaatatgcgatcgattgaaaagagctgtttcggattacacgatagattttagattttcgcggaagacaaatcgctacaacaacatgtatgttctcatctaatattctggcttttaagatttttccaaacttattttttttgtattagattttcgctgaagacaacgaaatttccgtgttagtgagttctatgatttagatgaatatttggttctttgtatttaagctttaggtttctgttttggattctggaatttatgatgaatcatggttatctatctcgtgaatcctgataaatcatagattagtaatttttacttgatttggtagctcgattatagctaagtgagtgagttttggagaaaaaaacgaaatagaatgttagacaatgaaggaactatagatcttgcctgttttatggggttgaatttgatagacatctcttgttagatcttgttaataattagtcaaaaactctcaaactttgctatattctcctttctctaatttttgcacttttgttttttaaagattttttttttattgctatgaaacacacattttcttaagttgtatagtttagtgtctcttttaacataacatatagtttctcttccaatttcatgtttcccttgactatctttgcttggtttctatgagatgcactacgacttgagtcattacatagacaatttacctcactctgttttagatatgtatttataagtaaggtaatttcacaaacggatttacaggtttagtgtctgaaagaggtttttatatggtaaccatggtcagtatggttttgtccatttgtggttttgtccgtctttaattcaccattcatgttttgaacacaataaaatgaactaaataaaatataatataaaaaatgcagaaaagtaaaagcggtcagaattaaagaaggtttgcaaatgaacacagtccatgcacaaataaagagtggactagtttttcaaaaagtggtatgatattgaccaaccaatcagattttttcattctttttattaattacatttcttttcctttcttctctctttataaacgtaacacatcaatattttgctctcatcatttcaacactttggcagacacaaaaaacctaaactctctcaaaatttcttttactttttcaagttgcttttttcggacaaaaaaatgtacatagcataataaaggtaaacattaattcatatcatattagtttcttctttatattcaattactaataacaaatttcatattttttcttttttatattcaattactaatgacaaatttcatattttttacttcataataatgatgtcttcaagacgtaaaaataaaaacactaagcctcaatcatctacacgaaaatgggtaaattttctattctaattcttataaagagactcagaatgaagatcatgaaaatgtatcatatgaggttgatgaagcagagaatgcagatgcataacatatggcgaacattcgagaaactattgcaaatatgaaatgcgaaaatcggaatacttgattttatataatgtaa

SEQ ID NO: 12378 - DNA, 1103 bp, Arabidopsis thaliana landsberg
ataaacaccctcccaatatttcatctttccctggaccaatcctatcatcaacagaaacaatcaccatatcctcaaacggctcacacacaacaaacataagctcctcatgccactgcggattcatcgtccgcatctgaggcgtcctcgtcgctctcatctgattccccgcttgaatcttcacaatcgcatcaggtactctacctttatcagacggaacaagatcctgagcttccattacgtgaattctcaagtaatacagcttcggcgagaagtaaactttggaccgcgtatttgaaagattcgaatggctcactcggtgcgcatccgagtgccaagcatctggaaacgactcatcagcttgagttcccatccaaacagcaagcataatctctcctctgttcgtcttcatacctttcttatcctctaacctgtaccactgtggagccaaaggactatctggaggaactctaagaggaacttcagtgagatcaatatgaactcttccaacgaaatcgtctttagtcaaaagatctttatctttcacagtgacttcaagaagattcgattgtaatctctctttagagaagggcaaagatctgtttccagatcggattcgaattcttctccaaatgcttcgttaaacctttgtagttccctagcttcacttcaacgtaaggatctaagctaccggaaacatccatgacaggaagatctcgagctttcacgacgctaacgtagaggtaatgcatctgctcaacgagatcgtatgtgctcgacgttttatctccactgcttctgtaatagtaagattgtctcatacgagctgctaaaggaggactagtttcaattagctgaaactccggattctgctgtctcggaggttgcatctgcattactgctccagtcggtggtcctggagctctcatgaaatctgacctaaactccggttgattcggaggtggaggataagcttgtttcgcttgtgacatcggtggagctcctcctcctcctccggcgtgagcaccgattgagtccaaagttctcgactctttctctttaatcttcgagagcttcaacgtctccatgttattaatctcatcttc

SEQ ID NO: 12379 - DNA, 285 bp, Arabidopsis thaliana landsberg
atcccgataatgtttagtacttcacaccagcttcccttagttctgtcacgcaatgtaccagttgttgttgtcgcttatccaccactcgcgtattcctagtcaatctctttaggagagatcttgtgttcggtgtaggactagactggagtagacttcaacggaaaacatccaaacagtgcaactcgcccttgtcaccaagtgtgtccaatgatttttccagccagttcatgagttttaactggcccggtttggccaacgcctcccccgttggcattagcgggccaa

SEQ ID NO: 12380 - DNA, 1093 bp, Arabidopsis thaliana landsberg
gtggaccattagcgtctttccagcttacagaatgttatttggctggactacgcatggtcgattatcttgtccatattgtcaggataatactgatgcatttcagttaaaacatggtaggaaaacaagttggtttgcctgtcacagacgcttcttacacgcttcacatccatatcgtcgcaacaaaaagatgtttaagaagaataaagttgttgaagaagatccaccctcggagttagacagtcataacctcttacatcaactacgggattttggtgttgagaagacaaaatattgtggtggcagtgtgcatatcgcggttgatggttatggagagtaccacaattggcataaacatagtattttctgggaattaccgtactggaaagatcttttgttgagacataaccttggtctttgctttacattttcaggaagttccatagtcaaaggaaagcgctatggatttggtagattgtttgctgacgggtactcatcattcacaattccaagctagaccgctgcattacttaaagagcttcagacaatcaaggaatgcaataaatatcttatggaatgcaagaagcgcattcttcaacaattaccgcaaattcaaccaccgggttgtccgacaattgagaaagagactacgaacaataggaacacaagcatcgatgacgacgacgagactcaagggtagtttgttttcaatctctacttttatgtggattgtaaaaacttatcttatgaaactttctttgcaatgtgtaactcattagtaactttgtaagctgtgtaaaacaatttgtaagatataaggttttttaatctgtgtcaaacaatttgtaacatttggatatctaagggtttcagcaaaaaaacaaaactttaaaatgattttttgcaataaaataaaaatatattgtttttatttttttcacaatatttggtgggagaatagagaaagaatgatgttttctactccaataaaaattcctaagaaattagttgagaaaaccggttggaaattgtaaagagttttttgttggtaacttgcactatttcaacggtacatttttttgcaggacattagctt

SEQ ID NO: 12381 - DNA, 1496 bp, Arabidopsis thaliana landsberg
caaaaacaaaagattcatgtattccatacatataaatctaaaacaaagccttgagagttgtgacgactgacgatagactgagtttaagagttgtgacgagagagttagtatgcgttcacatcttcgtttaggtttcgtgacctcctttttagttacctgattagacaagatggttcttatttcaatgttgtgccggtccatatatgatttctgtgctctaaccagtaatgatttgtgtaccaggtaagattcaacatctaaccattcaaacagctgcaagaatagtacaattcaattatcaaaataaactaacaatattagacgattaacaactgtatatattcatgcattgttttacatgtggatagttttataaaatgatttaacgattatttcaaaaaagatggcaaaaccatatcagattatttttcagtcaatcggccaattaataataatactaatcaaccaaaaatatttttaataataatctagttaatacaaccttactaggcttttgtatggaccgaaaacttttctaattgggcccaatcacatcaactttttaaaaaaaaaatctttctcgttcttttccatgatagtacacatctccagaaacccactaactaagtcgatttgtcaaatcatatttttaacgacaaaacttttaaaaggccttcaccgtctaatttatgtcggaaggttttcaaaatatttcgtgtccaaagacgaaaacaatatcgtctaactttgctttactattagggagtcttcctaagtaccagtgaaaacaattatatcaatgattttgttttccatcaaatttttttcataatagcatatttacatcttcattcactaaaataaaagtgatgtgataatgaatttatgatggtattataccattggtaattgggtatatatatatggataccattgtatatctaagcgtcaattccaattcagagactctgtaccacaaaactaactaaagtaaaaactatttttctctcaggtccgattatcgaagccctctcatcgactactctttccggcgccggtgaagcctctgttcaccggcgtcgggaccccaacttctcttcttttcgttaccatagtttccttctttatttttccccttttgaagctttttcccatcctttccccccttgttattccagcccataacctgttaaccaatctacctcaccttgcatctctaccaggacgctcttcaacacaaatcaaggaaggaaggttgaagcaacatgctctctccttctcccattcttctgctgcagctctttggacagattcgtgctcggagctatcccatgtagaaaaggatgcgaccccctggatctttgccacctacttgagccatggtcatagtctgcttccaacgatcttttactcatcggagatgactcctgcgctgcaaatcatctcgcctttcttggacagccgtcgctctactcagcgttttggcactcgacatg

SEQ ID NO: 12382 - DNA, 515 bp, Arabidopsis thaliana landsberg
  unsure (1)..(515): unsure at all n locations
acgatcttgaagcttggaagggattgaagagagggtgaagttgttgtgagagataaaaaggtaacggagatgatgaaactggaagannnnnnnnnnnnnnnnnnnnnnnnnnntaagacatgccctgagtcgtagcatcgtgaccgcacccgtggagttatcgcagcacactccactccaaaggtcactatagttgcaagcacgagtatcaaactcgtactagaactgcgtaaaggcttgaatctggaggagaccacaagcaccaagaccaacaacagggttattaacagtggaaaagcttgaaggagagacgcaaaacagtgagagtagctcgagcttattcatacggagaagctattcagacatgatgagaactttgtaagaaagacatggactttgatatgagaaatgtgagatagcagattggtatgaatcgggatggactgtggtcttgcatagtggcagaagtgagagcttagtgaagtcgtcattgaagtgtatcgtcgttagatgac

SEQ ID NO: 12383 - DNA, 935 bp, Arabidopsis thaliana landsberg
atttccatacttgtagctattcaatgtattgtggaggtgataaaactttgccttatgggcagtatcagaatggtttctcggcgagacctccaacggattcttacgagagagattttttgaaacaaacaatgcttgaacatgaagctgtatttaagaatcaggtattgaataatgccgttcgtgtttctcattttactcgaatgctttggttttttatgtgtctgttaaatttgattgatcttgttttgattaatgcaggtttatgagcttcaccgtttgtatagaacacagaagagtttgatggctgaagttaagggaaagaactttgttgatcacttgaacaacaatgagcctacaccgggaagtgggattaaacgaggatttcttttcggaaactcgatatgtggcgaaggaagcacctctcaagattgcaatgttggcaaggacaacaaggtgttagaggttagacctgtcaaggttaggagaacaatgattgatcttcaacttcccgcagatgagtatctccatacagagggtgataatacgacttgtcctccttatgagcagtcaaaagaagttggtgaaaacatcttctttgaatctcatcggaacgattcttctggatcttctttgcttatgaagaactcaaatggatttactgacttgaacgagccagtccaatgccaagattcagtacctgtttcttcttcttccagggacttatattctctttatggagcaaacatttcacacgtgcaaggccagtgggtggaaaaaaatactagtcaaaatggatggatggttctagaagcaagtgagattttggtcgtgttgctcatagattagtttgtggactgtgttactgatacagtagctatttgcttatcttctagtctctgatgtttctctattgctgcattgtatagggaacggga

SEQ ID NO: 12384 - DNA, 763 bp, Arabidopsis thaliana landsberg
aacgagttgaggacggtgtggtgtaccgggccattgagttaactttgaccccttctctgattgccgcagcgattgcatgagaacatggtatggtaagtagctggaactggcgggatgtgcacgttctttcccacagatttacggcgtacccgcaattcaccatatctctaacctcatatagaccgccgcctattttcaagactccataacctgcccctttttcaaagttctctataaccatgtcatttatctttggagggaatatgttatcttccatctgagctgcttcccatcgaagggcaaaccatgttaccaaagttgttctccaagattctaggatcgagatcaccggatagtctcttgacatggtcaacacgttgttcaagactctgcgatgttgcttgtcatgacgttatccctcccctacaaaatgagatcgtgtccaatgctcaaaaccaattccggttagatagtcagcacatgggccgttcattgctcgtatctccgtaaatattttgttgaaatcagataagcggtacgctctcgccgtggttgatactagacttcctatagtttcgtttttaaagaatgcgataatgtttcttttcaaatgaaccacacaagctgcatgcgaggacatgggatacacctgcatataataaataataagacaaacattaaccgtgtaccctattacttgctaacgatttgattaacatgctctaatcaagcacatcttttgctgctgttacctaactaatat

SEQ ID NO: 12385 - DNA, 1110 bp, Arabidopsis thaliana landsberg
accatcatcctcaagccaacgcattctctgatttctcttctttgaaacggcgcctttgtttttgagctattccgatcgattttgaaatcgattttgagctgaaaaaaagttgctctgctttttaagtcagatggaagtaaatgtgttggaagttgcttcgagatcgacgatcatactgatgatttagttgataccgttaatgtagatagccgtcgaatttctatttttcgccttttagcttgagcaagtgtggatttcgtcgaggtttttgattgatggagggtttcgattctgagaagcttcgttgagatttttttttgtgtatgtcgagaaacggaaggatggcttcggatcttagtagagctggtcctgtggagagagatatcgagcaggttgttatcttcttcttcttcatttatgtccatcatcgaagccttatttatgattcatttcgcttagactgtgttaattttacttttattgaatcacttatggatagtatctccggaattattaatacatgtcagccgaatttgttcaattgggattaggtgaatccttagagctaacttagatttcaaactcaatattgattaccttagtaatggaattcgagtgtgacagttgatattcaagctattgatccaggaacttgaatttttggttcccgtataagcttatcctttgtggaagcaaaccactctagcagactaggatttcatctttctagcactttaccaatctcaaatgtcatttatcggatactagtttgccatgattcttatttcagtgtttgaattctacatatattctgtatcaactatttcttctaagattttattaatggtgagctgaagagatgtcaattgccaaatattcacttattgattgctatttgattgactcaggctatcattgccctgaaaaagggagcttacttgctaaagtatggaagaagagggaaacctaagtcctgcccatttcggctttctaatgaaagttatgcttgcgtcaatttgatattaaagtgacttgttagcgtgttctctttcgtaatagtccactttagcgccagcatttttctttatctatcattcttggctggttgat

SEQ ID NO: 12386 - DNA, 479 bp, Arabidopsis thaliana landsberg
  unsure (1)..(479): unsure at all n locations
tgctagtgatcgagctatgtgtggactgactgatacacggtgcttgtttcgatcgcatgcatgccgcagaagttgcaaagatgggcgagaaggagtggtacttcttctaccagaaggaccgcaagtacccgacggggctgagggcgaaccgggccactgaggcgggttattggaaggcgaccggcaaggacaaggaggtctacaacccctttgnnnnnnnnnnnnnnnnnnnnnnnnnnnnnnnnnnnnnnnnnnnnnnntacaaaggcagggctcccaggggtgacaaaaccaactgggtgatgcacgagtacaggctcgaaggcagcggtaggctccctgctagtcctgcatccgcatccggctcagccacaacatcgctgcggccatgatgaaagcttcagcttcggcttgcaaggtgcgtggtaccagtaatatatatcaatcaagttcagcaaccatgatgcatgcatccacat

SEQ ID NO: 12387 - DNA, 1192 bp, Arabidopsis thaliana landsberg
cgtcgataaagattaccaattgcaaaaatacaatattttatgtgctaacaacaaacaaatgggataaagaataccttatcgccttaagtttcttcatggagttttgaaatcgttcttctgtgtcgacaaggtcgttgcctttattgacaacaagggatggatgacccactaaaaccttggttttcttatcctacgcgaagcgaccatctagcttggtagatagagtacggagacgcttacttcttctcctataaattccatcaacgttgttagcattcatatcatcctgcatactaactggcattattaataaaaggtgacaaatcatatttaggttaccaaaaaaaattacagttgacgagatatgtctgggttaagatcttagcctcttttgaaggagggggagtggtaaaatcctaaatgattaagcatattaaagtaaaacttaacttgtaaccaatattatattagatatacaattaggggatatacctcatctgaatcctgtgcagaacgagtcaattgaacaaaaagtaagaattagatagttatagcaattaggagataattaaaatattagtaggaaacaaaaccccagacacctcgaggatagaagacacaactgagggggcgcccctgccaacatcctgtcaaaacagttgaaatatgagagttaccgataaaaaaacttatggaaataataacatacgatgtgtagttacacattaacctgttcataaaatctcttaatagggtcacgaccgtcgctggtataacaatcgttaccgccatattcctgatacaatacaacggttccacaaaatacaacttattgtaaaaggggagacgaaactttgaaatcaaaagtgttttgcgtaaccataacacgaccgcaacagaactagcatccaaatacaatgttataacactaacgatggcatgtggtaacttccaaacaataacaacacaacaacatgatagactctgagacaaattaaaactgagcagaaattaaaaaaacgattaattttaattttatttgccggtggttagtttaccactcatggtttttatttaaaaattataaacgatctactcagtaataaagcattgcccaacttaaagactgaacataaatagaactcaaattacaaacataaaaaaaggtttacttaactcctaacatcttatc

SEQ ID NO: 12388 - DNA, 603 bp, Arabidopsis thaliana landsberg
tatacaagctacttgtagtgggattacctgagcaagcaaaggaccatcttttgcatcagtgacccaataggggagcccttctttaatgtctaaaccaagagcacgggtaatgaacatatatagacttggctgccacacatctgagcacttgattgtcctccacatcgctttcattgcattggtaaagttctgggttaacagaaatgatacaacaatgagtaaataatctcatgttggtaaaagaattcaagagagaatagaattacctgtttgaaagagaaaccatgaacacgaggctcactaaacaagaccccgactaccgatactaatgcgaatgtgaatgttaacaagccgaacacgccctaatgtccgaaaagtgaaactcattagagaaaaaatcatgaatgacagagagatcacagcaaacgattcgctaaccttggagccaaaaagatgaactaagataccactcataaagaaaccaagaagttctccaatggaatagcttaaactacattaactctggatattccaagccagaaaaggggggttggttcctttggtaggaagaccagccttaattggttccttcgcttttggcct

SEQ ID NO: 12389 - DNA, 594 bp, Arabidopsis thaliana landsberg
tatttatgttataacagaggatgctttggtttggttaccactggcttgtctaaatcagaaattagcttacctgtttaactgcggtggggtttgtggttataatatttgggtaattttctttgtttatttggttcatcaattagactgcattttatgcaggtcttatgccaacgacgtcatcttgtaccatcacagaaacggaagcgaatgggggaagttcttctcaaggtcaacaacagtccaaaccaattgttcaagcattgcctcgggcaggaacatcacttccggctgcaaagtctcgagttgttaaaaaaacaacagcaagctccacttccagatcggatcttatggtaacagctaattcagtagctgcagctgcatgcatgggtgatgtattgactgctgcatcaggacgaaaggtcgaacctggaaaaactgatgctccacgagtgccaaagactaaacctgtaaaacatgcttctacagtctgcatgcctcagccctcaggtagcctctccatgccaaaggttgaaccaggaacgagtgttgccgcctctatacggtctctagctaatggaaaattgaaacctgtta

SEQ ID NO: 12390 - DNA, 555 bp, Arabidopsis thaliana landsberg
tcatagccaccacgttgctcggctacgctggtgcagctacggctcccctgcaatggagcaccgccaacatctgcttcacccatcgacgtgttaggaaaccgcgtgctgcagcctgcaggtggacggccgccgccgtctgtcgcggacaaccaccctctcctggacgttgctcttggggtcaagggtagtggcgatggctgcccctgatgacgggggagatgtcggcgacctaggtgagcccatcaccgaccgtaccttggtgttgaaccttctacgtggcctcaacccctgctatggccacctgaatgttctcatcaagaggatcgtgcccttccccaccttccacatcgtctgcaacaagcttcttctcaaggagctcaccatggagattgagtcacccgctcccgcctcggccctctacagcgtgcctcctggtggtcaggcgcctttgaggggcccgtccctcgacctccgtcgacaggggctcctaaccgccctccccccgccgtgcctgtaggttgcggcttcgtccggctccacggccgatagaggttt

SEQ ID NO: 12391 - DNA, 596 bp, Arabidopsis thaliana landsberg
  unsure (1)..(596): unsure at all n locations
attaaaaatgataaggattccttataaagattgaaccattgagttttgttcacaattcgaaccaagtacaacacaaaaggcttttgttcacaatttgaagactcaattaaaaaaggttaacaagaatggcggatgaatcctttccccaaggcgtggccgctaccgacgacacgatcgatggtaaatgaagtaatgcccgctgcgcctcctccgacagttccaaaatcttgtatgatgtattgcgaataacacatagaaaaagaagtgttatatagaatagttttataaatattttttagttaaaacaaaattaatggcaactatctacagtcttaaaacacacatttttcggtctcttatattattacacatttttgtgtagttgataactagcaatgttttaaagtcttaaaatttgagcttataattttgtttgcttgtgtgttgcttatgtattgcttatgttttgcatttttcttgtcatattttagaaagaaaaaaaattccatatcgtatgctttattgatttgcaaaattttccaaatcaataatcgagtttttnattatgataaagtacatgatgataaggtaatatg

SEQ ID NO: 12392 - DNA, 1081 bp, Arabidopsis thaliana landsberg
ctattctaatccaggtatgccttctcttgttcaggttctcaagaacttgtttataaaaacgaagcaggattttaaggaatttcaggtttatttgcaaagagatttgatggaactaggttagtttggtttctgagatttcatttgtattacctccggagaaaaatgtcaacatttcatctttaattacaatcacattttctactttcaaatgcaatttactgcgttacacagggaatcagatgcaagagatgtcatcagcagctcagggatattacaaagtggtggaagagaatcgaaaattatataacatggtgcaagatcttaaaggtagaaaacagttaacacaagttttgctcttttaatggaagtcgtaatgccatgtcttaaatctgcaggaaatataagagtgtactgcagagttagaccgatcttcaatagtgaaatgaacggagttatagattatataggaaaagatggctctttattcgttttggatccatcgaagccttataaagatgcaagaaaaacgtttcaatttaatcaagtatttggtccaacagcaactcaaggtataagcttgcaatgtctcagagggtgtataagcttaagtctcacacttgtttgttctagtaagatatcttttaaactcttcatcccatgtttacagatgatgtattcagagaaacacaaccattaatcagatcagtgatggatggttacaatgtctgcattttcgcttatggtcaaacgggatcagggaagacatacacaatggtgagaatttttctacagactagaccatcttcttgccttctacatttatagttacttatcattttattctttttgatgcagagtggtcctccaggcagatcagctactgaaatgggaataaactatctagctctcagtgatctctttctgatatgtgataaaagaaaggatatgatgacgtatgagatatatgtccaaatggtcgaaatctacaatgagcaagttcgagaccttcttgcagaaaattcctcctgcaccagatatcctttcatggctgctgaaactttaatttaaattaccttggact

SEQ ID NO: 12393 - DNA, 643 bp, Arabidopsis thaliana landsberg
ggcgagcttctttgatcattggtgactcgcaagtagttatttattatttcctcgttgaagaaatttcagtttttccattagacatgtcatctgaattatcaaagacatattggtccaagttactattctggttgctcaatgcttctcccaaactaagagacttgaacatcaatgaagtagtacgtgatggtaatgaatatagacatgtttgctggaatcaactgattagtattcctcaatgtttgttttcgagtctccaaactttcacgtggtcaggttaccatgtctccgtagaagggaaagagctggccacatatatcttgagaaagtcttgcttattatagactgcaacctcatatttaatcaacattggaattgttacttgttagatttgaaagacttcttttgtggatttgatctattaaagtttttgttgcatttgattttaatgattatatagcttggtttaagcgttgacaaggatttacatatttagctaaatgtggaagttgtttttgaaatgaaaattgcattctatataaatatatatctttagaaaatattataacaacaatgatgagtccaaatccatctttatgatcttacaactacaaaacaatcataacacttcaccccacaaaat

SEQ ID NO: 12394 - DNA, 1031 bp, Arabidopsis thaliana landsberg
tgatgtaactcaccctgctttcatacatacgaaatttggtcagataatatacaagcaattaatgggctattaattctgaaggtactaagacatataccaatatagagattgcttcagacagaaaacaaatgcactcggttatatgttcagttccagatgtccttgtcattcgtgctttccatatcaaaattcttgctctctctatatgcatatcctcagtgacataaacatccttcaagaggatatctgctatcttgattcgcgtttgttgacctagatttgaccttaaaggtaacactctgtcataggcaaaaagctcctgcaaacatttacagaaaagagaaatgaaaaaacaaacagtatcaccaattttacatataggaaagtacatccaccgataaaaaaaagggaatttctagtagtgtggccctgcaatttaggacctgcgtaaacttttattcaaacattaactgaaaggttgttcagatcccaacctgctcaaggatttttccgataccccgctttgactttttttgagaagatgataacaatgagtacaaagttgtacaagaacctgccgcatccagatccgtgtgacattcccgctctatctgttgatagcacacactcagatacttgtagttcaattttttcctaaaggtactttatcaaaaaaattaccttaacccattgctttacaattgcctcagggcctggtaaccgtctaatcagatgttcagctgacaaccaattttctagaatatgaacaatattctgtctaatcttacgtctgctacatttctggagtatatccaggtagaatgcacacctattacatgcttcgcccacaaaatccataatggcatcttctgacaagtcattatcagatgaactagactgatttacaaacatatgacaatgtagttcaacacatctccatgataccttggagcacagcttaagcgcctcacaagcctgcaaagtagaacacttactctataaaatgtactatgaggaaaagaagaagaaga

SEQ ID NO: 12395 - DNA, 475 bp, Arabidopsis thaliana landsberg
  unsure (1)..(475): unsure at all n locations
tatcaaacattaaaaaagagaggcataataattcatcactatcatcaataatgcaagacataacagctgtactcaacagtagcatctcctgacttttgatcaaaccacatggtccgagcctcgacataacctctagcaaaccggaagagtcaacttcctccaatcaccggcatctccctaaccttggtcaacacagcgttccggccaagaatcgcgatcgaacttccgttatacttccctgtcttgaacgcaaagttcatcaccataagcgcagatgcatcacgttgaccagtagcagcgtagatcccttgcgcttgtcccactaaagtcgaattcaccgcgacctccgtagttannnnnnnnnnnnnnnnnnnnnnnnnnnnnaagaaggaagagttggagataggagggttgatcacgaccgaactagggtttgagccgcatcaaatgtcgtgccagtagacacgcaaatgag

SEQ ID NO: 12396 - DNA, 968 bp, Arabidopsis thaliana landsberg
gacttaataaccagttagaattataatatatcccatttttcattagtgtaattattttaccatcctaggatgaaatcaagcacacgttcaatggaacctccagcatgctcaaggtcttgtggttcgaaccaagctggactgtgtgcaattcctattttacctccagcacactgtaaaatgtttaacaaaataaatgttagaaaactataaagcaaaataaaataaaaaattatagaatgtaatttagataacctgtttgcattttctgaatgcgtcaacggcgtaagcatgcgacaagagtaagttgtgactgacttgataagcttcgtatccagaccgcccatcttgacaatgctgtccataaccggggatgtacggtgaacaacgtcccggagctttctttccgttgtcgtaaccggcacgactaaacacccatggctcattgaatgtgatccaatgtttcactttgtgtccatattcgtggaaagtgaaattcgcatattcggtaaaatcttgcacgatgcgaccacttaagaaaccaccatattcatcttccaagtcttggggagtatcccaatgaaagactgtaactaatggtattatatctaaatttccaaagatcaaacataaaataaattgttagtatatattgatattatgaattttttataattaacttttgtttgtgggggattactgtttttgagaagctcatcgatgaggtcgtggtagaattggactcctactttgcttattcccttagacatccttccatctgttaattatttcatatttttcaaccatcttaaaactattaataatgtgaataatcaattatagccactaataatcagtttttttttttttgtggaccaaccactaacagatatatattgatcaactattaaaaaaaaaaaataaacttacgggggaatattctgggccacgcaatagaaagtctaaaagca

SEQ ID NO: 12397 - DNA, 719 bp, Arabidopsis thaliana landsberg
tggggaaccgaccgtactcatgaaattcccgtctttaacgcaatcggtgatctcgaacatgctctgaatcccaggctgttgccaccactcaccgccggagagttcgatcaaaggctttatgctttcaaacgccgtgcatttcacaccaccggcgaggattccggccgccatcagcataacctggctatgacagctagtgaagatcagcttcttggattcggcgaatcgcgccacgaggtcaacgcatttctcgtcggcgctgagaagctccgtgaatcggcctcctgggatgatgatgacgtcgtaattctccggagtgacgtcatcgaagtttgcgtttaaagtcaactggtcaacgacaagctcggtgtatagcttttttagaacagaaaaacaaaattaagcgaattatcacaaagaaaaagaaagttcgaaattcgttttagtggcaaaattggaacctcgaggcccaagaaatcgtgggcagacataacgcagcgatcgccggcgttgcggttgggtgaaacgcaatgaacgctaaccccaaacgattggagaacatagagaggaacaatcgtttcataggcttccatgtagtctccacataagagcaacgctgatttctgaaccgccgatgccattttgggtaaatgtttgtgtgcattgaataagacaatgtaagaagaactaatcttatttatactgattatctatttgtc

SEQ ID NO: 12398 - DNA, 1379 bp, Arabidopsis thaliana landsberg
caacaccacaacattagctccagctttcactaagtgctctagcctctccttgtctgattcccttgtccctatagcagcaccaaccatccatttcttgtctgcaccaacagttcctgaccctaacttgggatatcctttaaccctctccacatcgtcttttgttactacgttcacagtctcaccttccttctccagaacaacaaaccctttctgcttatcttccaaaaccgcctcaatcttgtcaagatcaatatcccatggcacatagtaatctttgttctcacaactcttcatgtaatcatatatcttcacctccttttggtcatctttcatactcgaccactccgattttgaaacataacccaacaatttcggtgtcaatgttcctgatcatcaaacaaacaacaacgaagttgtcaaatggaaactatttcacaattttgaaaatgaaagtagctaactttcagctaaaaggtatgaaattgattgtgaaattatacccgtctgcgagacaaaaacgaaggaagaaggaccaaaatcatcaacagaaccaatctggtgctctgggcatttaaaaacagcatcagacgcaatcggaacttgaagcgatttagcgtgacggataacggaagcttgagtatcgatgtcgcagttatagtgcacgattccgattcctccaagagcagccattgcagcagccatgtgggattccgagacagtgtccatcggcgaagcgacgcatgggatcgagagtgggacgcgcttgctgagacgcgtggatagcgagacggcgtcagtggaaaagtcgatgaagtgtggtagaaatatcacatcgtcgtaggtgtatgagtatccttgtgagaatagcttttcagctgaaaatccatcttcgaatcctgacatcttcagtccaacaatggcgtcgatgccaatagagagaaatgaacagtgagtgtaagctagggttcagtggaggagtaggtgaaggtttaggtgcgaaagatgacaaacgaaaatgttggtgaaaagataaaaccggaaccgaagaaattaaaccaaatcaaatagaattttatttattaaccgattggtttaacgatctatgaattgaattaaaaccggataatgattatccacgccagggacagtactgttggcgtatccgaacatcacctctcggccattggcaatttctattttggcatctcactgccttcactcacactacaacttccagttaaaggtcagaatcctaaatccttgatttgtgattttcttcgatgcagatcaatgtagagaaattatcataagttctttcgtgaattttagattctgattttggaagttgaggttttgttatctgatcttaagctctacta

SEQ ID NO: 12399 - DNA, 796 bp, Arabidopsis thaliana landsberg
ggcgctagcggccctcagataaggtctcttgcatttgctaccaaccttaatcagtacggtccttttggctctcagtctccgatttggagtcacgaacaacagttcatattcaaactagggaaatttcgccagttcagcggtttctatgggacatataatgcctcgggactacaaaatatcggtgtttatctccaaccaacaattgttaaacctaccggtacacgcaatgcagaggaaactgagtcaaacattgttttgggttaaatgaaattgtgtattaatcttaaaccttcttcagcctctacatgcgtttatatcaatatctttcgaactttgtatgaataaaattactttacgtgtgtgtgatgcgtctgtaaatatatacacatgcattaagcatataaataatcattggttcaaccatattcctcgttgcccagcagggaatatattttcccacaaacacaaatcctcaatatagggaccatatggtctcaagtctcaagtctcaagtctcaacaacgacatctcacagatttatttttatatcagaagatgtttttgggataacctccatccggaaaaacattttgctaatttaaaattctcttaaatgtatcaatcaaaaattactagaatcctccgcaccaagtttttttaataattactagaatcctttttctttgaaataattctaatatgagacattcaaactaatacatattatcctgcaagatttgtgtatataaataacttattaatcatgactactgacgcgtgcatataaaccctaatt

SEQ ID NO: 12400 - DNA, 635 bp, Arabidopsis thaliana landsberg
tcagtgaacgattgaggacattacttggtggctgggtgtttgatgaccttgcagactcacggcggggtcaatttatactaagtgaaagcggtggccgggaatttgagtgctgacgcacgacggtcggaggaaaacagagatactggtgcatgggatggtggctttcaccgtggcgcttcctccggcgatcaccggctgaggagctacggcggctatcggtgagctgttacagctagggacgatgtggtggaagacttggagcgtggcacagccgcaacaaagcacggcaactccggtgacggccatgaggcacgtcgccggtggaaagggcaggggacagcgagaccacaatagttcatacacatccgtgactagatcttttcatggtgagcgaaatccacacactcgcgacacgaatcccggcgaagaggtcgtcggcggtgagatttttttacactggcggtctgatccatatcaggtcactgtaccatggcgagtcccttgcagtgcactgacagccacggtttaggccaaattgccctaaattcaatggcacacacctaagtttctcacaaagttttcttgtatagtaccctacactttgtagacaacctgggtagtctcctgaacttagt

SEQ ID NO: 12401 - DNA, 905 bp, Arabidopsis thaliana landsberg
aagatcttacgtactgtaagcaatcaccatgacccttatagacaagttgaatgtaccaaacggatcaccagcaaagaatcagcaccacactgaagaacaattacttctggctcatagatttccatagctctgtggataacaggaatgaacaaaccacgaagactaaaatcacccaaaccatcctttaatggtgcattgagtgaatagtattgtcctttcccttccccatagtcacttatgtctccggtgtccccaactttgtggaaagaaacagtcattactctatcagtatccttaaatgcttcttctacttcatcaccatgaggaaaaccaatttctatgtagagaactctctaccaaaatcaaaattattaaagcatcaaagattcaacaatcaactcttaatcttgaaaatcaaataaacagttacgtaccttgaaagattttagtaactcgagaatcgcaagcacaacgtcattgacataaccaaagccagaagctttatctttcttcacatggtgcataccaccggcccagtttatggcaatatcggcttcttgacggttcaatttcgcggcggcgctaatagaaccaccagcgtaagcacgacaataatcgaagaggttatggaagacaggaccgtcccaatccacatctacgttgaagcgcttgaggttttcagagacggaaggatgaggatcggttacggtttccggcgtgacggatttgaggaagttgatatactccagcgagtggaatttttcgaaatcggaagcatcggcgaggtctgggtggttgatttccatgtggcggtggagggtatagctgaggatgaagttgtgagtgacacggattcgttgatatttcgttggctggtaacgccgtaatagtagtcgccgatcatt

SEQ ID NO: 12402 - DNA, 437 bp, Arabidopsis thaliana landsberg
ctatcaagaagacaaaaaaacctactacaaaatcttgagcttttatcttgatagcaaagatttcgaaatcttcgagtttaactctgattcatggaggtttattgatgatatctgtccaggcttgtccttgctatactctgatcaatgcgtgtctttgaagggaaatacatacatgtttgctatagatgacttaagtgtatccttgctcaaatatgatttttcaacagagacatctgttcctgtacctcttccctacaaaagtcgttcttttgaagctattagtctttccgtggttagagaagagaagctctctgtgttattacagcgagataaaagttcgaaaactgagatatgggtgacaaatgtgattgatgaaaccaccaccaaagtgatggttgtgtcgtggagcaaggtcttatcattggatttgagccctg

SEQ ID NO: 12403 - DNA, 1504 bp, Arabidopsis thaliana landsberg
aaagcgtgtgggtaacaaggtgggacatcgggcgacgcaaagccttttaagagtccacttgacaaacctgtctttctttaatctctttaccaagtctcaagattcaatgaactccgtgtacacaaacacgcccatagatgagctcatttttggtatttccaatattgccactccatgataatatcatctagggatggggttcatttattttgaaatctcaacaaatctcgtcgattctaacacacatgattgatttgtttacttacttgaaagttggcaactatctgggattaaaatttatctttttctactgctagctagaagcatctatatatgttagcctaatacgtggaagatgtcattgctaataatggctaaagatgtgtattaatttttcttcttttttccttgaatttttgttctttgacataaactatgctgtcaaaatgtgtagaatctttttacataaatcattccctgttacacactaaaaggttcacaacggacgattgtattggacttccagatcataaaccatgcaaaactgaaaaccacaagaataattagttctaactttagaacgttcgtacgtgtttcatgttcaaaaagcgtcaattataaaagttgggaaattacttttgagttttgacatttctaaggacagtcaaatatgacaacattgggatgcaacttaccttgtattaacttattttgttataaaaccatatattacatattttaaagggttgataaataatcaaatataccaaaacatagcttttcaatatatttgtaaaacacgtttggtctactagctaattatgagaacatttgttcaatgcatgattatctagtatctactagtggattatgaaaattagatattttcattgcatgattatcttccatatatagtgataacatcaaaagaatctacaccaattattgcattttttcattatataataagcactaaactgtaaaattatattcagccacccaaaccatgacaaatcaccttaaaggcttaaacacataacagccattacgagtcacaggtaagggtataatagtaaagaatcaatctatataatatacgacccaccctttctcattctttctggagagtaacatcgagacaaagaagaaaaactaaaaaagagaaccccaaagaatcgaatatttattatttcgccccgaagattctatttctgatcatttacacccctaaaaagagtagagctttcgtgaagccaccatgtgtggaggagctataatctccgatttcatacctccgccgaggtccctccgcgtcactaacgagtttatctggccggatctgaaaaacaaagtgaaagcttcaaagaagagattgaataagcgatccgatttcttcgatcttgacgatgatttcgaagctgatttccaagggtttaaggatgactcggcttttgactgcgaagacgatgatgatgtcttcgtcaatgttaagcctttcgtcttc

SEQ ID NO: 12404 - DNA, 1067 bp, Arabidopsis thaliana landsberg
tgttcagaatgttgtattaagcttagctgcttttagcatggaattgtatttctgtgcactgatcaatttccatttatgtctatttgttactgcacaatctatttttaaagctggttggtagaatcaattatgaatctagacctagttggtgcgtagtttagtgtgtgatatagctgtgcaaacacatttcctctagtgattctgatttggttaagacatctattgtagttgctgccacttgctttggcaggcaaggatgttttggtttgaattatgaaacttgttctctgcacttctgttgtttaatttctctttcatgttacaacttgcatgtgtttataatcacctgtatcattttctgtttattcccctgcccactggagcaacaatttttagttacctataacatgtgtcatgatttatctctatgtttcatgatggagcaataatggcgctttttggtttttgtttcttttgcagatcacagaatagtggcgagttttgatgttggaaaaccaatttcgttcatggaagacaatttgatgcagcttgagaatgatatcactgatgaaataagctttcccatgaccaaagtaactaagcaccctaatctcacttgcatgaatttcattgtttcctatgttgatcattccgtaacttctgtttcttttcttgagccaggttgtggtattagcgcttgaacgcttgggtgatcttaacagaacaatggttatttttgccattgatcccgagaaggagaattctaagatacctgccgaaatagagagtctgatcaaggcagcttttgaaactctggtccaaaagcagttgtctttccgtttgactgaatccttgtttggggaaccattctttttcgaggtgctaaaattccctggaggaatcactgtgatccctccccagcctatatttcccctgcagaaggcccaacttcttttcaacttcacattaaacttttcgatttaccaaattcaatcaaactttgaggaactcgctagccagctgaagaagggcataaatctggcttgcgtatgaggtatgacacttgt

SEQ ID NO: 12405 - DNA, 798 bp, Arabidopsis thaliana landsberg
  unsure (1)..(798): unsure at all n locations
agaagatgcgattaataattgcaaatctgacgttactccattgtataccaaggattttgcatttcaaaaagaacccgggtatgttaatgacacagtgcgtgttaggatcatggctgaactgtgcggcatggaatctcgagaagaccccttgtatgttgaggacagtgagctttatgccattcatcttaggaccaagaaactcagatccttcaaggttccttgctttctccctctttctcttagatatttctttgtgataaacttgaaaccttgtttcttgttagtgaatgctaatcttgataacagatttttctgactgatattagacttgaaaatttggtttcaataatgatagtcaatgaccaaaaaccttctaaaaacttagcattaatcccatgagaaaagcattagttatatcccattgcctaattttaacctttttattagcatcagagaaaggtcttggacgttttaacttcaaagagaagaagagagaaggaatatgagcagcttccgatttggtacggagatgcggaaatgggttctgatctggccactaaggaagagtctcaacaagtggaagccacagactccaaaagctcacttttacttgaatcagaagattcccagtgggagctattgtgagagttntgatcatttcatatagtagttaaaatccggccagtgttttatcttgagtgagactcctgttactatatttaaacataaatgagctaatctgctctgagattgaagcttttttgacagtngaataaaccaaaaaattatcctatcttt

SEQ ID NO: 12406 - DNA, 535 bp, Arabidopsis thaliana landsberg
tgcttgtttgatgcacaccagacatcctatagtgcatgtctggtgcactgccaggttaccgttctggcgtcgctcgtgacaattctaagttggtaggtgatcgttaccgttgatgtcagacactccggtgcacactggacagtccggtgttcttgcctcccaaaattcccgaagctgctgagttcattggtcatcgctataaataccaccagacagcttggtgttctcttctgttggcttctctgcttaatctcagggcactcaccggacagtccggtacccctttgtcagcaagctattttttcttcttttcttcaaactttctttaaatcattttggctaacttcaagaaggttcatgagacctagacaaacatatgtgctaacaatctaactactctaagtctcatttcttgtaatttttcttttctccaacttataactttgattatgctcaaactagctccaagcgagtgattctttgaaattgagctatccaacctctcttgatgtgtcgtataggttcctatgtgtaa

SEQ ID NO: 12407 - DNA, 569 bp, Arabidopsis thaliana landsberg
tccatcacatcaatttcaacactttttttttttttttgtcgtcaatttcaacacttttaagaattaaaaagtctcattttctttttattccttttttttttaaattcctttatttttcagataattaaatgattctctaagcttcatagcaatgaaacactttgaattcgcatttcggcgatatagtctctaataacaacctcgccgtgtgctcttgcctcaccaccgcatcttctttctccaccagaaccgctccgacgatcctctcgtatcctcctccaccaccattagccacataatcaaccaacgccgcctgtactggtcccatactaggattatacgccgccgattccatataccaacctctgtacactttcccgtcacaatccaccagcgaaactcccgatggacataaactatacggcgcgtacgatctattcgccgccgctaaagccgtttgtttcaaatcggcggatgaatcggtgtttccgttacaaatcgaatccagatctgagattttgagatggttatcgtgagattcgagaagaagaggatgatctttcccgaga

SEQ ID NO: 12408 - DNA, 550 bp, Arabidopsis thaliana landsberg
atccaccgtctgccacgccccgtcgacctgccgtccctgaccgtccgccggatccgccgtccgccgcgccccatccacctgccgtccctgcgccaatcgcggattcgcgcagatccgcccgtcgtcgcagttgtcgtccctgcgcacggcctgctctgcgcagatccgacgtccagggatcttcctttgatgatgcaaaacgctttagtgatgtctagcttgaaaagaagacatgccctattttgctgatgcaaaaatctcgaagtttgctgaactagcataaagttgtcttgaatgaatcttcctttgatgaaagcactctgatttggagataccagatcgttcaatttgctagcaagcctattggccaggatcttagttaccagtttagcaaagttgtgcactaaactgataggtctgaaatctttcacctgatcggccccatcaatctttgggaccatagcaatatatgcagaatttactctgtccaagtttatgaagtcctactccatactgctgaaattgcattgagcactccactttgatgatg

SEQ ID NO: 12409 - DNA, 885 bp, Arabidopsis thaliana landsberg
tgaggtttttttttggaatgaaagtttgtattttcaatgaaaaaattggatataaaagtatacgagtgagttatgattattattattattatgaggaaagtagctttgccaaaatgattatgacctagctgtcctgaaataaattttgaaccaattctatttaatgattgcttgatatatcatatcatacatagttactaatacgtaaagacaagaaccctagtttaatttcagacttagagtttttcaatcgttgaaatttgaaaaattcaaataagttagccagtaaatttctttaaaatttgattcgagtttattttagatcctaaattagaatagtttattctatttaacgttatagtttgcaccaagtccatgacaaaaagattgatccaaatctattgaacatgcgtctataaatacatgataatgatatgggattagctagcttatgatatcataaaacaagactttatatccactcatataaacttgcatagttttatctctcgtagcaataggaagtatcaatcagtggtgatggtggagagctatcagaaccacaactttgaaataatttattagtttttatgtcaatcaaatttttatatttttttctggtaaataatggaggttttttttgtttactttaacttagcctcgccgcccccatcacctaaatgtcattttctttaggaccgacccaatatactatatcatcaatatggtgctctcttctttttgtcgtataatatcatagcctgtcgatttttcagatttaaaaagccacagtttttgtatgccaaatcattttaaaataacttacgtccactttgttttttgtttcgaatcagcatttacattcttgaaaacacaatacaaaac

SEQ ID NO: 12410 - DNA, 829 bp, Arabidopsis thaliana landsberg
acattgatctttagtgaagtcatagcttcccgcgaggatatcggttatgacggttgcgagctgtgacatcaaagcttatggttcgaggccagattccattattattcttaggttctttacggtgtttacagtatccgcggataaggctagatcaagaagatcaactaatttctcatcagagattaatccaacctgaaaatgacaacaagaacataatgagaaattgagaacaatgccaattgaaaatatagaaatgtttttgatctttaccatttcttgaactaaaggaacagagattcttgttccaagcaaactcagctgttctaaaggcatctccgcgtctttcaaggaaccgtctgatctcgaagcaacaagcttcaacgcatctttatcgatatcaatctcttcctttgatgcaataagttgcaaagactcgatgatatctgcgtctttgagcttagggaaaaagaatttctggcacctcgaaacgataatgtgaggcaaaacatcaagactcgaacatacaagaacgaaaaccacacgacgaggtgctcggtccactatttttgatagcgtattccaacaatctgttgacatagtatcgcaatcatcgaatattaacacaagctgctgcttttgctgctgacgaatgttcgttttatcaagcaaattctcgaagtcgaaactttttacaggacccatttctcgaatgtaccggttcttaccatcatcataagaaacacaagaactgcatacaccgcaaggctttgattgttccgtagaatggcacgtcaaagctctagcaaatacccgagcacaagatgttttt

SEQ ID NO: 12411 - DNA, 591 bp, Arabidopsis thaliana landsberg
aggcacaacgcacgagaacaagaaccaagtgaagaaagacaaagaaggtaattaagattagctttatggcacgattctgtccgagggtgtggttggagttattcacgaccactacgtcactttttaccttgacctcgatgtcgatggcccggacaattcctttgttaaagtgaacctcaagaggcaagagacggcgccaggtgagtcacctaggaaaagttacatgaaagcagttaggaacattgtgaaaaccgaaaaagacggtcagatcaagcttagcttgtacgatccatcagaataccacgtcattaatcctggtaaaacaactcgagttggtaacccgacgggttacaaggttgtccctagagccacagcagctagtctacttgaccatgatgatccaccgcagaagagaggagcttttactaataaccaaatttgggttactccctacaataagtccgagcaatgggctagtggtttattcacttaccaaagccatggtgatgatactcttgcggtttggtccgacaggtgattagttgcaaaaaattaccctttttattagttatattatagttaatattgttc

SEQ ID NO: 12412 - DNA, 495 bp, Arabidopsis thaliana landsberg
  unsure (1)..(495): unsure at all n locations
ggcatgtcaatgttttgcacctcttcttcatcttcttttggtttgatagctccaattggcatgttcttcattgcttccctaactggctcatcacctacatcatcaagattttcaagtgctccttgggacgcattagtctcatcaaattccacatcatatgtttcttctaccacgccaggcnnatgattgaatactcgatatgctttggactttaatgaataacccaaaagaaaaccaataacacaatgtctttgaaacttccctaggtgatggcgtttcttgtagatgtagcatttgcatccaaacacccggaagaaggggacgtctggctttttcccatttagcagttcatagggagtcttcgcaagtagccggtgaggaaatagcatgtttgatgcataacatgcagtgttgacagctttggcccaaaacctctctggtgtgttatactcatcaatcattgttcttgcaagtgtgatcaaggtcctgtttttc

SEQ ID NO: 12413 - DNA, 640 bp, Arabidopsis thaliana landsberg
atgttcaaagtttggagcggcactgaggattggattgcgctcgaaaaagtttacgggcttcaaatcgaaactcgaagaaaccgtgggcattatcggaaaatcttcttgacatggaatgtgatggaaaccaagtgtataccacacaactatatccttgttctctatgtctctatccctgcatcacaccaataatgtatcaaataaaacattcgaatcatcactacatatatgactagttattattaatttgaacttatcacctgtctgaccaaactgcaagagtgtcatcaccatggctttggtaagtgaacaagccaccagcccattgctccgacttattgtacggagtgacccaaatttggttgttggtaaaagctcctctcttctgcggcggatcatcatggtcaagtagactagctgccgtcgttctaggaacgaccttataacccgtcgggtttccgacccgagtggttttaccagagttgatgacgtggaattctgatggatcgtacaagctaagcttgatctgaccatccttttcggttttcgcaatgttcctaacagcttttaggtaacttttcctcggtgactcgcctggctcggtcttttgcctcttgagattcactttaacaaatgagtt

SEQ ID NO: 12414 - DNA, 721 bp, Arabidopsis thaliana landsberg
cgccacgtcatcagcccccgagacagccgtctttttctccgacgagaatttcgggctctcaagaatcgaccaagatgttgtctccatctccgtagaccatgcgaactcgtcgacacatgatggcgtcgtttcaatcccccttccaagaaccataaacttattatcctcctcctccgcctctggctctacctcaggctcaggttcgggtttgggctcgggtttaggtttaggcccgtttcttgtggaagaagtgagaggccaaggatggttatgctcagaagtgtaagtgatgagaatcatcgttggatcatctctgcttctctcgacttgcttcctcgccggacaaccttttgtgctactacaacggtaataacctctagggtatggagatcccttaatgggcttttggccgtacttacgccaagcccatgaatctgagggcggagttgtgtcccctttgtgccgagatccttccatttctttcatcggtacgttcactactctcttctctacggatctcctgctgtaaagtaacaagtacatcaatatatgaatatactttagtcaaatgagaatttttcttgaaattgttatataattcgaatcacatatatctacctaccttcttttaggcgaatgagaagagataagagctttcatgccgttaaaggttgaagaatttggtgattcgggtccggtttcttgactactttcatgatca

SEQ ID NO: 12415 - DNA, 1056 bp, Arabidopsis thaliana landsberg
acaacaacttctgtgacttttgatttcctcagcagccatgaacatgtcagcgagttgttgcttgaacattggtgtatgacatggctctcgggcatcttctccatgtattcatcatcatcatcatcttcattaccatgatcatccaagtttttgttgttattgttgtcgtctacttcattgttcttgtgtctcccaccacatcttttcctctctaccaaatacttaagctcacttactcttctgcgtaactcgttgatgtaatcgattccatcttgaagaattgatgctctatctccctaaataacatataatatgaattaagcaaagtgccattggagataatgaatgaagctaaaccaagaaagattgttgtcataagtaaataactaaccttactcgggctaggaatgagcaatttcaaggcctcgtaccgctcattcaagtgacatcttcgctcacgttctgtagtaaaagggttgttctttcgcttccctcttcctttacgcctaatctctttgctaaactcgatgattccgctatcaaactgagcattgttattttcatctccaacattagactcatctctttgagtagtagtattggtatcaataccaagcaagtaccctgagtagtcattagaagggatcaatggaggttgtggaggaaggtttaagtgaaagagcgggtcatacgtgaagcaagaacccgccaatatatcagagcttggtaatgacatagagcatctaggcaaatgcaagaggctgagaagatcagggattggagttgttgtgtgtttggatgtaagtgttcataagaaattagagttgtcttcagaaacacccaattgatcttgaatcttggttgatcaaatggttgttgttgctatgttttggtttgagtttctgagttgggagagagatacagaagggaaacagagaactcatccatgtgggagcttaagatgtcatcaaagtgttcccgtgcttcccccggtggttaaatggtggaaacgtaaagaagtttcccgcacagaagccccgtgttgtcgccatgctt

SEQ ID NO: 12416 - DNA, 697 bp, Arabidopsis thaliana landsberg
catatttcttctcttaatgatgcagggatgttgattattttccaattaattgattaggaaggcaacactcttctggcagaggtacttttgaataattactgccattttttaatatactttacccactcaggaagggaagactacaaaattacacaaatatgtctttcatttactctcttcatgctcttgtgttctactgtcaggcatccacatacactgataagaccgataaacaagcaccgctcaagtttcagtaaactctaacctatcagagaacacctgagttgtcttggcttcatggaatgactctttttctctctgcaaatggactggggtcacatgtagtcggaatcacaagagagtcactggttggatctcgaaggaatgaaactaaccggtgttatctcgccctctatcggtaacctctatttcctcacatctcttagtctcacgtacaactcttccaatggtagtatccctcttgaggtagggaagctgttcaggcttcaacacttgaacctgagcaagatcattcttggaggtgggattccacttggcatatatatctaactgtttttccctttgaccaatgatctatcctccaacaatcttgaacacgaggttccttctaaactgggttcgcttcctctgcttgtccttttatctctccgtgtaaacaacctgacagggaatttcc

SEQ ID NO: 12417 - DNA, 1113 bp, Arabidopsis thaliana landsberg
aacgctacagctccatgatagagacgtcactgttgctgttagagatatatatagaatttttctattaattaaatttaaatcaaagtcgtaggcagaacacataattcacgcaccaaacaaaaatcgattataagaagaaaaaaaacaattattcttaatgcacgaccgacgagaattagaattatacatagacgacgttgatgtttttttatgttctaaacatcaagaattgaataagaccatacatactgactgtagggcaaaaaatatcatttgtatagtttttttacttgatatttataaaatagttgagtatctttcacatacatatgatttttaaaaaaacaaatttcataaatattatggaaatatgacacaaaaatgacacacatgcacaaaagctttataaatatgacaaatattaagtaagagatgtctcggaagaatcttagtatgaacgaaaataagatctaacaacctagtaagatactcaaaccatgaatcccctttgaatgacccaatcaaacccaacaaagagattacttggtcattaagcaagttaacgaaatcactctcatgaacaataacatcttaacgaataaataagcaaattttttacaaaggactattctctacatttcacagaagataacttgtctccccaaaggcgatacgaataagaaagagggaagaaacaatgaacaaatgatagctttttcaaggaacgacttctaaggcttggagacgacaaagagctgctgtggaggctgttggaggcgtcaagagatgttgtggaagaagtatatgattttctcaatataaagtggtatttctaggttcggatcttggattagggttaaaaatgctaaaacaccatcgttttggtaagtgtagggatgagagctcctagacgaggttccctagagaaggcaaacaaccgatcatgtgggttgtgaccggttccatgaggcgcttcccacctctcacaagcctatgaccggtaatggacggtgcttccttcaattaagcactaaacatcaaccgtgggtcatatgagtcttgatacactttaatgtctatcttgactcttctagatttccataactgccatga

SEQ ID NO: 12418 - DNA, 556 bp, Arabidopsis thaliana landsberg
tggattgctgtggaagcttgagagtctgagtgaacttgtgttgtaacgtcgaatgcctccccatttatagttgaaggggggcatgcacaaaagactccgtaccccgacatgtgggtccagagacataaggatggaatacccggagcaactaatgtcggtcaccttgtgctatctccctgtgccccgacatccgcagcttgagtagaatcggcgtgctgcagaaggttcctcggtattgttcaagtcatgatgaccactgtgtgcgtgcagcggtgtgggcgtactgccgctgcttgattggataggcacaccgcctagtctggtcgccgcctgccagcagagtggacggggcacattaaatgccgagtcggacatcacccgtctacagggcggtcaggcggcgcgcgatctccataataaatgcagaggtcgcacgatcccgtggccttacgtcaggctctgctctccggcttacgtcatgacccgtagccacgtggtagcaccgggtcctgcctcagcggagagcgtaggcgtgcctaccaagactcagacaagt

SEQ ID NO: 12419 - DNA, 1241 bp, Arabidopsis thaliana landsberg
acaccactttacacagccctccaccacatcatcatcctcaccgtccgccaccgccatgtttccctttcgacccgtcgtctctaataccctcttcctccacttcctcgccggctctaaccggaaacaacaatagctttaatactagtagcgttagtaaccctaattaccacaatcatcatcaccagactctaaacagagccagattcatgccaagattcccagctaaacgaagcatgagagctcctaggatgcgatggaccaccactcttcatgcccggttcgttcacgccgttgaattactcggaggccatgaaagtatgtccctttaaccttaaagcttatctcttttttccatttcttaattaccctttttaactaaacatgactttgctttattcacttgctaattaggagcaacacctaaatcagttcttgagctcatggacgtcaaagatctaaccttggctcatgttaagtcccatttacaggtaaattgattaacagtattgttacaaattcatccatattaagtacataattagatgggaagaaaaagataaatgtacataataagtatgtaattagttaataataataatcttcttctcgggtatcgatgcatttgactcggtgacttccttaaatcagagttccactcgagtcagaagagatcgaatcttgttttcttctgaaccttcctttttttattcttatcttaattaaatccaattttgcataccaataatgcattccttggttgagttacagacaaaagaaaaatgcatataaacattccatacatattttatacaacaaaaaaaaaaaaaaaaaaacatttttcaaaatcctcttcttcgtttcttcgtgttagatctgatggtcctcatagatagacgatagacagtcttctttttgcaagtctaaaaaaaaaaattcgtcttggaagaataaacttgtcttgttacaagtaaaccaaaaattactcaatattactattactgacacacatagaatagaaaggtagagagagaaatagagagatggggaaattacgtaagtgattgtgctaattattagaaaaacaaaaatctcctaagaatatcaatcaaaacattagtacttttggtttcttatcatccattgtttcttgggttataaactaaaatttagactttgtttctgcgtaatcatatgttttatatatttatcatctattaaggattacctgattatagtttctg

SEQ ID NO: 12420 - DNA, 1097 bp, Arabidopsis thaliana landsberg
tcctccggcctttcagtttcggcggtacgtctaggtcctagaagatgaggggcctacaagcattcattcaatgtctgatattagtcactcatctttgggacctgttcaaggaaacattctcggttgtgctcatggaagtaagtatcttacactttctctggacatggaagcattaaactgctgcaattcgaatctcaatcttctcacttctgcttcaagattttgattctgatcatagtcatgcacaaagaacacaaacatctcagaatcatgcatctgacactcagcataaccgaaacactatatctacttttctgaaacattaattttacctggtgttcagtgatattgcccccagataagctttcctctccatcagttatctcagactacagattcgaaaaaaaaatgtcaacgccaggcaaataggtggtaagaatatcgatttgaaacgtgatgggaatactaaccatggaagagtgtgagcttcctccatatgtggatcgtcctaggatgctgtagaagctagcatttgattcagcactgtgatcgctgggaaattcattactaagctctgacatagaactcctatacaaagatggcttgtaatgaggtgtaggtggagataattctccgttcaatgcaggagatgacctgcaagattggcaaacccaatgactactatgaagcaaaaaaggcattcattcacaagacaaccggataaaatttgagttcattaattaccttccggattcactggaagtggaacttgttgggccaggatcagacatcattgagggatgttttgaaggatgaggagggtgttgaggagcttgaggtgtctgaggaccttgaggcgtgtgaggaccttgaggtgtctgaggccgactcgctgatctgcttgttaagagcttccctttagacacaatgaagacagcacatgtatctggtgttgttataagcagagtcgttggcacatctacgctcttaaacttcctgattaagaccataaatcacagagagttataggatttagcattcagataaagattacagtttaggttatatgagagaaagaaagagacttggggaaagaa

SEQ ID NO: 12421 - DNA, 1543 bp, Arabidopsis thaliana landsberg
  unsure (1)..(1543): unsure at all n locations
gagaaccaacaatggtgatagcctataaaaaggcatctggtgatttgttacaaacaaccatatactaggcttgtcaagccagtggagcagactgcaataagattaaagcctaaccaaccttagcttgtttcaaggccagcaggccaacactatcaaggaccatgccttcgttgtcttcaataattattaccagcgttataagcacaatggaggttctagttactttaatggtgcatcaccgattttttaaaaacatttatctatttatgactaagaggttccgagctaagcacatacattctcacaagctgggaaccaaaacattttatttggtctgcacattcatcctcttaggcgggaaccaaaccattttaatttatatggttctctcccgagtgccactcaaaaatgatcatggattgcgaccctagtatgcaattctggctaaatcctttggttttaggaggcttaaagttctgcttccaatattgttgtgtttcaaagttggtggtgcaataaatttcacctacatatcttgttttactcatttgttatttttggtgcacatgcaataaagattagatgtttcacttttctcttcttctccagctaatgaaacagatattatattcaaatgtagaacttcaataagatatatggtattaaaattacatcaatttggtaattgacattatccattctgaaacaaaataagctatatatgataagcttgaccacattccatataacataactcatatatatttgaatcaaattcatagtcaacaaaatttggcagttgatatgacttacacctaaatataagatcttacataattcattctttattttgttggtcagagtataatccattctaaacacagaatactaacactataaaatactcgagttataaccatctttaagctctcaaacagttcaacttgcctcttgtaaaagatgaaaactttttgtttagggatagcaattgctctacttttcataacagtaacgttttcaggtacaatattattgtaacatacacataatctcaaagatctctataacatggggtatcttatttttgtagcgaaagcggagttcggacaatggtgtgtagccgatggacagataccagataatgtgatacaagcagccgtagactgggcttgtcaaacaggtggagcagactgcagtacgattcagcctaaccagccttgcttcttgcccaacactgtcaaggaccatgcctctgttgtcttcaataactattaccagcgttataagcgcaacggcggttcctgtaacttcaacagcactgcatttatcacacaaaccgaccctagtaagcaactttatctaaaccctttttgttacagttatttaagctctttgatcaatcaaaatcttgaaccatctgtttctgattatctcatgatttgataggtcacgattcgtgccattntgagtatgtgccattntgagtatgtccaatgattcanaggaaagaccaagatgaaatgaaagatgatgaattatacta

SEQ ID NO: 12422 - DNA, 1091 bp, Arabidopsis thaliana landsberg
aagagcggttggtgggatgaatggatggggaatcttctggtgtgttaatttaactggtttttgatgatagtgatttgacatgggaaatggtaagccaagtatctgaaagctaatgagcctaactactgtactaaaggcaaaagaggaccagcatcgtcttcaagtagaactaaaaagggaagaatacagcctcatgctccattccaatggctttgattgatgaggatgatcaaattgaagaggatttcgaaaaagaagataaggataatgaattgtgtgtggaagatgatgagtacgacgatgatgaggaagagttttagagtttcagactcaaagttttatctttgtcggattggattctgtttgttttcatttttatgtttcagagtttcaggctcacggtttagcttttgttggatttgattttcttttttcacacttatggtttaagtttttcttgaattttctttttcagacttttggtttaatttattgtttggattttctttgttatctcttttttagactcacaaattgttctaaaatggctttatgtatcaatgaatacaactaagctatttttttttaagttgtgcctcatacggcaaaggctctaaggctcatgcgcctaggctcgaggctcaaacaagcacctcagcgccttacctcaccttgggctatttaaaacacagtttaagcctaccttgaaatagtcaaagttgttcattagggacaatcgagtgagagtgatatattacaatacaatggtgtccatatccttgtttctcaagtaagttcggtttcccatttatacctaacaactacctccttcttgtgaatctggttgaacctaatcaaagctcttttggcgagttctgtcaatggcctatattttcattcggcacccagacttttaagtagatttcgtgccaaagtacgaggatcttgagtcagtgtgcttgactttcttcttttacctcatcaagacactaagcaagtctccatagaccttatttgcgggtgaactaaccaatgctcaaaaccaattggcagacctaaggaaattaggctttcagctagactggttgaag

SEQ ID NO: 12423 - DNA, 497 bp, Arabidopsis thaliana landsberg
ggtagtcatggatttactcccatacccatacccatgtgattatagatcacccgttggtcacctgtacctataaagattaaatatctatcaaaataatacatcatacaaatgtcaagtatatcaatctaaatgccattacaaaatttcgagcaccattcaatcatccattcaacactctattcaacacacaccatgtatgattggataaagtagcaacactaagataataccacataacacattacatgtttcattacatggttatcaaatagctgttaagccttctattacattatcacaaaaaagtttgttaaatagttaagatagatggattatcgaggcctaagtttacacttttatattgggtattttatacccatgtgttaacagggtataggtgaggccgaagcgttctaatctctactacaccttaagatgacaatgagggcgtcacaccgaggcatgccccgccagccatgcacgcctccgctagcccc

SEQ ID NO: 12424 - DNA, 603 bp, Arabidopsis thaliana landsberg
  unsure (1)..(603): unsure at all n locations
ctctagagcgccagcacctggtgggcaaactttacagctattcaacctaaaggacatcttgttatgtgggcagaattcaaggaagcattcagggaacactacattcccgatggtgttttacagatgaaacttgaagagtttgtgcgcttaaagcaaggaggagattcggtgatgcaatatctcaccaaattcaaccatctctcccagtatgctatagagcacgttgatacggacctgaagaagaattgcttcatgagaggtctaaatgatcaactacagcgaaagatggccacttgcctggacctcacttacagtagggctgtgagcacagcgctttcggtggaagccaagaatacggggcgaggaaaaacaaagagatatgggcgtgaagggggtgaaggatcatctcaagggtccgagaagcggtcgaggatggtgattcgtccttttaacccaaatcgctcttttccgtcgtccaccacctatcccttcaagcaactagtttttatctgtctaactcttgccccgctcaaaacaatcagccgagtgccctggtantcgtttcccgccttaccagttcactagnactgctcaattgtggga

SEQ ID NO: 12425 - DNA, 598 bp, Arabidopsis thaliana landsberg
aatatgagagcagtaagaaaccagataaaaaaaagtggttaaagcaaagatattgatactcattttgtctgctttttgacacttatgtgtattgcattcctcgaccactcaaactcatcattccatgcacttgttaccccatcgtaatgaaacagaacaatagtaaagttctctgaaaactgtacttgagtagacaaatcataatgagtttactataaagcaaaacagaaaacaaaaagtgttatatcaagcaaccttgctaacacacgcatctatattgtgtctctgattataacccactgtaattgttgctagatatctcggttgtttcactaaatcctgaggaaacagagaaaataaaattgaagctaatgttcattgatcacatatgaaagctgtaatatcaaaagagtgaggacaaacctcatcagggttccccataatctacgcaagtacaagtctgattcggatgcaatgataccggatggtattctctcagcgcctcaaagatttgatggttcccatatctgcaccaaaacatgccttaagctttggtttgttcttaaacatgaaaaagtataaatcctacaaatacatg

SEQ ID NO: 12426 - DNA, 920 bp, Arabidopsis thaliana landsberg
atgcgaagtcatcatttcttttttcagcttaaccagtttgtcctttattgtatattctcgccgccagttagggagcatggggaagagactcggctcaacctgatttcatatttcgaaacaacttgtcagactaagcaaatatccacacacacacacacatatataacagcagtgatgtcaaaggttattaccactccagtttctgggttaacacaagccatgtttatccgggtctggaacctcacagtcggtggactttcagggtactccttaccacagaaaagcttcagctgaaagatcttcccttcatatgcagtctgatattcgctcatgaccaaacaaaaaacatcaatcttctcaaaatccaaaagcacaaaccaacaatttccttccttttagtccactctaatcaatagtaatcaagaaatgtcactacataccatttggagtaaagggtcttagataacacagccaacggttatatccattcgagaaacagccacacaactactagttacttcagaaacgcacccaaaacagagagacaaaaagtagaagaaaactccaaagcatatctaaaaaatgtttgaacactaaaacactataccaacaattctctcacaaaagtgttaaaaattgcatctttactctatcaaacacagataaatctaaaacaaaactcagagatcgatagagagatacatacattaggaggaccaagaatggtgccagtccaagattgcatataaatatcatcagcatcatccattccatagctaacagtaccatctccaatacctttctcacctctttcaagctcttccgacaatctaaagttcctcggaactacatcacaaaatcaagctcttataaatatcgcccccaaatcaaatcattttacagatcagatatatacctaa

SEQ ID NO: 12427 - DNA, 578 bp, Arabidopsis thaliana landsberg
  unsure (1)..(578): unsure at all n locations
ggactctccggataatcctttcacagaatagcttcagctgaaagattttcctttcatacgcagtctgataacaaaaacatgggtcttggttctcaaataccaaaagtggaaacaaatacttcaattcatttccctttttgtctcttctcattcaccaaaattggttttaaaatgctacataaggttactaaactcagctaaggatcatttgaagttaaattaaaccctcgaattatagtgacaaacaagtagcaaaaaattgcatcttttaagttaaacatttggaaaggttcttgctttagcattaaaaaatgcatctttattcaaatctaccatagatattatcatttaagttaaacaaaagatgaagagatagattgagaagaagaaaactaacattatgaggaccaagaatggtaccagtccaagattgcatcaaaatatcatcagcatcatccattccataactcactgtcccatctncaattcctttctcacctctttctagctctttcataatctaaagnttctgggaacttgcaacacacantnatcatcaaagatccaatgatcaacac

SEQ ID NO: 12428 - DNA, 574 bp, Arabidopsis thaliana landsberg
tcgaggagaaactatccggagccttctctcgtgacgtttcctactgagtttgcatctgtgggctccaagatcattggtgcttttgtgaggttggtgacgagcaaagatcatgccaatgacgggtccgacatggctttgttggatgaacttgaggcgttagaccatcacctcaagactcacgttggtcctttcgtggcgggagataaagtaacggtcgtggatttgagcctagcatcaaagctttaccatctagagactacgttaggacatttcaaggattggtgtgtccctgagagtctaactaatgtccgtgactacatgaaggtattgttctctcttgagtcttttgagaaaactaaggctgccaaagaatatctgattgcaagttgggctcctaagctcgacgtgtgatgcattattgtcttgggttagaaaatatatgatcttgtgtttatttcccccatctattaaacaacgcgccaaaaatgttctcagttggtgtcttcgttatctttcaaaatttatgtgttttagttggtgaaattagatctgtctgcatatgttatctggatgt

SEQ ID NO: 12429 - DNA, 919 bp, Arabidopsis thaliana landsberg
ggtcgttgtgaaggataaatttggggaattgatgcagcagggcttgtatgagtataatcacaggcgatatttggctaatctagagaagaagagagagaaaggtattgaatctttgaagcctgtggtgcgaaagaaagacaggaaccacgatcgagatgatgtcgatgaagaagaaaaccatggggatcgaccaggtggtctgtttgatccagaagagagaaaaaggttttatcagattctcttcagtgacacccaataagaacattctggtaaagttggacgttctcttcagattctcttcagtgacacccaatggagaaaaaattacctatatagtctgcaatctctaagacgttgtgctttttctgaaagctacgaagatcacaatatgcttgtaaacaaatgcaaaatacgagttgttccccgcagatgctagatcaagatagaatctgtgaattaaggcagctggaatactttcacttagttcagtttgggcgggaatcaagagttaagagttctctgaaacaatgctatatacttcatgaacgtggtccagaaattgagtgaaaacatttgcacgtacttggaattttcccgatatgtgttcttggtttcacatttggtctgtgtataaagtcaccttgcagcttcataaaggacataccagtggtcaaattttctaacccctgaagaccgtacgtacgtgcttcagttgatgtaagccatgttttgattacacagatattaagcggagcttttgattccccgatgattatgtcagatgatactaagtgtcagcttcattttggattgtatatatattcccagataaaaagattcattcaagttttgttgatatatagcattcatttatgtggttgttgtccggagggggattgggcgcaaagctgaaaaaatt

SEQ ID NO: 12430 - DNA, 734 bp, Arabidopsis thaliana landsberg
tttgagctccagaatcagcaatttcgttatattagagcaagtctaaagacggcattaactcaaagaatatttaaacctgagagcttcatctatgtcccacgggaagttggtagctgccaataccattactattttgcgactaccatcttcatttgtcgctgtattgctcactccatctacttgaactaggagttccgatttcacccttcttgatgattcatgctctccagaacccctgcatcacacctccaccaattacaaatacttttcatttcagtatcgaaatctcagtatcgtcaggaaaatttacccccgagaattgcagagagagtcgatctcatcaataaaaattgtgcttggagcatatgccctagccagatcaaacaggcatctgaccatgcgctcactctctccacgccattttgaagctaatgtagcagaagatacattgaagaaggtggtaccacactcagttgcaacagcttttgccaacagggttttacctgtcccaggaggaccaaacatgagaactcctttccatggtcttcgaataccctgaagggaaacaaaaacaatcaaattaagtatcctctatacctggaagatcaaatataaagtctacggaaatgatgaattgaaactggtattctgtatgattgctccatgtctaataatagtattttagaatccaaatttcacagcgtatggagcacaatcaaagtacctgaaagtat

SEQ ID NO: 12431 - DNA, 923 bp, Arabidopsis thaliana landsberg
gatatatatagagattacgagtaatgtctcataagcagacacaatatgttaaaacatttactcttttgtccatgtatatctcagctcggctgccatatgcaataaaatgaagaatcattatccgaatatctaccctatcttatgaggaagcaccaaaactctcttcctctttaaaaaatgagtgaaccccaaatattcatcaaaacagccggcaacctcttcaacatcctggattcgagcaacattgcggggtgccgtgcgatctcatcgtgtgtaggggcctcaagggtttaaaaatttgacattcaaaacccaaaaaattaaatgccaaacccatgcctgagattctgatgtaccgtaaatttctttttctttgaacttgtgtaggtgttgcacgttacttaaattcattctcatttgtcttcaatgaatattttgtttataaagtctctaaatcttcgggaataaagcttaggatcaacagctgaaatggacgcgggatctgcgtggagtgacttgtaggcgtgctctagttttttggtgatatcatagtcttgaagaatgtcaataacaccgaaataaaggatcacctcaacggcttctttccttgtacccttaggatttgagttgtcaattgcatcttcttcccacgtctcttcctcaaatctgctcacctgctctgcttttgccggtgtactttcccctagtctcattaagggtccattactacattttcaaagacataaaaacaaaatattattaaaatgcaagagtcatattttactttgactttaatctggtaagcttttgtgagtgtatgtataaaagtgattgtacaaggttcatttgaagttagtgagaaatgttcaatcaagttgacacatatatatgcaatatggtttaaataagtttggttagttgat

SEQ ID NO: 12432 - DNA, 896 bp, Arabidopsis thaliana landsberg
  unsure (1)..(896): unsure at all n locations
gtagtgaattatatgggactttttcgtttttgtttatgcgtaattgtccacagtagctatattaaacaaatcaatcatgaaatttcacttttattcatttgcgttttgcgtttataaaatatttaatattaataaaattatgtgtttctaatcacatgcaaagcattttaaacacaaagtccgatcccgaataaacactgacgtaacacttgtgcattacagaaaagaatgactatgacgagaagaagagggtggtgtatccatttggagtggtaaaaccaggtggtcgagaagaagatataactctaaatgacattaataagaggattttaatgccatcggctaggccggttcgacatccggttggagactttgcatgtcgtccgtgtgtctctgcagatggaccgggtctatcaggcaaagccgtggttgcattcacgaagatacaaacattagggaggggcacaattactattataagaactaagggatgatatatcatatatgtaattaatattggctattagaggggggtcgttataatatgtactggagatgtttaaaaaagactaatcattggttgacatgttcaaacctattgttgtatataatgagaaatggtgtatattagtatacatgcttttccattttcttagaaatcttccttctaattatttagaaacctcttaaaaaagaatcaagataatagatatcttagaaacttactaaacaaattttcttaagaaatcaagattttgtatgtattgacaaaaaaaaaaagttctcttctttttttcgtttgatatattatgttttttgcatgttcgtgctttttggtctttaccctttttcccatagcctacccttttgttctttagtanaagaaaaatcagtag

SEQ ID NO: 12433 - DNA, 885 bp, Arabidopsis thaliana landsberg
  unsure (1)..(885): unsure at all n locations
gacagtccctacagtctaagataaaggaccttgacccatcatcatcttgcacttaaaattagacattttttttgtgctcttctctttactctgtttattgctctgcttttaacttaggaggtactatccatatagcttgtgtagtcttactgtgaccaaagttttctccttacctatttcaaggtaagagacaaaacctgaaacagtcccacaaatagcatatttttgcccacactgaatctgaaatcattatggaaagtcaagttctttcaaagatcttgcttttctaatcatattcatcccattgtacaaacttgtaacagagaagagaagactctattatttggtttgtcttgtacataacaaacttgttgacttgaccatatcatagttactaatttatctcctctctttttttttcaactatcaaatctaaaagttttgtatgaaaattgtangtggttatggaacacttgaagaattgcttgaagccataacttgngctcagcttggtatacatgacaagccggtaaaacaaataaacccttctatcacattttaatcaaaaagtttcaactttaataacaacatatcatgcatcatttttctgtaggtgggtttgctcaatgttgatggatactacaactctctgctctcattcattgacaaagcagtcgaagaaggatttattagcccgactgctcgtgagacatcgtctccgcacctactgctaaagagctggtgaaaaagctagaggtaaattaaacttataatgaagatggatcattaatgtttcttcataatctcataaattggttgttgttgtctttgtaggaatatgcaccttgccatgaaagggttgcaacgaagctttgttgggagatg

SEQ ID NO: 12434 - DNA, 915 bp, Arabidopsis thaliana landsberg
aatagaaattgtgaccaaaataaattatatagttgactaaaatttctaatacatgcaattcgatgtgaaattttatttttttaaattgctgatctaataaattataagatcttttttatctctatagttttcttacaattattttgtttaattttaatgtttgtattacttagttatgacatataaatatgtgatgaattttaaagtagctttctttgttactaaatgtatctacgaatgaagtagctttctttgttactaaatgtatcaacgaatggccaagttcggatatgtgaaaattttctagagacacttgagagacatgaatctctggcctagactcatagagaaactctatatctcagcggaatttatgttgcaaccgataataaccattcaaaacatctacctatagttgtgttagttctcgaagaagctgtaggcttgttttctcgaggttttgtggactgatctcggttagaattgctcatgacaactaagataaggattccagtgcttaggtactgtggcaaccacgcaaatttccgagttttgcgagctcggaatcggtattttacctcgcaactatgctttttccaattagaagcgatccaaagctatttaagtagttatgttgtatttattttctgtagattgttttgatatttttcttgttatctttgtaattctgtcacaaatcaaaaatagtataaaatttaatcttttaccaaaaaaaaaacatctacctattttattctatatctttttagtcatgagtatcttctaaattaaaaaattaaatcactctttagaatctcattgcgttaaaaaatcaaagaattagttcctgattatttaaacttttggttgcattgcattttttaaaattgaagcaatttagtctcacaatcgatg

SEQ ID NO: 12435 - DNA, 887 bp, Arabidopsis thaliana landsberg
tgtttaagttatagtgagtagagttagttcgttatttttttctatttatagaggagattgattagtcagggagggacgtgtgagtcaacaaaaccggctttggtgtttgtgggggatagatgaaaaacgacaccgtttgtgggagattcaaaagcgcgtggtgttggtcagtgcgttgtgagctggtcgactggttgactttaaaagcattttcttttggatttgttcgttttgatactttttttttttttttttcgttttgatagttacttggtgtgaaattgattgaattatgtaacgaatgatggaaatatcgtttacgtataggagttttgaatttaggttcatgcctaattgatgtatagcaaatatataattaaaaatgaggattatactattttgtgattaggaaatttgtatatacatccattttttggtaggtagatctcaatattagaggattaaaacgaacatcaaattcttctttaatttacaaagtccaaaagtctgccaagtggattttaataatggaaatatccaaaggtttataaattctcactataaaactactggtagtaaatgaattaacttgggattggaatcatgaagcaatctggttcttccacaaactttagaaattaattactctgaattttggttcaagattcttctgtgaaaaaagaagaagatcaggttaattatgtttctccaaactcttactatattttcacggcgaatacagttttgtaatttacaaaatgataatacactctttttttttaataaaaaacttcttaataaactattgctaatgattagaattcaaagtttttcccttgtgattcacgtacagttcttatatatttgaaactatagaaagccatgaa

SEQ ID NO: 12436 - DNA, 725 bp, Arabidopsis thaliana landsberg
cactcttccttctctagcatcataataacaaagaaccacagtatcgtgctattgcactgaaatgctactttctaacttttgtgatttctcaaaacaatcccaaattgaaacccctaaggttatataacagttgtgcatcatacttggtcttgaatatgagaggttaaacaggaaagtaacacctacctcggaggacttgggcatgaggtgagtattcacaacagttgatttggtctcgtcagaatcttttacgtctgcaatagctgtagtgaagaatgttaaagaagaaaacaagcaaacgataccacttcataagccacaaatctgaacattgtctaaaggattttatgacaaacagtaaaacacaatcaagtgaaacagaaatacacagacagattactatataccttctgtttctgcaggtgggacagtagacaattggatagctttcacagatcgcagagtcgttctcagactcagatacttcatagggctttggtcaacaaatagtctttgattgttcggtatcagcaagtttccacatcttaatctactgaaatttgttgcaaaaattctaactttaggagctcctaagctacctgaaacagaatcaaatagttatcaacactcctccatagaccccttttaccttgacctatacatgtttctataaataatttatcattgcaagtcatagtcttgaaacaagtatagaggcagtagca

SEQ ID NO: 12437 - DNA, 1461 bp, Arabidopsis thaliana landsberg
gctccaacaatgcagtgtaccgagaacaaagaactacatgaaaaggtgaatcttctagagcaacgcttgaatgcagtatctagtgagaaatcctctccatcttgttccaataaagcggtatctggagagtatgcagacgaactaaaaaagaaaatacaatcgcaggtaaatttataaacatacattctcagttctcacaagtatcccagtaaatacctctgcggatcaataaatatcaagtaacatagatttatgcatttatttgtaaatctgatcctcccttaatgctaacataaatctcattcttacgtggatgtttatgttttgtatttaggaaattgagaacgaagagttgaagctagaacacgtgcaaatcgtggaagagaacagtgggttacgagtacaaaatcaaaaactagctgaagaagcttcatatgctaaggagttagcctctgcggctgctgttgagctgaaaaatcttgctagcgaagtaacaaaactctcactacaaaacacaaagctagaaaaagaattagcagctgcaagagacttggctcaaacgcgtaaccccatgaacggagttaatcgcaagtataacgatggggcaaggtcaggaagaaagggaaggatttcctcaagtaggtcaagtggagatgagtttgacgcatggaatctagacccagaagatcttaaaatggagttgcaagtaaggaaacaacgagaagtggctcttgagtctgcattggcagagaaagagtttatagaagatgaatacaggaaaaaagcagaagaggcaaagcgaagagaggaagctttagaaaacgatttggcaaacatgtgggtacttgttgccaagttgaagaaagacaatggtgcattgcctgaacccaatggcactgaccctggaagagaattagagaagagtcaaagccatgcggttctgaaagagagacaagtctcgagtgcaccgagacaacctgaagtagtagtagtagctaaaaccgaagagacaccaaaagaggaaccactcgttgctcgtctcaaggtaaatgtaatgagatgagttttctacatttacctgtgaaacagtcttttctttcaaatatcattaacaagattttgctgtaataatgagacaggcacgaatgcaagaaatgaaagagaaagagatgaaatcgcaagcgaatggagacgcaaactctcacatttgtaaagtatgtttcgaatctcccactgcggcaattctactcccttgccgtcatttctgctgtaagtcacaacttcatctccatgaaacctcatgtctcttcttttatcaaagagttgtattaaaaagatgaaaatctctgattcattgttacagtatgtaaatcctgttcccctgcccgctctgaatgcccaatttgccgcacaaagatatctgatcggctctttgcgtttccgtcttaaccagttgagaag

SEQ ID NO: 12438 - DNA, 480 bp, Arabidopsis thaliana landsberg
  unsure (1)..(480): unsure at all n locations
atttttgtgagcattactcgacatactctttcagttcctctttttcagcttcagtcagctcctggccaactaagtttcggaagtcaaaagtttcatcttccgaggtatcttcggttattcctcctttctcgggtttggcagccgtggtctcttcggtggctgcagcagtttcttcagcgaccatgtttagcagcattttatctatatcagcggctatgctctctaaattaataccttcggagttagcatcttcggctctggcctcttctgcggcagctccgaaggtannnnnnnnnnnnnnnnnnnnnnnnnnnnnnnnnnnnnnnnnnnagttggagctcttggtggtgttgtttcaatcactttagtcacggtaacaatcctttttctttttggcctagatgcctttgtctttgcgggctccttttcattatgaaaaagcttcatcagatgaaccccaacggacttagtttgacaggc

SEQ ID NO: 12439 - DNA, 1115 bp, Arabidopsis thaliana landsberg
gttcagtggcatttctaaagtttcatatacatgaaccggcgtcgttttataagatttttgtcaaggacaatagattaagctcacggtcttcttcttcaagctaaggaaggtcgtgagaaaagaaaaacacttctcaatctttctacagtcttcttcttccaaaagaacaccatgtacgctctttatcttctttctcccgcctttttcctgtgttacagagatgtgattacatgtgtatatagcttctcttttcctctattgaactatctgaatatattactcatctgcttcgattttttctcgctcttcttcagcttccttcgtaatgtcagagaaccagtccgaagaagtccagcaaatcgagaagctctatgagttcagtgagcgtctcaatgcctccaaggacaagtctcaggttcatctcaatttttcaactagggttttaattgaaataaaatcgagcactccctgtgttgtaaatgggttttgctttggattcgaattaggctggtttagttttggatcattttacctgatttgctttctcgtttgtagaatgttgaggattatgaggggatcattaagatgtccaagactagtatgaaggcaaagcagcttgcgtcgcagctaattcctcgctacttcaagttcttccctagtctctctactgaggctttcgatgcgcatatggactgtatcgatgatggagatcttggggtatgtaccttgaaccagttcaaagctagcttcttactggattatactaaaaacgtttggtttgagttaaacatgtgtttctttttgcgtgtaggtacgtgttcaagccatccgtgggctcccgctgttttgtaaggatacgccagatattttatctaagattgttgatgttcttgttcaactcttgaatacaggtaactcttgatatttgtgttattatatattttgtagactgtttgtgtcttcgtatctgatttggatgtatcatgatttgaagaggaacctgtggagcgtgatgctgtgcataaggctctgatgtcattgttaccacaagatccaaaaggtagtctgatatcgctattgactctttagttcactagtattttgctaatttttac

SEQ ID NO: 12440 - DNA, 787 bp, Arabidopsis thaliana landsberg
gcaccctaccatggttcttctgcttggagcatgcccagaatgtggatgcttagtgtatgagttcatggctaatgggagcttagaagaccgtcttttcagacaaggagacagcccggctctctcttggcaaacaagattcagaattgctgcagagatcggcactgtactgttgttcctccaccagactaaaccagaaccactggttcaccgtgatctcaaaccagcaaacatcttactagaccgcaactttgtcagcaagcttgctgatgttggcttggctaggctggtccctccatccgttgcaaacaccgtgacgcaataccacatgacatcaactgctggcacgttttgctacatcgacccagagtatcagcagacgggtatgctgggtgtgaaatctgacatttattcgcttggtattatgtttctgcagttaataacaggaaaaccacctatgggtctaacccattatgtcgaaagagctctcgagaagggtaatttgaaagatttgctcgatccagctgtgtctgattggcctgttgaagacaccacagagtttcccaagttggctctcaagtgcgcagagataagtcgaaaagacagacctgatctttccaaagttatattgccagagctcaacagattaagagtacttgctgaagaatcaacacaggctgcagtagtcattaacagctccggaccaacccccacggagagtcaaacttcctcccccaagttgtgaggactgataagccattgatctgcacgtagaaagagacagaggtca

SEQ ID NO: 12441 - DNA, 975 bp, Arabidopsis thaliana landsberg
aacaacgcttctctagattttcgacaaggttgattttttggcgtttatcgaggtgttccaggtgaggacaggcgtctaggggggcgtttaagcctgttttgggtagcttgttcccacaaagctggagatggcgtagtttaggcatgctttctgcaattgctatggcatcatgatcatcatcatccgaacttaagtaaaagaggcggtttagcatcaatgtcttcagatttggacaagacagccctgcaagtttcatagactctcctgacaatgatattcctgaaacctcaagctcttcaagcattggaagtttcacaactgcttgaacaaatccatcgtctgttatttctgagcacattagtctaaggcttctaagattacttgacctacaagtaatggtgtgtaaaaagttataaatcataatcttgagatatctgtttttaacagacacttgaagacttacatgaaaagtaatcaaaagtcaaaactagaattagaggagaacctctccgcgatgtatgtaaggagagaatcactcccgaagtccccaatgttgatctccagcaagccaccctcgctacgatcaacggcgttacgacatatcgcctcaggattgttcaccagtactggtttgttgtaactcaagattcgcatgtcgattttacgccatatggatgggtctttacaaacatatcgccacgatctacacactttctgagcgttctccagtatctcagtcacgctaagacgtagcagaatcaaacacatcaaatccgtcggaagatccgcccagttttttggctcttcgtttttcatcagtgaagacagcggatccatttctgatgaggatcaaaatgtcaaatctgtgaaatatatatatcagaaagttatgtagttttaggccttctttgattatttgtagattctaagtagttttctggcacaagtattaggccttgaatggtagtagattct

SEQ ID NO: 12442 - DNA, 845 bp, Arabidopsis thaliana landsberg
tattactacttgcaagtaactatcaatagtacctctacttactatctgtttgtatatgtgacagtgtctaacgagggcgcttagagaagagaacccaaagttcttgatggctgcatcagctttggctctaccgtttcagcctctcgtggtatcagctgttcacactggaatgatggaggttctataagaaatctcaacttttctcactccatttaactaaacctcggtcgacgctaatctaacacaaatctctcaacttttgactcaggtagcatttgcgaaacgagccttagaggatccggatttgaaaatggctcatgatgtacacaagatgtcttcgttattaggcggagcattgttcatagctgatgatcttttccctgaaacaccattcattcacgccggttggcatctcgccgcagccattggcgttggaacttgcaataagcttcttcagtaatccacagtaccaactatattgagtgattgtggaactgccacattcttggcttaatgaaaccactagtacgtgtggtttcactaagctcataaatcagccgacataactagtagtagtcatctctatctttaaatcaatgtaaggaaccgaaacaagtcacctgttgtaatataaggacaaaggccactcgtctctatatattcgactttgaacaaccatgaagaaattgccgaattggagaagatcttgatgctaaattgctgatacaactttctaggtcgttatgggttttaattaggcccattgggctctgagtttataacgctgccgactatatccgcttggatccatgtggttaccaccgttgtttaattttctcataaac

SEQ ID NO: 12443 - DNA, 1038 bp, Arabidopsis thaliana landsberg
aaaaaaaccaataattttgggaacccgataaaaaattaattttgttctctggtgcatagggttagaaaatataaaaatcaaggaagactaatttatgcgataaaattttaatttagtattcatattaaaattaacactcttaaacttttttataaaattttatatattattatcatttcaaatttttagaaatcatggaactataggatccaattggtagcatcagtacaaaacaattgtaagtttttacaaaaaaaaaagtggtacagaacaactgtaaaaaaattgagggttgccgaagcggtacctatggtacatggttaccaatcaaacactagtgtttgtcttctcattttcaatatattaacacacaaaaaataattatcaaagctacattagtatttataagggttcatcatgaaaaaacctcaagtatcagcaaatttatttgaaaatcctcaactatattattaataaaaaaaacttaactaaaagatttaagtgataaaaaactttaagaactagtcggtctatttaatagcattaaaatatgatacaatagattgcaaaattgaaacgatgaatcaatataattaagatatggcatcatatattgcgtaaaacaatgaaaataaataaattcatttatagtttttgtaactaaatgaagttgaaataaattaattgtacggtaattttttttaaacgattttaaaattttaaatcgagattagcaatttttaaaaatttatattttacacatttttcataattagtaacacaaatatcgattaaacgagatattggttataaatgaagggatctttttattaaatttgatgttcattaataatttatttagagcttttaaatggaccgactattaactgagagttttttattagacctttttagttaggagtttttctattaaaaattaagttgaaggtttaaaaatgaatcaactaaaatttgaggattttgttattaaaaaacctatttataacagagcaatgatactttgttgacaaaatgaat

SEQ ID NO: 12444 - DNA, 563 bp, Arabidopsis thaliana landsberg
  unsure (1)..(563): unsure at all n locations
cgtcgttagcagttttaattatgtcgagcacctctttgacggatgggtcagcatcgggattatatggttcggaaggtggagaaagctcaacttcattgagacacaaatatctgttagtgtcgaagttgaaaatcttacgaaaatgagttaaaaagtgcatacttataagtgtagcccgttcgacagcttctttagctctttttgcttcttctaaagcatcataagattctttctcatttcttttaatagcttcatcagcaatttctcgtccacccttgagccatacttcagaataaaatttcccacctagggtagtagcttcggctgaagggttcctaatatcatcatctaagaaggcaaagtccggcttagctacagcattagcatgatcgcagccaaccttctttaggatggacgtagcccacgagcaccggcgaaggcacaaaagtcccctctgttgctaagaacttcctcgaaagcttcgagttcgccgtttatccattgaatganttcatcaggattccacgaataaattctgctcggagaatagatccactttagaa

SEQ ID NO: 12445 - DNA, 879 bp, Arabidopsis thaliana landsberg
tttgttagctgatcggtgagtgccatgtccctaatgccataaaacatatcgggttgagaaacatatcatgccattcatgcctaaaccgtatagggcccttgaccgccatttcgagtgatttatggtagacttgattatccggttgcttcaaagatgaaaaatatatttaaaatcaacatcacacatcgagaaaccacaacacaagagagtgatccagatcaacaatgattctgaatggaaagaaaataacctgagctacagctattccgaagaacagataagctaagccaaagtttaatctagcttgagtgtcgtcaggagtcaaacgcgcgtatgaagtgtatgcattccccaagcaccaaaccgcatcatgtttcattgggtcaatcaatattgcatcttcgagttttgagatggcatctacgcaaagaaaataaaattgtaactaaagcagtttttaatcacaattaatttacataagcatgaagcatcatcatacctacaagagcttgaaacattaataaaacaagttcaagtttttaaagaagacataagtgatattccaatactaaaaacatttgattcctataatggttagggaatccaaaatgtgcaatattcaattatgttaagttattaacacataaagcaaacatttaccaccaaaacaaaaaaaaaaaaaatacaccttgaatcattttcagtgaatctataacgttttgaaactgagataactctagtaaagcttctccccatctcatcaaattctgcaaaaaaaacatacaaggttaaggagagtgctagaaaatttttcaattcccgccattgattacaaaaacagaaatcaaaccaaggaagagtcattcctctaaaaatgga

SEQ ID NO: 12446 - DNA, 1136 bp, Arabidopsis thaliana landsberg
ctcaaaaatattaacggacgttttttgccccctttaattattaattattaattaataagattatattttacattaatgagatttccatattttaatatgtaaaaaaaatgtgtaaaaaatgtaatgtaatcttttctgttttacaaaataacaactctaatttgcgtatcaatcttaattcgcctattaaccctaatcaactgtaatcacccataattcgtctatcaatcctaattgtcttattcgcctattggacttatatttttctattaaaaaaattatgtccgtataatttatgccgtcatatctaaaaccctaaaaccttatgttgaaaatttctataaatataggatttctcccttgaaactcaaacatcacggcttgatttttatgcatgatatgtaataattatggtttatagttctttttttacttcaatcttggacctttctatgatgcatcgtcatcggttttcttttctcctttttatgttatggtccatggaaaataaaatctcatagatctttgccaattgatgatgagttgtttacgcaaggttagtttaatcgactacatgttttggttttcctagctattgtgctaatcaacatataacaaatagttaccaacatgtaatttatgtgccctccataactcaaaaataagacaattattttttcttcaataatgttcacgtaattatatttgtatactaatctttgtgcttcgtgttattcatcatcgtctaatttttcatttcctgttcgtgtagttgttgtttggaaagcaacatcaaaagatcctacatctttgcctatgtttatttcacctcttgaaacaagtaagttatctcaatttatatatttttatttcagtttttaaaattttgtaaagcttcgtttctaattattatgtttgtttgttattgaagatgatctcacaaaaaatgttaccttcctctctacgaacacaaaatctaaatcttgtaggttggatggaacgcaatagctttgatcctcaaaaaatagtttaattcatgaaatttacttttacagtattaattattattaaatctaattactttgtatgctaataaaattaaatttaacttaaatatccaaaacctaaatattata

SEQ ID NO: 12447 - DNA, 693 bp, Arabidopsis thaliana landsberg
ttcaataaactaaagataaggttttgcagaaagtaaaattgaatgacttgacaaaaaaattaccctgcaagctcagctccagtgttggtgtggaagctattaatcaacattgctgtggcggttccactaggataagtaagtttgtagtccaaaaccatcacctgagatcaaacttatgagtacggagaagaatcaaacaacagtgaaagcacagtatacattatccatgctatcgaaacgctaccttgcgtaacggaacgagactaaagagtcccaagaagctgactacaaataaaaacccaatcatccaccacaatcctggatttataacatcttctgcatggtttccaggataatcagcaccaatgagcttatatgtcttctcatccatagcaatcaaatatgaaccaaatcctcctgaagcaaaaatcaaagaccaatccatatcaaatccttatactagtaatcacaatcaatcaaatctcacaaacagctacagatttcaagtcctctaaatcaaatcacagttactattggacaatcgccaaaacaacaactgtttccagaattcgaaaactaagaatccgattccagcacaatgatacacagatcttaagtaagaaaggttttataccgccccaggcgaggccatagcaagcgacaacacaagtctgaataacggtgtctctgcat

SEQ ID NO: 12448 - DNA, 530 bp, Arabidopsis thaliana landsberg
aaaagaatagggtttagcttctttagcatttcgacatgtgtcttgcaccacaagataccctcctggtcttagtattcggtctatttccactaccacctccatcaaatcacacctgagaatatcaaaatcaaaaacaacatgtagttttagctatagatcgaaaagtcaaaacaacttgcaagaatcataaattttacctttgagaaagattggtaaaaaggaaactagagtgcaagagatcatatgatcttgggtatgtattgaacgactcacaccaatcatggtatatcccgatcaaacctctatcaaaaatcgtcgataacgtgtcttcaccttccacaggaatcacattcatcacccacagaggtttgtttataagagcagccgcaaatctgaaaaggaagatatgaacaaatggttaacaagagagaaatgaatcatttgtgaagtatatagtgaaatattgtctcaccctccataaccagcgttcatgtccataacattgtgaatcctagtccaggttataacta

SEQ ID NO: 12449 - DNA, 1055 bp, Arabidopsis thaliana landsberg
  unsure (1)..(1055): unsure at all n locations
taactccttcgtcttcttcttcgccttcgtggtaaagtttgcagctgcctgaacatgtctcacacggcacaaaccgaacatctgcacaagcctcacattcgttaccaaaacccggtgagccatcttcaaccatttcacagtcttttatcagcttttcaagttccccattttcattcaacttcttaatctcctctactccgtcaagatacttgttccccaagaaaactctaggcagggttattccaacgccgttgttgaatttaccctccaagagcttcttcagctcatctttagaaacccgaatgcatcgatacatcgcgctcatcgatccgaattcctaagcttttcagtattatccggatattgcagcagtcttcatatgttttccttatacctctaaggcttgtgaagtaaagtaccactctttctttacctaaagtctttcttttgaaccttgaaactatatcaggtggatccaaatcatcaactctgcaactggacttaacattctcatgaaaccttgatttaggaagatcaaaggaaacagcaacatcatgatcatgatcatgactaggttggatacgaacaaaatcaaaggagaagctcctcaagtgattcggtgatcgtaaaggactaacatcttcaagaccttccatcaattcccatgtattgatcgtctctggctctccaggaggcgtcactattggagttttagccacaatcttagggattttctcgtttatcgtacttgaccaaaccttagcttcgataaccttagcttgcaaatccaaattcatcttctcttcatcgccgtgaagaaacccattaccggagattagcgtctcctcacccatttggtcggaaacgcgttgcttgtaaaaagagtcttccaagtgtttgtgaaaatgcctgagagaagaatcacaaagactaagagatccgattgtggaggaagtgagagccaccgtgtgataactatcgncggtgtgttgggctggatgaagaaacggcattgaataaccttgtggtacaatcaccggcgataatcctccttt

SEQ ID NO: 12450 - DNA, 466 bp, Arabidopsis thaliana landsberg
cgaagctcccttgcgcgcaacttcggcttcgtttcatccttcgtatctcttgtgcttcttcacactgtgattttcactcaagtccgaaaggtccaagttcgaaggtatctgctcatgtattatactctagaaacattgttaaatcatgtatttgaggaccttcgaaagccgtagtccccaacagtcgccttgggcggtccagggcttggaaggcactcgcattctctcgcccttctcggactgacgcttggtgcgggtgacctatcggtttggagctgctccggctgagtttctttctccgcttccgtgctctctccctatgtgtatcgagcggtatactaggtacgtcgcatctagatggccaggtcttcatcgagtcctgctctggcaatgaacatgtatgtctgcctcttaacttcccctcgtgctctacgaaaccctggaactggggcaggcgagggatggg

SEQ ID NO: 12451 - DNA, 866 bp, Arabidopsis thaliana landsberg
atttaaagtcattagcttgactttgcagcggtctaatcaataggtggatcctgatgatacattggatgcatctttggaagctcggtttcagcccaataatgcttgactcttcgtccattcacagcaaactttgcgccattttctccattaagaacaatggttccatatggctgaaccgaatgaagtttgtagggacctgtccaatgagaagacatttaccaggaaataaagtcatacgagagttataaagaagtatctggtcatttgtttcaaaagatcaagatatgatcttcttgtcattataggccttggtgcgttcgttgtagagcttggaattatcataagcatgatttcatatatcatctagcttatttaactgaattagtctcctttctccggctgatttgatatcaaagttcaagatcttatctgcccaaactgctttatactctaattccactagaagatgagaagttttcccgtaacgaagatgaaaatgagtggttcctagcggagtcttgaaaactgtcctataagcccaatagtgcatcatctaacttaaaagaccactccttttttgatctaccaattgtcttttccagaatctcttttatttgcatgttcgaaacttcaacctgaccacttgtttagggatgataaggagtaggtacatgatgctgaacaccatacttgtgaagcaatttctcgagaatcatattgatgaaatggtttcccccatcatttatgataatctgaggtacttcaaaacgatggaagatgatagtcttgtacacatgataacaactacaaagtcattctttgggctagtgatagcttctacccatttggagacatagttaaaactg

SEQ ID NO: 12452 - DNA, 1159 bp, Arabidopsis thaliana landsberg
ttgcaagcgttttgacatcaattcatgacaaaacggattttgtgcaaaaaaaaaaatctcaaccaaatttaagaactttatcctttatttcaaaaaatgcagaataatctttacgggtaatatgtatttgagacattggaatttttaaaatttttaaattagagttgaattctcgtctcgagaacttcgatttgattatattatttatcaaatttttaaaaacttgacaatagcaaaaaatgttatattacctataattttagattttataaaattattatgtacatattttagaagtaaaagataaaattacaaaaattagcgatattgagttttgttttgcaccaaacccattaaaaaaagtatagattatgaaagaaatttttcacatgtaaagtctgcctcaattagccttattctagattttgtagctatagttgtcgaattagacttaaagttatatcatacagacgttaagactatgaatgtatatcaatcggataccttaaaattttaaagtacaagatttggatccggatatttaaatgcatgagggtatacaaaaccgaatctgcccaaaaagctaaaaatatttttaaaaaaatcaaatcataaaagaaaaattaattgaacatttttttttttgaaattgactttagcatatctttttgtgcaacggtaattcatttctgattaaaattgggcgaggcccattacagaaaaagttaatgttttctttgccatagagtctgctaaattgttttgcgatcgagggatgataagaactttaaacactgtaaaagatgaatcaaggatatcgaagtgaatcccgtggagttccttgaattgaagcttcgagttgatagctttgacgagttgagaagagtcagaagcaaaagtaacatggctgaaatcgagttggcggatttgattcagagcaaggagaacagccagggctttcgcttgcagaggagaattgacgtgttctactaaaccggtgccggaatggagccttttcccggtttggtctttgagtatccagccaaaacctgctcgatgatcatccttccaggctgcatcggtatgaacaaatactgtttgatagtctatttgatttacggatgatgggggcatattcaatcgggtcgcgacttttctt

SEQ ID NO: 12453 - DNA, 867 bp, Arabidopsis thaliana landsberg
  unsure (1)..(867): unsure at all n locations
taatttggttcatttagttggggtaacaacggaataaaacataaccaaacaaaagtttcaatgaaccattccatacttcatagcgtcgtcatcttcacgactttaacacattacgtcctattctaatgtacgtagaaccaaacatatatacgcgttgaaccaagttgtgttgannnnnnnnnnnnnnnnnnnnnnnnnnnnnnnnacaaagttatataaaccaaaaacaagaacaaataattccgacaaaacctgtaaataattacgaaaatgttccacctaatctgttaaaccattggaattatgcaaaaaatgttaacacatctgagagccttggaaattgaaacaacagtttctgctgctgacttcatatacatcaatgacgtcatccatatcccgaccaggagatggcgaaggagtaaagtaaggaggtgagtcgcacggcgtcaagaacggagttggatcgccggaatactccaccggaatatcaacttggacttcgaagccattatctacctccgcagagatcacatcatcatcatcatcttccagttccaaatcctcttcttcaattgtgaagagaagcctcgacacccgccacttgtccgccgccgcgaattcctcctcaggcaccgccgcagcaacaacatcctcctccatctgtacagaaacaataccggtacatggctcaatacgagagtggtggtgattcttcttgcaacacatcaagaattggaaaagaacctctttacttgccggagacggtaaagatccggtgcggcaacaaaagatgtaagagagctcggcgaaaaggatgagcagaaagaagagtaacacggcgagaagtacggcgccggagttggtgag

SEQ ID NO: 12454 - DNA, 1313 bp, Arabidopsis thaliana landsberg
cccgatcttgaagaacattctcttcagttttttctgtcctctctaaaattttctaatctctagactcgtcattgatgagctctgaccccaatctcaccactttcccctcactttctcggcaaaagttcagtgatttgctctgtttcctgggaggttttctctgttttttaaccaagatttcaagattcggttttgacggagcataaatggagagaacaagatcgaaaccggttcggaatctacccgagacaatccattctttgctcggtttgaaatctcatatgaattctgattgggttaaatctgtatgcaacatcgccaagaatacttcttcaacgtcaaagaaagaagaagacgactctgtttctgtcgatttacagagcattagaggtacacttttcctttgagaattctctttttttttttctaagatttttctatttctttggatgtttgttcataaattttctttttttcttctgcatacaaaattcttgtcttcttgtgtacaattaaaatcctttggtggagattacctactacatgcaaatcatactgaccgttagattatctattctggtactgtatgagtgacgtgtcagtcatctaacggctggtttggttattcgtttatatgtgtgggttcaatactgtagtcagctctttgaaagtttttgctactctatgttgtcttttatgaaaaaatcactctgtttctgttaaaaaaacactttattcagataagtttaacttaatatttttggttttgcacttaaattagttgcattacagaaaacatttaattcgaaaaggtatctgtagtcaagatttcagtaggattataatatagaattaaatatgagaatctatgtctgttcagataatgttgactaaaaagtttcacaaattatttattgctatttatttatgctctgtggcttattggtcttgctctgattctcttgttattggtttgcagatcagctctctgcactaactgttcaagtcaacgatcagaacaaacagagaagacaaattcttaatgagttcttggaccttaaaggttagtaatacattagaaaaaaaactatgatttctaatgtaaatttatattcaagagtctaattttatagattggcaaatttggcagggaacattcgtgtgttttgtcgagtcaaacccttgggagccaccgaaaagttgagaccaccggttgcttcggatacaagaaatgtgatcatcaagttatcagaaaccaagagaaaaacctacaacttcgacagagttttccaacctgattcatcccaggtatg

SEQ ID NO: 12455 - DNA, 985 bp, Arabidopsis thaliana landsberg
cttttctttttctttgcataatactcaagtttaagttaatcgagtcgcgcaaatctcgaaatttaagatctataaaatccttaaaacccataattgattattgcatcttccttcctcagtcttaattcttaaatgtcgagaatagtctaaagtcaaactctcttagtctttgttttctcttatctttctttctttattttttgtcatctctctttcttgatataaaaacgttctcattttctttattgaaactttattcataagcgacgtttggtgaccaacttaaaattgggtttggtgcatttcgtagtctcacttttcgttcatttgaagcttcattttttctggtagggattttttttttttttttgtgtggcttagttaacaaattttgtgggactatcttcatgtttcatatgatttatttaaatttacgtgcgtataaatattgattccagtgaatctcttgatgtcatcaagatcagaagacaatttttatttttcatcaagtttcttagatcatcaggttgattgatactttaatcagtgtgattgtgtatgtaaatgcatgtgtattattatttttttggttttctaaatctcatgatgaatctgtgattagagtttattgaatttgattcaaaattgtagaaatggcgtctaattcttctaacgggacgacgacgacaaagccaccacctatgccgtctcctctgcgtaattccaagttttttcaggttagttctgttttttgaagtcaaaatactctttaaactttttgttcaattgagttctaaatgcaatgaaagtttttagtatttactctagtttaaagtgtagttatgcttaagtcaatgtcataagtgaaaaagttgaaactctatagatccaatctcacctttaaggctttgatagttgaaaacttgttttttttccgacaacaacatcattacccgtgtgatgcaacactatactacacaatcac

SEQ ID NO: 12456 - DNA, 604 bp, Arabidopsis thaliana landsberg
tcggcacttttgccgtttcaatgtgtcttggctggtgtgttaaaactttaaccttttttgccttcgacgtggtagagatagccgaagcagcagcctttcttttctttctctgctttcgcggggatagcaatagtctgggtacacaaaaccaataacatcaaaaaccttgttcaatctcttcttgcctcgccctccgaaggccactgtcatggcatcatcctcggccctcatggaggcaccaagcaatttgtcgctagtcgcttcaatgcaatctagccagtcatcgttcagctcatcgaattgatttctgtacctgaaggtgtacttcaggtagactaaactatcctggctggacccagaagcagcttcgttcggcatctctcagccgtttgcgagaggccacactctgtaagtaatgtgctcctggactaagtctctggtgccaatataagtacaaattgtgttataagcggcttggcacgcttgtacgtcattcccaagggcgagagacgacctcctgatgtcgaagcgagaccagatagggcgttgaatgatgccttaatatcttctctttcgaccaagtcgttttcacataaaacactct

SEQ ID NO: 12457 - DNA, 949 bp, Arabidopsis thaliana landsberg
tagtagttaattaaaattttggaaaacgccataagcttcagaatgtatgagtctagtcagactctcaaacggcagattagcgatatggaaattacactttctagtgatttgtttatttatttaatttgacttcgtgttataaagagatcagagacattgatcacatgtttacattattgcaccaccacttttgttttgtacgtaggttgggcattattctcccttgaatccattaatttctttcattgtaaacaacaacactgcttttgaaaaataaataatttataagggataaggccaaattcacttccataatctgtcacatactttaattcatgactaatgttatttcaacccttgtcgttattatttttttaaacaaaaagcagtggatgtccacaacagaaagtttgatgatcctcactctttttacgttactgtgtaacgtgtgcatatactaattgcgatttatgctaaaatagttggaaacatgaaattagtatgtggtttcactcgttttcacttttcaatttgttccgatcgaaaaattcatcactcttctagaagattctaaatatcgatcaacaaatacaatacggttttaaagtttaaacgaattgatcatacaatgaagataatgatgtgaggactttttcttatagtttttaggtttcttactctctcttttagagaatgtttgtgctaccctctaatatttaatagttgtatctactttagatttgtctatataaatgaaatatgttgatgaacaaaaaacagattgatgaattagtagacaaatgtatatatatgatgtaatagatgtcataaaatccactagaacgtatccaataatgtgtggggcataataacatgtattatatttctataaacagaaaaggatgtgtttggctattcgacaaataaatttaaaggaaaataatcactt

SEQ ID NO: 12458 - DNA, 567 bp, Arabidopsis thaliana landsberg
cggtgggtttccgggtgtcaaagaaatggaggagtggtttgacgtattgagcgaggtttgtgatgttgtttgtgtcaaaagagctgacaccggaaccggtcaagtcaacggcgtctacttggaaaccatgtttctctaagagcgttatggttttgtaccaacaccatgcaccaaaccctcctccatgaaccagcacgaaccgctttgtctccgcaccttcgacctttagctcctgatttcatccatttatatcatataataagcctcaatataggtgtcgacatagaaaaaacaatctcaatagagaatttggctaaaacaaaagattattgtaattaaccatgtgtagcaagtgctgttctaacacacacacacacacaaaattgtaaaaacatttaacaaaaatgtcattttatattttcattcaatctttttggttatttacttaaattgctcaaatgaatctataggaacaaacaggttcagttctgaccggtttgaatggttccatgaattaatctagctaggagttgtatctatcttgatcacatcaaagtatcattataa

SEQ ID NO: 12459 - DNA, 558 bp, Arabidopsis thaliana landsberg
tgatctatacatggaagtggatgcaggtccttgggaaatgccttatttaagctggtgtagctaatacacatccaaagcttcttgttcgccttgggacggagactgaattggccaactacacgaggtggtggacctcctcgatgaagccaccgtgcatcaacttatggacctcttcaaggatgaagtcctgccgctcgatggactaattttgaggcttctaactcatcagcttagattctaggtggatctttagatggtgctcgatcacctccctagggatcccaggcatctatgacaattcccacgtgaacacatccacattttaatggaggaaggcgagacgcactttcctatttcccccaaattccccatgatgcgggtggtcttagagtagtgagacctgacctggatggtcttcacggtgacgtcgtctgccccgaacagctgcacctttgcaggcaccctagtacgcgaggtcgagggttcctctccctcacgttcgaacgagcagccactaccgagagaatgtctagcttctcgatggttgtgagagtcgag

SEQ ID NO: 12460 - DNA, 710 bp, Arabidopsis thaliana landsberg
taacccaagacaaagagtggttccccgaaccaattgggtggtgcgaaaccaagttcttttgttccagtggtacctttgaaataaacattataattatcaacatattctgtccattgaggaatcttaatgatgtccttgtcccactttctatcaacctcgttcctaacccatatttcaaaaactccattgaatttaaatttagagtcaaaggtgttcactaaggcaactttccctttgtagttcaccaatctccaatgataatcaatgtcgacttcctcaggcaatttaatgacagcaaacgcttcagaactcacgttgaacctcattaccataggtttgttgcaactcgaccgagctccatagtacaagaaacctccattaaatagtccttcatcagtaactactgaatgatcatcattacaaatgatcggtctccaaaaggaaggtttttcatgatccgatctcaccgtgtagacctgatatttcttaggttcttttgatgtccaaccagctccgaactgtgtctgtggtacacatacacataacaccttgaatactttgtcaactttatcgtatccgaaaaaacttctcacggatgctccttcaggcacttggatttgcggtaaattccgaaactttttcagaccgggattgcaaatcacaatctcattattatatccttgatgacagagcaaaccaagaatgggatt

SEQ ID NO: 12461 - DNA, 1098 bp, Arabidopsis thaliana landsberg
gatctgacatcagtcaactatatcatcgtaaatggctggacttgaagtattgcatgaaactcaaatctctttcgacacttacaccgcatctccagtgtttagatgcacacggttgtatctccctacaaacagtttcgagttctctagcctgtcttatgccaacggaagatactcaatccatgttcatcttcactaactgctgtggactcaatgacgccgcaaagaatgatattgcttcccacattctgagaaaatgccgactgatctcagatgatcaccacaatgaggtctctactctttcatgttaagtctcaactcctaatcatctgtcaagatcttaagtttctgattaatcttttccttgcagagttttgtctttcgagctttgatcgggacttgctatcctggatatgaagtacctccatggttcagtcatcaagcctttagttcagtgttagaaccaaagctacctccacattggtgcgacaataaatttcttgggctagctctgtgtgccattgtctcttttcatgactacagagatcaaaacaaccgtcttctggttaagtgtacatgtgaatttgaaaacttagatgcatcatgtagccaatttagtgttcctgttggaggttggttcgaaccaggaaatgagccgcgtacagttgagtcagaccatgtctttatcggctacataagttggttgaacatcaagaaaagacaagaagagcagtacaagagaggttgtgttcctacgaaagctagtcttacattctctgtgacggatgggactggtgaagtgattgcacaatgtaaagtggtcaagtgtgggttcggtttggtgtatgaacctgaggatgaagttagtagtgctgtttctttgtcggcggatagaacgaggatgaatggtgatagtacacaaggtgaagaaagcactatcacatcttcagaaggtgaatatccagttgatacaccaacgacagctaattctgcaaatggaaatgaattgtttggtcagcatagcgtatgatctttagagctcacatgatagtttaaaagcctgtagaaacgcaaattcgtttgagatatataataatcggg

SEQ ID NO: 12462 - DNA, 1207 bp, Arabidopsis thaliana landsberg
ttgctggtcatggcctgttcttcctttaggcctttcatggcaccaccaacgttgctacacgattaggtacgtttcagtttataacagaccgaaacctagacaataatactcacaacatgaccctgtgaatcccattggatacatgctctcaattactattgtaggcatatatagtggttgcatgtttttgggatttttatgggtttggacctctgattctcacatatatttttggtaaggactaatcctcatgtgtcatttcagttattcagcagagatgccttgggtcctaacccaagcagtgttctacctaggaattatactagtcacacgtctagcgcgtcccaacatgaccaagctatgttaccgacgttctgataagaatctaagcatgatccagacagctttcaagtttgttgcactcctctttatcctctcagcctacattataccattcttcatcatcccacagacgatccacccgctcattggttggtctctctacttaaccggctcctttgctctctctaccatacccatcaacgccttcttgcttcccattctccctgtcataacaccgtggcttggcattttcgggacactcctcgtgatggcttttccttcttatcctgatggcgttgttagagcattgtcggttttcgggtatgcattttgttgtgcaccgtttctatgggtctcctttgtgaagatcacatcgcatcttcagattatgattgacaaagaggttttgtttccgcggttgggtgaatccggagtcacttctggtctcagcaaattgtactgattaagacggtaagattttgatcaacttaatggattgcttatgtacataaaggttagagacgattaacaaaaatgaaagataatctctcacattttctaggtactttgttcactaagattcaaaagaaatgcaagttcattagaaaggagtttctaaatagtaaatacatatcatcatcgacttaacagaacactacaaaaaagttacataggttgtggttgttgtgactgagcacatccaaaatgggcctgatcaaatgagacccataatggcccatcaagcatctttctcagatttaagtttaattcagattcccgacacgatgtcgttttacagcaaggtctttccaaatgccactccactgttttacagtgggccctaatgagttaatatgatattttt

SEQ ID NO: 12463 - DNA, 407 bp, Arabidopsis thaliana landsberg
gagggagccatcgctggagacgcctgatgatgatgacgatgatgatgatgatgtagacaatgacatggctgcccgccttggcctcagcccagatctgaggctgggccaggggtcgtcgagccagccaccgagtgggccggtgctgtcggtatccggggcgggggcatcagggtcccgacccgaagaacaggggcaggccgagggggtttttgaccccttggcccaggtagctgaggtgaccccggggagtcaggctgtcccgcctgtgcccccagagccgttgtccgtgccggcaggagaggaggccgatcctcgggtcgccatgttcgcgcctaggcggaccgtcccttcggcgccccagacgctcgaggcaaggatggcgctgaagccggcagcggggcaaacct

SEQ ID NO: 12464 - DNA, 1254 bp, Arabidopsis thaliana landsberg
aaaacatggagaagaagaaggaagtatcgagaaagaaatatcgtctgtccgaaggaacctaagcccatacgtctgtttaataattctcataatttacaataaataataagtataagatggaaaaaaaaagttcaatttgataaattactgattttattatttggacttagtttggtctgtgaagcttctctgggtcaagagattcaaactcggctccctgtcaaaggaaaggaagatggtggcttagtttggtctgtgaagaatgtggctaagtccaagtctcttaaggttgaagatagtgtttttgggtctatttcagttcagaccaatgggatctctctcggtttggataaggtccagaaaggagattcaagtgttggacagcttgctgtaatcattgataatgcaactgaaaatgaggaggttggcatttgttcaggcacaatttgtgcagttgaggatgattcctctgacgtgttatctactgacactgaagaagaggctttcatcaaggttttgtctaagcgtcagaagaggaatctacgaggcaagggcctcaaaaccaaagcttaagtatgtgtactaagctcttttgttggaatgttcgcggatttaatatttccagtcaccgccgcggttttaagaaatggtttcttttgaataaaccactttttggaggtctcattgagacacatgtaaagcagcctaaggagaagaagttcatctctaaccttttgcctggctggtcttttgttgagaattatgaattctctgttttgggaaaaatatgggttttgtgggatccaagtgtgaaggtagttattattggtaggtccctgcaaatgatcacatgtgagcttcttcttcctgattctccttcttggtttgtggtgtctattgtttacgcttcaaatgaggagggtaccagaaaagagctttggaatgagttggttcagcttgccttatctccggttgttgttggcaggtcgtggattgttcttggcgactttaatcaaatcttaaatccggaggatcattcaagtgctatcaacgcaaatattggcagtaagattcgtgcgttcagaagttgcttgcttgattctgatttgtatgacctcgtctacaaaggtagttcttacactttgtggaataagtgcagctctagacctttggcaaaaaagatagataaaataatggtcaatgatcattggaacactctcttcccatccgcttacgcggacttcggtgagccaa

SEQ ID NO: 12465 - DNA, 1346 bp, Arabidopsis thaliana landsberg
caatcacaaactttaacaacaccaacttgtcttttattgataaatttcaactacacatataagttaaggtgctaaactactatactactactcttataaagaaacagcccatatactacaaactttaacaacaccaacttgtccaacacacataatttcaacatgataaagaaacaacccatatactactactcttaactaataaatttcatctacacaatagatttgttaccttgagaagtaactcagaactaactaatgtcaaatccaaccaaaaagagatacaaaaacaggtatatagtaagtattaacttaattgaacttagcaattctgttatctataaatgtagttcatcataaatggtaagcacaaaaagaaggaatctactcctaaattgtgtgaaattagtaactcaagtgtaaacaatcatatacaataacattaacaagtataagaggcaaaacacaaagcgagagagagagagaacgaaccgtgacgggtctatcaagcaattgattacacagagaacaattcaagtcttcacaaatcgcagtaaacgcatcaacaccgtcattgagactcgcgatttctccgtcactcttattattctcatcggcttcacaatcaccactgagtatccgtttcctctttttagtctcatctgcgtcagtcatagattcatcggccttcgagccaccagattcgtcggaaacaggaagaggatcaacatcgccggagcgatcaagaggagacgaaagggaagtcacgtgcgtaggggtaatgcacgtgccggaagtgagagattcctccgccgtagatacacagtcgcatggaagctggttgacacgcgtcatttcgaaagagcaacggcaaagatcggagagaggaatgctctagagtctagagagtagggctcttttatgagagggacacgaaatgtgaagaggcgcgttttaaaaaaatttggggaagagatgccaaaattttttatggtatacacatttacttcaaagtactaaaagttgaatagaaacaaaactaccaacaaagaaagtttgtttctataaaaattactttttatatatttagagtatagataattactttattttggtgaatatcattaaattggataattaatattatagattttattttatgtattttaatttcgaaaaattattctcgtgacaactatatattatttttcctttatttttatgttttgctcagcaactgtattttacttttatattgtgtttgttcaaaatgaaatatgagtaaatctaattttaaacgtctagtaattaataaaaactctataagagttttaatatacggaaat

SEQ ID NO: 12466 - DNA, 828 bp, Arabidopsis thaliana landsberg
agaaaatttcacctgtagattctgaagtcaatgaacttagcaaggagacgataacaagcatggtctatgaagaactaaggaaatggtaatgattcaaaccaagtgtgatcccactctaatataagagtaaactttacctaatcaggcaattactcatatatacaccatatgatgcaggacgtcacaatgctcgttccaagttggaccagttctgatcgtggatgaaccattcacggtaggttcttttattcgctctcactgataatcctttaatatgcaactcaaagatttgaacctcatgtgaacgttctatgaatatcgttacagatagacaacggtttaatgacaccgacaatgaaaataagacgggacaaggtggttgatcaatacaagaatgaaatagaaagactctacaagtagactagaaattttagcatcctctttattttacaattatcttgttaaggattagcaaatgtgaaccagttcttactccattgttaatataagctgcatatatctttgttcatcaactagggatttccaagttctgcagcactatggatacttattgagtctaatagaatcaataattggaagaagcagttaaaccggtcaaaagacctaagtatgttggagggtttgagatatcttgacattctgtgtttagaggaaggctagatgttgatacaatattgtataatttgcataattatattatccgttcaatccaaaagcatttaagtgcgatgtaaagtgatggttttttctcctttatgttaaaacaaatgattagtctcactaaatagtcgatagaatattgcaact

SEQ ID NO: 12467 - DNA, 999 bp, Arabidopsis thaliana landsberg
ttcttcctttattatctttgtccacaaaacatcatattgttgtttttttttaacaaagtcttgatttgccttggttgggggattgacagtctttcaggagctgatgatgtatgtgattctaaagccggggaagatcttttggacatatttcgtagaaaggtttgtcttttcttttcactctgtttcaaaaatgttgcattgaagcaatttctattgcatttcacttgtcttcctttgtttgaacatattcgttgaaattggagttccctgtatagaaatcaaagctaagttacatagttgcttcaagtggtttacctatctttgtgacttccaaagcaattctccatatatgattcttgttctgctttctataagttggtttgcacattgaatcaattcttagctacatagtagcatataaagattgatcttttgttgaaactgtaaagctactgtccacattttgtgtattgagatctatttcttgtcttcttctttctctaggaatcagtatcatctagatcacccccatttttccttgggtctccccctagccgagcagcaaacccgttagctcaagatgcacgctttggatatgagaaactcgacactgtctcaccctcactctcccctcttctcccatctgcatctcgtgttaaaagtggttgtggtagaatgaagtttggggtgaaaccagcaactgttagagtagaaggggtttgattgcttgaacagggaccgcccaaactcaagtatccctgccatggcctagaaagaagaagaaggaacaaagaggattcacaaagtgtacataaaatccagactcaaagactccattttttgaagaagtatatatagttttgcagaagaagaggaaaaggaagattaacgatcgctcaagcttttaccgcagttttctgtgattatgatgaggttcaatgttgtgtatatatatgtatctaccgtaattaagaggtaaggtcgagactttatgtgtta

SEQ ID NO: 12468 - DNA, 1199 bp, Arabidopsis thaliana landsberg
cgaaggtaaacatagcccagccagagatcaaaaatactctcacatgaatcatatatcaaacgaaacaactagtatgatctaacagggtctttttatggcctttttcatttcccaagattaaaaatttctcatttattatcaaaacataaataatcattgaaacaaagaggtacacacaaacacacctccaatgttggtgacatcaacacttccgagaagctgttccttccatttcctcagactctcatcatcctacatgacccagattcaacgacaacaaattcttcaaatatctgacaatgtaattcaaataaatagggtggaaggaagaagaagaagaagcaaaaaggagaaaccttgtccttctcgagatgttctttgatagtgtactgaggacccaattgcaatttggaatcgtcgtcttcttcctcctcggtagcacaaagagaagattcgctcatctgtcgactaagagcatcgtcgtcggctcttgttctggaggaggagttctcatcatctccatccttgttgttcttgttgttgttgttgtcgtcgaaccccatgtccctggctccagataccaaagacatcaatcagctctctcgccctcaagaattttggtgtctttgtcggggtaagggatctaatcagagggaaatgagggcaaatttagggattttggttttggtaacggcaagaagatcaagtcatgtggtgatccgagttatatgagagagaaagagatcgtgagggtcactaacggataataatcaaatacaaaagaaagcataattgctatttcttccacgcgcataggagagacgatagcctcgagccacgacaacgacaatgaccactaatgttgttatgttttttatttttaataatcactgaattgtcaataaaatcatttgtttgtaattacggaattagtcctctaatctcgtcttcaatcattattacttgcattaatgatatatcccggttttatccggtctgattttgggatccaacctaacatgagacaaacaagggcatatgcttctgcccctatttttgtgtttcaattttaaaacatatggaatttattgccaccaatcaaacaataggtgctacctacccatgcaaaacctatcccgttttgaatataaaaaaataatcacgtgattatgtctatatagatgatgtcacggttgttt

SEQ ID NO: 12469 - DNA, 564 bp, Arabidopsis thaliana landsberg
  unsure (1)..(564): unsure at all n locations
aatcctccgggaccagagaacacacatactcacacatgtctccatgtgcacaccaagattcttcctgacaaagtttctactgatgatacatcggaatcttcagggaagaagagacctttagggaatagagaagcggttagaaagtatagggagaagaagaaggctaaagcggcttcgttggaggatgaggttatgaggcttaaggcggttaataatcagctgttgaagaggttgcaaggtcaagctgcattggaagctgaggttactaggctcaagtgtttgcttgttgatataagaggaagaattgatggagagattggtgcgtttccttatcagaaacctgcggttacaaacgtgccttactcatacatgatgcatccttgcaatatgcaatgtgatgttgataacttgtactgccttcaaaatgggaataatggaaaaggtgcatcgatgaatgagcaagggctctatggttgtgagtttcgatcagctagaatgcttggctaatcagaatntagctggacggagatccctgtttgtagtcatggaattggaacagtcact

SEQ ID NO: 12470 - DNA, 1009 bp, Arabidopsis thaliana landsberg
atattcctgtttgcgttagtgaaggatgtagccaaggttaggcctgttctgatgttaataatctccagtgcaacgcttggggctaagagagttctccgaatactttgattcggctcggatttacctgattccaggaagaagatatccagttgaaaagctcttcagaaaatgtcctgaacctgactacttggagacagtgatacgcactgtggttcagatacatcagactgaggcgataggagacattttagttttcctcactggtcaagaagagatcgaaacagtagaaacgaatttgaagcgaaggatgatggatttgggtacaaagggatctgagatcattatctgtcctatctactcaaatctcccaactccactacaggcaaaagtgtttgaaccggcccctaaagggacacggaaagttgtcttggcaacgaatattgcagaaacatcgttaaccattgatggggttaaatacgtcattgatccaggatattgcaagatcaactcatacaacccgagaacgggaatggagtcactccttgtaactcctatttccaaggcttccgcagcgcaacgagctggtcggtctggaagaacaggtcctgggaaatgtttccggttgtacaatatcaaggatttagagcccactacaataccggaaatccaaagggctaaccttgcaagtgttgtgcttactttgaagagtcttgggattcaagatgtgttcaattttgatttcatggatcctccacctgaaaacgctcttttgaaggctctagagttgctctatgcgctgggtgctttggatgaaattggtgagattactaaggtaggagaaagaatggtcgagtttccagttgatccaatgctgtcaaagatgattgttggttcggaaaagtataagtgctcgaaagagataatcacgatagctgccatgttgtctgtagggaactcggtcttctatcgaccaaagaaccagcaagttttcgccgacaaggctcggatg

SEQ ID NO: 12471 - DNA, 1101 bp, Arabidopsis thaliana landsberg
  unsure (1)..(1101): unsure at all n locations
cggcctctcctctgagagaagaatgtgtaaggaactcctggaaacttagcacttttgataccacgattccagtttttatccttttcaacaccgaaatattggagtttcacatggatctttgatcctccagcaattggttttttctcattatctaagatatcaacccatctatcaacttcttctccatgcaaaatatcttccacaggaatataacctcttccgatcaacgtcgcgccaatcggattagcatccttaacagtgaaaataacatgtttagccatgtgaccacagtaaatatgaaaagactcaaaccactttgggttttttggctcctttgttattttcctcgttcttccaactcttgctttctcaagatcgattgtagcgtaaagctgagtttctcctttgccaacaccgattgtttcttctacatttgctagtatctggaaagattaaaaacagaacattaaagacagattgaaggaaaccttttgttgttgtatctctaaacaacttataaatgagagagagacaaaagacaataccgatcctaagaaacctgatctacctccttcagcatggagatgatcaacttcgtagattgtcgcgtgcaatcttccatgtaacaaacactcttccattttttcttcccgcctgtaacatcataacaatataacaatattagtaaaactcatacattagattaccaaaatacgtaaacaatatttttcgtttaaaaatgtaaagtaaatttatgtgcagggagagacgaatctacaagctaaagtcattaaccgtaatcagtgtccgaggaaacagaagaaactctaaatctcaagtaactgatctccatcaaaacaaaatcgaatcacagaaacagtttgagaggcaagcaaaacactgagaaattacatactgcaatcatataacgaatgtttaaacttaaaccaaagtatttatgagtttcataaacattntatacacccacttgcttcaaaacaagaataccagaaaccagacgatatgtgatctccaagataaacgttttaaaaaggaaagatctgcagagaagaggaagaagagagaaaacgaaactacctg

SEQ ID NO: 12472 - DNA, 572 bp, Arabidopsis thaliana landsberg
  unsure (1)..(572): unsure at all n locations
ncatggacagtcccacgtctaaggtcggatagtccaactactgccagcgagtgccacaccataagtctgctatcgcgaacggtccagaccttgaggctagacagtccgcagctacgtagagagcatccaactcctcttaggtaagcacaatagaggagttcagagatccgacaagttataggacaggggtttacatcggttgatcctttgaaggacattgacataggagagggaaatactccaaggctgacctttgtaaacctgaccctaaaagccgatcatagggattaaatgattggcttattaaaataatatcctgatagctttgcttggagctatactgagatgtcaggattaagccaagagctagtagagcatcggttgcttaagtccggtttcaggccctttaagaagagaccgagatcattttgttcggacttacttcccaggattaaggacgaaattcaccgacacttagaagctaattttattagacattgcagatacacagagtgggtctttaatattgtgtcgatagagaaggagtctggtaagcttagagtatgtattga

SEQ ID NO: 12473 - DNA, 813 bp, Arabidopsis thaliana landsberg
gaacaaatgtaagcacatacttgcacatattcgccttgatcactactatatagttttacaacttttttttgacacctttctttaatggaaattctgattccttccttttttgataagaattttccagatgttgtaaaatagatctacacttcaagcttggtaacctgaaagaaagaaagaaaaaacacactcaatcataagataacagtaacaaaggaaaaagaaggaatttgggtttaattgatcttaacaaaagttcgtagccaaatctggtaaacaatgtaaagtacagggactgtaactacaatacctgaggagttttttgtttttgttttattcttcttcactattagaagacgacggagaattgtttccatcgtcgccggctacccaatactgcttcgtggcgacaagaatcttctccggcacgagaggaccgtcttcatgatccattaacttagtatcccatctcattccatcaacgatcttcctcacatcattcaaaacatcaacctcatcccggaaaatcacaatcccttccggtcgtaaaatccgatcagtttcaagaagaatatcctcaagtttgcagctgccaacatgaaattgacccattacttaaacaaccctagtacagaattgaaaaattcatcactagttctcaaaaagtttgtagctttagggtttagatcaatggttgctaattctcagaaagttcatagctttaaggttaaaacaagtgtttactaattctcagaaagttcatagctttgggtttcacttcaacgttgctaaatctaaaaagtttgtagcttt

SEQ ID NO: 12474 - DNA, 943 bp, Arabidopsis thaliana landsberg
acgccgaaaacacaataaactagacagaggatgaatcaaatctaactacgacgtgtcacatcataagagatagagattcggtttgggatggatcataagagatcattaaggaatagttcttgtgtaaaacccgtaaaccggaaaatcggttatggtttgtgtttaaatcatccggtttaattggttgggttaatggaaactctagagtgtacctataaaagaagtaaactcgaattagagctttggttagtcatttttcgttctgtaaaagagaaaaagagagagaaggatcagaatcgttaggattggggaagaaacagtttcaacatatcaaatcgttgtcaaaggtatcgaaatttggtaaagttatttcgaagtctttcatcgtcattttccattttatagaaattgttttggatttaatctcattaaattattcacagtttcgtaaaacacgttttttcagaggcgagttagcccagcagagattattataactgagatcgtgatcttgtctagtttctcgtgacgtcgaaggctactatcagtatacatacctattcggattctcgttatatggaagtagacgtacgtgtttcatatacactaacaagtcatttatcataaataaatgtgaactatatatgtttataagattaagaattggcatctgtttgacttataaccaaaactttgaaagccaacaagtatgagacctggtctaataccacaagcaacagactacttactatacagtgtattataacatgatggaaccagagataaataaaaaatgtacatcagacaaactcctacatagtttctctccagccccataaccggaattacattaaaccgtaccaaaagtatacttcgtttacagcccaacccatattttaccggggtttccagcccttatgatggttccctctccttttgcccc

SEQ ID NO: 12475 - DNA, 1331 bp, Arabidopsis thaliana landsberg
attaggtcgtgctcgtgaagagaaatgaattagtggtagagcattaggcaccaagtggcttactaatatgagtcttacttagcaattttgttattaaatgttacaaccatcgttaaataaactcaccaaatactgattaagtcttgctcgggtaatgatagggagagcactaaacatcaagcggcttactaataaatattagtattacttagcaatattgattataaatcttcactactttcgttaaataaacccactcggaaaatgggagaattttcgaaatgattatataagaataagctatgataagagcactactcatttacacacacaacacacaatgccaagaaacgacaattcatgtccctttgtcgttgagaagtcagaagtggttcttgtgaaaccctcaaagccaacacctgatgtcactttgtctctctctaccattgacaacgatcctaacaacgaagtaatcctggacatcctatgcgtcttctccccaaacccatacgttcgagatcacaccaactaccatccggcttcttttattcaactcgccctctctaatgcccttgtatattattaccctctcgccggaaaacttcaccgacggacgagcgaccagacactccaattagattgtacgcaaggcgatggagtccccttgataaaggcaacggcctcgtgcactctctcttctctcaattacttggagagtggtaatcacttggaagcaacataccaacttgttccttcacacgacactttgaaaggttgtaatcttgggtataggcctctggctctacagatcactaagttcacatgtggaggaatgactattggctctgttcattctcacactgtttgtgatggtattggcatggcccagttttctcaagccatacttgaactggccgccggaagagcccaacccacggtcatccccgtctgggacagacacatgatcacttctaaccaaattagtactctgtgtaagaaattaacacaaccatctcacttaattcttttacacgttaatcttttattacataaagtatagttttcaaaagtatcgttaatttaatttaaattttttaaaaccccccattgagtgggtcctaatctaatatacacataatttacatatctacatgcaatttccattctatcagacacatataattttctgtaaaatctatttcagcatatcaaaaaatatataattatttgcgaatatttgttcgttctatgtgtgggaatcttttttgtttggtttcctaaatattttgatttagtttggtccaattttgaataatgagatcattgatcaa

SEQ ID NO: 12476 - DNA, 1182 bp, Arabidopsis thaliana landsberg
tctaagatgtcctttgagttattttaccaaaaaaaaaaatgttctttgaattagttaaactaattttccatgaaacagttagctaataaatattttccatgaagccttagatcgatgtcaaagtctcacatcatgaaaggttctcacagactctacacgttttttactaagcattgctttggaaatttacgaaagaacattttccacgaaaccatattttcgacgaaattacattttccatgaatatgccgacaaaagaaaaacattttccatggatattagttaaacaaactatttatcatcagatgtctatattcctatgtaatcagctaattacttcgctcgtatattaatctattcctagttgttggaatacaaacaaaatgaagcatttgtgtgtcacacttcacacgctaaggtcagtattctataatcaactaaaacattatcaaattgtgttactcggtcgagactttttatacagttaaaacattgacccagactcacgaactgccaaatccatttaattagttagggtttctcttgctatatatagagccaagtgttaactctgttttcatatcaactatcaactaataaccaaactatccattcttttcttcttattttttcatatcaacttaaagagaaccaaatatgaagccaatcttcgatatcaacgaaacttttgagaagcagctgaaggatttaacttcaaatgtgaagcctatacaagacaacttgttagaggagatcatcacacccaacaccaaaacagagtacctccaacgttttctcatcgataggttcgacaaagagctcttcaagaaaaacgtaccgatcgtgtcatatgaagatattaagccttatctcgaccgtgtcgttaatggagagtcatccgatgttatatcggcccgaactatcactggattcttgctaaggtacataagaagctatctctatatagttttattagggttcttgtcaaaaactatatgcttacttgtagtgttttttttggtagttctggaacttctggaggagcacaaaagatgatgccatggaacaacaagtacttggacaatttgacattcatctacgatcttcgtatgcaagttataaccaagtaaagtgcaacattttttccttatatttttgtacgattattatttggatcaccca

SEQ ID NO: 12477 - DNA, 925 bp, Arabidopsis thaliana landsberg
  unsure (1)..(925): unsure at all n locations
gaaacatgttacttaccattatatattgcgggacttttatgctctcgccgcgttctgtctcttccttatgagcaatctccaattccctttggcaatacattctgttccattttgtctatgcaggttaatcagaccagagtcaccgggttacttggatctataccgacgcctgaggaatggagattgctcataaggacgttactttctatctaatgttttaaagaaaaagctcactctctaataaattaatattagatactctgactatgtaataagactcatgcatgtatataatattcagagtcttcatgtgccttcatgaacatatatataccaatcaaggaagttataaaacttcatttatacaaatgagcaaaacaagttcacaatttaattgttctcttcaaacagagttatagatttttagcatcagaaagctaatccaattgtgtgaagcaaacactaattattttcatcgttatccattcgaattcttgtaacgatatgatgaaagtacactaagattgacatttcaacctcaacaactttctacttgcttagaagtcttcatgacccctaacagccttttccaataggatgccaaaagttagtattaaaaaatcccccggacataaaggaacaccattgcttgacatcctccaagtttagaaacctcctaaatctgctcctatgaaatnnnnnnnnnnnnnnnnnnnnnnnnnnnnnnacaaagtggaattttacaagagagatcgtcctcctcctcgtcatgaacaccttcatcaatgtttaagaacatctttcttttaaaccaacaatatctatttactgataacagaacggaggcatgctctgtaattttttttaacatactgtttcttttctttatccaactattactaaatcatcgaacttatgatgtctg

SEQ ID NO: 12478 - DNA, 517 bp, Arabidopsis thaliana landsberg
ttatccccctgatttaactttattgataatttaaaggatggtatttgaacggacacgtgcgttaaaataacatccactagatttctctaatagagtcacattcttccacgtataagttgtcatagctatcaactcatgtacatgcaaaaacaaaaaccttaaaagctttcatggaacgtatagagtcttataacacgaatgagatgaaatacagaggcgtacgaaagcgtccatggggaaaatatgcggcggagattcgcgactcagctagacacggtgctcgtgtttggcttgggacgtttaacacagcggaagacgcggctcgggcttatgatagagcagctttcggcatgagaggccaaagggccattctcaattttcctcacgagtatcaaatgatgaagaacggtccaaatggcagccacgagaatgcagtggcttcctcgtcgtcgggatatagaggaggaggtggtggtgatgatgggagggaagttattagtttagatttggataagtt

SEQ ID NO: 12479 - DNA, 985 bp, Arabidopsis thaliana landsberg
tatatatttttaaaaaaagttaaaggagagctttatttttttaaagcaaattgcatactccaatgatagttttccttaatggggttctcaaaaaaaaagaaagaattaaaaatattttttttcataaaacttaataattattgtaattcataaaatattaaacatacattattttgaaaaaattttaaaatagatgtgcaaaagcaaaacataatataatatcgaattgttgatcgagtaattgaccaaagctttgttttatgacatcgtcaaatggaacacgagatgaagatgtcatatcgtttgatagcttgtagtataaaataaaagataacaagaaatttaatttaaaaaattgaacaaaaaagtctttttttgtcaaaaatatacgttcaatcacaagaagacgaatgtcaggctctctcaagttctcaaagctctctagaaagatccggttctctcaattaaaatgagcttagattttttttttgaaataaatgaaagagaacccaacaagaaattaaagagaactcccattggagttgctctaagaaccctcaatcatcaaaactttttttgttatgcgaccaaaacattatgtaatctttgcttctctaaaactactttcgaaccgcatgataaaaagttttcaatcttgtctgtaagagcgttttctcttagtgatgatgataaatcgtcaccctcactcataaaatatgaatcttccgggagatgattatgtcgtttttgcgggattccagacgaggtagattgatcctcttgcgggtaaaggggtttagaatgggtgaacactcaaatcttgattctttgtttaagatttttgttaacaacaatcaaaactgagattggtttgccatttgctcagttatttactctgcttctatgtagttttacttggttactaagactatccttaagatttcaactgctacaaaaacacaacaaacattttttgttgcttatt

SEQ ID NO: 12480 - DNA, 1320 bp, Arabidopsis thaliana landsberg
catgcatacgcaaacaaacgtaaatggtcatgacacaaaacatatatagagaagggaaacacactgtaaccgaacattaattatgcttatagtttggttttagttagattgtggggataaaaccggttgggaggatagcgactatgttgaggaggccggagacgatactgccgacgagatttaactgggagatcagttgtccggtggaagggagggtggcgtcgcagctggagcgaggggttgggacgacgatacgacaatcgttgaggagtgtgggaagggatatctgaattccgtttgtagaaaacgtgaataatccggcaatgttcgtaattgtttctgctacgactctgtttaggtttccacactggagctggacgaccgcatctgttatttgcaccattaaattagtatgtcaacaaagagatcataaatattatctttttgtgaatattcgtcattaagataaatatgatttcgtgaatctttttattagttcgtatatatagtataggttaagaatggacaactaactagcgaaagccggggcaggagtgccattgagaggggcgccattgatggtgcaaaagagaaccccattgataatggggacattgataccaccaagaccactctgagcgttagccattggagacaccacaatgagacacaacaagaccaatgagaaggttatgtgtttcttgataactgccatcttttttggattacttgtatataaaactatagagtagatagcaaatatttgtttgtgttgctttgggtttggatgtgataaagtactgtcttatgcagctctatttatagaacaagtttaatagatatctcccctcctatttactttgctctagttatatctttagatgattcgtttactttttttatacaccttattgtttttatatacttaagtgaaaacgtccatagggtttagtagtgaacccggatcctaggatgtaatttcaatggtgtgcaatcattctattttatgttattttcccctacacattatatataatttatatcattgaagacaattaattatatatattaggtaaaacaatgatgtcttccatattatttcaccaagatatcttgaagttcaaataccaaaataaacatacaataatcgataacttgaagaattatccataccgtacttgtaattaaatttttaatcatttgccgttttccgtttctatttatattgtctccaaatgttttttatatagtttcagtactatttactattaataggaaaatgctaaaaaaaagacatagtagaataatccaaatggggtt

SEQ ID NO: 12481 - DNA, 701 bp, Arabidopsis thaliana landsberg
ctcattttccaaacatatcgaaatagtgtgaacattatatatataaccggggcccctcgagattcggttaagaaaataaatcaaaacacacatataaacatctgaattctcttacaggaaccgaacatggagtcatcatcgtcgacttttctcaccacgacaagcttagacaagaaaaaaccatctccggtttcaagaaaatcaccaaagcaaaagaagaagacgacttcgacgaataaacccatcaaagttcgttacatctcaaaccccatgagagttcaaacttgtgcttctaagttcagagagctcgttcaagaactcacaggccaagacgccgtcgatcttcaaccggagcccatctattccccttcctccgacgaccacaacctttctccaccggcggagaatcttgcgccacgtgttcttcatcaggagccgttcggtgagagagacagtgattgttatgagccgttgaatgcggaagacatgtttttacctgatcagatgtcggcaggtttttctgggtttttctctaatgggttttacaatgtcaatgactttggaagcatcgattctatgtgataatctttcagagtttttattaggggtttcatctagtagatatatatcattatgatatcgatacataaatttaacccccaaattgatacatggatttgttaattactatagggtttggg

SEQ ID NO: 12482 - DNA, 614 bp, Arabidopsis thaliana landsberg
  unsure (1)..(614): unsure at all n locations
tcgccttcggtcaaaagagaagtttcgtccacagcaaagcagactgtatgcgaataagggaggtagactatattacaaggtatgtacaaatttacatgagttgttccatagctatattacaagagtttctccagaatttttgcaggagaagcacattgtaagcaactttaagattcagcctaggtttcgtcttcagcttcgtcattcatcagcttcgtcatcctgtgtatatcaaacagcagaataagaaaggtgcaaatttcgaaggagaaggtaaaagtaacaaacataagtttcttaccggcttaagatggcttcgagcttcgtcacctgccatttttcgcccgccgcttacccagatctgggtcatgaatctatttccaatgcttcgggctaggcttgggatatctatcagatctgatgctgacaagctgaagtttggtctattcacaatatttccatgcgtgtagcagccttcagaaaagcagtagctgtgccncgagaagctaccaggtgacagaagtcggcgtgtccacaataacttcgtnnnnnnnnnnnnnnnnnnnnnnnnnnnnnnnnnnnnnnnnnnnnnnnnnnnnnnnnnnnnnnntaaa

SEQ ID NO: 12483 - DNA, 670 bp, Arabidopsis thaliana landsberg
acctcttgtaagctttttcgggtgtcgttgtctgttattaccgcaatgtcaaatgatctcattccaaaagtaattccaaaagtagttgatgttatatccatagatataacactatcagataatgtgtcaagttggttggaggaatataaaaccgatcattagacttgtagattacaagagcataaaggcctaacctatataataagtaaacacaagaaaaagcttaaatctctcttccaaacagttgatttcctaaggatcattctgggtaccacgtcaatttttgtttgcctaaataaaagaagaaggaaaaatacaaaagagaaggataaaaggggataactataccgggatggttctaattagcttagtagctatgtgggtggtctgatccaccggaatcgagttcttaagtacacttgaagccatggcaaaccgacaaaatgatgatgagaatcaaagcgacaatgatgccaaagactatgagctttatcttcatgttttcgaccacaactttcttttcatctttgttccttgtgttctaaaatcttgtgcctatttacaaacagaagaatgagaggatgttccactagataatagtgatgtagtgcgcttatactgtatttgagatgtgggtattattacttgtgagcgaggtctcagttttgct

SEQ ID NO: 12484 - DNA, 616 bp, Arabidopsis thaliana landsberg
acctgaaaataaaaaacaacacccataaagatatgtaaagaaaaactgaatattttctttgaaagagcatgaaaatgacaaaagaatcttactgggcaagaagaatctggccaattagaaatacatgagcaatggaaggaatgattgcacatggttgtgagaatgccacctgtgtcttggtccaatctctctgaaacatgagcatatattaatataccgaccaaacatagtcaatatatgacaccagagatactgtcaatcttaatatcaatacctatgcctacactttctagagctagactaagccatatttctgcatatattttaataattcaggttaagaatttaccaaaacacactgggcaagtaggttgctctattgggccagcagcagaaggctgtgtatggtcaatggatccactataaccggtaaactgaacatcaagagcaaaaagcacgcgacagacatgttcctgcacagatgtggcaagcagctaatcaattactcaagatacagttcaacgtaaatatacatctgacataggttgactcaacaaaaccatacgttcagagagttgaactgtttccctctgaaatgctggaagactgtatcggt

SEQ ID NO: 12485 - DNA, 657 bp, Arabidopsis thaliana landsberg
tctgtacaacatataaattagagagagatttgaatatatatatatatatatatatatatatatattgattaactaacaaaacacaacctctctgttttctcattacatgaagtaactcagtgatgtcttcttcctcgagcctccttctccgtagagctcgttccattgctggagctcattcatgttcgatgaatcagacgccacactcgcacataccttccaataataagaagaaaaaaaacactccgttatatcccaaaactagaccaaatggtgaaactaatttgtatgtttcagtttctcaaacctgatcatgtgcggttttgaaatcactcatgttcaagggtctaatgtctctactgctatataactgaggcattgctcggttttcggattgggccacacttctctgctgcgagtcaacaaaaccatggtttcaaaaaccacaatcataaccattattatgatttttaaaacagagacaaaccttcttttctttttcaagaatctctcggataggaagatgtgccgcggtcacgcaaagattctgcaaaccagacaatttgattagaatgtggatttttatgaaatgggttttcagtttgtgctttggatggaggaagttacagacctttagtcactccctgagtacccatc

SEQ ID NO: 12486 - DNA, 1086 bp, Arabidopsis thaliana landsberg
atcctgacaaagggccaacacttaaaaaaacaaaattaacaaccacaaaaataaaacaaaaacttacactctgtattgcccttttttatccccaacaaaagcatcccacatttgttcttctgcaatatcacttctatttctccctcctttcacaaggaagggcgtagaagaatccaccataatagttctataaccagataataaaaacatttaaatttcatcagcaaaacaaaacaaagaaaaccaaatgggtatcaagatcttgttgatccttggcctcttgaccctggctgtagtcgccgagtcagccaatgccacatggacccttaccaaatcttgtgtcaatggccaaggttgcattggagaggatggtgagcttgactacttgatggattctgagaccaaccggcgccaactagccgcgaggcgcagctacatcagttacggtgctctcaggaagaacaatgtgccgtgcagccgacgtggccggtcttactacgattgcaagaagaggaaaagggctaacccttacagacgtggctgcagcgtcatcacgcattgctacaggcaaacttcttaatttcgggaagcatttatacaaacaatatgattgaagaagcgagagggcaaataatgcaaaaataaaaacaaaaattgaatacaaacaatatatttataccaacgtatggttcttgatattgccctcttttgttcctcttaactatctttaatcatctttttcattttatatataatcatgatgcatatacgctcatttcatctgttgttcttcttttatatttgtgcagaaattgttgtatttggtttgtgtctataattaagtgttgtttaatttccattaccttgtgctatgtgttaaatattaagctttgtatacagaactttaaaaagaaattggaattgttgacgacgtttgcattgtctcttaacatatgttagaattgtatcacgttatacgaatctttgttttattatgtcatcaagtgaaaaaaaaaaagtggtatcctgctttgataaatttactcaaacagaatcgagagaaccctggatttgtaaaaataaaag

SEQ ID NO: 12487 - DNA, 815 bp, Arabidopsis thaliana landsberg
ctctcaacgggtattactcaatctatgaaagattttgtggtttttgaaacattttgatgtgtttggttcttttaatgatttgctgactcatatttatgaacaggctgaattaggactgagcaaagacataagagagatgcttcccattgttatctacaaggagagtttcactgtcaacgatacacagtgagttctctcttattcataaagattttatcttttgtggattcacgatcttttttaaggcttatctcatgaaataaacttgttctctccaatgtttgattatcacttgtgattgataagtggataattgtcttgtgtatataatttcattgaaactgttaccttagtctaaggaaaatttcattattttcttcggattggacacaagtgaaatcgtgactcattttcgagtggaggcatatgtaaagcccaaaaaattcaatggtgcaattttggtttgtatattgagttgtttgaaatagttcttatgagtttgcgatttggtagaatcttttattcttagataaaattatatgtaggcctcataatatgggtattagctccaacagaaacctgactaaactacttttgtttacgtttgtttttatctttctttagatatcaaagccaaaacataagaaagtatgattatgaatcacctgattttgactttgagtacttgaaaacagatgttcagtgtgtcttggggactaccaagcagaagagaaactccaacaaatgccatcatgtgggcacacttttcacatggaatgtattgatctatggctcacatcacacacaacatgccc

SEQ ID NO: 12488 - DNA, 633 bp, Arabidopsis thaliana landsberg
  unsure (1)..(633): unsure at all n locations
gttcgattaggttctctcttctccggcgcgtgcgcgggatcgaaggtagggtttgggccccaaagttcgtgtctttggggacagcggcggcgatggactacaccaacgccatccacatcatcccggacgccgcgggccccgacgcctgggccaacgcggcgtcggccgggatcgccgacgccagcatctgggccaccgaggacgactaccgccagtggagcgccgaaccaggctacggcgaccggaacccctcgtcgcgggcggggagcgagcagccgccgccgggcaagaaggctcgcggcacgggcggcggcacgactacgtncgagcggtggcagcacgagcaagtcgctcgccattggcaagatgttcttcaagaccaagctctgctgcaagttccgggccgggacctgtccctacgtcaccaactgcaacttcgcgcatggcatggaggagctccggaannnnnnnnnnnnnnnnnnnnagatcgtgtgcgcccacgaggaggcacggagcagcgggaggagcaccagatcccatcatgacatctggaagtgttgtagctggagacggcggcggtggcagtggtggcggctccaggggggcaggcattcaagggccgtactcaagaag

SEQ ID NO: 12489 - DNA, 614 bp, Arabidopsis thaliana landsberg
acagtcttggctttgtttaatattcagatgctaaaaaactgtttctacatcaagtgcatcgtttagttaagaatttgcatacaattttcccataaaactactctcccttagtatttatcttgaagcaaaccaagcttccatacatcaatcgtatcttcttttctctcattctctgagtgttacaggtttcataagtatagattgcgggataccggatgattctagctacaacgatgagactacaggtataaagtatgtttcggattcggcgtttgttgattcaggaacaacaaagagaattgcagctcagtttcaatcaagtggttttgatagacacttgttgaacgtgagaagtttccctcaaagcaagagaagctgttacgatgttccgactccgagaggcaaaggttttaagtatctaatcagaactcgtttcatgtacgggaactatgatgatcttggaagagtgcccgagttcgatctctatctagagtaaacttttgggactctgttaaactcgacgatgcaacaactatactcaacaaagagataatcaccattccacttttagacaatgttcaagtgtgtgttgttgatagaactagaactccatt

SEQ ID NO: 12490 - DNA, 1108 bp, Arabidopsis thaliana landsberg
tgatgtgatgttgatgatgatgcttgatgacgatgacgatgttgttctgccatttcatcctcacatgtagcgtgcccagtctgaggagtgtccctcctcgccacctgaacatttataaacttttaactgctaattaaaataactgatattatatatactttctttttttatatatagaaaattaattacttttattatatcacaattcttttggaccgttgcggtttagacattgttttctgagtttatcacgtcgggtgaaactttaagtcacattgttagttaaaaattgattatcaccaaccgttcattattatcacgtcgtataaattgattatttaatttccttaggtaactaaattataataagacaaagaaaaatcagaaattacacaaacaaaatgagcattgtttacttgcaatacaagccaatataagagccctaagcattatttttccagcattcacctttgtttttattaatcttatgcgaggttgataaatataattaatagtcaaatcacatttttggtcctaatattaccagtgagtatgcaaattaatttagttattttattaaacgaaaaaatcaaaatgacaaaaatgggtgcatacctcatcaaagcttttcataaacggaacaaagctgagctgatccattgcataactcggaagcccagctgcaaccgccgcagccgcagctgctacggccataacgccaccaccaacgccgcctatttcatcggatcggttcggaggattaacattaataatttctctagacgaagaacaactcccaccactagtagtcccactatctctcctcatatgatactctccgccgcctccgccgctactcgcttcaccgccgccaccacctatagcgttcaagctcgatgtagaagacgaccagttgcattgcctaggctgagtttgataaaagatcttagacacaacaagttctccttctttctcttcctcatgtgtccccaaatgatattgatgcattacccaattggttttctccggttttcgattcttaccaaaattggtatacaaaaccaaaatcttcttacaacctttttgcttaccgtttaccataaccggt

SEQ ID NO: 12491 - DNA, 1225 bp, Arabidopsis thaliana landsberg
atcgatcattattcaatagagcattgaatttgaaatcatttgcaaaacaaaaacattcttggccggagtaagcatttatttctcctatgcaaactcgcgacatgaagacagaaataaacataaaactagaaaaaaaaagaaaaaaaaagcacaaaaaccttaattgttactatatacaaaaacatagaacttatatatatatataatatatatgcatgtgtgtgtatgtgtttgttgacaaaatatatgcatgatatctagtttcttgccatatggtgtgaatagaagaaaagaatgaagccaaatagacatgtacacatacaaccacacaaaatgaatagatgctcatgccatcaaaatctcatcgaatatcatatactcataaagtatgcagctattatttcaaaatcttaaacaaaaataaatagaaattgctcccaaaagtcagaatgtcttcaattaatgctctgctctattccaactttcgcaacagatataacaaatcacaagacattgcacacacattcatgcatgccgacacttgatatatacacctatatctgtttgagttttttacacaattcttttaggttctaacactgtcacatgaattgttttgcattgctttcatccgatattgctatatatgaatagaataccgagttctaatacttcatgtagaaaaaaactcaacttatacattaaccaataccaactgttaatctcgttagtaaatattacctggagaacaacgtgccacagtcacatttatactcacgagtaccacaagttttcgcatgtgccttccaatcagactgaacagcgtatttcttagaacacttttcacacttccacttcttttcaccgtgtttgcggctgtagtgtttcttgatcccagtgaggtctccaagggccctggaggcatcatggtgtacacaagtcttgataggacatatgtatactttcttctttatcacttcttgtttggaccgttgctttagcttccatggaaggttgtggccacggcgatgtagttgtaaattctggtccctttgaaaccctttgttgcagatctcgcacacgaatctgtttgttgccatgagtgttgttggcgatagagcgatgacatcagcatctggatctgtccatacctatgcttaaatatgatatatcaacgcatatattgataataatggctccaaatatgttgtagagattataaatt

SEQ ID NO: 12492 - DNA, 1166 bp, Arabidopsis thaliana landsberg
ctcttttattaagtgtgtgtgataatatatagttatacatatatttaatgttatccttagaccttagttgattggtcatataataatgtctacatatattactgtctcaccatccatagtaagaatgaggactcgataatatattaatttccatgtaaattgtatgcatgcgtattagtgttactgtatacatatgcactaacctaacgtatttagtgccggcacgtgtatagaagccggcgttgagagcgcttccgccaccgagaacccgagcacgtgcattaatgacaccatcttctgatacaaaacgctgagatggtgaggactcagacaggtcagagagagcggctccgaaagccgagagcctcgtgatgttggggttattgtacggtgagtcaccgcgttcgagcagcaaaacgctggcgttttgagacagcgttgcggctagagggcacccggcagtcccaccaccgatgatgatatagtcgtagtacgacgttgtaggacttcctgtcggtcccgcatgaaggagtagttcggagctgcgatcaaagggtaaaactataacttcgcactaatatgaatacttaagaatctagttgtagttcatgaatattacctttgtcagaagaacaaattggagaatggagaaaaagagagagagcaacaaacaatctccatgaccaaaatctatccatcattaatacaaattgagtttagcacaatctagagtagagttctctcactttgtatgcctatatgtatatgataatgtatgggttatttataaagtctttggtgacctatggtgaaattaatactcgaccttttcatcatatatatagctagaaacaataaagagtccatctaattctgaggaaatgcaacatcaagattctatgtctattttaatggacacgtgtcaactgaagaagcagataaataagacccaatagataaattaattaatttaatttcaagaaaatggcagttagatgaagtatcatggggagaaagacccaatggccgataaaatttttagggatggaatggaaataatggtacacttaacctggcctttctggatttggataaaggaatctgaaattggaattaaaattaggaaccatatatttatggaaattgggttcagtgtgtgtaatacc

SEQ ID NO: 12493 - DNA, 562 bp, Arabidopsis thaliana landsberg
gcggataatgtgaggtcttcaaaacatgcgtacttctcaaatagccgatacagctcttgaagggttgtgggagggtccggattgcagtgactgtatagctgatcggcatggagaccgctgatggcgtaatgaatggcgattctgtcttccactaaacgtagatgtgactttagcgataggaacctgttatagtagtcgcgaaggctttccctctctagctgtctacgtagtgataactctgctagggcattggtttgtggtctatacccttggaaattgaggataattttttctcgaagggccgcccatgaatcgattaatagcggaggtagcctagtgtaccatgtttaggcagggcctccagggcgatgatgaggactttgccattgcattgtcgtctcctatggatgaggccaccgcgacttgatagctcatgataaactgtgatgggttagctacatgttgtacgttggccaattcccaacctgtagttgcttggccatggcgtctcctgcaagcctgcagtctggaagaaagtggacatttgttatcaatgaaattg

SEQ ID NO: 12494 - DNA, 816 bp, Arabidopsis thaliana landsberg
tgatacgttaccggtggattttagatatactcatactaattaattactaggatttcgaaaatgactagacatcttcttgccatatttgctaactatgattgaaatcaaactgatttaaagttagtaatacatatatatgctcatgattttcttgttttttggggtcaacatacatttctgcaaatcaaatatgctggtttaagtctactaaacacaaaagttctcatatattaatatattttcttttgtctcaataattctagtaaataaagtagaggaagagaatgatgcacgccagtagagatttttattcatataaaatcgttgtctttagaggaataatacatgccttaattctcaacaaaaatacatttataatgaggaaagtttactcaagttgcataatatatcaaagtacccaatgcacgaattctaatctttttttaatactaatcattaagtccattttgacgaaatatgtgaacgtcattacaaaaatcttcagaatattcagaccaattcaattttattaattacaaggattatcagcttcgaacataattagacggtaagagccgccctgttagggttttttgtcctcaatgccaaaatcctcccattgcagatattatatcactcccactgtctaataaacaactctcttctcctctctacccagagcgagtcaccttatcgtctctctatctcctccttcctatatccccttgctctctgggtttttgctcagtgtgctacgtgagagatagagagatggaaggtctgattcaaaccagaggaattctctctttacccgcg

SEQ ID NO: 12495 - DNA, 1081 bp, Arabidopsis thaliana landsberg
gaccttggcgacaatgacaaagccgtgtttgcagtagccggaatggtttcaaccgatacggtggcggtagaggcggctgctgcggctaccactgcacctctatggcgtctcatgtgaccacctaatgcttgcccggatgtgaattcggctccacatatcccacattcatggaccttattattactacctttgccgtataccacaagcgatctatggttactattgttgttaggagttgtggtgagaacgttgttgagatggagagaaacggcgtcatcgtagttagacttcttgtggtcatggttagagtgaagacccatagcggctttaggcttcttgtggctggctctatgcccaccaagagcttggaaagacggaaaagtccggtcacatgttttgcactggtaaacatagtaaccggctctgcctccaccaccgttcgttgtggtcccgttagatgaagatgtctctagaaacctcctgctgctagatctatacgcattgttgttgttgttaccggaatcttggtaactcatcataagctgtcttgtttgttgttgggggtgcggttgcggttggaggtggggaagagagtgaccttgggcgaggaggatcaaacaattagccatatcttgatcttcttcgtcagccgtggcctttaatgtggcattgttgttggaagatgaagaggcagaagatgaagatgtaacaccattgatcaaagtattgttattattcttgatgttattgttgttgatttcatcattgagactcttctccttggaaacaagactagtagactcttcttcagcatccggttcatgcgaagacataggaggaatgatagagaaagggattggggactgaggacgttgccgcttagtccgtttccctttaaggatcaatgattgctccctagcggctgatacagcctccgcagctgcttccattgagtatatagagagattcaagaaaaaaaggccgtaatattggaattgatcaatcggaaaaaatgaaatagagagaattgaaattgaagatggagatgatcagctttaagggttacatatatataaatatg

SEQ ID NO: 12496 - DNA, 901 bp, Arabidopsis thaliana landsberg
actgtcatatttgtcaccggatgaactctggttgatgtcatatagaacacaaacggtttctggcacggatgacgactcacgggtcgggtgttgaaagcgtatgccgtgtaatccgcccgtcgatacctaacggaaaaaaaaaatacaatgtaaaacaaaatgaccatatatttatacattttggagtttacttatgtactttactaatgttttgatatagattaccaatttaagaaagttctcgacggcatttcaatctctcgagccgaaaagattccgcggaaaatctgaaccgcgaatccccaagagacggaaacagtccatttgcggcgtttgtcatagcatatcgactgttgcataagtccagcagagtctagctttgccgggacttgtagatgcttcaaggcatcaacacgtgtcatgtttgggaaaatcggttcgaccacgtcgaggtgatgaagcgtaaccagtggagccaccgggtgagccgctagtaatccaaagagattgccatacacatcgtactgaaatacacaaaagacagcaccaattaatatggaacggttcaaaatttaatttgagaagagttaccaaaccgaccggttattggtaggtaccgacgattggttctgtaatcaatgaacaaatcaccaacaaacaaggagagtgtcacgtgagacgcacgcgccgttaaatgcgtgacaactctttaaagaaacggcctgacaccgtgacgacgtgtaccttactccggcaacaatataacgtacggcaacattgtggtccagtgacgtggcattgtatcataattgaattttataatgcaatggatttttaaccagaaagcgtgtaactttttattatcaaaaaacccggggaacaatttaatttataatctcga

SEQ ID NO: 12497 - DNA, 591 bp, Arabidopsis thaliana landsberg
  unsure (1)..(591): unsure at all n locations
tactatgttttataaaataaaaaatatataatcgtgtcgggccgggccgcactgcggaccgagacagcggcccaagcacggcacggttctcgtgcgggccgggcccgagtnagttaaacgggtcgtgcttcgggccggcccgttaagtacggctcatttgaccatctatacttatggccctcgcggcgtcgaagcacgggagcttggtgaacggtgactgcagcagtgaacgacgccggagcagggagtaggagtagcggttgtaactaggtacccatttgggagggctcccacagcggtttttttccggagtccctcccaaatggcgcctgaaaaacagctccgagtacagggtgggagtaggtttacttgtctacagccagagcttaaaaaactagctccgtagctcgagtagagagtgggagccggtttacttgtctggagccggagctcaaaaaactagttctgtatggctctgcgtgctctctcccccgctgccgcaagcgcatctgttcctcgcgcagatgttcatcgcttccgtttctcgcaccttaagcttctgtggacgctggctcctctcggtggagtggt

SEQ ID NO: 12498 - DNA, 549 bp, Arabidopsis thaliana landsberg
ccaatggcggaacgatgcagagcggtccggtgaactctcccggccagtggcgtcggaggctttgaaagctgataagaaagcaactcctcgccgtaatgcatttgtcgctttttcataagttatggcttccccaccgtcaatttttaccggcggaatcacttgctcaaattttgcctcttttagaaactgtggacatgatcacccagacggaaaaggaccaatacgattaagttgatgagtttgaactttaatctatttctataataagaaagattaaaatttatcctagtaaagttattttagtcttatagcattttgtcatagtgcatactgattaaacttcttaaatcctttattttttaaacagcctggttaagtaacattcggttttcttttgtgataacttttattttgatgaaaatattcagaattttttttttgattttgataaactaaaaatggtgattgactttaatggaacctaccaaattacaatttctgactcgaaaaaaacaatatggtctatacatttaattattattttcatgt

SEQ ID NO: 12499 - DNA, 1593 bp, Arabidopsis thaliana landsberg
agggtattaaggttggaattttattatcaatcgaattcgtggaacatttgttacgtttaatcaaaaagtcacttatgtaaagcgttggcatggtaactgtcgcattttaagcaaattaaaacactattgacgcatatggaggatataaagtcattgattaattatgtgttttttttttttggtatcaagattaattatgtgttatactaatgatatctaacatgtattcaaggaagaattgtggatacagaaaactgaagtatataatttgcgtgggggaatttatattgggcacacttgaacagcatatgtgaaaattcttgacgttaaaggaaaatgaaaaatgtgtgtgttcgtttacataaatacaaaaaataaaggtgctctatatcctaatacaaaacctagggggtagaagctgaggtggatcgcaatagaagaagatggtcggctctcactctcgagatcggacggctgagaagagaagagaagagaaggagaggatgcgtttcttacggggagagagaaataaggccaaacaggtagagcccacaagatgactaatctccaccgtccaactcaaaaacaacatcaacaacaacacatcacaccaaatattattcggtttctctcttcaggtccgactcaatactgtcatacaccacatccactactctactactacagactttttggtgctcttccccctgtggagtccaaatcctttgacacgtgtcgttttctcaagagattcactgtcccactctctgcgtgattcccccccacatctgacggctgcagttcgccgccggtctactcatccgtcaaacgccggttactgctcagactttggtttgatcaaaataaataaaaaaagatcaacggctggaagaggaagtagaggttgaatctggacccttagatttatatatactaaaaaaaggtatttgggtcttcatgtcagtagaggcgtttctcttgcttgtttaacacaacactcccccactcttcacatttcttctattttcttctaatttctacatctcatcacatgtagcacacaaagtcacaaacacttgtactggaaatgattgaaagagaaatatgtcttatatttgcggatatataaatgtgctttcacttcaatatcatttaaaaaaaaaaaaaactctaattttctctgctaattgttacgtttgtaaatatatttttttatagaaaataactatgaaaaatccgagtgcaactatagattgtagataaaagggacaaaagttgaaaggaagtggaagcagcaaaagatgtttcaatggataggggagtcatgacgtgactaatacacttctttttataaaatgtactatacattagtactaaatacagtattgtacaaatattcccgtaaaaacagttttaatttttaatcaaaaacaactatcaaatatggataaatcagcgtccatagttaaacaaaaaatgctaccctagctaaaatctccatttcttagaaaagaaaaaaaattctataatatataatacctcgaatgaaaaatgacacattgtacacgttcatcaaatggggaatagatatta

SEQ ID NO: 12500 - DNA, 1116 bp, Arabidopsis thaliana landsberg
gatggaaatgctcattccgagtatgatgttgaaaattctatggcaacttttgcaactggttctcaaagtttgatggatgatggaccagttggccctggaagcagaaagccggcttctccatatgatttgcatataatgacagagccatacggagtcccaagtatggtggaaatttttcacttcttgtgctctttgttaaatgtggtcgaacatgttggtatgggatcccgatcaaacaccatagcatttgacgaagatgtgcctctgtttgcgttgaacttgatcaactcagccattgaattgggtggatcgtccatccgccatcacccaagattgttaagcctaattcaagatgagttatttcgtaacttgatgcagttcggattgtcgatgagccccctgattctttcaatggtttgcagcattgtgctcaatttgtatcaacatctacgaactgaactcaagttgcagcttgaggcattcttttcatgtgtgattctaaggcttgctcaaggaaaatatgggccctcgtatcagcagcaagaggttgctatggaggctcttgtgaatttttgtaggcagaagagttttatggtcgaaatgtatgccaatctcgattgtgatataacttgcagcaacgtgtttgaggagctgtctaatcttctctcgaagagcacatttcctgtgaactgtcctttgtctgcaatgcacattcttgctctggatggcctaatcgctgttattcagggaatggccgagaggataagtaatggattgactggtttggatttgggtcctgtccatcttgatgagtacacgcctttctggatggttaagtgtgacaactatagtgatccaaatcactgggtttcatttgtccgcaggagaaaatatatcaagagaaggttaatgattggagcagatcattttaacagggatccaaagaaggggttagagtttctccaaggcacacatcttttgcctgacaaactcgatccccaaagtgttgcttgcttttttagatatactgctgggcttgaaagaaccttgttgggattttcttggaaatcatgacgacatttgtgttcaagttctcaatgagtttgctgggacttt

SEQ ID NO: 12501 - DNA, 497 bp, Arabidopsis thaliana landsberg
  unsure (1)..(497): unsure at all n locations
gagtagaaatagcttattttagcagcagctgttactcctgatacaactgagaataggttttcttacatttcatctactcaaaatcactgcaagcnnnnnnnnnnnnnnnnnnnnnnnnnnnnntagagaccagtgccaaggattctattaacgttgaacaggcattcttaactattgctggcgagatcaaaaagatgtatgttcactatctttaatctttcgccataattttttctgcgaagatttaacatagattaagtttagtaaacttgttctattactatattccttgatcaccattatatacatcaaatcattctctgagtttttttctgctgcaaagcatcttgattctccactgttttcatgaaataaactattcatgtaaagtttcaaatccgaagagtgctattctagacttgatgactaatggaaagcaaatcaacaaactaactgctgtatccttgtagcttcctcaagctagagtacttaacttc

SEQ ID NO: 12502 - DNA, 1089 bp, Arabidopsis thaliana landsberg
ccattccaggcaacaagacaaaggtaatggaaaagcaaagtagtaaggttccatctttaatgactatataattataagagatcatcatgtataacttactttagtgccaattcaaaatgttgaagacgatagtaaaatacagaaagatccccatagcttttcatagtgtcgggatggtcgagaccaagttctctctcatttatatctagagccttctgctgatatattgttgcctgatcaagagaggataaaaaatcagagatgacggtacctctcatcaatttatttatatacagtgcctagaacgagaacatcaaactctctatttgttacttgaaatcaaagtttccatttgggaagaagataaaagatgatgatacctggttaaaatcaccagtgtggtatagtacaactgcgagaagactgtacgcacatgcagtatttctatgataaggcccacagacagcaatcatcttgactaatgcctaggaaatgcaagaagtcagcatctcttagataacaattcagttggttagaatgatgatcatgtagctatcaaaagaaatgacacctttgttccatagctcacagcatcatctagttttcctttgtcaagagcaagttttgatgactccaagagtgtccttccgtcagatgaaatacacagcacatgctgttcaaacgaacatatatcttaaagattactctctagaatttgaaccataaaatcgaagcagccgtagataaataacagattgtgaccgaatctctattagtcaaactaaaattggatcatggagaggcgaaccttgcacacaggtaccaatccaataatgtcagagctcatgaaaggatttggagaatcgaagtcaaaatctcttgaaactagttctaaaccaacctgtaaaagcatgaaatcaatagagaactctaattttgatacaagcagcagtaacacagagctactttaccttctggcagagtcctcggaggatagaaaactttttaaatgaaggaactcatctttctgtatccaaccaaattttctggagagaaatttctgtagccactgtaatctgagacagtact

SEQ ID NO: 12503 - DNA, 906 bp, Arabidopsis thaliana landsberg
agttacatgtgtggcttctatagctctaggtcagattgcacacatcaaagtgtcctttttttctttaaacatcattcaatttgaaaaaaggtcacatgtccgtccaattccataaatagaactcacacttcacttcccacgaccacatcagttcacatctttatcaattcttttactttcattctctttatatattctctctacgctataatatatattacacagaatatacatggaaccgtccatcaaaggagatcaagaaatgttaaaaatcaagaaacaaggtcatcaagatcttgagttggggttgacccttttgtcacgtggaaccgcgacctcatcagagctcaatctcatcgattctttcaaaaccagctcatcatcgacttctcatcatcagcaccagcaagaacaattggcagatccgagagtgttctcgtgtaattattgtcaaagaaagttctatagttcacaagcgctaggcggtcaccaaaacgctcataaacgtgagcgcaccttagccaaacgtggacagtattacaagatgactctctcctccttgccttcttcagcgtttgcgtttggccacggttcagtcagcagattcgcaagcatggcatcgttaccattacatggctcggtgaataacaggtcaacgttagggattcaagctcattcaacgatccataagcccagcttcttaggaagacaaacgacgagtttaagtcatgttttcaaacagagcattcaccagaaaccgaccataggaaagatgttgccggagaaatttcaccttgaagtcgccggaaataataacagtaacatggttgctgctaagttggagagaattggacatttcaagagcaaccaagaagatcataatcagtttaaagaaaattgacttga

SEQ ID NO: 12504 - DNA, 1165 bp, Arabidopsis thaliana landsberg
  unsure (1)..(1165): unsure at all n locations
gatcggatccaaggagcataagcttccgccaataatttcttagtcttccagaagagatagtgttacggacttggcgggggtgatgttcttgaagatgatcgttggagcgattggctgcgagttgtgatagaagtttttctgttgcttccgtatgtgaaaaattaccgctagagctgctacttgatgcatacaatgaattttatttaatgtactattatactattattcagctgaagatgtttttttttgacaaattgttattgtaactttcattttcttgcaagtatatcacacgtggaaatatgtatacaagaggttgacatatataaggttaaaaaggtcgatttagtttctctatattgttaaaaggcatagagaataatcctcaaatcctttgagacagagatagagagcgatcaaagattatggtcaccaaggagagcactttcaagtttgaatatagacgcaaattggggttaaaggaaagagtaaactagaatacgaattctgaagaaaagtactaaatcatgcttttcacaagatagaaaggagattcattttatagtgcccataccggttcttgaatattgtcctcactaaattttgttaattataatatagagaaaagcttaattagtgatgttgatatcaattctctacaataaagtccaagaattttgctaacatattgatattttgttcgtgcgccgattaaagaaaatattgtttatttatcaaagatcgattgttctttataaactaactagctaacaaacaaaaactaactaactaagccacatatgtggcgcatcgtatgatatgtataccaaaaatatcgcactgaatagatgaaaagtcaaatagatgatgacggaatcgattaactgaattatatgcatgnnnnnnnnnnnnnnnnnnnnnnnnnntgtaaaggttaacagatttatttttcaattttttttgctaaggactccctgataatgactaccgtgatatatgattcttacttaatacaattttttcatatatattgaaaaaattgtataaaatatattttcaatttgcctctaccattttcaatgatatttaaaaatgaatattaggttttgcatacttttaggcataaagtatataatattttcacatacatgtaaaaaaaaaaaat

SEQ ID NO: 12505 - DNA, 777 bp, Arabidopsis thaliana landsberg
ccggttctatgcctagatgaactagaatccgtgatctatcatctagcttcttcaagtgtggtgtttccaccttcgcatatccaatacaaccgaatatcctgagatgttcaatgtttggtttcttcttttgaaaagcttcatatggagttttgtcttgtagagatcttgtagctatcatgttcaacaagtacgtagagtgcctgattccttctcctcataaataatttggcatctgcatgtgcttcataatacttcttgtcatttctaatggggttctgtttcttctctcacctacttcgttctgttgaggggtgtatggagctgtaaggtgtcgctttattcttgattcttgacagaaattgttgaactcttgtgaaacgaactctcctcctctatctgttctgaaagtttgtattcttgctcctgactcttgttccacgagactcttgaactttctaaacttgttaaaagcttcactcttttcttttaacagaatagtccacatgtacctagaatgatcatcaatgagcacaaatacatacctatttcctgcagttgtgcttggcgttgtaggaccacatagatcaccatggactagttcaagaatcttggcggctctaaatagagtggcttttggaaacgcaagtcttgtttgcttttcaagtaaacatgacctgcaaagttttttttttatgcttccacgggagaatccttggacccactccttttgcatcatcgatttaaacgtttcaaagtccacatgtcccagccttgcat

SEQ ID NO: 12506 - DNA, 646 bp, Arabidopsis thaliana landsberg
tcgtccgattggctttgggtggctcggattagaatgagtgggtaccgattcagtgagtagatctatgccattgatctggcttgtgacggttgagattagagaaggggaaaacgattcgttagggcgatctggacccttgatctctgatcgcgcggccgccagccaccgataccccttcaactggatcttttagcataaaaacccttactttttacagaaagcaacccgcagtcctaccagttcaaagaaccttgcgattgggtcctgttttatttagaaaagcccctgtaaaaccacagattatggtgcgcagtcctgagagcagaaaaataggaaaaagaatatagaaaatgagtttctagagtaaaaataattccagaacctatttaattcatagaaaatccattttaaatccattttgactcattccagttgaattaattttgttttaatattgtttacacctagtacctttgtttagccatgaaacttaatttaaaattattcacttgaattactctattataggtactagataactccagaaattcataatttccttgttctaactctgatttgatcattcaaacgcgttcgttcataaaaattatcgctacacagtgacaatataatgtacatagacata

SEQ ID NO: 12507 - DNA, 939 bp, Arabidopsis thaliana landsberg
  unsure (1)..(939): unsure at all n locations
atatatgcatgaaaaaagttgaaagagctacattactacgcaggaaaaattttcaagctatgatgtctctatcaagatgctaagcatacttgatatactaatacttgcaaaccaataagattaccttgccatcatactctccgcgagaaagaacctcaggtgcaatatatgctggagttccaacagttgatttgggcatagagtgcaacaatgaggactacaaaagaagaaaaatagctcacatggagggaaaaagaagaaaaaggagcttgttacgacaggataaattaagaaatcactagtagcacattcaagtgcatgctggagatatatggcagaccttggaataaccaaaatcacagattttcaggcgtggagcaggacttccatccaagagggtattttcaagcttcagatctctgtggcatatttgctgtgacaataaggaactaatgcaagtaaaggactaataccgcagaaattatgtatatgtgtgaagttaaaaaaaaaaaaaacttcgtaagccatttctttctcttaccatagcatggcaatagctgactcctgagatnnnnnnnnnnnnnnnnnnnnnnnnctgaagaaaaagatgtgcacaaaaagctatcataatccgagaagctgatccaaatgatttacaacagaaattcctttggcttcctatactacaaaacacaaatataactctacaagttttcctctttcctttcctctcaattaatctcagaccacaaaacaactctgaaattgatcatttagtacaccaccatgactttaaatggcaagagaagcttacctcatcctcactgaatcttccagcactacatatacgctcaaatagctcaccgccagcggattattccatagcaatggcgatgtgcgttggtgcaaaaccactggaaatccacaacagtgaactta

SEQ ID NO: 12508 - DNA, 575 bp, Arabidopsis thaliana landsberg
ctatcataatctcgtaagctgatccttattacccacaacagaaattcctttggctgggtatacttcaaaacacaaatctgactctacaagctctcctctttcctttcctctcaattaatctcagaccacaaaacagctctgaaattgatcatttagtacaccaccatgactttaaatggcaagagaagcttacctcatcctcactgaatcttccagcactacatatacgctcaaatagctcaccgccagcggcatattccatagcaatggcgatgtgcgttggtgtcaaaaccacctggaaatgccacaacagtgaacttaggataccaacttccgctgagactaatcaccatcggtttaaacatgacaccatgaagccatagaaaaaatgcagttacctccttaaaccggattatattgggatgacgaagtgatctgtggttaataatctctctcgccacgttctcatcaatctattcaccaaaagaaaaccagaaaaaaggtttcaaaatcacatactcaatctttgatcttataagacaatgaaccagtactatgcttacaaaagtaagaat

SEQ ID NO: 12509 - DNA, 1055 bp, Arabidopsis thaliana landsberg
ccggaagattgaatgaaatcttgaattagatgctgaaattgctcaattaaaaattactcggtctttttctttttctgttgtctttgtttttgtcctttttactagtcttatatgttaaacttgtagttttggtgttcaagattaatgatgttgaacttgaaacaaaataggattgatgagatgcggaaagagttgtcgtctaagatggataaactatctgagaccaggtctcaaacgaggcaacttcaccaaggaggaggaagataccattatccaccttcaccaagcttatggaaacaagttatcatctctccctaatctctcaaatcatcatcttatcatctagaaacatttaatgatcagtgcattatttgatctcaggtggtctaagatcgcatccaacttcccgggaaggacagacaacgagatcaagaatgtatggaacactcatctcaagaagcggttggtgaagaggagcatttcatcatcatcatccgatgttaccaatcattcagtgtcttctacctcttcttcctcttcctcaatctcgtcagtcttgcaggacgttattattaagagtgagaggcctaaccaggaagaggagtttggggaaatcttggtggagcaaatggcatgtggatttgaggtggatgcaccacaatcactagaatgtctctttgacgatagccaggttcctcctcctatatctaaaccagactcactacaaacccatgggaagtcatcagatcacgaattttggagccgactgattgaaccagggttcgatgattacaatgagtggctcattttcttggataaccaaacttgctagaacacacaaggagttgacccatcatgtcttattgttgcattgtcttttttcctttgttttagataaattgagcacacactgtttttgtaaaagctagtattggaaactaaaatgtaaacgagtcagaagctagaatgtaaacggttggggacaaaaccatatttcacattagatattttgatgaactttggaaacacaaaaacctacgaagctgtcacttgtg

SEQ ID NO: 12510 - DNA, 1000 bp, Arabidopsis thaliana landsberg
cgattaattgttggtttagtatgctttttagattaccatgctatcctcttaataaaaaaatcaatttggttcaccaaattagtcctctattttctatattttattgtaatcagatacgttctcttttatttggtttgtatgttttagcaaaaaactgaccttgccatatcacatcctctaagtcatataacatccacttatgtgaaaatttctttagattttaaatcctagttatgcaatatcaatagaattaagagaaattcctatcaataatgaatacggcgtgatggtggtgatggtacccaaaatatcaagttaaggcacgacgaaaaagtatattaaaatgcacgaaaatacttttaaaagataacattttcaagcaaaagagaaaaaatgtatcgaaacattttaaacaactgaagggtctttttcaatacataatcatttataagcataaaaatcaacattctataaattctttattataaatgaacatataaatgcacgcatttcatataattctttattttattcaaaataatacaaaatatataacccacgaaaagcatggggcaattttctataatatataaatataatatacctttactttcactaactccgactatccacgaaaagtcagaacccaaaaacagaaaatgaagattgagcttgtgttcatacctttgccggggattggtcatctcaggccaaccgtgaagctagcgaagcaactcataggcagcgacgaccgtctttcgatcaccataatcatcatcccttcaagatttgacgccggtgatgcatccgcctgtatcgcatctctcaccacgttgtctcaagatgatcgcctccattacgaatccatctccgtcgcaaaacaaccaccaacctccgatccggatcctgttccggctcaagtgtacatagagaaacaaaagacgaaagtgagagatgcagtcgcggcgagaatcgtcgatccaacacgaaagctcgcggg

SEQ ID NO: 12511 - DNA, 654 bp, Arabidopsis thaliana landsberg
caccttccgggggctcctagcaataccacgtcctgactgtgccagaactcccaaaatagatatgggacgccaagaacatgatatgcgtcgtggacccgtgccacggtcgctacctgacggcgtccgccatgttctgcgccaagatgagcagcagggaggtggacgagcagatgcttaacgtgccaaacaatgactcctacttcggactcgatctccaacaacgttcagtccacggatgtgcctcttttgggagtgaattatacttttactcaattaggatattgtgtttctttggatctttgtttgattaatgattttttggatgagagtgtggctacaggatgaagcaatgcagttttttatggaacacacatgtgcagtatacaaatggaccatcaggttgcgggtatgttttttagacaaattattccattttttctattttgttgtccatcgagtctaattggattgggaatgcacatgctaactataccactagaacattagatcatgttgtttttggacaaataattttatttttccgttccaaatttctcccattaagtctaactggattcaagtgtgatattagaaatcacaagggacaaatcatggtggcatttgaggttgtctttctactgtcatgttattttg

SEQ ID NO: 12512 - DNA, 988 bp, Arabidopsis thaliana landsberg
tctcctcaaaatcaagcacttcttagtgttaagagtcggtacttattttaaaattccaccactaatgtattgttttctttttcttcattaaatttgtcgcctatcaacatcggtgagactccgtgtgaaaaattgaaaacacacaatggtctatggcccacacaacaaaccattcaaaacaacctcgtgtcaaaacggtggcgttcaaaacttaatcacatcacataaagcagctacacttaagttaaacaagaacaagaaaaaacaaaaaaacaacattctctctctctctctcacacatggctcatcatctcttaaaccgcgttagatcttcctggtcttcgatcttaccattaactataacattcctcgtcatcttcaccggaaactcactcgccggagaattacgtccttccgatcatggcttacagtaccaattcagctcaccaccgacagaatctcactcacctccgggaaaaatgaagtccttcttcggagattctcattcttcttcttctactcctccttctcaccctcagctcctccctaaagccacggcggcagatggcggagacgacgattcttggtggcgagatggagctgggatcagacgtgatcacgtgatgaggcacgtgtttcttgcggcgagtatcatctgcggcgtctccggcgttgcgcttctggtggtttttactttgatttacttctttaggtatcgtaaacataatcattcgaactcacccaccggtaacgattctaaagaaattatattttgattattgttcttcttagatttaaaattttaattgtaatctttacttatttttttcaactgatcttttactttgtataaagttctttttttttgcactttgctttatttcgacgacttttatgttttgttgccttataaagagcactgttacacccacatattattgattctctattattggtggcaaaagacaaggaaaaaaagagaggagag

SEQ ID NO: 12513 - DNA, 887 bp, Arabidopsis thaliana landsberg
  unsure (1)..(887): unsure at all n locations
cgaagcccttgctgcgggaggttttgtccttctagaccggatctccaaatgaaagagggcttcctccggttcttgcattcagaatatttgttgtttcaaagtaccttccacgtaagaggcgagtgagcagggatgatggtgcttgaagtattcgccacacttgttttgctaacatggctttattaaagcattcaatgtccctaaatcctaacccgccttcattctttggtatggtcagccgcttccaagccatccagtgcattgatctcttatccgagcttttactccaccagtaagacgcaagtaatctgttgatatcatcacatatcccctttggaagtttgaaacagttcattgtgtaaactggtaatgacaaagccactgtctttattaagatttcttttccggcttctgatagaaatcgagttgaccacccttttgttttttgttgtacccgatcaacaatataggtaaagatctccttttttcctccaatctgttctggtaaacccaaatatttacccccaccaccgtcattatggatgtttaggattcgtcgaagttgagttttcacttgttgcttcacttttgaaccaaacgtaatggctgctttgtgtagattcactgcttgactagagacagtttcatacatccctaagatctccatgattgtggcgcatgatttgggatgtgcatgacagaagaataaagaatcaccagcaaaaagaagatggttaatagctggacccgtattacttatcttcattcctctacgcttgttgactaacgttgcattggtgaaaagatgagataaaacttcagagcacataatgaagaggtatggagagagtggatcaccctgtcttattnccctgcttggcttaata

SEQ ID NO: 12514 - DNA, 888 bp, Arabidopsis thaliana landsberg
ggcggagatggagaagagacggctaatctggaaagtagaaggctcggcggtggaggaagtgaagagaggagaggcggtggacgcagagaagctagtggttgagcttgttccgatggaaattcgaaccttgttgatcaagtttgatgatcaaattgaaatggttggtgataaagagcagcaacataggttatgaaataatacacgttgttgttgtctttttaagtttaatcggagaagagaaaaaagtttgaatttagtgtctgatgcgagtttaaaattcgggtgattgcaacagtcacgagtgcgatcccggtaggagtatcgcaatttctgcattaacatttacgtttgctaaggggtgggcattttaaccgaaccgaaccgatccgaaccatttacgtttgctaaggggtgggcattttaaccgaaccgatccgaaccaaccgaactcaaaccgacccaaactaaacccggattaacactaaaattattcggttaggcttcttctcaacccaaatagttcggtttaaaaactttcctatcacgagaataaattttgtttggtgtttacataaccgaattaatcgtaccgaatccgaacttaaaccgaaattcccaccgttatacctggctatactgaaactatatatatatacgtatatatatatatatacatgcgatgttgacaaatgaacacaaaagtagataaactcaaaccggtagttattacattaactgtgtaataaagattcggtatatcccacccgcgaagaaaaggaatcatatcacgggttaacgaatccgggtcgggtacacggagcaatcataaagaagaaacaaaaactacgacgacaagttttttttggccttggccaaaaatttttcata

SEQ ID NO: 12515 - DNA, 766 bp, Arabidopsis thaliana landsberg
gttgggtttatgcttttctagacaagttcttactttttgtttcaaattttctttgtaattttgattatttttcattttcatagatgtttttttttttgtatttttttgagttttagctttttacttttagtggtggttgattcatgattgatttttaaaaagatttatcatttcaaagcgaaaaaggttgaaatctttgatcattaaacaaaaaatgggtttagtgattctaaactagaaaaaaactatgtttttggttccataatttggatttgcagttacagaggatttgatgagtctcaaggtatagaagtagcatggaaccaagtaaagctctacgatttcttgcagagtcctcaagagctagagaggctctactgtgagatccatctcctcaaaaccttaaaacacaaaagcatcatgaagttctacgcttcttgggtcgataccgataatcgaaacatcaactttgtcactgaaatgttcacttctggcaccttgagacagtaagcttatctctctatctcataagtgaagttctcttgataacttactcataatgtttttatatctttcatgcaggtataggctaaaacataagagagtgaacataagagcggtaaagaattggtgtagacagattttaagaggattaaactatcttcatacacatgaccctcctgtgattcatagagatctcaagtgtgacaacatttttataaatgggaaccaaggagaagtcaagattggagatcttggtcttgct

SEQ ID NO: 12516 - DNA, 1319 bp, Arabidopsis thaliana landsberg
gtcttcagtcttcaaacttgttacacgcaaggttaatttttttcttccagctagcaagaccgtttcatacacataaaaggtcataatcgagtgattttacgctagtgaatatcctcctaagagagagagagaaagaaaatgcccattgtaagttgatggatcatctcagaaaatgtaacacgaaccaaaaacctttttggaaaattactatattattttttttgtagtgaaaattttattactaacaaatgtctaaaatttgcttaataggttctgaccggatcgacgagataaaccgggttacaacccggttgcaatttggatcaaagctaaaaagagatggcttcggttgtgtcatggacgacgatggtgatcggagaggggctttggtggtgttggggccgaaggttgaggtcgaagaaggttctgtccgtttttaagagaggtttctagatgagtttcttttctgcgatagattgacatatgtatacgaaaatcagccataaatctctaccaatagctcacatacccatgaaacatcacctccattggacatctatttcaatttcctataaccattataaagaggtccaaagctaaatctcaatgaaagaacttcatccgagtcgatctttgagagacttcagataggttatgaatcatcaattctcttctttgcatttacaaccagtaactataggacttctaaaatgcaagaagactcacttggacactaaatgcaacaaaccacaatgaaaatactaatgaaacaccataaaatggatcttaataaccatgataaagtgctaaatatagagtatatcatgggttatatatagatttgagaagagactaacacacaaaaatatgaaaataagtcagtaaaattagctaagtaatcaaaatgcttcaacaacttttgaaattctatttatcatttagctatacattctaattggggagtgaaaaattctttgctttcaaaagatacacatcttggctcaaactgcatattttgcgacggacttcgtggtcatggtgtgatctgcactgttgaaggtcttggagtggtttgactaaaaggtgaactcacattatgaattgcactctccttgaacatgtgcgattttctgtcgttttcatcaaagtttctaagcaaaaatgttagctttctggaaaaggaaattttcgattcctcatttagcgtgtgcctatgttcgtacaagaagttggctatgaagacgagatgtgccatgactgaagcaaggcctgctattaaaaacagaccccagaagctataaggtgagacggtggacgac

SEQ ID NO: 12517 - DNA, 1086 bp, Arabidopsis thaliana landsberg
tattctaacaatgacaatgctgatcttaaatagataaccagatctcatagatgataatgctgatattatgaaagctgcacattaaaataaactttcgcctgaatcacccttgaagctggtcgtgctctctccttcagcttttgggccacgaagaaaagaagccaggtacacacaaggattgctatcacaatctcagggaagccccaccatcctgaatgcgtcacctttactccaaattcattcatattcatttcttctcctgtcattttcggctcgtccggtgatagaggcccgagaaaattgttgttgtgccctagctgtattaataataacaccaatgttcttatgtttaacaacctctaagattcaatctttttttgatagctagaaaacattattttatgttcttgaatagttcttgcgagtgataagctcataaagtcaagctattgacttaccttgatggcccaagatccaaaaatcatgtaagaaatcgtgtaggaaatcgagaaacggcaaaagattttgggaagatcaggaagaagacgggagaatccagaagacgtcatgatgattccctttccaaaacataaaaacagacatcagtttattcaagatctttagtagctttctttgaagttagttaaaaagaaaacagaggtcgctctgctcgtacaataaggccagctccagtgaaaagaccagtcaagaagtttggaacaaacgaagccacaaccatcatgagaatctctattacagagaatgacaaaacaccgggcaagttccctgatttgtaagttataattcctctaatgcgagtgccattatgctgcaactcttggtcccccatctctccaactcattccactcagcagcctcggcttcggcagctacaaatacgcaagaatctcaaagagtaagtccaaaacggcaaagaaaacaccttttgtttcaaatatccaagcttacttctcaaagaaggcagactccgatggtcgtatttagtctgttgaatagaaagctcctaacaacttcctctgattgagtaagtgaagacaattattgaaatagttacatggtttgagt

SEQ ID NO: 12518 - DNA, 563 bp, Arabidopsis thaliana landsberg
tgccgataactaaagcagccaaggagcttaacattggtgtaaccctcttgaagaaaagatgtcgtgagttaggtattcctcgttggcctcaccgtaagctcacgagcctaaacgctctaattgctaatctcaaggtacgttcgtcaacagacatttacaatcaaattgcctatacattttggggttacaacacttatatatgtgatggtcttctttgaaaggacttgttagggaacacgaaggggataacgcccaagagtaagctgaggaacgctttggagcttttggagatggagaagaagatgattgaggaagttccgatttggaatttggggataagactaagaggttaagacaggcttgcttcaaggctaaatacaaacggagaaggctcttctcatcttcttcatgagatcaagagctcgtctctagagatatctaaccttttgtgacttaattaagttggtactatatgagtcgtgtaagaagaagatgagagtgatggagttacgtcttgtactagctagtctctgttgataatgatctaattctcatgaaacttg

SEQ ID NO: 12519 - DNA, 1009 bp, Arabidopsis thaliana landsberg
ttctcatttccatttcccgtttgagccttttttttgtgttgatgttccaaattttttgttatgcagatccatatctgaacactgatgctggtacaatgtccccttttgagcatggagaggtttttgtactcgatgatggtggagaggttttcttgttttcatttgcttactttgcattgctcattgatagatgcttgttgctaaagaattatgctgttttgtgaaggttgatcttgatttgggaaactacgaaagatttctcgatgtgacactaaccaaagacaacaacataaccactgggaagatatatcaggtacttactgagatttgttaacgttcgccggctatgtatgtatgtagtgactagtgagatagagtaactcgttttccacttttaccagtctgttcttgacaaggaacggaaaggcgactaccttgggaagactgttcaggttgttccacacattactgatgcaatcaaggattggattgagtcagtctctctgattcctgtggatggaaaggaaggccaagctgatgtttgtgttattgagttgggagggactgttggtaagagcagcttttgacccattttctgctttctcgtttccacttcattaccctttttttttctgctaaatcataggtgacatcgagtcaatgccttttatcgaggccttgagacaattgtcattctctgttggtaatgaatcctcctcctcctcctcctcctcctcctcctcctctgctttctttcagtaattatgatgtatgttgcttcatatttcgcttcctaggaccggataatttctgcctgattcacgtgagcttgattcccgttcttggtgttgttggggagcaggtacacactatttttttaccctttcaaaatgtatggtaaactttaatatcctcggctttatgcagaaaacaaagccaacccaacacactgtccgagaactaaaagctttgggattgactcctcactttttggcatgtcgctctgctc

SEQ ID NO: 12520 - DNA, 1185 bp, Arabidopsis thaliana landsberg
tttcgatttaaattcgcacaatttcggttcattagttgcttacatgcaaaaatactctctttttaaattgaaatcagatcttgagaaaccataaaaattcaaactttgtttgttcttttcaagctattgtggttagaaagataaaagcttgaaacttgcggaccaatctttataggttaccagacactaatgctgcattgtcatgtgtgtttgcagattgtccattagatttcagtggatcaaatttcactctagtagctactgtgtgctccaacataaccaacagaggcaaatgttgccgctacatgaacgcttttgttgcggtgtccgtggctcgttacgcgaacttgtcaactaatcttggagtcacatcagatttatctgaaacctgcattgcttccatctctagagccatggagggctacggagtctcgagaaacgccactagtttctgcggtttgggaaccaagatccttgttaagtatgactgtgacggtcgaaccactgttacacaaatgcatcagtctccgggatttggacatgtttcaagaaactgcagactcccattttcgccgggacaccaatgcagaaagtgtttgaactctggcatcacttaccttcgtaatctcataggtgcagagactaataacattactctgagtacttgtcgtgatgcgacttatgctacattagcaagccgaatagacgatacatcagctcttgaactccttagttgtttctttcaagtgacagagcttaacattccttcaggttagactcatgactgcaattttcttagtatctcatcagtttctttagtaactcattgtgtatcgacagagtcattttcaccagtggcaagtccagaaccttctccaagcacggttggtggtattagcccaagcaacagtgattctcaaatgactacaagtagaagcaccaatccatatcacttaacaatggttccaaccattgggattgttgttacagctgttgctcttacgatgcttgtagtcttggtaattcttatccgtagaaagaaccgggaactggatgaatctgagagcttggatagaaagtcaacaaaatcagttccttcttcccttcctgtattcaagattcatgaaggtgtgaaaatagagaggtgagttctttgtttataatataagatacctaagaaatgac

SEQ ID NO: 12521 - DNA, 643 bp, Arabidopsis thaliana landsberg
aattgaggtaagtttgatttttccttttcttgatcgatgatttgatttagttaaaaagtttgattgatattgatagattttactttgatcgtttatgataatttttagtatcttgttttaatttctggaatctgttgatcttcttcttcttataccttgccttgtaaacagatctgaaaacttctattggctatcttgatcttggtttataatcagaaaattgatttctttttccttctatttcactattctattacttgtacggaaatttttcgttgcacgaatcacgataacatttatttacaatctcttcaacttcatagggtctctcatctaatgacttacacgaagcttcctcgatgcatttattttcacgatccctatttcattattttcaagaaaatttattaaaagagactgaatctttttatttctttataatcttttcaggctctcaagtctctcaaagagacaaaaaaaatggcgtcttcaagctctccttgcgcagcttgtaaattcttgagaagaaaatgcacacaagaatgtgtattcgctccatatttcccaccagaccaacctcaaaaattcgcattcgttcacaaagtctttggagcaagtaacgtcgctaagcttctcaacgagc

SEQ ID NO: 12522 - DNA, 618 bp, Arabidopsis thaliana landsberg
atttaatgtggtacctatttgtgaaagataataaataaataaatatttttggacaataattttgtaacttttgagtagttagagttcctttgacataaaaagcaaacaatactttgcttgagtttttttttcttgacctaagaatttgatggtaatttcctctaaaaagtgtaagttttgtaacattttcttttttcttttagtaatttagagtaatttttcggaactatgaatcaattcgaatttaatgtcactacaactagcatgcttataatgaacataagcattaaagtcaaggtttactatggtttgtttgatgcaggtctcttcgacctggccgtgtccgctgagtttattagtaaggaaatcgtcaactgccttattcttgctagagaagggctacatgctgtggtgttagttctatccttgtcgactcggatttcacaagaggaagaaaacgcactttgtacgttacagatgttgttcgggggtaaaatcgttgactatttgatcgttgtattcacttgtggtgatatgttggaagatcgaaatatgactttagaagattatttgtccaatggttgccctgaatttctaaaggtatgagtttgattattt

SEQ ID NO: 12523 - DNA, 1126 bp, Arabidopsis thaliana landsberg
  unsure (1)..(1126): unsure at all n locations
taaattgtgttggcctctgaaagctaaatatgctcctacacggttctatatctaataaatttaagtacctgaagtgtgtaagtcttttaaggaaatataattctaaaacagagtcgaagatctgtgtcctctgcgtccaattttatcagtaaagtacggagatcgatcatattgcaatctaggcttccctgtgaagctgatcaattgtgtcttgtacgaaatctcccaaagacgccgctactatgctctcctaaaccactgtagtaatgctgagatttctataaatagaaaaagatgattagaaggatagaaactgagaaagtgaaacttaaaataaaagaatacacaggtgagagagatttgtttaacagtcaacaaatataaatatagccaagacatgagggagtgctagtatatctacataactataaaaatgtacgaaattggacattggaaattgaactataaccaagtctcaaagagcttatggatctctttcatggaaacgaggaagtgaaaaggagcttggcaaacataccgctgatttattaccggtgtttctgtaatagtatagggatccatggttgtcaagcacaaagaatctccttttccaatcagctctcaaactagctgatcgctttaatagatacccttgtttagttacctgcattagtacacaagacaaaataagtaagacattagcctggacaagaactgaagcagtgaagtgtatagctaatcaccaaatgagtcatcataaatctcaatgtctacatggttgtaaagcagtattatatctaataacagaaggcccaagtcttgaagccagaaatattctttgcgagcgcaactcaaatattgacactattactttaactttataagcatctgaatgagagctggattaattgtgtcagttagaaaacaacagtagggtaagcaagatcctgtcaatataaatagccatattcagaaacagcgaccattatatctttggacaaactatgccacttctaaccattttccggtggcaagacaaaacttaatccatttctttaccagagaaccattggaacaatttgtgaaaactatggtttggagaaccttacttccttgtctgntttag

SEQ ID NO: 12524 - DNA, 624 bp, Arabidopsis thaliana landsberg
aaataaacgaaatgcgttctcgggtaataagtattctagaggaaagatgtgattaaaaacaatatgagtaaaatgcattcatgaattatgaagttgcaaatttcaaccagctgatgccgacgtgttggatttcaggaagttgttggatatcaaagacccttggagatcttagggtttaggcttctagaggctttaagcattgtacaattgtaaacttcaaagaattagtcgagggttgttcttagtcgagttgaagaattaggcttaattattcttaattatttttagtgttagtcggggttgttcttagtgttagttcttagttctttttgtcttcacgggtgggtgataagaaatagaggagaattaggcttaattattcttagtcggggttgttcattcaggtagaatatgtcaagtaagttccgagataatacttgttaaagagtttattattaataaaaataaagtttaagcatcacttgttgtttgcaagtgaattctctgtgttggatttgtctctataccttttaaattatatttgtattggatttattgagtcaatgtataatgggcagagtttttggtatatagctttttaagtgaaattgacccctaaatttc

SEQ ID NO: 12525 - DNA, 520 bp, Arabidopsis thaliana landsberg
gatagactaacttatgcatcaaaataaacaccctataaatcctttcagattttaaattccaaaaaaaacttgtatggtggagcctggttgttggggtcttcttctccgccgaagtcctcgagacgaagacgttgtgtcaaaatgataatgacgaatgacgaagctacagtcgaagtatgacagcttcagtttaaggtggcgacgaagatcaagcatgataccgagccgaagaagaaaaaattagttaatccctgatgatgtatgttacaattataaatacatgtcaaggtcataaatgtatttttactctaactgtgtcacgtgcctataaataatagaacattaccctcgtactgttcacgctggattgtaatcgctctagcaccaacaccttcaatcgagccaaaagtataaatataatacaaattatgttaatgtccatctgtatattatgaaataatatatggatgaatgaatgaataacatatattgtctttgtaagctttcctgctcatggatg

SEQ ID NO: 12526 - DNA, 810 bp, Arabidopsis thaliana landsberg
tactagaatcaacttcataaatcgcaaaactaaaaaactcctaactaaattgggatccaattttcgtaattaccttccagagagaagttcttaaacgtatcaatggtgaaggatctgacgtgatcgattaactcatcagtaactcccaaaatctcatctttaccttctttcttaacactcgatccattcttcaagctattcccatctgaagattccttcttctctcttaaaaaacttcgtcgaatcctcgaagctatattcattgctgatcctgtgaagaagaagaagaatctgaaaatctccaatgccttagaaagtagaaaaaatgggcctgggcatggcgtgttaatgggctactgggccttattataataacaaaaggcccaataaattagggtttagagaactcttaaccctaatgtcgcatcatatataaagtcgccattgaagtgaagctgagatcttttcgaagagcggaagcgaaggagaggcgaattcgaatcgagaagatggtgtctgggtcagggatatgttcaaagcgtgtcgttgttgacgcacgtcaccatatgtgtggtcgtcttgcttcgatcatagctaaagagttgctcaatggacagagtgttgttgctgtccgatgtgaggagatttgcttgtctggtggtttggctcgtcagaagatgaagtacatgaggtttcttaggaaacgcatgaacacttaaccttttcatggtcctattcatttcccggctccggctaagatcttttggcgtaccgttcgtgggttcgtattctaatcttacagtcttaaag

SEQ ID NO: 12527 - DNA, 612 bp, Arabidopsis thaliana landsberg
atacaattttattcagagtttgaatggtgatgacggtcggagtagacaaatccgtcaacagtttaatccgctttatctttagggtagacaacagaccattgcggagcaactctatttgtatgtaaaagcggtttgtagttggtctgcaatgagttttttttttttgagtcctcaacactacgaacataaacagatttgtccgtcttaaccgctacaatcatttggaccctcaatgtgatatgatttaatcattgttttccaaatttgttgtttgctagtagaggttatatacaaaacataagttgttagctttttcccatccataaggttttgaattatgttcccacaatgatcacatccaaaaaattataataactcacatgatttagattgtaaaatgaataatgatgtaaacgaatcaaaacttttagaatctagccttggttccatttttgttgaccttcataataaaatatgaacgataaaagatttgaaaaagagaaagaaatggtgtaaaatccatttttgagcatttacagaagacattaacaatcctaagaaactgataatatcagactctaatctcctcatctggcataagaacactggcac

SEQ ID NO: 12528 - DNA, 897 bp, Arabidopsis thaliana landsberg
aaatgttgatgattcaactaaaaacctgttctagtctcaaacgagcttctgttctctccttctcaatgcttatccgtctctgttcctgcagattctgttgatcatctacgttgtgattctctggcatgtcctgagaataagtagatccgaaccataaaatcaaatgacaagtcacagtagaaaataacagactgtagtactctgttctctcttcttctagaagtcacataactaggtcttgtctcagttttttaaacctgtaatctctgttgttgcagattctcttgagcctctctcctctgcctctcaatgctatctctctgtctctgttgttgcagattctcttgagcctctctcctctgcctctcaatgctatctctctgtctctgttcttgcagattttcttcagcctctctcctctgcctctcaatgctatctctctgtctctgttcttgcagattttcttcagcctctctcctctgcctctcaatgctatctctctgtctctgttcttgcagattttcttcagcctctctcctctgcctctcaatgctatctctctgtctctgttcttgcagattttcttcagcctctctcctctgcctttcaattcgttcctgcagattcaatcaaagctgcgattctcttgaagaaaatgcaaaacacaaactgagaacaaagtcaggtctattcagtttaccatcctctctcgctcgaatctccactctgtatcatggtgtcttggatcacgcatttgaaaatccggaacaatcttggactgagaatgaacaacaatataagcaactagtaacggtaaacaaagaaaggtcacattttagtttacttaccctcttctctggcctggctcctgagtactctattccatatctcctttga

SEQ ID NO: 12529 - DNA, 1398 bp, Arabidopsis thaliana landsberg
  unsure (1)..(1398): unsure at all n locations
gatgcttcctactgtgacattatttcggtaagggtgcgttttgttttactttttgttttcggaacaataacattatgttgatatattttaaaaatctaatcttaaatagtgcaaaatcttggttatttttcttaattgctttcactaaactgaaatgtaacaacattttggtattggtgcatttctactgggaccatgagattgacaaagaaaacctgtaacgaaataattgggagtttaagtttagaaagttcaaaagaagtctctcataggttaagctgtacaaattacacatgagtaaaacacattactccaaacataataagacgttacattatggccatgtaactttttatgttgccaaatgaaacccacaccaaccacttaaactaccaataatcttttctttctcaagttaataacaaatgaaaccacaatgcaacatcaaacaccattctctgatcagaagaatccaaatagcttcgttggagcagttccggtggcacggtactttgcagccatttcttcggctttgagaacatcttctccgcgtttagcttcggtcatcgctctcttctcctcagcttccttgtggatttgagctatcttgttcttcatttgctctgtgtagtgtgctttcttcttatttagttgctcctgtcatcattcatatttccagcggataaattagaataatgtgaaaagtggaaagcatttcatgtaaaagttaaaaatataacaacaaaattgaaagaataaagaattacacttttacctcgatcttttttagctcagcttccacagaagctttcttgctgatttcccaagctccaactgaagaaatcttcttctgagctctgtttcataaagttaataaatgagattacatacaaatatatttggaacacaaaaaaaaatatcatggaactaaaaatttggaaattcatcaaaacaatggattatataaacttctttaggactcacttgttctccactntggatttctcagcctcttcccaagctttgattagagatatcctcttatcttgctcgagtctaaccaaaacagcatcttcatacacacacaccatgaattatcagaaaaaaaaaatctagagaaaaatgaactaatattatcatgtaaattactgaaattagataaacttaattaatattttttcttccgcaggtgaaatttttggctgaaagttagatattggataaacttcactgatattaactattattatcaggtaaaaaaatcaaataaaaagttaaaatatcttgttttcctggttatgtatcaatcatgatctaactataacgttgattacctcggggaactgaacctactntcttgtcttccgtaggtgcttctgcaacaacaacaaaaattga

SEQ ID NO: 12530 - DNA, 1291 bp, Arabidopsis thaliana landsberg
gctatgagaggacaacctatttcgtttgatgaggctaaaccgattattactggtctatcagctcttatctacaaggctcaagatgcacattatgatattgccaccactatgatgaccatgaaatctcacatccaagcacttgaagagcgtgcaaatgcagctactgttcagaccacaatatttgggcaattggttgctgaggcattaccaaagagcctccactgtttgacgataaagctcacatctgattgggtaacagagccatctcgccatgaactggcagatgagaacagaaactcacctagacttgtcgacaacaacctctaccacttctgcatcttctcggacaacgtgattgccacctcggttgttgttaattcaactgtctcgaatgctgatcatccaaagcagcttgttttccacatagtgacgaatcgagtgagctacaaagctatgcaggcctggtttctaagtaatgacttcaagggctcagcaatagagatcaggagcgtagaggagttttcttggttgaatgcttcatattctcctgttgttaagcaactgctggacacagatgcaagagcttactatttcggggaacagacaagtcaagatacgatttccgagccaaaagtgaggaacccaaagtacttgtcattactgaaccatctcagattctacattccggagatctatccacagctagagaagattgctttcctagacgatgatgttgttgttcagaaagatttgactccactcttctccttggatctgcatggaaacgtcaatggagctgtggaaacatgtcttgaagcctttcaccgatattacaagtatctaaatttctcgaacccactcatcagctcaaagttcgacccacaagcatgtggatgggcttttggtatgaacgtttttgatctgatcgcttggaggaatgcaaacgtgactgctcggtaccattactggcaagatcagaacagagaacgaacgctttggaaactcgggacactccctccaggtctactatctttctatggtctcacagagccactggacagaagatggcatgtcttgggtttaggttacgatgtgaacatcgataaccgtctgatcgaaacagcagctgtgattcactataatggtaacatgaagccttggctaaagctggctattggtaggtataaacctttctggtaaagcttttgaactcgagccatccttatatacaagattgtgtcacagcttaaagcataagacgttgagagttgagggctatcaatatcagaag

SEQ ID NO: 12531 - DNA, 730 bp, Arabidopsis thaliana landsberg
ccacctttttactcatttcttctacctttgatggcttggctcgtgcacgggccaaacccgattggaatcaacactgctttggctcagcttgtagtttcgaggccggtttttaggttaccatatgtaccattgccactgtctaagaggcttgagtttgtgaaactggtgaatgagattggacgagagcattttgtgggtgagaaagatgttcaggctcttgatgatgatgattttatccttatcggtcgatattagcatacttttttttttgaatttttggttcctttgtgtttggtgttaatgaagaagagatggttctatcatttggctatatgtagctgatgaatgaatgaaaactcaaggaatgatttcatcatatttcttagcttgttttggtctctgatcgctatgttctgcttttatactctgttttacggttgcctcaaaggagggagatagaaacggcacgcatgtttgataatattgcttgaaacagcatggctttgccatcttggaacggtcacggcatcgccatgtgaaaatcattaattttgttggatactcggaatccaaaaatttaatattaaggtgattttctacgatgtatggggtgcccacgtcacgtgagatgttcgagccatctgtgaaattatccccccggattatcagttgtaatccaaacaaaaaaaaacagtgattcaccatattagctaaaggctcagcacggcat

SEQ ID NO: 12532 - DNA, 751 bp, Arabidopsis thaliana landsberg
agattgattcttttactctgtctcgtctcttcttccttctcctccaccacttcttcctccaactccactgccgccgatcaaactctccggccgcaagaagagctccagaagctaacactgattagacaagaactcgacaaaatcaacaagccggctgtgaaaactattcaggcaatttctctattctcaaatatctcaatttgataaatgtatatatatacagacatctttgtttactttgttactctgtttcgactctgtttttgctctgtttttactctgttttgttaattaactgacatgcaagttttgttactctgttcttactctgttttttgctctgtttcttttccatgtgttatgtttgcagagctcagatggagataaaatagattgtgtttcaactcatcagcaaccagctttcgatcatcctctcttacaaggacaaaaaccattggtaaatattattttccctcctcttctccattttatctcttttcattagtattcttatcaaagatttcaaatgttcttatttaggatccgcctgagataccaaaaggatacagcgaagatgatggatcatatgaaaactcccagctttggagtttatccggtgagtcttgtccggaaggtacgattccgataagaagaacaacggaacaagacatgttaagagcaagttctgtccaaagatttggtcggaaaatcaggcgcgtgaagagagattccacaaataaaggacacgacg

SEQ ID NO: 12533 - DNA, 770 bp, Arabidopsis thaliana landsberg
ctttgacagtgaaatggaaaactaacaaacttggaaggtatcctacattaatgaacctagtgtggacagcttgttacctggcaggtattctccatcggtggcacaggactgatcttcgagctctcctctctattctcaaatgcaataagcgttttgggactcccagtggttcctatcttggctgtaatcattttccatgacaaaatgaatgggttaaaggtgatttctatgatcctagctatttggggtttcacttcctatgtctaccaacaatatcttgatgacaaaaacttgaagaaaaatcatggaatcacaacaacaaaatcctctgacccaccagaagcagaagagtcacgttggcaatcaaaataagctgatattttgaaatatgctgtcccgcagtttacagactcaatcaatctagttaagtaaacttactttacttatcggcctggaggcatcctacattgaagaatacacaatacatttttgatgcaactaatgtaaagtctcagcttgaaattttttgcatcattgtaacaggaagtagatttcatttaaataagtagtgaatgactctggtttagtttcaattacgattacccaaattacattgtaatctcagtgaaccaacaatcttaagtttagaacagctgattacaaaagttcatcgtttaaacttgggttcatagcagctaaagattaaatgtaactcaaccctgtatgtaacaagaacctgtaagcagattgataaaagtagatatttattt

SEQ ID NO: 12534 - DNA, 575 bp, Arabidopsis thaliana landsberg
  unsure (1)..(575): unsure at all n locations
tctctgtctccggccgccaccgcgcttaacccaaattcccggccaccgctatcgccccctatnnnnnnnnnnnnnnnnnnnnnctgcaaggtcatcacgcacccagccaccagatatcgtcctcaatcgttcgcctgagtgctcgaattttggattccccccaattcggtttccgccgccgcgatgaacacctccccgtggccagcccaactcaggttagtcccagtgtcccagttgcttgttctagcgtccttagaccctcttcaagccctatgacccacctaattgagctagaccaccctgggttgccgtgaacgcttgtgttcttcccgatacccgcggtcatcgtggccagcacaacccggttgatcattagtgaaattaagttgggggtaaggtttgggatgagtccaattccgtgtccgtcgctcgggaaccctagtcgttgccttatcccgccggtctaggagctcgccggacttcggccgcgctcggccagntcgtggacttcaaatcgtgaatagatagaaccggaggtctttttgtgaagtgtcacgactcctcaaatagtgaaa

SEQ ID NO: 12535 - DNA, 596 bp, Arabidopsis thaliana landsberg
acttatatcatcacaaaacccacaaatatataacttatcatttcatatatctccacaaataaataacttatcagaacaaaacccaaaaaataaagaagtagagactttctcattgttatctaatagtcaaggaaaaagtattcaacatttacaaaggttgtttttatatatggatctttctagatattcatatatatatttctactttctttgaaagtgtgttgtttaccttcacgatgatcaaaagaagagtcccatgaggttttggagagagaagcattatagccctcagatctgagtttagagacaatcttgttcatcacatctctcttctcatcgtctccttcatatgataaccttcctctattgatatacgaccttatcttctcttccatctccttctcttctactccttttgccctaagaatctcctgtaaaaatatttcctgaaaaaaaaaacctttttatcttgaaaaaaagagaagagaaaatgtatttggtgaaaagagatatgtagagacctgaagagtgataagagcctttgaagaagtgttgatatgctgagagacggtcatcggagactcgatataaccgag

SEQ ID NO: 12536 - DNA, 525 bp, Arabidopsis thaliana landsberg
atttagacgaagcttgtgctcgattatattgagtctccgatcaccgtctcccagcatattgagagttctacaacggctcttatcactcttaaggtctctacatatctcttttcaccaaatacattttctcttcttttttctggataaaaaggttaaacctagctagaaatatttttacaggagattcttagggcaaaaggagaaaaagagaaggagatggaagagaagatatggtcgtttatcaatggaggaaggttatcatatgaaggagacgatgagaagagagatgtgatgaacaagattgtctctaaactcagatctgaaggctatgatgcttctctctccaaaacctcatgggactcttcttttgatcatcgtgaaggtaaacaacacactttcaaagaaagataatatatatgaatatctagaaagatccatataaaaacaacctttgaccttttccttgactattagataacaatgggaaagtctctatttctttacttttttggcgttttttatgat

SEQ ID NO: 12537 - DNA, 701 bp, Arabidopsis thaliana landsberg
  unsure (1)..(701): unsure at all n locations
ggaagagagctagaggagggaattttttagtcatgtccccagaaagataaggcctgcgcttatatacccacaacctaactttgtaaaccctaatggggcttcttcttctttnnnnnnnnnnnnnnnnnnngactactacatggctgagtgctacaagaagacggagaccataaacccacctaacccttatcaccaatggtctccttcttcgttcttaacggagtacacacaccctaggatgcttgaggggttacatcgctgtggattcaacagaccagtggtaacttgttattcaaggacggccagggagatgcggtggtggcttcgccaggtgatgaaagacatgagagcagaagacctaacacttatcttagagaagactctgtccacaactgatgtgatcacaacgacacatggccgtttctcaatgcctttcaacagattaatcagtaacgacttcttgaagcctgaggagcggagtatcctagaagaagatacctacaatgatgagacgatgggagttggagccattctcgtggatcaaaggtctcaaaagtggagtgtgattttgaagagatggggccagaattactttctgagttgtggctggaacgacgttgttaaggctaataaattgaaagctggcgacgacatctgtctttgggcgtttaggtgccatggagacctctgttttgccatga

SEQ ID NO: 12538 - DNA, 966 bp, Arabidopsis thaliana landsberg
cgtatgtctgtatatgattttaactttcctgtgttcacgtaatctttgacatctttttaatacccttgacatgctcattcatagcaccaagtatatatgagattgaaaatgtctttcaaatttgcaagcattatatgcgaccatgcatcggatcagattagctgcaatacactgatactgatcatctctgtggcatttaaaatctaggcaaacggttttcagctacgtacgtttatactaggccaattctctcatattgccgctgattcactttgagttcaaattgtctcggtaattttggcctcatcaagcttcttagcttcttcatcactacctccctttgttttgtatccttttgttgagttttttgctttcttgtttttacatatgctactaaatactaatattgttcctatttgtatttctagaattgtacattgctgctatcaatagaataacatttatcaaaggaatacgtacgtaagattataagatattaaaatctcaacagaaggttcttttcttgtaaaaatcgaagtaagagttattaaacaggaagaaaagaacaagaagataataaggtgataaacatagaccgtagaagaaggtcaaaggtcaagaggaagaataaatcgttagaagaagattgtgaaagaatatagtagaagaagaacaataaatgtgagacaaaaaaaagcggccaagtaggaagactccgattaaactatatgagctcaaatgattttaagtcatgtttgttttcattgaagtttatatcttttaagtacatcgaatgctagattattgatataagctattatcatttaggttctagctcaaatttcctatcatccaactgtttatacataattttcaaatcatcatgatgttatcaaaaccatgtaaaatttattgtagaatcgagcttacgaacacatgctccgcttttgaggtcattttaaactt

SEQ ID NO: 12539 - DNA, 956 bp, Arabidopsis thaliana landsberg
  unsure (1)..(956): unsure at all n locations
gcaggaccaaaatcagagatgttcgcttcataatcctcgccgagttgaatatttccactactaatatcacggtgaacaggcgccggagaccgatcatgatgcatataagacaaagcatgagccacacctttcacaacgttgatcctctttccccaatctaacttcttcgcttcatcatcattctccaaaactttcctcaagcttcctctctccatgtactcgtaaaccagaaacgtgttgcggcgatgcgagcagaatccgaagagtttcacgacgttccggtgacggatctcggttagtgctctgatttcgttgagaaactcttgttttgttgatggatttgagattgatgagtctgttgtttcgtttagctttttcaccgccatgattgcgtttggtagctttgctttgtagactttgccgtgtcctccggttccgattaggtattttggatcgaattctcctgttgctttgatgatctcttggtatcggactttgccgtcgaagctgaagattgataatgtttctcctcctgattctgaatctgtatgctcctcgatttgttttgttcgtttacggaaacagatgaagattccggcgcagacggagaggattatgattgctccgatgatcggaactagtatgtagatgattaggtttcgatccttgtgtgatttctttgaggatgtgattgaacatggcttcaagccttgtgtggtgttaacactaccacataagtctttgttaccttcaaaagcatctggaggtgcgtttcgaaacgctgcgttatctggaattggaccttggaggttgntgtgtgatacatcgacgtgtgttagtgctagcatatctttgaaacttggggggatttgacctgagagaatgttgggtgagaggtccagtctttcgagggtttggaaagatctgaaattgggatgagatctctccgtcgagct

SEQ ID NO: 12540 - DNA, 120 bp, Arabidopsis thaliana landsberg
taaatgctaagcttgattcagtccatagcttactccaattgaagaagcacgtccactttgctgcagaagcagagacgatagagcctgagtctaagtcagaggaaggcgtattctacattg

SEQ ID NO: 12541 - DNA, 1227 bp, Arabidopsis thaliana landsberg
  unsure (1)..(1227): unsure at all n locations
gaatgaagcttaacagattgcgtcatggagtaatgggagcttcaagctcgcctgcgctctttcctttcgataatcccaggtggtcctgaggatgtggtttaccatggggatgcaatacccgatgggacggtaaacttcaacaacgtagagtatatagctcgtgttggttgggtgtttgggttacttatgctgagaaagtgcctctctggaatcctaaaactggtaagcctacagattttagtaccagtttctcctttaagattgatacccgtaacctttagaattacggtcatgggatctgcttctttcttgctcctttgcggattcaacttcctgtgaactcagctggtgatttcttgggtctttttttctcgaatcgagagctacgcatcttcgtttccgctggttcatatcgagtttgactcattcaataaccaagaatgggatcctaccactgttggatctcatgtgggaatcaataataactctcttgtttcgtctaactacacttcttggaatgcaagctcacatatccaagatgttggtcatgcacatatctcctatgactctgttactaagaatttgagtgcgtcttgggcttatgaattaacctctgatcctcaggagagtttaggcatttcctatatcattgatcttgcaaaggttttgccaccacatgttacggtcgggttttcagccgctactggatcggtcacagagggacataagcttttatcatgggagttcatctcaagtttggatattgaggtttgttataagggatcttgttttagctaccaacagattctcagcccagaggaagcttggtgaaggagggtttggggcagtttatagatggtacttgaacgaaatagatatgatggttgctgtgaagaaattgtctggtggttccaagcagtgaaagaaagagttnnnnnnnnnnnnnnnnnnnnnnnnnnnnnnnnnnnnnnnnnnnctggtgcagcccattgtgttggtgtaatgaaaaagatgagtatttgcttatatatgagttcatgccgaatggtagcttggacactcacctctttgagaaaagaccccttatctcacctaggacacagatcttcacggagagggagatcggtgtgtgttgcatacggacatcccggcaagcaatatcatgttggaaatcaattaaaatgtaaaagtaggtgactttgggctggctcgattgatggaccatga

SEQ ID NO: 12542 - DNA, 616 bp, Arabidopsis thaliana landsberg
aattgtgcagtattatttgttagaaaatacatccacgcatcaggttccagaatatcttcgatttagaaaatatctcttattcttcagggacttcgagaatttcacctgatttcagattatcctcaaagatccttccttatcatttctgagaataccggaaatgatcccgtttttccggaagtgatcctttgagcgtgattagattttaaaaggctttgtctcgcgtattcttgaggtttccccacggagtacttcttcgcagttcagtgattgttcatgaggtggcttcagggtaaccggtacactttggcttggggcacggtgatgactatccctcgtgctcaagtgactatctcccgaggcgatataggcggtcctcgaagcgttctcacaatcggcttggtttgtgtttctaagattaactcccgagccgttttacggacttactcccgaggtgctttgtgattgggctcgggttcaatcatctttttaaccccgaggtgaccatggatctttgttatttgtctcggtctcattcgtgagggaacccgacctaaacataagataaataaaaagatcctttgtcaaagacttaacatggtccttgatgtgtgct

SEQ ID NO: 12543 - DNA, 1037 bp, Arabidopsis thaliana landsberg
  unsure (1)..(1037): unsure at all n locations
catgcaaccctaaaagagagagaagagcagtttaacataaagtccagagatcggtggaaaggtctgtccgatcagcggtccaagtgattcttcactggtcggcataaatcatctaccgaacagacattttaattgatcttttcgcttaagatatattttggtccatttcgtctttctaatgcttattttagttctagaggtccaattttttaaaaaaggtttatttataaaaaaatatttgtttttgaatagaacactcaataaaacaagtaaaacaaaacctatacaatgtgttaaattaccacttgacaggaatgtctttacaatatgagttcaatatagggattagacaccatttttttttaaacccatataatgaagcgaagaagaatgatgatattactacaagaaaactcttgttttcctaccgctaaaatcgtaagaaaatggtaggaaacatagctttcctaccgttttcctatcaaaaaagttcgtaggaaatctcccgtaggaaatcgattttggtaagaatttcgtaggaaatttcctaccaaaatatttcgtaggaaaattcgtaagaaatttcgtaggaaagtaaaaagatatttttaactattttcctaccaaaagatttgtagaaaatatatttcctaccattttccttcctaaatttcttacaattttcctacaacttaataaaaaataaaataatactaattaatttatttttattaatttgttaatttcaaaattaaatagtaacaaataaaataattattaattaataatctgaataatatattaaaaatcaaattattttatacaacacaataaacaaattaaatgtctaaaaaaacagtngagataaataaataaaaagaaagtctagagcatggttcaaaatttggtctcttctttaaaagtacatccacatcgaagaccttcgacattatcaagagcaagcgacatcatggatccggacttaacaacacaaacctgcaaggcataacaaaaatcattgtgctggagctttttta

SEQ ID NO: 12544 - DNA, 552 bp, Arabidopsis thaliana landsberg
catattgcgcacgccattgtatctggcaaagctgagaatgtcttcagcataccatacccaaatttgtggattttattggcccaaatctagcccatatgttatatatccaggcccaatttatctgtcaagagatggggaatctcttacgatttggtcggaaaatgaaaacggagcaagacagagagataatcggagattccaatttacgatttggtcggaaaatgaaaacggagcaagacagagagataatcggagattccaattttctgtgttaatttcgacaagcatgcatttattaaccaatttgtgctcaaaaatagaaaacaaaacaaaatttggtacgtgaaaagaaaattttcaagggattgtttgtttgtttctgttcttcttcatcaatggcgaattcaaggatttatccgcaattcttccacacacttgttcctagcttccacactcacttggtaactatctcttgttctgtcggattagcttattcaaagattttcttctgttcattggtgatttgtgttggtggagataatccctgaagac

SEQ ID NO: 12545 - DNA, 820 bp, Arabidopsis thaliana landsberg
ttctcgaatcttggggcgtttagtaaaggtaaagcggctggttataagttgatggagataattattcagttaccgacgataattcaagacccgttggatggaaaatgtttggaccaagttcatgggaacattgagtttaaagatgtgacttttagctatccttcacggcctgatgttatgatcttcagaaactttaatattttctttccttctgggaaaactgtggcggttgttggtgggagtggctctggaaagagtactgtagtttccctcattgagagattctatgatccaaacagcggtaatttgatcgaatttgttttttgctatttgagtctttggctagtgactggatcataactttgttcattttttcttgatgagcagggcaaattctgttggatggtgttgaaataaagactcttcagttgaagtttttgcgtgaacaaatcgggcttgtgaatcaagaacctgcgctctttgccactactatactagagaacatactctatggaaagcctgatgcaacaatggttgaagttgaagctgctgcttccgctgcgaatgcgcatagtttcattacattacttcctaaaggctacgacacacaggtataaatcaaatatttgattatatgtctagttaatgtcatggccttttgcttaattttttgttgaatgtcaatacaattaggttggagaacgtggtgttcaactctcaggtggacagaagcagagaattgcaattgctagggcgatgttgaaagacccaaagattctgttactagatgaagctacaagcgctcttgatgctagctctg

SEQ ID NO: 12546 - DNA, 970 bp, Arabidopsis thaliana landsberg
gtacaagagttccgaaaatgtaacaaggtggattattgaagcttttaatttaaataatgtatttctgattagtttctgttttgattttatatattaaccaatataatttgtggacagactcaagacggtcagattgggatagtgttatctcctttgtggtttgagccttacgactctgcttctcctgccgacaacgaagctgttaaacgagctcttgccactgaactagattggtataagttgttatatactttagataagtaatgttatctttatagtaatcataagatatttatttatatttttcgaatgtgtgtatcaggcatttagatccagttattcacggagattatccagaaatgatgaagaaacttgccggaaatagattaccttcgttcactccagaacaatccaaaatgttgaaaaattcatcggatttcattggaataaactactatacagcgcgttacgttgctcatattccacaagccgatcctgctcgtccgcgattcgtaaccgatcatcagctccaatggcgaggtaagattgctaatgttaacatccgtacgaccattctctttgtatgagattcaataaaattcctaaactagttttttttgtctgtttatgaacagtaacaaatcacagtaatcaccaattcggaccaggggtacgtaacatttttgactagttttgttacaaaatcaacgttgcaattatttttactttttattaattgatccaaagattctaataagaagataaatgcttgtttttgaaaaacaggaagatcgaggcatacttcaatcacatcctgaaggtttacgaaaagttcttaactacatcaaagataaatacaacaaccctatagtttatatcaaagagaacggtaagaatattttacgaatttgtttttttttaatctattaattaaacagtttcctctctttgttaattgccaaaatatttt

SEQ ID NO: 12547 - DNA, 393 bp, Arabidopsis thaliana landsberg
gtattaacttacgtcctcttttaaaacttatgtattcatattctctattctgtcgttaaaatcgttattaatactaaaacccggccttttgtttttatttttcagcaaaaaaaacacacacacacacatttagcaaagtccaacaagaagaaaacaccatcaaaattccttataaattaatcaaaacactagctagacacaatactaatcaaactaatgtcgacttctaagaccataaccttcactctcttcatagcaacactactctcgccctgcaacgcagccacaaacgctacaacgcaaccgctatttccagcgattctaatctttggcgattcaacagttgacacaggtaacaacaactaccactcacaaacaatcttcaaagccaaa

SEQ ID NO: 12548 - DNA, 499 bp, Arabidopsis thaliana landsberg
catgccaagacggtgcgtttcgatggcgttgacttggatcttggtttcatggtctttaatcgtgtacgtattcctttcactttcgctcattttttcatagtttataatgaagttatatatatatatatatataaatatggaattttattttatgttttcgtgaaaaaatgtgatgataattgaagctttttgccttatcctgtccactttggtccacaaatggaccataccttatgttgtgtttttggtttcaatgtatatcataaacctttttatttttgccaaatttctgatttactttgctatctaaagttttgaataaacggtacttttttatgttttttctttgtttctattttgtgttcacctgaatacacggaacttggattatatttttctgtccaaatctagaaattggaaagtaaaaaaatttgacatacgaatttcagtttggtgtttcttacaagtcgaacgtatttttgatgttacagaaaaaatg

SEQ ID NO: 12549 - DNA, 532 bp, Arabidopsis thaliana landsberg
  unsure (1)..(532): unsure at all n locations
tctatttgaataccatgtagggtctgatcgtacgacaacagttatttcgaaaatcaaaaattaagtttgacttaattaaaaacaccaaactaaaactcataggtcaaaggaaaagaattccaatagctagatttggacagattaataaaaaaataatccaagttctgtgtatccaaaaattctagaaagcaaagtaaaacataagtttggcaacaaataaaaaaagcttataatctacattgaaagttgaaaccaaaacacaacacaaggcatggtccatttgtggaccagtagacatataaaggcaaaaagcttcaattatcatcacatttttttacggaaaaaaagaaaattccagaaatgtattaacttattataagctatttatttcaatgaaaaagaaaaatgagcgaaagtgaaaggaatacgtacacgattaaagaccatgaaaccaagatccaagtcaacgccatcgaaacgcaccgttttagcatgacctnctaatgactcttcnttctcgtataacacaact

SEQ ID NO: 12550 - DNA, 1100 bp, Arabidopsis thaliana landsberg
gaaaatctaaggatggtcttaatgcacgtaaggatctttatttatcttggtctacgacacgctttgcatggtggcacacaaggaaagagaacataccttccagcagcaccttggtccttgtcgaagaatgagaagaagattttctacaagcgactatttgattttaaaggtccagacggatactgctctaacatttctagaggcgtgtcagtaggagagtgtaagatatcaggtctgaaatcacatgattatcatgtcatgatgcagcagcttcttccggttgcacttagaggactgttaccaaaaggtcctagaacagctagactacggctatgcgcattcttcaatcatttgtgtcagagagttattgacattgaggttatttcagtattagaaactgaaattgttgaaactctttgcatgtttaagaggtttttccctccaaccttctttgatatttggtacacttgacagttcatctaggaagagaagctagattaggaggaccagttcattttaggtggatgtacccatttgagaggtaaatcttatctctattagtaattaaacacttatattatctagttattgttttattattgctaatccttacattttcattttacagatacatgaaagttttaaaagattttgtgcgaaacccagcaagaccagagggttgtatagctgagtcctatcttgcagaagaatgaatgcagttttgtaatgagtttctgaaaaagacaaccaatgtagaagaaaagctagacaggaatgtagagtatgtgaacagctctatattagaaggccgtccaatatcagcaggaacatcattcacgcttactgaaatggacaaaaatatagcccatctagctgtcattcaaaatacagctgcctttgatcattatgtggagtaagttccttgtgtaattttccatatcaaattacatttatctagctgattctaactcaaggtgtttatgatttggtagtatgcatttgcaatatttacaagactcaaatacaacgtgcagacgtgatgcttcagttttatgatcatgcatgctaaaaattaagctgcttggttaaaaggagaggca

SEQ ID NO: 12551 - DNA, 1214 bp, Arabidopsis thaliana landsberg
  unsure (1)..(1214): unsure at all n locations
aggtacgcccattttctagtctatatgcatttgaatatcaagtatgtaattgagtaccagttccaaagtgatattattagtttcaaacatatgttcagctcatcttcattcttttttgtgttcatatattctgaagagctaaaagacttgagtaatctagaactgttggatctaagtgggaacttgctcaatggccctgtgccaggtactactaaagtttttattcacctctcatttctcttttcaaatattcatcttagttaacctttgtcaaaaatatatatactgatggcaggcttggcggttttgcataagcttcatgctttggatttaagtgacaacacattttctggatcattaggaagagaaggtatgtatcatgaaaattaatttaactattattgatacagntattaacctttgaacccaaaaaacaaaaaaatgagagtttatattcacgtgtttgacaaaatatatggatacgagtttatttttagtatatacatgacagttcatcaaaatatccgtgaacaaaagatgatatacagccaaacattttgtaaaccgggcatttttctaaaaaaaaataggttctttagcattttaggaattatatatatagtagtttgcatataagtattttttaaattattaatttgtcaaataatttttaaaagaaaaaaaacattctaatcttaatgtgcctttgcttgtcattgttataggactttgtcaattgaaaaatttgcaagagcttgatttgagtcaaaacgaatttaccggtccatttcctcagtgttttagtagcttaacccaactccaagttcttgatatgtcttcaaaccaattcaatgggacgcttccatctgttatcagcaatcttgattctcttgagtatttatctctctcagataataagtttgagggtttcttctctttcgatttgatcgccaacctttctaagctcaaggtgttcaaactttcatcaaaatctagtttgctgcatatagagtcagaaatctccctacaactgaagtttcggttgagtgttattgatttaaaatattgcaacttggaagcagttcctagctttcttcaacagcagaaagatttgcgtctaattaatctctccaacaacaagttgaccggaatatcttcatcttgtgttttggagaactatnncaaacttcgagttttgcttttatggaacaact

SEQ ID NO: 12552 - DNA, 1033 bp, Arabidopsis thaliana landsberg
tatgagacacctttgctttacagtggtgtatttggagagggcgttgtgaatgatgccacatctgttgtgctcttcaatgctattcagagttttgacctcacccaccttaaccatgaagcagcttttcaatttcttgggaactttttttatctgtttctcttgagcaccggacttggtgtcgcagtaagtccattttcttctctctactgctctttcgtctggctactacttccacgttcctctgttaactacaatttttttgttattcatcttgcagactggtctgataagtgcttatgtcatcaagaaactgtattttggaaggtagataattggctttagctcatatgtgactttatctctattagtcttctgttatgtagtctaattgggtatctttcttaggcactcgactgatcgagaagttgccctcatgatgcttatggcttatctttcatatatgcttgctgaggttagttttgtgaaattttataccactgtcataatttaggcatggagacaatcagttgtatcttaagaatcctttattgataatatattgtttgggttgcagctattcgccttgagtggtatcctaactgtatttttctgtgggattgtgatgtcccattacacttggcacaatgtcaccgagagctcaagaattactaccaagtaatatgacctccattttctcttgaaaacaaattcaaatgttttccatcttcaatacttacttactttctatgcatttacgatgagacaggcatgcctttgctactttgtcgcttctcgctgagacttttattttcctctacgttggaatggatgcattggacatagagaaatggagattcgtgagtgacaggtatggtcactcagtagaaacataaactctctctttgttcattggctatatacataatcttcttatgtttccattgcttggttttggacagcccggtgacatcaattgcagtgagctcaattctaatgggtctagtcatgcttggaagagcagcttttgcctttc

SEQ ID NO: 12553 - DNA, 811 bp, Arabidopsis thaliana landsberg
gctgccccacctagaataaaaacatatccagtggatttcgagtttttggaatcagctatccaattggcatcgctatatctttctaaaactgctggttctttaccgtagtgcaagccataactttttgtgtcttaaataatttaacactcttgttatgcctttccagtatgtatgacatgtattactggtgtaccgacttaatacatttgctgcatgcgctaaatcgggtcttttacaatttgttaagtacataagacttccgataacccgtgcatactcaatctgtgatacagcttcatccgaacttttcctcaagtgaagttgacaatctacatgagtttttgcagttcctttcgagtagtttttaaaccgctctaatatcttttcagcctaatgttcttgagacaaagttattcctttaggagttcatgtgattttaatccctagaataacatctgctaaacccatatctttcatgtcaaattgactatgaagcatatttttggtttgttgaattatatctttagtgctaccgaggatgagcatgtcatctacatatagacataataaaacatatgcattacgagtacttttaacgttaatgcacttgtcgcattcattaatgctgaaaccatttgacatcattacgctggcaaatttttcatgccactgtttaggagcttgtttcagtccatataatgacttcacaagtctacagactttgtgttcttgtcttgggagtacaaacccttcgggttgtttcatatacaatagaacctctataaattaatattctataaattaataacgt

SEQ ID NO: 12554 - DNA, 1501 bp, Arabidopsis thaliana landsberg
agcaacccgtttgtgaggtaatggacaagcgtcacgtagtttgaaagatgagaaggaagacaaaaaggcatagacaggagcaagagaaggagcggtttggtacctgaagctgaaaaagctttaagagataaacccggaaaaaaaaaagagaaatattttaatcaattcttctttatcacaaagagtgcctgtgtattaatgagttttgatgttgtgtaatgaatacagacataaccgtcgtgtctcgtcgttaaagaaacgagagtttttcagctctttacttaccttttcttcttacccttctttcatgactcttcttctttgatgggttaataatgctttgagcttgatgatttcgattttagtttcctgttagtgtttgttttcttctgtaaagcttggattttttttggtttcttcgatggcgaatgtggaagctgatttcagaacatcaggtgagttcaaattttgacttcaattttctcaagttttgaattttctttttctcttgggaaaaagtcaacatttttaactctaatcatgagccaaacaagcttagagccacttataatttctattataaagcttcaaattttgcaactttggttgaaattgatagctgttggttggaatttagggtctaatgatgatgaattgtacacggagctatggaaagcttgtgcagggccacttgtggaagttcctcgttatggtgaaagagttttctacttccctcaaggtcacatggaacaagtaaagaatccaaactcttaagattattccttgttttgtctttctcaagttttaagatttgaatgtttgtcttttggcagttggttgcttcgactaatcaaggagttgttgatcaagagataccagtgtttaatcttcctccaaagatactttgtcgtgttcttagtgttacgttaaaagcagaacatgagaccgatgaggtttacgctcagatcacattacaaccagaagaagatgtaagtttaaagaatcttgaattaatgtgataaattcagtgaatttgatttagattttgtgtgtattttattatgcagcaaagtgaaccaacaagtcttgacccacctttagtagaaccagctaaaccaacggttgattcttttgtgaagattctaacagcttctgatacaagcacacatggtggattctctgttcttcgtaaacacgccactgagtgtttaccttcacttgtaaatgcttttatctttccatcttcattttacagagtttggcctttcttagctgaatttgtcactttatgttttgattttgattttccttacctaggatatgacacaacctacaccgactcaagaacttgtagctagagatcttcaccgctatgaatggaggtttaagcatatatttagaggtaacagaatctttaagagagtctcttgaagcttcttttagagtctaataagtttggcttatttggatagggcaacccaggaggcattttcttacaacc

SEQ ID NO: 12555 - DNA, 4360 bp, Arabidopsis thaliana landsberg
cgaaaccaccgacctcgataaacctgacgatgacgctttctattaatgatcgacacgggaagctcagcggacgtattctattacgacgcctgtaaaagaatggggcacctgcagtttgagctgtatgggaagaaaacgtaacttaccggggtcgctggagatacgaccttttctctaggaaccatccagctcccgaccgtcgcacgaggagtgaggcgactcacaagtttcctcgtagtcgacaagaaagctcctttcaacgcaatactgggaagaccatggctacacaccatgaaagccgtcccatcaacctaccaccaatgcattaaattcccctcggacaagggaatagcagtcgtgcacggcagccaacgcagcttccgaaaatgctatatgggcagctacgaccttatcaaaaaggctgaccccatagtacttatgatagaagacaaactcgcggaaatgaaaacagtcagatcctttgatccttctcaacgcggacctcaaaagtcattgataacacaggtctgcatagacgaatcagatcccaaacgatgcgttgggataggtcaagacctcgacccagcgatacgagaggatgtcataacctttctcaaagaaaacaaagacagttttgcctggtcaagtgcgaacctccgaggaataagcctcgaggtaacctcacacaaactcaacgtcgatccgacctactgacctataaagcagaaacgtcgcaagctaggtccccagattgatcgattgctcaagattggatcgataagagaagtaaaataccctgacagctcgccaacccggtcgtcgttaaaaagaaaaacgggaagtggagagtatgcattgactttacggacctgaataaggcatgtcctaaaaacagtttcccactcccacagtctgagagactggttaaggtcactgcgggacacgaactattgtctttcatggatgcattctttgggtacaaccaaatacttatgcgcctagatgaccaagaaaaaacagcttttataactgaccgaggcacctactgttataaagtaatgccctttggtttaaaaaatgctggagctacctactaacgattggtgaacagaatgttcgtcgaccagctaggtaaaacgatggaggtctacatcgacgacatgctggtcaagtcagctcatgaaaaagaccacgtcccgcagctaagagaaatcttcaaaatcctaaacaaaatcgaaatgaagctaaacctcgagaaatgctctttcggagttccatcaggagaattcctcggatacctagtaaccgaaagaggcatcgaggccaatcctaagcagagtgcagcctttattcaaatgccatcaccaaaaacggcacgggaggtccaacgactgactgaccgtatcgccgccctcaacaggttcatatccaggtccactgacaaatgcgtccctttctatcagctccttcgaaaggagaaaaagttcgattggaacgaggactacgaacaagccttcaagcaattgaaagcatacctgtccgaaacacccatactcgcaaaacccgaagaaggagaaccagtgtacctatacacggcagtttcccaaaccgcgataaggggtgtcttggtgagagaagatcacgaaggacaaaaactgatctattacgttagtaaaacattgatagacgttgagacccgttatccagcaatggaaaaactggcactggccgtagtcatgtcagctcgaaaaccgagaccatattttcaatcacaccccatcgtagtgatgacgtctcaaccaatcagaaccattctacacagtccaactcaatctggttgacttgcaaaatgggccatataactaagcgagtacgatatagaatatcgcaccagaaccagcttgaaagcacaggtcctagccgactttgtaatcgagctcccgttagcggacctggatggaaccaactctaataagaagtggctcctccacgtcgatggctcctccaaccgacaggcatccagagtaggaatacaactcacctcccccaccgaggcagttatcgaataatcggtccgattcggattcaacgcatcaaacaacgagtctgagtacgaagacttcattgttggcattaagctagctcaaggaatggggatccgcgatatacacgcccatagcgactcccaactcgtcaccagccagtttcacggggaatacgaagctaaagacgagcacatggaagcgtacctcaaactggtcaaaaccttgaccttgacccaacagttcgaatcgttcgaattaactagtatccccagaggagaaaacacctctgtagacaccttggcagctctcgcttctacgtcagatcctttcgtcaaaagaattatcctggtcgaaggaatagaacatccgagcatcgacctaacggtcaaacatgctggaatggaaacctcgacaacttgcaacttcacgcgagtaatccgaagcaccaccgccgcagctagagctctcgcagcagttgcggaggcaagtgcatcggaggaagagccagagctcgaaacccccgaacaacctgccccgtacgaacctgaaccgtacaacgactagagaatcccaatcatcgattacatcgaacgagggatcacacctcccgacaagggggaggccaaaaaactcaaagcccacagtgcaaggtactgcatcatggaagggagacttatgaaacgcagcgtcgcaggaccctatatggtgtgtacctatgggcaacaaacaaaagacctcatgaaaagcatgcacgaaggacaatgtggtagccactgtagtggacgtaccctcgccctcagaatcaaaaagcaaggctacttctggccaacaatgctagccgattgcatagctcactcactcaggtgcgataagtgccaacggcacgcacctactctgcaccaacctcccggggaaatgtccttaatattttctcctcacccgttcatgaagtggtccatggacgtcgtaggtcccatgcaagcctccggtgggaagaaaagactaaaaaaaccttctggtcctcatcgactactcgaccaaatggattgaggcaaagccttccaacaggtaaccgagaaataagttgaggacttcctatgggaaaatattgtatgccgacatggcatacaatatgagatcgtcaccgataacagaactaacctcacctcgggaaaaatcaaagcattctgcgacaagtggaagatccgtcttaccacgtccaccccccgttacccacaaggtaacggacaggcagaagccgccaacaaagctatacttagcaacatcaagaaaagacttgattctaaaaaaatcaatgtggtccgacgtactacacggagttctcagggcctatcgaactacacctcgcaagtcaacgcaagaaacaccgttgtctctcgcctatcatttagaagcagtaatctctgtcgaaaccatagtaccaagcgtgagaaggaccgccagtcctgttaactcagacctgaacacgcaaatgttacagaacaacatggacttcatcgatgaacgcagagatcaggcaatgatccgagttcaaaactatcaacaagctgccgcccgctactataactccagtatcaaaattcggagattcgaagtgggagagctcgttctacgaaaagtgttcagcaacacaagagagctaaacgccggaaaacggggaactaactcgaaaggtccctatcgaatcaccgaggtggtacgcgacggcgtctataagctagaaaaagttatcaacggagtacctgagttacggccttggaatgccatgcatctcaagaaataccacgaataggtactcaaaagcaatcgaactacgataaggcttgatcccttggcagggtacgtaggcaactccccccaagagcgcagccaccacttcaatcaaatcgcaaaaggacctaatcccttaaccaggtatggaggcagtcacctccgcaaacgcaattaccacctcaacccttccatctgaaaggcgaaacttcaataagggaaatagatatcgcatcccccatcaacaaatatcagctgctcacctgacagttcaacctctcttcggtatcgaccaggtccttgctcaatgaccaaacgccagattgtcgctttctttacctccttttgtacttaacaatttggagataagaataaaagaaaattttgatactcattatcatatttcgcaaagacagtcatttaccctatgatttaaactcattcgtaatcttacgatacccaaagcccaacggctgaacgttggcggatccattttttgatctcgcttccaaaaaggcgatagt

SEQ ID NO: 12556 - DNA, 647 bp, Arabidopsis thaliana landsberg
tgattaacgtatacttcatcttttttgtgcagcaaggtcagacagtggcatgtggcacagttgagcatgattctggaccagtatttgacaagactcctattgggagtgtttctgcaccaggcatcttcttatctgaattagaatgtgctcgcgctcttcgggcatacttgtgttctaaggtcattgaattggacaggtacatacttttcaaattgtttgacttggcataatgtttaattcttattaattctgattgaacaacatcgtggcaatggtatagatacaattaagttttattcaatctttgtacccaaagatttagccttgaatagaagcgaaaggaaaatagctatacacatgactgaactttgagttgtagcttctatagggtttcaactctaggtctctagcctaccctaacgtatctagtatttgttgttaaagagacaaaaaaaactagttcaaagcctagtgatttaaagcctgcaatgatctacttctagacgcataccagggtattgaatcaaagcttgtgtccccattcttctaaaaaatagcaatttttagactgaacgaaatgatgagaacactggtagccacattgcatagttagatgagaaaatacgaattaattaagggtattttaa

SEQ ID NO: 12557 - DNA, 785 bp, Arabidopsis thaliana landsberg
tgaaaaaacttttttgcagtccaaaaaataaaatgaaaatgtcttcggttggttccaattcctatctaagggtgattggcaaagtttgacttatgtaatatcctttatgtatttggagaatatattagcactactttatttaaaataaatattctttatcaaaaaagaatatatgaacactcaaataagatctcgatttagtcaattacagcataattgttgcaacacgttaatgtttcattttctgttcttttttgttctctttgttgcgtatctccatgtcattaaattgctaacactcgtttttagttgggttttaatttcatttcttaattaagactaaaaaattgattttttttagaccgaaccggttaatccgaaccgaagacgttcctatataaacccaattttgagaacagagcatcatcatcacacaaaaaagatggcaccagcacgaacccgagtcaactcactcaacgtggcagtgatcggagccggagccgccggactcgtagctgcaagagagctccgccgcgagaatcacaccgtcgtcgttttcgaacgtgactcaaaagtcggaggtctctgggtatacacacctaacagcgaaccagacccgcttagcctcgatccaaaccgaaccatcgtccattcaagcgtctatgattctctccgaaccaatctcccacgagagtgcatgggttacagagacttccccttcgtgcctcgacctgaagatgacgaatcaagagactcgagaaggtaccctagtcacagagaagttc

SEQ ID NO: 12558 - DNA, 675 bp, Arabidopsis thaliana landsberg
ttaggatctaaggagaggtctcatgtcgacccaacaagagagtcccgcattgctcttcagacatttgatcccgatggcctctagacccaacacgagctttctctgtctgttcttgagccgtttttggttctctctaaggtagttcttagtgaacttcttgtcagataataatgaggatagtaggtattgtgtctgggaggagacaaggccgaaacttgacatttttgtagcggcagagatgacatctttgtcattggagtaaatggctccaactctaaaaccagggaggcctagatctttagataagctacaaacaatgtggactcggttcaaaacatcggtgttttcaagttgattattttttagaatctccatgacgctgatgaattctgaagagttgaatactgtgcccgaatatatctcgtcacttactaaatgtatattcttattcttggtgatgaaatcaaatagaatgttgagttcggtttgggttgttgtcgtacccaaagggttagatgggttggtgatgagtattcctttgacgtttaggtcaagcttcttggcttgctcgtaggcttcttcgagtgcaagttttgttaggcgaaacccggttgcacttgaactttggattggtacaatcttaaccccgtttcgcctttagtaaccctatcaaac

SEQ ID NO: 12559 - DNA, 657 bp, Arabidopsis thaliana landsberg
  unsure (1)..(657): unsure at all n locations
cagagaagaagttgagaatcaacactatatacagaaattcactagtatgatccatatttttgtttatcaaattataccttcgtatatccgacgtcaagcctatgttactgaaaactgatgataaagcttccttccatttctgtattctctcaggctcactccggtactcccactccagattcctcaagttgtctccgaaagctcccatgaatcttttacacgcggtggcgtttaatctgtagaaaacgggaaccaccacgagtttgccttgttccatctgctccttcatcttcacaagctcatccaagcaccagcatgattctgtgtacctctcggagaagatggccaccgcgactctcgattcctcgatcctcctgaaaagataatttagatttgtaccctcaactcaacctcgtcagtgaacacgttgatcttctccaatctcatggcctttacaagaaacccaacaaagctatttctcagctcgtctcccctgaaattgatgaacacttggtactgcggcagagtgatgccgtgatcgtccgtggaggaggcagcattggaaaataacggaacctacaaggnnnnnnnnnnnnnnnnnnnnnnnnnnnaaagaagnaagcatcaggacaaaatgggatggatctttcattcata

SEQ ID NO: 12560 - DNA, 563 bp, Arabidopsis thaliana landsberg
tttcacaggtgtgcaccagccatacctaactagacttacctaggtcaagttacctatttcatgcaccaccacacctatcactactcaagtgtcaaacaccgccattttaacatagatttagttgacccttaaccttctcgaccatcctttgaaaaccgaccattgattttagttaataagggcatgaataccatataagcccaatcatcttccattattatgacctaacttacatttttcctacataacacatgttagtcacaacaatcttatgttgtcattaattatcaaaaccaagctggacctagatgctttcaatctctcccttttttggtgattgattagaacttaacttcaagtatgtgagaaaatgttttgaggttttaaaaggaaccttgtatatatatgaactgttggtgctaagacatgaagtattagtgtaagtacatataatcaaagtacatagacatgtaccataaaagagtatggataagctaatgtacatgaaagagtatgctcgtttgcattaggtatgacatgaaagataataagcccacatatgt

SEQ ID NO: 12561 - DNA, 1161 bp, Arabidopsis thaliana landsberg
ctgttcagtatcaacgatgagcagtccactgctgcatgagctctctcgccggacattagtgccaccaccgagaagatcatgagaatagttgcatatgccattgtgaatgatgagtctcttttggtgctctctagcatgctaaataaatggaattgcctttttcatatattattattgtttattttttatatttttcgccgaaagagaagacatgaatcattactttctcagtgtgtaaaatgctttatggaataaattatatttgtctaaaatcggtcgttcttccagattggtagaatttttctatgaacaaaattatttatatttgagaataaactgaaatttcaaatttttgtcaagggaaaactgaaatgttaaactaacatctaatattaatgtgttaaatggtaagataacatcataagaatatataaaataaacgtaaattaaaataaaataaaaacattaattacatattttgttgtatacaaataaatatattagatcctaataattttactaataatttatttcagtcgttttatcccgcacatagtgcgagttcttatctagttagtattatttacgttattttgattgcatgtgataaattaatttttttgtagtatccgctcatatctagcatatttaggttcattttcacatttttgtagtgtgtaggcctatattttagtgtagagtttggtataagaagatacaaaaatggcaaaccataagtaaaagagagattgtggctagctattttttgtttttttgattatgtctattggctagtttattaacaaatttttcatatctaacatagttttgtaacataagtgactttaaatcaaaaagtgtattgtcagaaaataaaaataaattgtatgtaacaatgaactgtaaacaacgagttgcaatgatgggcaagagtggagagagtgccattaaaatgaatgcaaagttggcaaaaggtgcaacgatctccttttacaatcctataaataaaacaattcatgcacttttctccctctccatcttttttctttatttgaaatttgaatgatgcacttacttttgagttttgacacattcttttgtttcaaagtagaaaatatccaacaaaataataacttacttctctattttgaagtaccaaaa

SEQ ID NO: 12562 - DNA, 945 bp, Arabidopsis thaliana landsberg
gcgataccacacgtcactcagtcagacggagatggttggtccttagtttctccagtgtaaaggaagtaaaagttctgaaaaatcaaatggaaaacctttagagttcggccaagtaacgcttttatcctcttctcgatactctgttttgagtgatcatgaggataatggggacaaagaagagacagagcgtgtggaacaggtggaagttttggattccaacgtgggggctctgaagaactcggcaccggagacggagaaaacaggggcgctgagagtcaatcttcctcgttcctcgaagagctcccataaagttctgtcggagacttttactcaaaaagcaagagacaatgtctcaagaaattcgagcagaagaaactccaaaaaacttcattaaatgactgtttttttctggaatgtgcgcggattcaacaaaacaattaaacattctgtagttcgtgattgggtcagacaggattctttaacttttgggggtttaatagaaacgagagtggatgaaaacagagccagtcgtatcatatctaaggtctttcgagactggtcctctatgacaaactatgaacatcatcgtttaggaagaatttgggtggtttggaagaatacggttcgagttactccggtttacaaaagtggacaattgattacttgctctgttttgacggaagaaaatgcagaggaactttttgtctcttttatttatgcatcgaattatgtggatgaacggagagaactttgggaagatttgaggaatcattacgatttgccaatgtttcgtaataaaggttggatgatactgggtgattttaatgaaattttggatggggaggagcattcaaattttgtgaattcaccattcattccacagggcatgcgagactttcaagacgtcgtaagatattgttccctagctgatatgagttatcatgg

SEQ ID NO: 12563 - DNA, 991 bp, Arabidopsis thaliana landsberg
gacatctcaattcattacacaacgaaacacataatagttttttctattcaagaaacgataattttcttataagtaaattctgaaaacgaagacacgaaaaggaaaaagcatccgattcctaattcccatcatcgtaaaaaggacaaaccgaatcataccaaaccgaatcgaatcgcatcatcgaccccttataccgatcggtttagtctaatctaaaaaactcaatttatcgtcgtcgttcgttgcttcattccgcggcaccgacactgatcgtaacattcgccgggttttcgcatcggacatcgtcagccgtctgatctcgcttgttatcatactccttaaaacttgcgatccttcccaattcctcaacttcttcgattacattatcgagcctcgccaccatttccactagcaacgacgcaaacgccgcgaacggtaatgcctccgagaattcgagactcgtcatcaccgcgattttgctcagctgtggccgtaacatcctcctctctcccgccgccgacatctctgagttactgttcttgaacgatctccggtactccattaaagctgacgtgtcagtcctaaagcttgaaagtgaaacggctccgttttggccttgacgtgaaccggtttctgtaattttacgtgtaccggtttcggtattttgaagagaaacgtcgccgtttagatcttttccactgttactactgttgcgctgatggtgtttgttattggaaacgctaccgttttggtgtttattattgtgacgatggaggttagagccaaggaagagtttaggctgagacttgatagcggaattaagatcttgaagtgccacgtggagatgatcggatagaatctccggtgaacaatgacggtggtttgagatgctatctgcgagttccgtcaaagctttgcatacttctccggctaatcttacacaaggatctttaaaaagcgcgcgaacggatctggagtcttaaaaaacaag

SEQ ID NO: 12564 - DNA, 664 bp, Arabidopsis thaliana landsberg
aaaaaccctgaatgtagcgataaagacatgtttctgatttcatcaagggaagaagaagatcttggaaacctgtatgatgagacgaacaataccataaacagcgaggagtcagaaattgaaacggggtatgcagatttgtctccacctggttctcctgatgttcaagaaagacagtgtttggatggttgcccttctccaagagcggaaaaccactactgtgacagacctgacagagatattaaagatcttgaagatgagaatgtgtactttacaaatgatcatcaaaaacctgttcaccagaacgcaagatattggaaagaagtgcagtctgataatgctttgaggtggtcagataaacgcacatattcagataatgcttcttttgtcagtaggtcagaggcaagataccgtaatgatagattagaagtgccttcaaggggattcaatgggtcaaacagacagttaagagtgaatgcttcaaagactggtggcctgaatggtatcaagtctcatgagaagtttcaatgttgcgacaacagaatcagtgagaggtttgacttcagttcttgcagttgcaaaccaagttgtgaatatcgggcaaaagtagaacctaaaaccgctggatccagaagcacgcgagaaccaaaaaccatatccaattcgg

SEQ ID NO: 12565 - DNA, 1346 bp, Arabidopsis thaliana landsberg
  unsure (1)..(1346): unsure at all n locations
gagatggagatactaaactcaagacgaagacacaaacatatatatagtagacacgaagctagaagaaacttaaaaaaactaaactaaggacaaaaaataaaaagactcagtcaaagataagtcgaaaaagattggacagagagaagaacgtaaaaagagaagattaaggataaactaataaaataaacagaaaaagccaaaaattttagccaattaagagagtaatgatttcaaaagataaaactctaaaaaactttgacttctaatcttataaaagacaaacaacaaaatctaaccctaacctccttgtgaagttctcatttcctcatcaaaaaggaattgcaaccaagcgtggagcttcccttggcgacatatgagttgattacgaaaagccagaaatcacactcttagctatttcaaaagcacctcgattacattcaggtggttccatcaaaataaaccaatgagggttgtccttggtgaaacttaacaactaagcaatgtgacccttaaacattggccattctttaggtttatgcaacgcttggatgaattcataagaggaaaatccaaatgtaacattctgtaaatgatgctgattcatagaacttaaagcccacttccaacttctgaattttgcatcaaatagagataatacctgagaataggaacgccgactatgtaataagacaattccattagagttcctaaccacccaagacgctccagagacctggtgatgcttggaccacgcataaccaatgttgcattttaagtctccacttctaggagcattccaattttgagcacctgcagctttgtgagtcagagatgaattcatcaaattttcttgagccaaacaccattcctgacagtcttcaaatgctttggcaatgatcaaatttgtcattagtccaataccctcaaagagattcttatttctgtttttccacagagcccatagaatccaaggactaatctccctaagcaaaggagacaaactgggatttgttgacatatcaaacaaatgagccaaatttgtaaaaagtgaatcaccaaaaccattcaaaggagaaggaactaaggacatagcccaaacttgtctcgataaagaacactgaaacataacatgattgattgtttcggattctgaaccacacaggagacaaccatctgcatttttcagacccctagttctaagccgatcttctacagcaattgacccatttaataacctccataagaagttttaatctttggactgtatgaagatccanatcttgagaaacagggattaagagagggttctcttctgccttttgacaaatatgatgacctgatactat

SEQ ID NO: 12566 - DNA, 823 bp, Arabidopsis thaliana landsberg
cgatatcaatcacattctctatatccttcagctgaaattgggtgattcattataataaaatggaaaagttttgatcttttttatctggggtcttgttgtttgatgggatccagcgtcttataagtgcattccattgaaattaaactgattcaattgttttgatccataggtaaattaagatggacgtcgttgagagaaaaagaccaagaggagcgtttctaaatctgtttgattggcatggaaaatccaggaagaagcttttctcttccaatctctcccaactctctggtatgtcttccagcttttgttgtatatataagttaaggtaatgaagtttaataatctaaagtttcttcttttaaaacagaagaatctaagcaagcaaaagagaatgttcaaaacccctctattacgccgcattctgttgtaagccttttcttactcaacaccattttccttgtttgatgcaatgttttgttttgtgttagtttactgaatgacatgaactatttgtgttctttggtgtgatctgtttacaacagtttgaagttgatcagagtgtaaagaacccaacttacaacccgagaagtgactctagctgttgtgcttcatctgttactagtgatgatggaaatgtggttagagcaagtgtggtagcgaggcttatgggtttagagggtttaccactaccaaacgttttggaaccacgggttaatcctgatcttgatccatactttctcagatcctcgcgccaagcaaacacttgggatgctaatgttgatcgtcagagtgacttcgatgggtgtttcttgggatcatttgg

SEQ ID NO: 12567 - DNA, 795 bp, Arabidopsis thaliana landsberg
gtcgattaacaaatcaaacatgaaatcttagtgggttttcaccggttaaaacaatcgaagctccaattagagaaacaacagctcaaggcaatgttaatatgcgacagaaatcacttttgttcttcaactcaaatctttgatttgattcctgcacttctaaactcaaaaagaaaaacaaggttggataataagtaacagaagcgaaaatcgctctatcattatcaccaacacatctcaaatgagaattattgaaaacaaaactaatttatgaaaaaacaaaaagcagcaaaagagcgctgacggcatagccgaccatcatcactatgaaaaccaaatgatgccggacaaaacttggccaacaccggaaagaactagtagttgctagacgataatccttatcggaagaggcagaagccgaaaagaattccggacggcatagtgattttcagctatctctctctcgaagattttaaagagggaaaagagagagaaaacatggattcaatattaatggtgaaaatatttatatatccaaaataaaatgtcaatttgacaaagaaaaaaagaaaaaaattaagtagatccataaatgaaacgccacgtaaacaaccaacaaccaattaaattgagtggcattatcgtagatttatagaagttctttggggttaaacgtgattccaataaaagctacattagataaatgatatccctagagggagaaaatttgaaatgagtggaccgttgctttgaaatccaaccaaaatgacaaaaaatttcaaaaccaaacatttatta

SEQ ID NO: 12568 - DNA, 459 bp, Arabidopsis thaliana landsberg
ctatatccagttctttactgagttggccagctcttgtccggtatcattcacctttcacagtgatgatggtcggctatgccgtcagcgttcttttgctactttttgttttttcataaattagctttgctttcaataaatctcatttgagatgtgttggtgataatgatagagcggttttcgctttttgttacttattatctaacctgtttttctttttgagtttagaattgcaggaaacaaatcacagatttgagttagaaaaaaaagtgatttccgttgcatattaacattaccttgagctgttgtttctctaattagggcttcgattatttttaccggtgaaaacccataagattccatgtttgatttgttaatcgacgttgaatcttcaccggagtcgatgtttgacggcgaaggatgaagccgggaaaactttggattcttcatcagtacgtgtat

SEQ ID NO: 12569 - DNA, 973 bp, Arabidopsis thaliana landsberg
agtctctaagtccaccattccacaattcagcccatagtcgcgcaaagacaccaatttaagctacatttcatcttctcgttgaatcaatcaatccacaatccataaactcatttccataattcagtctataaatcacacagagacctagatgcgttctaacatttccaaaaccccttttacattcgaaaacttgatcaaaattaggtcaattcaaaacttggaatatagaagagtttggatagaatctgactcacataggtattgagctgacgaatgaaggaagagaagttattgtgtttgaagtaggttggaagaaggaggcgtgaaaattcggcatgattccaaacgatgaagctgttgttgttagcgctccacgatacgatctggtccgttgatgaatcgtcgaccatctcgtaggttttcaccaagaaaggcgctggtcctccggctccttctccgccgctaacggagacggaggagttacctaatgcgccgttcattgttgaatctaatcagaaactggtacaagagatggtgatgctgggaaagagagagatcctttgccgtaaataaatgaataactttcttttcatttttatactaataatatctaaaactacaaattaaacccaaaaaacacctaatttgttttagctaaaactgcaaatagccaagtaaaaatgataaatttcataaaaatgactcttttaagtgttacttatagtcttatagaccatagtattcaacaaatattgttacgaatttgtttgagtataaatactgtgatactaatttctatccactgtttttgtttcgatatctcaattgaaagatatcagagaaatagagctagtgaagtttaatagagtgaaatcttttgagtggagttactatatttttctgttttattttaaatcgtgttattctatccaattgtaaaatttctaatttttcattttttcatttgtgtgag

SEQ ID NO: 12570 - DNA, 554 bp, Arabidopsis thaliana landsberg
  unsure (1)..(554): unsure at all n locations
ggtgtagttggctttgtcgtagggccgtcaatggggtcggggcatagtgcttgctctgctaagggtgggatataccacccttgctataaaaaccacccaaccccaggttgtccccattgccaccaatgctcaggagaagatgatggtaacatggaagactttaaggagttttaaaacttcgatgagttctagtcatgtttagtggcaaaccccagttagatgcctgtgaagcccttatctttctatgtttcgtattcgtattttgattatgataatgactatgtttagttaatgactctgtggatgtcttagatatcttgatgtaataaagtactattttctctattattttgaataatgtgtgatgatgtataactatgtaattgctgtgtatgtgagtttttgatcttgacacgtacatggttcgcattcgttttnnnnnnnnnnnnnnnnnnnnnnnnnnnnnnnnnnnnnnnaagatcaattaggttgtctcagcactatcctattatatccatatcatattatatgtaaatgactctgtaactgtagat

SEQ ID NO: 12571 - DNA, 947 bp, Arabidopsis thaliana landsberg
acaccaatgtgaacaaaggtgtattctatgattgccaatatttaaaaaaaatccccgattcgaaaagattgatgcaatccaaatatggaggaaatatataaataacttaagtcaatggtaaaagtaaacgcattatcaaacaagattggtatttcaaatattaatgaaccaactggtaccttaggcaaaagaaaaacattatcatgccagaatctcactatttttagccccagtaagcatctagttacacaatctccccttctatatatatacacacacacatgccattatcgttaacaagtctcacagtgactctctaaacttcattcatagatctttgaaatgatgagctatcactacataaacaccttatgcattgtaatttctctcttgtcttgtctcttcatcacctcttcttttgcaggaccagttccaaaccaggaaaatggatctcagaaaattttccccactcagatatcatcacgtgatagtaaggtttctctatcgagcacggtgaagggtctgagagaacgtcctccatcgtcttactctctcaagatggagtctttcaacacactcatgaagtctgtttacactgagagatacgaatctcgtccttttagggtcggtagatacaactggtacgttacgtaccatctttgttttttcttctattttattagctaaaagattaggaacctttgtcccaaaatctatctagctccatgataaaactattgtttgtgactggactacaaaacgttgatcaatccctatattcctaatggaggaccttggcctatctttgttcaagccacttcattatgtactatagttgtttgctgaatcgtgttgaacaaattgaaacaggacgcttgtgtgtatccgagggaaacaagaacgataacgtacagggcacatttcgctatcgtcgcttagacactcac

SEQ ID NO: 12572 - DNA, 583 bp, Arabidopsis thaliana landsberg
  unsure (1)..(583): unsure at all n locations
agaaaagtgacataccgatccatcagaagttgtgtagttcggcacatctcctgattggaactccatatcgtctggaatcaactgcattgcaattgatagctcagaggaaaaacattactcatcaaaacagtactgactgacattaattaattgaagtttaaacaagatgtctatgctagnnnnnnnnnnnnnnnnnnnnnnnngtatatttatggaagtgataaaggactaaaggagcgagtaagcagagcataattcctagaatggccagaaagaattctgaaatttctttagcattcaacactttgactatgaagcagctccaaacaaggcagaatcactcacatggttggacacgaagatctgcaccggcccagcctccgcaaagaagcccatctgcagagtgccagagtcaataacacacaaagtttaaataccaaaccaatcctggcaatcacattctccaacaccaagatcatcaccacccagccaaccagcactccaattcacatccaattcgaacgaagcaagcacagcccgagcggggaggcaactaggcactaccttgttcacatggtgacga

SEQ ID NO: 12573 - DNA, 830 bp, Arabidopsis thaliana landsberg
agttaggcatataccgatattccagtagcagtcatcggcttcacagatcggtagagctccccctataattatgagaagttaacaaattttagtaagactactagaagggtattaggatggaaatggaatagatttatgatacaatagcagaggaacaaacttacatcgacgattggatcctggcctttgagaccaaccttgagacggtttttcttaatctcacatacaacagtccgtgctttagtcccagtaggcactggaatgttaactgtaacctcctggagattctggatccatgagtagttctcaagatcagttccattacctttgttaggaactgcaaagaaacatacacaaagttcactcgacataacaagagaacaacactaaagctcatcaaagagaatcactagagcataagatagaagcaaaactaccatcaagtctaaaatccatgatgttttgctttcactagagagatatcaagttctagaactcaaaatccaacaaggctgatgttaaaatttgtattaggtgaacactagcagaacctactgatacttactacatcctaggggctagaacaagtaacatataaaaagttttactgattcaaagtctaaatactcctctactatatcatagttcttaataccaaagagaaccaattacataaaacttgatcaagaccatcatttgcaagcaaagtttccaatcctaagaacacataccctatacatcacaggatcaatgacaagccaagattccagattcaatatcatcatgctttagttaaaaaggattttttttaaaatattttaccaatggga

SEQ ID NO: 12574 - DNA, 629 bp, Arabidopsis thaliana landsberg
  unsure (1)..(629): unsure at all n locations
atacaagacattcggagtgtcaaacagtacactttgagggcatctatcatactcatccatttcaacataatcagtccaaacaattttcaatcttctgagacttgcgctaaccacaaaacaggcttcccaattatgccacttcatatctatcatcacgagctcctctagtattggacatcttgataagagtctaacgaacactttaacatcagcaactaaaacgtcgtcaagccacaaggtcttcaaacaaggaagatgagcagcagctacatcatctccatttatccaaatcaaactacggttggttgctaacttcaaagttacaagagtggcttgcgaaaacactcttgaactcagctggaaatttccttttatatcatatatgctaagctttagcttctctactccattgtccaatggataatcaactaaatgagtaacaaatcctgcatcgatctcgtcattcagtgtcagcgagaaactatccaacttacggttacctgtctgcctcaacacttgatcaacaaatctcacaaaatgctcttcctcttgatcatcactaaaagaaaacttaagacttgaaagattctttatctcacttctgcaccatnctttcataaagagaagag

SEQ ID NO: 12575 - DNA, 465 bp, Arabidopsis thaliana landsberg
taataatttaaggcccttaccaaattttacattgtaagatttgaaggtctcaaaataattagggacaaatattttggtgtagttgtaaaatttgttttgattgggaggtgtatattataaaaccagattttaaatccgcaatataccgcatgataatttttttttaaatatatatatatatataaaacataatattttaaattatttatctttatataatattttttttgttttgtttacgattgttattaagtaacatataccacgaatctaagatcaataattaaaacttgaggatttaattcgtattaaaccagcatattactgatattttaaaaatttataaatattgattcaaactcatctactataatccgctccacaatataaaccgtcttgtaatctcttaactcatctcatgtaatatttaataaaaatattaaaattaaaaattatttattatat

SEQ ID NO: 12576 - DNA, 927 bp, Arabidopsis thaliana landsberg
attctacaatctcacacacgtacatgttacacgtgtagacatatggacacattccaaatgtacgcgcatacataatatgatcttcatatttttaggtgtacacgtgacctaatattggcgcagccaaaccgaaaattcggaaaatcaagttggtgaaagttaagccatcaaattgtttcgattcgttgattgtaaatcttacgtgtagtcaatataaaaaggaatcagagaacacgtacgtgacattcagtatcttatcttatgtgttcatacattgacctaaactaattattaattaaattgacatacaaattaatgcgttcataaacaaaaaaagtagttgcgaaactgataaactgccgtgttattgcattagagacaaatgactccaaccaaccttataaaaacaaactttataatccacaattttccatattcaaacaaatcaaaaactcaagaaaccacacacccaaaaaaagaaacaagttaagttgtgatggagtcatcaactacaacatcgtattcagttgtgtcggagctagaaggaacactactgaaaaacccaaaacccttcgcctacttcatgctcgtagctttcgaggcttcaggactaatccgttttgcgaccttgctgtttctctggcctatcatagcactccttgacgttttgggctacagaaacggtcgccttaagttaatgatcttcgtcgcaacggccggtttgcacgaatcagagattgaatcagtggctcgagcggttcttcccaaattcttcatggacgatatcagcatggacgcttggagggcgtttggttcgtgcgataagagagtcgctgtgacaagaatgccacgagttatggtggagagattcgctaaagatcatcttagcgccgatgaggtcatcggtacagagattgtcgtaaaccg

SEQ ID NO: 12577 - DNA, 647 bp, Arabidopsis thaliana landsberg
tctctgattctcaattgctactcgttggagaagcggtgaagattctgagcatgattcgtcggaaaatcttcgatcggagacggttatcgaatctgatcttaacgaacggtggtgattgcttgacttccttcttcctattgattaaacgcgggaatccaaaattgaagatcgattgctccgccgtgcttgagtttatcgccgtcgacgcagagtcaaagcttataatcgccaagggagaaggattggtcaccgagattattaaattgataagctcagattccgactcaagcttaatcgaagcgaatttatctttattaatcgcgattgcgtcttcaaaacgcgtgaaactcgcattaatcagagaaaagctagtcacgaaactcacgagtttgttaacagatccaactacgagcgtttcagtgacggaaaaatgcttaaagcttctcgaagctatttcgtcttgtaaagaaggtcgatcggagatttgtgatggtgtgtgcgtggagacggtggtgaataagctgatgaaagtgtctacggcggcagactgaacacgccgttaccgttttgaggagcgtctgttatcttgtcaaggaaaagaaagcgccagaagccgatcttagaatttacggcgctacgaagatact

SEQ ID NO: 12578 - DNA, 720 bp, Arabidopsis thaliana landsberg
gattctgaaggtcatgactcagagaattcagtgggatccgaagacaacatcaacaaacagaaccagggcagagccgcggtggggccggtaccaccacaagtcccatgagagttggattttggaactatcaaggattgggacaacctttgacagttcgacgtctagaggaagtacaaagagtgtactttttggacatgttgttcctgattgaaacaaaacaacaagacaactacacaagggatttgggcgttaagatggggtttgaagacatgtgtattatttcacctagaggtttaagtggtggtttagttgtgtattggaaaaagcatctttcaattcaagttatttctcatgatgtaaggctagtagatctatatgttgaatataaaaattttaatttctatttgtcttgcatctatgggcacccaatacctagtgaacgccaccacctctgggaaaaactccaaagagtgtcagcacatcgttcaggaccttggatgatgtgtggggattttaatgagatccttaatctgaatgaaaagaaaggcggtcgacgtcgcagtattggcagcctgcaaaatttcacaaatatgatcaattgttgcaatatgaaggacttgaagtctaaaggaaacccttacagctgggtaggaaagaggcagaacgagaccattgactctcgccttgacagagtcttcatcaattctgaaaagcacgctt

SEQ ID NO: 12579 - DNA, 668 bp, Arabidopsis thaliana landsberg
gtttagaaatattttcacttttgaagattatctacttatctttatgagatttgacttccacaatctctactggttcactgttggtgtgactggtgagtggtgacaagatggcagaggaccataaatcagcaccgttagtattcgccacgtgtacggtccaagctagtggaacaagacataaaccattgcttctcaactctttcactttcatcgtcgggtttacttctccggtgtcttcgtcgtcctgacgacacatcaactattcatcagtcacaacaccgtcaaaatagtaatcttttaagtcttaaaacagtcgtttcgaatcatggaaaaataaatatcttccggttttattgataaagacatagagtgtaacaaaaaaagaggataccaagaaaaaagtgtaacaaaaaaatgaaataagataatacaaaaggatgatggatgacttacaagagggttatgtttgaagtaaggggttgaaagaacttgaacttggtcttgtaagaattttatgtaacccattgtttcatgcaacactgatgctgcatctgtctattcaaattttccaaattacatttttcttagttaaaatgtaaaaagtaaactaattttaattaccaaaacacataatgtacctccaaaacagtaaaatatagtccgtgaat

SEQ ID NO: 12580 - DNA, 1058 bp, Arabidopsis thaliana landsberg
aggatgagaaagtcgaacttggaactcaaactcttcccatttggaatcttgattgtcttcatggacggtcttatcaagaactgggactgcacggtgttcgaatctgaaacattggctgattggtttgtgtccatctgcactaagatagaggtttaccataccaggcgagtgtggaggtatgatgcaacggtagactccagcctggagatattccgcagggacacaaaagtcaccgcaaacgcaataaaggtttgatctttcgagatgttgataactgtcatgcaagaacccagttaccagaatctgcagaatcagtatatgagaaagttatgcttttccattttgtaatccaaaccaattattttattcatatgatagcacataccttagttttctcggaagaataggcccaagcaggtgaaacatcggttatgttaaacacttgctcaggtatgttagagtgagaatgaaatacagcttgaggagctaatggatcctgcctaggcataaccatgggttcaaaggaaggatcctccagtgagccattagattcgctgataaatgaattcatccaccttccaaaactctctcgactttgtggaccatcgttaagcaaagcatcaagagatccatcagccactgtcgcattcccatgctctgcagtgccatttgcagcattttggagcggttctgtgaaatatgaaagattatctgatcacagataaaaagaaagatttattttcaacatcatcccatagtttctttaactacaccaactgatattgtcaattcctaacctacggttggtgcagattggttattaagatcggttggtactagcagctcatcccaatcaagcgtattgatatcatgaaggctaatatcatgatttctaacaactgtatcaatatcttcagctgccacgcgattagggaatgtttgttccgagacggagattggactagagattgagtcccccgatgttgtagctgcctgaaaatatcagtttaacccaccataaagcctatcaatcggagaccatcactactctatagaga

SEQ ID NO: 12581 - DNA, 1271 bp, Arabidopsis thaliana landsberg
  unsure (1)..(1271): unsure at all n locations
tgataatgataagatgttgactattgcattgcttctgtttgaaacataaggccccttatctgacactgtaccttaactcttccaaccttataattctcacaacttgaatattttgctcttttttttcatggtaaagaacgaaattttagactattttttattttagacagagattataacaataaacactagaaatggaagaaaacaaccaacagaacttaaaaacaacattactacttcaattgctttggataaaaaaagagagcatttggccaaactgtaagaagaaacacagatttcgaatccacaaaactcggaaatttttgtggttgccacagaaccgaagaatatgaattctcgtcgtagttgcgaggagcaaaattttgctcttctttgtttcttaagaaatgttttcatttgaatttgcaaattgaaatcgacatatcaaacctttgttttcttctatagttttccactttgatacatgggtcctcttggtgtagaaaaatagtcaagttacgtacgtcctgttcacattccataaattacaaaacccgatagagacgaatccgaataagataactaaaatgttctattatttcatatcatcaccgtatagaaaataacaaaacatcaagtttctatgtacagaaaaacaaattgtaggtcttgaagtagatatttaaagactttccttgcataaaatgacaatgcacaagattacaattgttaaaaaacaattacgtgcacttatcctataaatagttaaatataatgtggcgatgttgacatatacgaattacggacccatgtatgtaatgtaagcatactgtcaaggaaactgagataagtcatacaaattatgagcccaagtagtatatttcaatgtctttataatgggccttaatttggacttttattttgttttgtttcaattaaatattttggcccacacaatgagccagcccatgaaccaaaatcaactagagcatttcctttgtttttgtcgcatgcctcagaaaaatggtcacaatacacatggactaaattcaaaagtgccgtaaacaaactcaaattaaaagacttataaggctatgataaagaaggaaataataatgtgtttgtaaaaagagttgaaaatgtcttactgtttaactaatctcacacttggccatggtctacattgtcttaagttcgaatccctcgagagacattttgntatttctaaacaatgaaaactacattgtttaaagaagaaaaatgtcgaaaaa

SEQ ID NO: 12582 - DNA, 796 bp, Arabidopsis thaliana landsberg
cgaggttaccctcaaaaagaaaaacaatctatgaataaacattacttaattatattcctctgcatcataacataagaataggttcaggtcaatttatgggaccttgtatttattcgatgtcaatacgaatagtgtgtgttgataatataaattactcacggttaatggtatatctatggataagtgatagtacataatgtccttgtaaaaaagtttgaccaagtaacaaaatttccaaaccgacgacttacattagaaatattactagtcaatgccaaaaagggactggcatacattatcctatcgggatcaagagcatactctaccaatcgggatcaagaccagctccagttcgattgaagacaaaggggacaccaggcaatgcttcatcttcaggaccaggtcgagaaaagacaatcggtggtttatctaattcataaagcatgggagacggtggctgcacttcaacagcttcaatctcttcatctgtgggcttgagcctgaatataaaagtgtgaaagttttgtccgcgacgccacacatgtgcttgatagattttagactgtggaggggaagaggccatatctgtagcccaaaatgttaaccagcaggtaagaccgctggtcatttggtaatttgcctcaacatgctccacaaacacaagtttggttccatgagcttcgttgtgtttgtcgatagcagtgagtgtcaactcacggatcaatacggcattgctttttctttcgctgatttatttggcgacttatcattgatctacacgaaaatgaatcaaatt

SEQ ID NO: 12583 - DNA, 785 bp, Arabidopsis thaliana landsberg
gttctatggatgttagtgcatattatacagaattggtaaccttatgggaagaatatcgtaatcatgtggacttcatgtgtgtacttgtggtaaatgcgagtgtaatgcagctgctctttgggagaaattgcaacagagaagcagagtcactaagttcttgatgggtctcaatgaatcctatgaagctactcgcagacatatcctaatgttgaagcaaattccaaccattgaagatgcgttcaatatggtgactcaggacgagcgtcagaagaatatcaaaccagtgtttaagattgacaatgtggtgtttaatacttcagataacaatcagttgagttactatgatggtagtgtacagaatcagaatcagaatgtctatcaaggtcctcttgacaataatgtctatgctgcaatgcagaatcaatatataccaagagcaccaaggccagtttgtacttactgtggtcagactggtcatgtaatccagaagtgtttcaagaaacatggataccctccgggttatatcccagggtttaaaagtaatggaggatatcataatcaacctacaaaaccatttactccatctttcaatcagaatctagatccaagagcgcggttctttaactctagacctacaactaaacatgctgcaaacatgatgaatggaaatcaacaggctatagcagcaccaaatgtggatgtaagccagatgaacacggaacacatgcagtcattgttacaatagctataattctaacttcaactttgggagaatcaagttccta

SEQ ID NO: 12584 - DNA, 562 bp, Arabidopsis thaliana landsberg
gaatgagccattcgtgcgacatgccaaaaattctcacctcgaatgggtgccccttcgcagttcacaaagctcattgcacacacttggccactatagcgttggggacttgacattgttggaccactgccaacagcgcaaggaaatttaaaattcaccttcgtcgcagtcaaatattttactaagtggatcgaagccaaagctgtgtcaacaataacgtcaaagacagcgcaaaaattcttctggcagaatattatttgtcaatttggagtcccctccgaattaacattcgacaatggcaaacaattcaacaatcgagatttcagggaattttgcaactccatcggcacgaaggcagtgttcacatcagtctaccacccataatccaacggagtagtagaacacgccaatgataaaattttcagcgctataaagaagagactccttaacgacaaaaagggcaaatgggctgaacaacttcctaaagtcatttgggtgctaacacaacataatctagagctatcgggtgtaccctttctgtttaatgtacagatcgaaacaatga

SEQ ID NO: 12585 - DNA, 753 bp, Arabidopsis thaliana landsberg
aaagggcatggattctgatctttatatctttgatgggtcttcatcttcttcctcaatctgccacagtactgatcctgatatgttttcctccgacacaacaacaacaacagatctctactgcaacaatccttatctcaatccttcaatggatgatcatcaatctctcagtttctttgaaagttttactccgacgactcatcatatcctctcttcttctcctccaatctctcagctccagaccttaactctcacacacacaaacagtttccccaacttctccggtttcgaaaacttcgacactgtcaaaacagagcagctcttgtttaactctccctttgatgctccattcatggaagattcctcgaattttcagaatcagaatttgttaaactcgccggaagattccttcttctccgatcacatgcgacgagtttacagcaccggagatttgcaggtactttatctataatatcctctgttttcctctgtgatttcacacaaaaactaatattttggaatttttttagaatttaggaagggattttacgggacagagatcatactcgagtcctttggcggcggagagttcaccaacgacggtgttttccggcgatgaacaaagcttgagggtggggcgttacagttccgaagaacgtaaagagaagatttctaagtatagagctaaacgaacgcagagaaacttcaccaaaaacccttaaggttaataataagttaaaaaaactacctatttaa

SEQ ID NO: 12586 - DNA, 547 bp, Arabidopsis thaliana landsberg
atatatcttttctaaagttctccggtggtttcttgccgtgtgtgcgggcgacctgaacttttgatgttaatcagtcgcggaaacgttgcgaggcttgtcgaagttttgaagacttgtctctttaacttcacggcgtgttttgtcgaagttttgaagacttgtctctttaacttcacggcgtgttttgtcgaagttttgaagacttgtatctttaacttcacggcgtgttttgtcgaagttttgaagacttgtcactttagtttcacggcgtggcttgtcaaagttttgaagacttgtctctttaacttcccggcgtggcttggtaggaacggtgtaagtgaatatcccaatgggaatatcatctttgtaatctttgatgtcttggagaacggagacaacagtgctaatgtctggccttgtctttggtcggtaccttaggcattgataagctagagttgctgcctttcgtgctccggtctctgagtactgatcttcaagcctcgggtccattattcttcccagttcacgtgcgttgctgagcaatgga

SEQ ID NO: 12587 - DNA, 513 bp, Arabidopsis thaliana landsberg
aaaaaaactttacaatatttgtatagaagattcaactgaaaagaaaataactgaagcgatgaaattaagcgcaagtcatgctataatttggtatgaaaactgtccaagcataggattccaccattgatgaatcccatgatctgtctgaaaatccggtgatatgattgtgttcaccatcacgatggccgacggaagaaaatgaagatgttcttctgaagaatacgacgacgaactttctcctcctccgaacaatattctcctaattgagtatctagccaacctctcgatcctacccagttgcagctcattcatatcgcctctatgattgaaatagccaatatattctgagcagactggatctgattggttcacaaacaaatgaggtctccaggaagctagattcataaatagatggctttcgtgaccctgtatataattcaagataagtgtatcaagaggtgatcaagtttcttggaagaaaaggcaaacctattaacaatttcaatatctagc

SEQ ID NO: 12588 - DNA, 1189 bp, Arabidopsis thaliana landsberg
acaaaatggttatggtttgaccgagacctcgcctgttgtctgtgcacggacacgtagctgtaatgtaagtttttctgccttctgttttctaaacgagttgtgaacacacaatgctttgaagtttctttttgagtgtttgcaaatgctatcatctctgatttatttgcatgaaagctaacatctgaaattaccttaccaaagttcacagacaaagcagttacattttgtagaagtattgaacagaacttcactagctagtctcttttcccactgagacaactttgtttttgtttccttgggagattacaagtccgaactgtctttattatgatccatcatttgccttcttcggcgacttattacagtatttcgtttcgtcttttgttttctgctaaaaaggttcttggctcagctgggcatccaatgcatggtacagaattcaaaattgtagatcctgagactaataatgtactccctcctggttcaaagggcattatcaaagtcagaggtccacaggttatgaagggttattataaggtaaatagcatatttttcttcttcatttcctgttttcctcacatttaagtttgttgacttttcaagccttactattttgcatgtatgtaattgtgtaagagtttttgcattgatgattaaattgggttaactcatctttctgttggtgtgtgctgcagaatccatcgaccacaaagcaagttctaaatgagagtggatggttcaatacaggagacaccggttggattgctcctcatcactcaagagggcggagtcgccactgcggaggtgtcattgttcttgaaggccgtgcagaagacacaattgtactttccacaggtattatcctatttacaaacatgttcaaatgcataatcgaacccaaaatcgattaaataaaagaactcggttcttatatcgataacatcatcactataggtgaaaatgttgcaccgttggagattgaagatagccgccatgagaagcagggtgattgaacaaattgtcgttattggacaggtgcttatattctctcgaaacaattacaagcatgaaacatcttagtatgggctattatgcgtatttgtagagattccatatggatgtctcgttaacaggaccgacgtcgccttggagctatcattatcccaagcaatgaggtacacatagagta

SEQ ID NO: 12589 - DNA, 456 bp, Arabidopsis thaliana landsberg
tctttattagcctctcttgtcttgtattttatattctgtatttttaggtatgtatcttataatgtatctacgtaccattatgttagtttatttaagccgttagaaacattttagtgtgtttgattgaccaaatgcaatgaagttatgcgctcatatcaatattttgtggtcatatatgcatgaaaatgcaatgaacttgtactctatattttttaaaaagtaaatttcatggaatctgcatacatttcaagattttatttttacttagaatgacatgcgtgtaggtgctagcatattttcaaagattcatctgtcccttttcttttcttgtcccaaaaaggttgcttctcttggagaaggagtgtctctggaggccaaattgttaagtaggtaaggagactgtgacctctttttctttatctttctcttctttagaatatacgtcggtaactataa

SEQ ID NO: 12590 - DNA, 771 bp, Arabidopsis thaliana landsberg
ctgaaaaaactcaatggttatagccctcaacatggcatgaatttgtaagccaagagatttattgaccaaggtaaatgaaattacctcacaagaagagccaccaggacaacaagagccactgagagccccactatccctatgaaggttgcaagaccatttaacctcacctgttacaagattaccaaaaggaaatgttagccttcttcaacacattgtggagaccttaagtgatcaagatgatatacctgcaatggagtttcttcaccagtatcttctgagatacttgccatcaacaatccccactcagtgttgattccaacaccagtaacctattgaaacactcacaaagaataactactaggaagtatgaacaactatgtgaaaacagaactaagaacaggacaaaagtttcaaagatttaccagcatgttaccgactccgtcagctactttacagccagacattagaaaaggggatttttgatccttgtgaacctgcaaacaaaggtctgtgttagcaaatagaaagggaagatgaccataaaaattgcacaagcagaaccataatgaactcacaatcttgctttcaccggtcatgctagattcatcaatagcaagagaatgaccactaattagcactccatccgcagggacctatatgaatacaacaataaataaggccatatagtcatttaactctgaagccattagatggaatataaagacaaagtatacctacctggtcacctatcctaagaggtataacatctcc

SEQ ID NO: 12591 - DNA, 904 bp, Arabidopsis thaliana landsberg
taccatgaataaatctgttctttttggaccagagctcactcagtcaccacttgtcacaattgggttttctaactatataacaaaccccaaggcatcaactgcactgatggtacataagaaaaattaatcacatataaactatgctaatctcttggccttttttatctgtaaagttagagagtaatcaactcaatagtaatacttttgtacgtgattgattattgtactatagagttattttaagcttcaaggtagatatcctcattgtaacttttattttcaatcaaaatgcagtcgatttggaaagtttgtcgagcttcagtttgacaactgtgggagaatatctggagcagctgtgcaaacatatttgttggaaaggtctcgagtgtgtcaaatatcagatcctgaaagaaattaccactgcttttaccttttatgtgctgccccacctgaggtattggtgctacacaatgatgccaatataccttattgttaggcgttctgctttaaatcacatgattaagtggttgtggatttcatttattttcccaatctgtaggaaagagaaaagttcaagttgggagatcctaagttattccactacctaaatcaatcgaagtgctataaactggatggagtggatgacaccgaggagtatcttgctacccgacgagctatggatattgttggcatcagtgaagaggaacaggtcagtcttccatttactccttttccaacaagaaatgatttctctggtagagcatcttattgaccattctgataattgctatcaggatgcaatatttagagttgttgctgcaatccttcatctaggtaatgtcaattttgcaaaaggaaaagagattgactcctcagttttgaaagatgagaaatcaagatatca

SEQ ID NO: 12592 - DNA, 917 bp, Arabidopsis thaliana landsberg
ttgagaagaggaacacacacttgaaacaaaagaaaccacaaagacaacaaactaagcgttgtaatgataaaaaccccagagtttccaatgttcttttccattagtataagtgaaatcaagttcttaatttatatgatcctttaaaaaggcaatactctcaacgtgttgatgtgcgatacggacatggcaattacacaacttgttttcggatccataagagcgcctaaactctatatcgcttccaattcctcggagcctaactcttctcatggtttttgtttcaacattatagtagaaaatgtagaaggaccgaacatcgcgtgacaaaaacattggggcaataatgatctcaccagccttgttggtgccaaagaaacatattctgacattcccaacataatcccacagagagtagggaaaatcacaactttgcctagaccattcatgtttcttggggtcttctagtatccaaaaaacaaaactgctgatacaaccaccacaggagtttctcacaatagaagctagcttccctttgtagtctatgagtctccatccccgattggaggacaaccgcaggtgcagtgataaaacttagtttctcagatctaacatcaaaacacacaataactggatctttggtttgggataaggtatgagcaccatagtagataacaccgttgatgcatacatttggtagtagtatcggtctataaggtgcaagtcacctctaatctgtctcattccttcaccacctcccaatgtccaaaccttgtgaccaatagcattaccatgacatctcttatcaaaatcaaagccgagcgctttgtattgatcgtcaatcggatcgtaccccacaaagatgggtgccaacgggtaacgtagtgaaatgctcccgtgtagggtacacatcaccttac

SEQ ID NO: 12593 - DNA, 741 bp, Arabidopsis thaliana landsberg
tgtgtaccatctcaagcgtcttctgctcaccgtgatactgctttctgtacaataaaaggcccgataacataaaagcaagaacaggccaaccacctctttcacaatgcattaacaatacattttgttgaccttccaacgataaccagctttcactcgatctcagaaagtgatggatcatttcaagaggtaaaagcgggcaactctcatactgccgtggataatccataaccgtcatatcgtattgggacaacacgtctgatatttgactccgctgttccccctctctaaagttaaacaccatgaaagacgcctctgggaaatgatcctgtagctgcgccacgatgccacccaagtatactttgtactcatcctcccccataacatcgctagagaaacagcagtcaaaaactgcaaagaagaagaaaaaacaagagaagttggatcagctctgaaaccttgaactagtccagcaaaatataggttgctagaaaatggaaacacaaatctgcaagctctgaaattttaatcactatccccaagtgcaatccagaagctcaaataaaccccttttccaaagaactatcattgtccaacattaaaggaaacaaaagaatatcccacaaagctataaattgtcttcaaagagattctgattcctaaaacctctttaattcaaagttgagctcaaatgagcatccactaattctcatcccaatcaaactgccaaaaaccctataccat

SEQ ID NO: 12594 - DNA, 733 bp, Arabidopsis thaliana landsberg
ccgagagacacgagtggctaccatcaccgtttctcctccacacgcaaatgttcttattcgctccgccgctttaaaccagacttccggcggcggcaaggcagagcaccgccaaacgatggccgcggagagttccaccgtgagagagatacttctgtccttcccagaaattaacggtaccgtcagaagaaccacagttaacaacagccgccgttatattaaccgctaacgccgttacagcgttctcttgcttcatcaacacattaacaagaaaatgcttcgtccctttgccttgaagctcacgtttccacactttcaaagttccgtcggctggatccggtgaatagcaaatcgtcgaaaccagcagccaccgtgttgatcgcgtcgtcgtgagcttgaatcgattcaagacattttgaatcagataatctccaaactttgagagtcttgtcccacgaaccggagtagagtaaaccgagctcttcgttcaagctaagacacgaaacggcgtcgtaatgacgaatcttgagaacatttttccgacgacgaacctcgacgtagttctttggattcactgatttcgtcaaaaactctttcaacgtcggcaagcttccgattcgtgaataaacctccggttcttcttttagaacctctccagacccgaattttacggtcttgatgaccggtgaaaatcccgttacctccggttatcacaatcgatctgaaaaaataaaag

SEQ ID NO: 12595 - DNA, 973 bp, Arabidopsis thaliana landsberg
aaattgatttcaatgtacatggatgctagttttacctttccaacgtagtcatttgactctcctatgatccggatgttcataccgggaatcaaaaagcacgcaaacgactgtcccgcgctccctaagaaactgcagacaaggaaagagtaaagcttggttttagctataacctgaactgaaacatatagatatctacaaagcttcagtgtttatttctcacgttaggttcacttgtcctgcaaaaccagtgtctccatacttctttgcaataacaccagcaacacgaccacaagccgcacggtctacgttgcatattttgacggttttctcaaccactttttcgttctctattgcatcaatcacctagagatattaaaactgttagcaactttacagttcagcagaaccaggtggaaaacagcagtgaaagacttctgttaccaatggatctgcaagaatatcgtcgtcgagaacaggtccatttgtatgaacttcctgctttctgatttcagtactgctcaatgaaggtgttccaacagactaaaagagtgaaaacaaaaaaaaagagaaattagaacaagtgattcatttcatgcatgttgaagaaatagagtctggatacaatcatataccgaaagaagataactcagatcgagatgttgagttttaactagcgaaatgtctcgtggtctcagtaactctgttcgtccaatgatgtcatctaaactgttgtatcccaactgtgctaagatacctctcacctgccaagaaaagattatacttcagatgagattaggccaaaaaaagtcttaatgattgaggtattaaaaaaagtggctgacctcttctgctacgtataagaagtagttgacaagatcaccaggtacaccagggaatcttgcacgtaattcttctctctgagaccattcatagagtgttatacaagcattagtgtgaaactcaagagaagatg

SEQ ID NO: 12596 - DNA, 732 bp, Arabidopsis thaliana landsberg
  unsure (1)..(732): unsure at all n locations
gtttagggaatctgtccacggcttgatctgtttccgaatagcaaaaaaacccattatttggaaccctaccttgagaaaattctcaaccttgcccaaacccaaaagcaactggaagggtaaaatagtctttttaggacacgatcccgtcgcgtgtgagcacaaagtagtgtgcatgcctcgtgataaagcttctgataagtgtcgggtttttacattgggaacagctacacaaaaaaaatggagaaccatcaatatcatcaaccataagcatcttccttttagtaacactattggtgacaatgacgggcaatgcatcaatggtgttctatactatagagccagtcttgatcaatctaatgttgacattataatgagttttgatgtcaggtctgaaaagttcaaatagatagaagtgccatggggtaatggatggtggggtaagctaataccttatgcaggtaagttagcttgtgttaaaagtaccatgtacaacaaggatatcacactgtgggtnnnnnnnnnnnnnnnnnnnnnnnnnnnacactttactagagcatcttataatgatcagcctttgcaagcattttccgggataaatggtatcactgaagatggtgagtttatttatgtagcatacgttctcgactcgttctatattttatactacgatccggagaaaaagagctacagaagagtcgatcttcaaggagtcggtgatgctgatttatgctc

SEQ ID NO: 12597 - DNA, 894 bp, Arabidopsis thaliana landsberg
cttaaaggtaaactatagatcgatctctaacatatatgtatataccaagtttagtaaccatattttgcaggactgttgattctttcggaaagagaagtgtgatagtcatgaagggcgtatctaaatcccgataattggcgttgtagccgccttaaaacatccggaaacttcttgttgtgcatatcgataagctcagcggcaggtttgaaacaagatcctatctttgttcggtctcttatcaatgaatttggtgaacattcgtacggtcccacgttcaaaaatccaaactttcttcctcccattttatacacttcctaagatcacatatatcagttttagaacaaaaataaatatttgaaattattttccgattttatgtttacctcgatcacgaatgtagtgttgccgataacaaaatcgacgaatttctctttggaattggattggaaagttgaggagtttgcagagaaaggataaaaatagtcgttggctccgatatgaaacagataaacagctcttgagaaaacccttttggtttctgcatctcctagttcagatctcaagctcttttcaacatctttgaagttgtttaactgtgttcccaaatttatcaccttacatgataaaaaaaagaagtggaacatatcaattaatcaaataacactatatcacatcggttaaagtaataaacattacacaattgttttaatttctacgccctctatttccaattaaataatctgtctaaattttttttctctttcaaataaatactattaactaatatttcaatatctattaaagtcaaaatgaaaattcattaacatcaattatgacattacccagattccaagaggtaataggttttggaagtaccataaacaggaacattta

SEQ ID NO: 12598 - DNA, 453 bp, Arabidopsis thaliana landsberg
ctattggtacaaagtgccttagaaacttagaatattttatcgctaaaggtcttgtggtgcttggggcctaggctttaaatgtgtatttggcctgaaagagcctatgccatgaaggcaacaagttagcttatataaggcccttatataatgttactttgagttgagtctcctctttgttggatgctagaggatatcgtaagacttgagacccctagaggaatggtcctaccatggtggatcttgaagttagtctctctaagtgaaacgttttagtgtgtattggcggcacgaagacgtatagccttccacagagggttcacttatacaatagcactatactcccattcgtactaaattaaaatttgttttagccttttaatggattcatacaataattaatatatgtgttttgtatatgggtctagatttatcatcatccattttgaatataga

SEQ ID NO: 12599 - DNA, 720 bp, Arabidopsis thaliana landsberg
tacggtcgctcagcttcaaaccgttcaaggtatgttttacctaccggatttaatgaacaaatttggttaatatcttctagactaaactgattggtttattattaatatatctcaggatatagagaccaagtgttggctgcgttggcacctgttcaatccgcgacgacgaacggattgttcttggactcgtgccatgctcattgccaaggtggaagcgctgccacttggtcaggcgacaaaggtcccacagtcgcgaatacggtaatcactttattttattgtacaaagtaaaaataatattggcaaatcctataaaataccacaaacttttgatctaagaagggtttataaaaatttacaaaaggtttctttgacattttaagtcttttataacttttttagaatctttcataaacctgaaaataaaacgtaaatatgtaatttgagcatttttctttttagtatgtttttcattattgttttggatttgttattttcagaaaatggctaaggcggttggagattggttctttgagaggagtacgtttcagaacgtagattgttcatcgctgaattgcaaccctacttgccctgcagtatctactgaagactaaaatttattcattgatgtcttaaaatttattcatctttggaatattgttcttgaaatttaaaaagtaaaataatataattgatacaatttcattcgaataaataaaa

SEQ ID NO: 12600 - DNA, 912 bp, Arabidopsis thaliana landsberg
  unsure (1)..(912): unsure at all n locations
aaaagctgaagaaatgagttgcaaatctgggaattctaactaatggcatccacgaactcttctttcatgatcgttggagataaattagggtttgtatttgatttggggatgaattcgatttgaggatttcttctcgacaaatccctaattgggttatcaattacgcctaaaacgtcgtcgtttcttcacaaacagagagatgataacggttcttaacctcgtctaatggatctgttaattgatttaacgtcgtgtcttattaggtctagtcaatgcaaagttcatgttttaaatgttagtcaactgtaagttgatgttttaaatggcctcctacaaagttgacgtattgattggccattttttgaaagttgggggattaaacaacatttttcccatttaaaaactggccaaaaaccaatgactaagattttatttgatcatcgggtcaaaactcacaggtatcgggttaggcgaccccctcgttcttcaaataaaattatttaaatgaggtttgatatcctaaaacgtttataaatttgattataaaactttagcatttgcccatatgtttgcaaattcattaagacattaaattcaattgtaacaattatttgcaaatgaataatcaacgtaatccacatatttataattttatatgcaaaataatcaaatacaaaatattttaacaacttacactattattagtatattaaaaatataataatattgtctaccacataactataactattttaaaaaaaaatcttaaccaaacttaaaaacagaatttttttttatccaacactgtattatgaaagattaaataaattgtgtactacacaacaacactcactataatctaacttaaaataatttttacangaataaataaaatgtatttttttactacat

SEQ ID NO: 12601 - DNA, 711 bp, Arabidopsis thaliana landsberg
caaatcaaagttctacagcttaatgtccccgagactgtgttttcttggtttcgtgagtaaaccctatagaaaacgaaatactggtcataagtaaaccgaaaatatatcttattcctcttaaaaatcagacccaatattcatccccaaatttttaaaatcattgctcgataaattcccgtctaagaaccctgaaacatccaaattttaattcccttcagttcgattagaaaactcgaattcaatttcgatgagcaatctatctactagttcgacgggatctacaggttctcgtggaagaggaagagtcgacagaatgccaaaaagatgttggtgtagggaaggaattgttgccctaacatccaaatctgatacgaatccttacagaagatactttcgttgtggttttgctgcaacaaacaaggtaatttcattgatattcatcaatgtttaagctgaattagatttttttacttatgaattttattgttcattgatagctaaggaatgatgaacacactttcaagtgggttgatgaagctttgatcaatgatttagacaagtttaatgcaaagattggggaagttgaacaacaagtgaaagagcttagaacacagagtttggagtttgagaaaatggtttgtgagaaagtccaaatgaagattgagaatgagttatttgagaaagtggacgatgctttggctgaatcaaaag

SEQ ID NO: 12602 - DNA, 746 bp, Arabidopsis thaliana landsberg
tgattttgaagttcctttttgttttattttacatttgaataccctttaaacattattatttatgatttaattctttactctttcactaagtaaggcacgaattcacattcttcaactagctataaatggatttatagctgttgtattttaaattgataaattcacatcgctccactgtttggagagaaaatagaagatgtggtctaagtaaaagctttgattggtgctgaaacatgataaatggtcgagagatggctaaggttagtatatatgaaaaatatgagcaattaactacagacttttatgttatataattcttgaattgttgtcattattgaccatttaaggggttggacattttaaaacttctccaaactctgacgtgaaatgtgtaggcttttgcagtttgggagactatactagagagtataacatattgaacttgaagaaataaaaaagagtaaagcaaaaatataaatcgagaaagtatgtctagtaagcgtgatggtgtagatggagttggtgtctcctcgatactcaacctctcgaccaaaaagaaaacataaatttcgcttttcacaaaaactgaatattaaagttccattttgaaaataagctatagtaacaaagtacaatttgaatttgtatattcttctggaatatggatttacagcagagctattcattaacaacacactaacatgttgagaaaaaggaagagcaaacactctttaatgttgagcaat

SEQ ID NO: 12603 - DNA, 730 bp, Arabidopsis thaliana landsberg
tcgaaacatcacatacagataatactctatcatctgaattagtgtcagaacaagatgaccagagtcctaagaaggttgaggagattcatgaggaagaaccaaaggaagcacacgatgtagaagctacgagtgaacggaatcttccagttgaaacatccgatgcagataatactctgtcctctcagttagtgtcagaaacaaaggaagaacacaagttacaggctggagaaatcctccctaccgaaattattccaagagaatcatctgatgaagctctagtttccatgttggcttctagggaagatgataaagtggctcttcaagaagataattgtgcagatgacgttagagaaacaaatgacatacaagaggaacgatctatttctgtggaaacagaagagagtgtaggagaaacaaaaccaaaagagcatgaagatgaaataagggatgcacatgtcgagactccaaccgcaccaataatcttggaggagaatgatagtgagactctgattgcagaggcaaagaaaggaaatgaagaaattaatgaaacagagagaacagtggctttggaccatgaagaagagtttgtgaaccatgaagctccaaagttagaggagacaaaggacgagaagagccaagaaattcctgagactgccaaagcaacagaaactactattgatcagactctttcaattggaaacttacaagcagatcagactccatccttagt

SEQ ID NO: 12604 - DNA, 933 bp, Arabidopsis thaliana landsberg
ttttagaggattaaaatttttgtgtgctatttgtacaagttttaaaagaatgtgtcatttttgcaataataaacctttttaatgtcatttatgttaatcccctatattttaacacttatagcgaattataaatttacaaattattacaaataagtgaattatttttatggtggatataaatataaatagtagattatttttaaacttgtaaagtgatcaaaatactaaatagtaaagagacaaaagaggagaaaaatgttttattacttctcttgtaattgaaataatgaatgtcatttacaacgatcgaaatcgtttatgtagacgtaaaaaagttaattactatgcatacataatgacaatgaattctacataatttgcgtaacatttattatatatatatatgtgcatatatttttgacgttgcgagaagtcacatttattaaattttgtaaaataaataatttaatttcagtttcccttatcaaatactgttctcgtatttaataaagtttaaataactttttacaaactgttcacatctggtgaatatagtgtcttctccaaccgaatggacgactttctcagggtatttggaggaattacggaacaataagaaagaattcacaagttcttcttcatctttaatttttggtagtgcacatattacagcggattctttgacaagaaaaatccgtaccgaaccgcatgatattacctatgtaaacaacattccttaggaatgactcttttaagctaaattattagcgatcgacatgaaacataaaagacatttaaataactttattatttaaactgttactttaccctgtagaaccaagttaacataataataagtgtgaaattagcatattacaatatccctaacagaattagcaaaatccaatcattaaatggactatatatggaaac

SEQ ID NO: 12605 - DNA, 879 bp, Arabidopsis thaliana landsberg
cagcatctcttcagaactacttgttgctatttttttgaatcatccatcgagtcataacctcagaaccttatcaattattggtacattacgagacccaagattttttgacaaaccatttcatcctgtgttaaaatcatcctctgagtcattgtgcgaagagacttcgcttcagactctgcttcttgaagccgttctgcagcagttgtagcctcatctttcaagttctgaacatagcagagaaaaataagacatggtttcataatgcaaataaaagtggtacatctcatagaaaacagtacatcagtgaaccttacctcaagctccgaacgtagggaaacaatttcctcatcctttccactctttttctgtttagcaacatttagagcagcctgtaacaggtacaaattttctgcacagcttaaattgtatgttttacataatgactcgattaaaagaagactacatctgagcagcaaaatagattgagggtattaacctctctttgacgcaatgctgcttctttcctatacaaagacatattcaacatgagcgattaaaaactaccaccttggtttctgaaaaagagagcaagaaaagagaagctaaagaaggcacaggctcccacctgcttaacaatttcgcctccaaggaaactccttctccaagagaggcaaccttttggaaccaaaaataaaaacaaatgaaaccttgaacagatgccaatacattagaaatatatgatttaaagtaaatttaaacaacgaggtgggatgctgtttcaaaaagataacagcaagatatacaaagagatttaaacaagtggagtattctttcagtcagaatttcaagacgcaacataagtgaaaaatggactactca

SEQ ID NO: 12606 - DNA, 558 bp, Arabidopsis thaliana landsberg
gaccccaattctgaagcctatcccttgtgtgcaatctattccacgccacaacccaacaaatgaaggcgtgcttaggaacatggttcttaaaccagaccgccttatgccaggggatggtgtgagattgcggatgcagagcagaccaagttcttggagcggagaatctgtttgatggtgcatgaaggtccgttttccaaagaaaggagtcgtcatgctgacagtcaagcaaaccctgagcctccgggagaagatttttaagctgaacaatgattggattcctgctacggcttgatgcaatccaccaagacctgccccttaacgcatccctaaccacaacatcaataggcaaaccaactgtacgagggcctagaggaccgattacctctataagggggccaaggccaatccaattatcatgccaaaacttagcggtgaccccggaaccaacctcacaaacaataaagggccttgccacaactctgagcttacacatcttccaccatcttggatatcatttcaacaccttcaaggacatattcgtcctctacatgagaggaa

SEQ ID NO: 12607 - DNA, 530 bp, Arabidopsis thaliana landsberg
atcctcctaacctatacgtacatgggtatgatttattgtacacaatatttagttggtttcaaactgcaaatatgttaaacgagttttgagatgttagtaaataatgatgtaaatttgattgatttgacatggaatgacccatatctacaagatttcgcttggttattaattacatactgtcaagcttaatttagccataatcttctcacataaatctccctaatagacgtacacggtttcgaattaatgtacgcatgtcatttgtcagataagagaaaatctaaaagaatgagatttgtatattaaatgcattcccccctaatttagccatatacaataactcaatatttttcccctaatttaccgacagccatcaactcaaacttttgtcagaacacgtaatgaggatttcatatacgtacacgggttgtgtatgatatgtacacatgtacttgttttaattaaaattactaatattattgcactaatatcaacccaaaatgcccaaccaaacacattcaaggcgttct

SEQ ID NO: 12608 - DNA, 437 bp, Arabidopsis thaliana landsberg
cggccattatgggctaaaatcccattttagcccgcaaacaaataggcgaacccatctggacatggccgtccaataagccttaaaattaggattactaattttagaggaattttttttccttatttctttaaaaattagggtttatactgacattttcattacaaaaaatattttactattttggcgaaaaatgtaattttctgatatgcataaaaatgcaattctttgattttgtacgaaaatataattatgcggttttgacggaaaataaaaaaatcatattatttgggtttcatgggttgtccaattagtcatgatctatttggggttggtcttatttggacacatgttctagttggacttatatcatcatagtcctatttggtttggtctcatttggacattgcccatttggacttggactcctcattgatatc

SEQ ID NO: 12609 - DNA, 565 bp, Arabidopsis thaliana landsberg
tcgtctgtttaatatagttgtactttaaggtttttacacaaaaattaggaaatcataaaaatcacattttatttacctcttttacataaaaaaaaaatcattaaatatgactagtttaaccaatagaaaaatatattgaaaaacaaaattggtcaaaaaagtattaaatacatttatatattgcatagaaagttgaaacttgtgaagtcatgaattcatttcaataatgcatgtgttattataacttataaaacgttatgatgactcgtgtcaatcttattgaaccgcatcatgtcgttaacgttgtgtttgtagacagttgcaaaggccacccataaaattttgcaaaattgatacaaagttggggttttagtgatatttgaaagtcgaattttccctacacgaaatgtttacaaaaacaaaaggcaaaatagagttagcgagggagattcattggtaatggtaggtgatataatagatctaccaaaatgtcaagaatcttacatgagacaaatcgccatcatctgttaattattagtgccgaaagtcaagaaaaccaaacttg

SEQ ID NO: 12610 - DNA, 655 bp, Arabidopsis thaliana landsberg
gatgtttcattgttaaagtacaatgatgaatcataacaatgtctagaaatagtagaacctgaagggtattgatctccccgttatgtccaagaaacctcattggttgagcaagaggccacctaggactagtgtttgtactgtaccttcgatgataaatagcaaaaggagactcataaagctcattctgaagatctagataaaacaatccaagagcttcagatcgaagcatgcccttgtacactatggtttgattggacagtgaacagaagtaaagctctgttccccaactctcagtagctacggccctttcgattagtttccggcagatgtaaagttccctttcaatatcatcagtactatcttcctttgcgattttcacaaacacttgttgaatgttaggcattgtctccctagcatttttaccaactataggaacattaacaggaacttccctccacccaagaacttgtaatccttctttctcaaatatgttttcaataactacaaaaagggaacaaacttcgttagcaacatactgaatccgtattgctagtgccatctatgattaaggagtcaccttgcttggcttcttgcataaaggtatcatcttgtggaagaaagatcatgccaacaccagtatgcaacttatcaaaag

SEQ ID NO: 12611 - DNA, 1075 bp, Arabidopsis thaliana landsberg
ttttctgctcagctctatgttaaaggatgtttcttcattacggggagaaatgaatgagagctcttgtttattgatcttcccatgattctagttctaaacgagccttctgttatctgaatttgaagtgttttaagcttttttgttctaataagccgtcttcttctctgacgctatgttttgctcactgcagagctcaggtcactatctgacgggatccgtgacaatagtggttactggagtcaaaagcagctccttgaatcttgagtgttaagtagataggtaaggtaaccgttcatggcctcgaagtatggttctggagttctcccagaaaataagaaggaaaagggcgataaggaaaccccggaaacatcttattccagtcaaagtgtctcagtaaacactttggcagatcaagtatcttcaactttgtcttttgctccaagcagcgacagtaaaactggaggtgaagttaaatttaatgaaaagtctgatcagagcgggaagagtaacacatgtagaccaagcacaagcagtgatatcagtgatgagagcacatgtagcagctttagtggtaacaacaagcctcacaaggcgaatgacgtgagatgggaagcaattcaagctgtccgaacgaaacatggcgtattggggttgaaccattttaggctcttgaagaggttagggtgtggggatatcggaactgtccaccttgctgagttgcacggaacaaggtgtttttttgcaatgaaggttatggacaaaggggctttggctagccgtaaaaagcttcttagagctcagaccgagagggagatattgcagtgtcttgaccacccttttctcccaactttgtatagtcacttcgagactgagaagttctcatgtttggttatggagttctgtcctggaggtgacttgcatacccttcgacaaagacagcccgggaagcgattttcagaacaagcagcaaagtaaaaacattttgaataataagttcatgttttgcttccaagaaaccacttttttttttttttggaaaaacaaatgggctttggttacatttttccaggtttat

SEQ ID NO: 12612 - DNA, 1137 bp, Arabidopsis thaliana landsberg
taaagccccggttaaaacatttggatcgcttcctttccggctaaactcatgttttgtaaccaccacggcaagtaacggactttggatcgacattgaaggagacaatagacgaaccacgatgatgaacttgtcgtggatagttctctccgtatccgaccatgtaacttgttgctctagggttgtctccaagaatgtaatccacctgatagtagttttaattaattgatcaataatccaatttagacaggttatccatttcacgatacattttctatttattaaggatatataatggaacatgttatgtatgtagcagatatcctaattatccattaggactaactaaccttgtaaaattaatgaaaatatctccaaaatagccaaaatattcaatcccggatttgacctttgcctgaattcatattagtttaggtttattttttcgtagtatatatatacttgaattaaccatttgtacccttattcgctatagtttttattttgaatatttcgaagttcaagcctgaagacctggactcacattacgttaaattcatcgcctttggataagagattctttccaacaagtgtcgaatccatcacttctactcgagagatttaccattaggctaaccccacgttggtcttatccgctattatctactcctaattcttgattttgacatcaaagactcaaaaattatagtgtatgttattatttagatcatttggatcgacggattcgacatataactaaagcctactacgcatggtaacacgactatctacaattaaattccaatagagaaaaccatagagatgggtttaactacttgactaaaagcattttcccggtgttatgtttcaatttcaagttgaattatattgttgttttggtttcagattaaagggagaataagaaaataagaaaaagttgggacaaacctgtgatttagaaaaatctaggagttgggatggagaaatgtttccttgagaacaacgaagatctcttttggaggacgagagatagtcggagtaaacagtggctaacaatgaagcactcgtgacaaactgcatattgttccagctttgtcggaaaatcaaaccccctggagttttcttaatgttctttgtact

SEQ ID NO: 12613 - DNA, 806 bp, Arabidopsis thaliana landsberg
  unsure (1)..(806): unsure at all n locations
cctctgcttatgccacggttctcatcgagattcaggcaagttatctcattcaatttttaaagtcttttaagctgggaaggtaaacctcttaatagaattgtgggtagagattattgacaacgacaatcgattccctatggaccacttttttttttctttacccaaaagagtcaaaaagtaaagaatctgtcttttagcttaaaggtaaaacatgtgcttataaaggacaaagagtcacattcaaagatattgtcaatctcttctccacaacaaacaatgatatgatattcttatcaacagagttagcttactgagttgacactacaactcataaaattttgtctcttaatgatcgtagctttcaccatttaatgacttgtcatgtacggtatttggtaccattgtgtatatgtcgaccgggtagcggcagtatgataaaaaatagttttacaaattaaccaagaatatttttggattaaagtgtctgagatgtggatcagccgggaaggtccccgagtttaagcatcggtgatggctgatggggaggggactaacttagttctggtctctgacccaaggaaataatggacctagttcaaaactgtttaccataattaaagattggagtattgtatcactaacggtgaaagttttatgctttttgcaggatacactaagatctagcccagctgagaacaaagccatgaaaagagcaagtcttgtgggagtatcaaccaccacttttttctacatcttatgtggatgcatcggctatgctgcatttggaaacaatgcncctggagatt

SEQ ID NO: 12614 - DNA, 899 bp, Arabidopsis thaliana landsberg
gatacaccttcctgtaaagaagaccgggaaaatcattaggtaaaccggtcaaattatttccggtataacaagccggtttagttaggtcagactagaaaacagagaaaataaggttttgctctgttttgtggttctgttttaaaaagacacgtacccaaactgctcgaactcttgtcctaatgtatcggaaaagtaatcttgaacggttctcgagccactattatcgttggaaaactgaaaagagagagtctccttccatggcagcttagtggagaatctgccggtgaagctacttgcatagccacaactctcaccgggttttctctgagctttctgtttgccggcgagaggcatgtcgaagaaactttccatcaaacggtgagcatccgctattagtgactcgctgacgccatgattgacgacgaggaagaagccgtgtttggtgcaagcttctgcgatgactctaggagcttcaagagtcgagtcttggcttgagagatcgatgaacgggacgttgagctctggaatgtcaatggaaggtttctcttcgtctggccaaatgaattggtttgggatttgggattggaggttaagaagagaagggttaaagattagtggagaagtttggtctttttcaagatcttgttttggttcgtgttctttctctgccggagatgttgttgtgcatagtatcgccatttcttttcttttttttttcttgagagttttggggtttttgttttgtcttgttctgagtgagtgttgttgaggagatgggggaacacagggtcctttaagtctttatataagcaagcttcaagtcatgttagtgtacatttgtttggtttttaatctttcttataataattcttctttttttgcccatgggattcatacta

SEQ ID NO: 12615 - DNA, 828 bp, Arabidopsis thaliana landsberg
gcattctaagaatgcattcacatcaatatcatatattcatgtgtatataacttaaatatcaaccctagttcaaaagtttgatactagagggaaaaatgaaaaacggcaacccaacccaaaaagttggaaaaatacaagaagagaaaacaaaacataaggtaaagatctaaatcaatatacggtcacgctcgcggtcacggccacgcccgcagactaacatggcaagacaacgaccaaggatgtaaaacttggctcgctgtttcctcaccatgtggctacacttcgccttgaatgtcttggacggcttgcatgtcccgctcgtgctgttctcttctcccattaattacttgatgattccaccactacaaggacaaaatttgatattctttgttgaaaaatggagagctttgttgtggaaatgtgagaagacggagaaagagagggagaatttattaatggagacatattgcgacatagaaagagtcaatatatggagagagctaagcctatgaattagaacgagggtcacttgctttggtacaataaatgattgatatgtgacatattttctttttttctatgaaataggtaacactaatactgtatatatgtaaccttacgcattctagaagaatattaatgtgatatatgttctgtggttctgttttagggtgtagtgtttttaagtttttttcaagagatcttgtagattaagtgaaactgtacttaaataaaatagtgtggtatgtgtatgtggtttgctatttagaaataatgtaataatagagtgtatatagagtatatagtgtgggtatgtttaagaaccct

SEQ ID NO: 12616 - DNA, 616 bp, Arabidopsis thaliana landsberg
cttttttttttcccttccctgtacactcttctctccaccatcaacagcaacaacttcttcaacttcaccttccttctcctcctgaacaacactctttccagacccaaaagcatcgattttaagcttcaaatcaggaacagactgatatataggcaatgctaaactctcagacaacttcaaatgcaaagacctaacgtacgtccacttattaggcaagaactcaactagtccattcaatgtcgccatcacattctcagtaatttcactaatatccatagacaatttcccaaccttaatgacactacacgtcccagtccttatgaagaacatagcagatccacaagctttctctatctgatgtttccagttcctgtgcttcaaatcaagcgccaccggaatcttcttgctcgtaaagaacttcttcccaatcaccctcggcagcagaggaatgatcctccgatcagtgaaaaacatgtcgtaagagtcgcagagtttcctcttcgcttcgaacgccttgtaatcactcttcagtttcgaaagcttaataaccttggtgattggaatattctcagatatgatcttcttcatcgcatcatctttggtgagacacttttag

SEQ ID NO: 12617 - DNA, 552 bp, Arabidopsis thaliana landsberg
  unsure (1)..(552): unsure at all n locations
acagtttatcgaattcctttaggagcgcaagatctagttgttcaccagagccactttagcttgttacaggtcacagaagaacaacatcaagcgtcgttgcaaaactgatgggtcttgaagtaattccagatgagcctgtgaccattcagaatagagaaaatcgcttctgcgactccccnnnnnnnnnnnnnnnnnnnnnnnnnnnnnnacaaagatcaagaggttttgattcaatcaaaaagatgatgcctgctaagtttcctatgaaagcatctccatgggcgcaagttgatggtgccaagaaccaagtcaaaataccagacgctactacgctgacagtttatggtgagatacagaagcggctttcacagcttgagttcaaaaagtccgagaaagacctcagggctcttaagcaaatactcgaagcaatggagaagacgcagcagttgataagcaaagatgatgatgacaacaaaactctatgttcatagcaatttatgcagagaaatatcagccaattccatctgcaataacacctcgccatgaatttaa

SEQ ID NO: 12618 - DNA, 1206 bp, Arabidopsis thaliana landsberg
gtgtaagaattttttattaatcagattaaatatttataatctctaaagtcaaataacacattaatacacaacacacacatttaaattataaagctatgttgtataatttgtaccgtattgatgaaacagggagaaaatagccaattatggacagctactctcatcatgcgtagtcaccaagtcatgattcatgaatcctttttcttattaaccaaaatcactatatgattccttactggtacgagactactaagagtctactactactagtactaatttactaaacgattaacatcggcaagaattagtaacaaaactaaaatcaaacacaagttctttaaatattagattgaattagttaatgaaatataatatacaaaataatataaaagtatcttaaattccaatgttaagtctttgttgagtctaatatctcacaagtcacgaactcacgattgaagattgaaagaaaaaaaaaaacaaggaagaagaagctgaaacttttttaaataacaaaaaaaatgttaaaataataagatagtttatcttaatgggcttaattatggtatatttacttttaaaacaaattttattgggcttaattctatatataagtacaatgttattgatgggcttaaatattataagtcttttaacgtaaacttttttagatgggcttaaatattataagtcttttaacgtaaactttttataagagtcaatactcttattggattaaaatcaatatatttaataagacttcagctcattttttaaatttccaccagcgtcaattgacctctatgactgatatcccctccactctagagcaatgtgatggcgagatagctagaatgttctacacagttggtttgtcttttaacgttgcgagaaatccttactatcgtaactcatttgtacgtgcatcacatattctaggatatgttcctggttataattctctgagcactacccttcttcaaaaagaaagaaaaaacattgacatgcatttgcatcctttgaagaacacaaggaagcaaaatggagttcgtatatgtactgatggttggtcggatccacacggaagaccaatatttaacttgattgctgcaaatgagagtggtcatatgatatgttaaggtcgatcaatagtcaaggtgaaacacaacacaatgaaatgattgcagatttgatcataggatgcat

SEQ ID NO: 12619 - DNA, 912 bp, Arabidopsis thaliana landsberg
cgattacactctcaggttgtagctctggagaatcgtgataatacttctaataacactaatatggatgttatggctttgttaacagctttagtttgtgcacaaggtacttatgctctgcatcattctcctctctggtagttctgttttggaaatccatgttttagaacaattttttctgatctgtggtctgcaggtaggaacgaggctactactaatgggtctccgggagtgcctcaaagagagcaacttcttcagatacttaacaagatcaaggctttacctttgcctatgaatcttacctcgaagttgaacaatatcggaattttagccaggaaaaatccggagcaaccctccccgatgaatcctcaaaatagtatgaatggggcttcttctccatctacgatggacttgcttgctgctctctcggcatctttaggttcatctgctccagaggccatagcttttttatctcaaggagggtttggtaacaaagaaagcaatgataggactaagttaacttcttctgaccacagcgccacaaccagtttagaaaagaaaactttggagtttccttcttttgggggaggagagaggacaagtagcactaaccattctccatctcagtattcagattcacgcggtcaagacactagatcgagcttatctctacaactattcacctcttcaccagaagaggagagtcgaccaaaagttgcatcttcaacaaagtattattcttctgcgagcagtaaccctgttgaggatagatcaccatcatcatctccagtcatgcaagagttattccctttgcatacttctcctgaacccaggaggtataacaattacaaagacaatagtaacagtcccaggaccagttgtttgcccctagagctctttggtgcatctgataga

SEQ ID NO: 12620 - DNA, 1170 bp, Arabidopsis thaliana landsberg
gcttttcaatgtaattatgagacatgaaccgatcaattagattcacggtaaggtaaagtgtatctgttaccaatttgtactcttcagagacctgaaagaaaagatattcttagtttagcaaatactttgaaaataacacactttcaacttttacacaagttcaagtaaaagtgtaaaactatgcatagcaaatattgtattcctacctccacgagccaatcaatcagaattccgcgcatcgttggatcgatatctcgctgcacttgcaccatatagctagttgaaggtctttgttcaagctgtacaaaaagtattggttaatataagtaactcaaaatctcaaaatgtaaatcatcttttgggaagatagaataagaccaagcattgagattatgtaatgcaaacctctgcaacatttatgctgtcatatatacttgcagcatataagctacaaaactgaggatcttggacacctgaatctatatctacaatctgaacacaatctgtgacatcagatctgtcttcttctgcacaatccactaattcttgagtaaatttgagaaacaaacactctggtacaaacacattctttagtagtgaagtttcttactttgctttgaagcagatgcatctaaagattcaaccattctaatctttgacaaatcttctgctagtttagatttttcgccatccacatctaccaaaccatcttcttctatttgcttagtttctttaccacctcgcttgcaagcctgccacattgtatcattaacaacaaattctaaaccaaaacatatactaatcaagaaaatgcaaagaaagcataaaaatttgctaccttaacattgccttctgtagaaattatactttctgccaaagtgttagtcacatccttgagcaccgctcgtcttttctgattacaaactgtgatattatccgatgccattcgtttattactcggtctagcaacacgcttcgtttcatgtttaaaagcgggttttgatggagaattcgacactcctaaggccttagctcttgatctagtgactctcacattattatctcgaattttcgaagtagagattgcttctttcttcgcattagtgtgcttagaagaagctctatgcatgatttcaaattataaaaaaaccactccactgattcaacaag

SEQ ID NO: 12621 - DNA, 1227 bp, Arabidopsis thaliana landsberg
tgcaattgactatgtaagatatgcaggcttgtctgtgaactttaaaagaactctactcgacctttttcttaacatgtgtagcagcgcattagagattgattttgttgaaactatcgacaaggaggtcttgagaatgctacaagctatatctaaagtggaaagcagccaatcctctagctaaccttttttgtgtggagaaagccaagctgaagctcagttttgatggtaaaaaatcatacccgatcaagatcaccaaaaactttattcgaaaattatttttatttaattctaccccatttattttagggaatcttgtacaatgtaccacattttccaagatgccttacaatccataccacatttccgattcctcttacacaatgtaaaaagtaattcattatcattcttctaatttctaacgatcattctatatcaccataaatagatactcttgttgtaaaaataatatgtttacttatggagttaaggattctggtcatgcctctatgtataaatggttcggttattgaatcattcatccatagtttgaagccctagttttaaatcactcccaagcgtcaatgaatgattctataactccttgctaaaatcctggtatcttgttcttcaagaggttggaatgagacttattgtaatggagaacctgtatgcccaatcgaccgtatagtaaggccaagatatggcaaaaggatattataactattgaagtttaagatatttatcactatctctaaatatactatttatatttatcttatattaggaaatttagatcaatctcatctctatataagagtatagtttgtaactttttcttatgagagtctaacatatttcttcttaagcacctttgtattctttactctcatcaaatttatcaaagtgattaagaaaggctattttggtagagctttttaccatttactcgctttgtctccaagagaaaactagagaagtttacatttcaagaagagattttttttaatcaaggagagacaagctcttcagtcaacaagatgatgttgctaaattcaaaggattcggattcatactcaatccatattttgtagcagtgggcaatagactagaagccgtctctttgttttcttgtaattatgaaaatactatcaggagaactattgctggaagcgttttgggcaccccttcgactgatcattaggacatctctcttcggatacgcagttt

SEQ ID NO: 12622 - DNA, 828 bp, Arabidopsis thaliana landsberg
tctattgatagatgaagtacacagtatcactgaatcagaatgggaatcacttgtgatccaatcggaactcccagtaatggttatgttcacagcccggtggtgcggaccgtgtcgtgacatgatccccatactgaacaaaatggactcggaatacaagaatgagttcaaattctacacagtaaactttgacacagagataaggctcacagaacgttttgacataagttatctcccgaccactctcgtctttaaaggcggtgaacaaatggctaaagtcaaaggagctgacccaaagaagttaagggaactcgtcaagaagtacatatgagttaccttggttcgtccgtttatatatgtttgcttcttcatttgtcaaaacctttgcttttactatgttgttgagtgttgtttgtctcctttactactaaaaataattgtctacttgaataattaacttttatttcaactttaattattacttcttgatcatggtaaattatgactaaagatggataatgcaattggacccataatgataaatagtttttgataagagtctcacttttgagttaattaagacaaaaaaaagtttacaagtaacaaaaaacaaaattttgcaagtgtaaccaaattactcagcagaatctgactcgtcttcttcatcattttctgacactgcgtcctcatccgcgtcagagtcactttctactccatcttccgacaccgcgtcatcatcttcttctgcataagttccgttttcaaagtctgttacagttgacccttttgctttcttatcatccttgaggtctttctcgtcatagaaatccc

SEQ ID NO: 12623 - DNA, 752 bp, Arabidopsis thaliana landsberg
gcgttttctttttctgtccacaaccagattttcaacttcacctttaaacaaatagcaaaacttttgagaagaaacatagaaaatgatttacctttaggccattgagcaatgattttctccttgagagatgcaacagtcatgaattgactatatttgcttggaccaatgtcggtaccatctgcgagtctgaacttcaattctattaaatcttcatctcccatctttaaattattacctcaagaaaagatctctagaaagaagaaaagcagagagttccgttgtctttgagcagagccaaatttagaaaataacaataattgggtctcttactctctttctcaacttatataataactaccagaaatctcaagatacagtcatctctccatttacatttatacaaatctgaatttacctttttggttgactatatacgataaatttgcaacgtatatttagcatactaagtactaactataaatgatttggattatatgatgatatattaacataagcttttatgatcacttgtcatattagacgccaaccaaaaccaaccgtcacgaatacatgaatcattccttgcgtacattccacaaacacgatacattctttgcttgaaaatagtaaataataatggccttaaagatactaaatcttttttatatgttcaacttgaaatcttttcttttaataaaaaaattaaaaattccaagaattcaaaattgccgtttggaaaaaaaatttaaatt

SEQ ID NO: 12624 - DNA, 1041 bp, Arabidopsis thaliana landsberg
atatcatagcttgtcggagcacaaaggttttattttgttcatcttggtctctatctcctggttgcattatatgaactctgttttcctttgcttataggcacttgaagagaatgtaaaagcaaagctatctcggttttgctatgttccggtatgatgcatcttgtgcttagttttcccttgtctttttttttctccctcaaatattggttaatcagcttccgcacttgatgttttcagattcagaacatcttctctctctgtgatgttcccaacatctggcacattcctctgttgctcaaggtacgagttttcaactaccgcgatgattttttttaataatttacaaaaatcatcagaggtaacacttgttttcgtttcttgaaacaggagcagaaggctcatgaagcaatttcaaaagtcctgaacctttctggtattgctaaagaaccttctttagagaaatgggcatcaatggtagaaattagtgacggtttaaatgtacccgtaagtctcaaatgcgaaagatttgtatactttgtagcctcgatgtctctttcttgacatccaagtaaatgttttacaggtgagaatcgctatcgtggggaaatatacagatctatcagatgcctatctctctgtcttgaaggtaaacttatacatcactttctcatgcacatcacaaggtctggtttaatgaccctgctaattgtttaggccctcctccatgcttctgtggcttttcacaaaaagcttgaagttgatatggttccatcgtgtgatctcgaaaagaccaagaagcaagaggtaaacaagtctgattaattacattcatcctaatttgcctcttcttgaatactatgagacagaattgtgtcttatttgggcaggattcacgcgcatatgaggctgcttggaagttactgaaggtttgttttaacttttttggcaatctttgagaagcctgatgattcataagtcataacatagcatattggttcatcaggacgcaaatggagttcttctccctggagggtttggtga

SEQ ID NO: 12625 - DNA, 582 bp, Arabidopsis thaliana landsberg
aagtttcatcgataaaaactgaaatgcatggaagaagtaactaacacaaagtgaggttgctaattaaatgaagtctcaagaacagacactaagaaaataggaaattcccaaagcaaacaaagggaaacctcgatttggcattgaagtgattgcacatagttaatgatttcatcgagcataactgccttaccagtcacctacacaataaatgcaatgtcccatttatatgaaaagaaaacagcttcagcttccattcttctacatgtagacatcaacatctaaaaagaaaaggacttaccttgtcgcaacctggcacaagatcttgcaagaacttcatcctttcactgattttttctcttcttacctacgataacaagtttaaccaaattcaaatacaacaacaaaagaaatttgctttctattcaacttcaaaaaaatattgttcctactctttcagcaagactgtgactattagtagcctggcctcttcgtgccctcatgtgaatatacccatcctttaaagaatcagaaggttgcttctcactgttagtcttgctcgcatttgaaggtggactttgctca

SEQ ID NO: 12626 - DNA, 627 bp, Arabidopsis thaliana landsberg
  unsure (1)..(627): unsure at all n locations
tggctagttgaggcagatggttctcagctggacatcactccactctgtgcttcaatgcttttgctgattagactcgcgcttcagtagctacatttggacttccttccatctcatccgatctcctccttttgtcgtggtacattcattgcgtatattttgtggatatgacttcttcagaaaatcttggaaaattctgggcgacacgccaaggggtgtcttggtacgcagagtgtttaccgcattgtcctggagtagtaacttgatgtgaccgagatgtgtaataatttgcctgagcaattgacttaggtccaaccgttgtcgtgttacgcgaaggtnngcctgttgcctgactcattttcaggcggcttgaattgcttattgaattcttgcgactgttcggcgagcgaggtaggaagtggacggtcaccccggcctctatgtaatacccaaattgtatacagtgatactataatggattccttattttttgtctcggcgaagggcgaggaggatcgtcatcaccagggaagtcgggcgtaacgcaattgggaggctaagcacggaaccggagcaattctcactgttgatctattccgcgcgggaactttggccacgacggaccgtgtg

SEQ ID NO: 12627 - DNA, 817 bp, Arabidopsis thaliana landsberg
atataagtaaaaagcaaaaaagacacctaagtaacatattgcttctgtaagagagtctgttaaatcaacaaagcacgtgagcttaaccttagaaattcactttaaacattattgtttgtttaaagtgaatctgttaagtatcttatttgttgttaacagactattaattttcttacaacgcctcttttttcccagaaacaaatatgtccggcccataaaagtttttcttcaaatgtttgtaattggtggatatatatttaaggcccaatatgagaaaccgacttaatgtatatagcccgattacattaaatccctaatgtaaccaaatcgtcgctgccttttgaataagtttgatgtatagtagaagacatactttacaggaccccgatcgactctctgatacgattcaaagcgacatgcatacaatggtacgctctcttcaacggcaagagattcatcgacaatcacttggatctcttatagaaacgatccatacgaatttatcatgataaggttgaaatcatgaatccggtgaccttagatctcttatgtctaccagtttcccaagagtttggttttggtattttgcatactaccgtttctgttattcactgctccaaagttccgatttctccaaggagacattcaagcccatatgttcgtggcccgttgaggatagggttgattttgcctggggtggtcctcttgatttatccgccttttcaggtttccaagaagaaaggctttctttgttataataaatacgcttggagccccaaactaagagaagaacccagggtgtgaaggtcacaaacaa

SEQ ID NO: 12628 - DNA, 1070 bp, Arabidopsis thaliana landsberg
aagtcgaaatattcgttttttttttattttagtgaaatggaccgacatgtttttaaaatattagacggacatggcaaccacatatgtaagaactgtcatgcatattctttgcataagaataaaacaaaaaccagaataatcatttttcaggttgataaatctaagtcagtccatatgccaaaatacaatagaatctcagtcaatcatagtcaaaacactcatagtacctacaaatgttacaaatatggaataaaaccaacacatcatcaatggcaatgaaaaccatccaaaaatttatttagctgcaatgatggtgaatggagggttagataggttgacctcttctccaaggaaaaggttgcctaccgttggacacaatccgagaaggttactgttcatgaagatatgcaaagccataatctaacatttattgaaccaacataactcacgcccattttattatgagaatatctacatagaaacaggggaaattgcttattacagaacctaaataaacataaacattacatatataatttagacgaacctatacaatactagctttggagtttcggatcacacattaattctcgtagctagtgtctacactcctttggaaatccttgaggaaaccttttggtgtccgtacaatagttatagatcatgtacttcctctgcaccactctcatcttatcttccgctgttagatcaagcctttgagagaaccatctaggtgaaccggcaggacaagatgatcttccgcccgaggaaacacatgcatccgctctaaagtttctgtaagaagcggtgaatggtgccttggaccagtcagtcttaacgagacctccccttgtagcccactggtccgcgttccatagactcgagtataacctcatcggctgcaattttggatactggatacccatatgttgtagattcttgaattctcttaccggaatatcatcaaccatgaaactgtatcaaaacatataaataataaataagatgttaataaactcaaattttgacgttcaatgtgaaaagatttatattttgcggatcagccataa

SEQ ID NO: 12629 - DNA, 587 bp, Arabidopsis thaliana landsberg
taaaaatttattagaagagagagtagatgtgttgggcctttctcttccgaagttcttaaaaacgtgactaactatatgattttagtatgacatagactattacatgaggtttcggctttggaataaaggttctttcatgataaaggcgtgtgtaatatgaagatacaacccgaagtgacatggataaacaccgaagatatggctaaaggagcttcggcttgatataatagcaaggatgaaggacggaaccgacctaaggggaaaaagactacttcgtccttgataactcgcattataattaagagtaaatgttatgggcatggatgtaatcttattcgagttgcatctcgtgcctataaatagataaacagtagcatcgtactgttcacgctggattgtaatttctctctcgcgtcatcttcacatccccaccttctgtcgaaccgaatgtatcattgtattatgaatatcattaatgttaattcttatatgtggatataaataaaaataaattacgaggatttgatcattgtcttctattctttaatgttctttcacatttatatttatatttatatttataatta

SEQ ID NO: 12630 - DNA, 611 bp, Arabidopsis thaliana landsberg
tggattatgtattcgcatctattcaaaaaatggataaaataattactataatttttttattacatcccatgctaagatttttgtcgaagcatctaaattgtatttgaaatttaaaaccaaatctgaaattgaatataaaattaaaaaaataaaacataaacaagtagataaaaaagaaactaacagcacctgtttgttttcccagccggcccacacccgctatggtcatgcacgacatgtgcatggtgtgttttcgtttttctttcttttatttatcttattctcttttctctattatttattcctcccatcacgcacaacgtcatgtatgctttctccaaatcgctgctcgcgatggccgcgcgggagatcctgaaatcacttgcgtcgatctcgctcgcccaactgaatcctcaccagccgcctagaaccgcggacttgaccccgcgcatgcccggactctcccagccttatataatccgaccgctctcgattaaccgtgccgtgcgccattgacgaggagagagaagcggggaccaccattgatgcatcgtgagcgcaggagagagagatgcaagaagagagaaaatagagctgggcactgcgaggga

SEQ ID NO: 12631 - DNA, 504 bp, Arabidopsis thaliana landsberg
tattcttgtttttgctgaaactagcttcaaaagtgtgttatttgttgaatctgagctttccaacaattatagataggccaagattcttaggggtatttagaacttatccaaaatatagaactagtgctagctcatctattccaagttttacccctttcggttggtttggagctgattctaacttagaggctaaatttttaaactcatgaacttgtgaatcaaagaccaggcaacctagttagtccaagatgttgtaatggtcatcaagtaccaaaatcaatataggaaatagtttgaggccatttccctttcactaaaggatggggctccttccataatgaacaaggttcatgtaatggctagaagtttcacaaatgaaataaaccataggtttactataacttaccaaaaagtgatcctactctctccaattataataatatatcagtgttctataatgctcatctatcaccaacgtaataccatgcatgaatgttttagttg

SEQ ID NO: 12632 - DNA, 908 bp, Arabidopsis thaliana landsberg
gcgagttattgtgaaatcgtgactcgtgtttgaagataataataacaaaggaactcatcaaaatgttgcacttgtcatcaaatattgtacagaaaatctagaatataattcccctctctcttctgccatacaattcttcaactcatctctgttaatcgaaacaactgcagcgtccgatgatccgtgttgatgatgataagctttcccgaaaacggagaagcagctgctacttttttaacaccaatttgcctaatcagtacggtctgtagcgcataggccgtctgaacctgggaactctcctgcacaaaccatcaaccattgtcaattttatgaacaaccatgatgaatcaaacaaatggactttaaaagagaggataggcaggtaaggttctagaacacacccataagcatatggaggataaaatggaactcctggcatgaatcccctcatcggtctaaagggacgccctcttcctcgaaattgcctcattccaggtacattagtcctctttgcagatacctgaaaatagattaaacaaagtttagtaatgacaaatcgtaatatggaaaataattaactacatcgtattgaacgagtttgcacctttatctgacgaccatgtagttctgactcgttcaaaataagcgaattctgaacagcttctacttccacaaattcgacatacgcaaaacctttaggttgaccaaacttatctgtcagaattgtaaccctattcactgtcccacatgattgaaaatgctgctggacttcctctggagtacatgcatagtccacctaatatacacaaaaaaacaaagacacaggatatctaaagaatcagcttcacagatgggagatatgaaggctttctggatatgaaggaagttagtttagcaatactagagat

SEQ ID NO: 12633 - DNA, 634 bp, Arabidopsis thaliana landsberg
ctctggcgttcgtggaccctccatataagatccgccctccccacgctcgccgtggaccggcgcgtgccactcgccacatcgccagatttctcagcaacgtcgcccgcccacatgcctagctcccttcttagagccccgccagtgcccgcactcgctccccctcctcatttcacacaacattaccctctctcgtgctctgccctcgccgccagacaccgccggagacccgcgcccgcattcccgaccatccagctcaccggagaccgtgccaagcctccccgagctccaccccgaggtgagacaccgttgcccgtgcccaattttccctgttccgctctgtgcttggccaattttggcgtcgctggtgctcggccgcggtggtccgtcgtgctcgcgtggtggccgaccgatttagcccggtctagttccccggagttggtccttgtgtcaccaatgcctctgctgaagctagcccaggccttagtgcaccttaagcccctccccgtggctggaatgcatcgcggagttcttcggtccgccgaggtttctctcatggtttccctctctgcatgggactatggctcttcccgcattgagttgcgtacgttcttcgtcctgccactctggaccggag

SEQ ID NO: 12634 - DNA, 1038 bp, Arabidopsis thaliana landsberg
ttttgttaaattccatagacatgaatcaattttgggattcctagatatatcctgattatattatatatatatacctttctggttttgtttctcagtcacaacaaaggaaaaacaaaaaaaaatatggctagagttttaggtgtgcttctgtgtttactcgcactgttcagctcgagcttatgtttggatcatgccaatggtcgtggagatcaagcacttgctcaaattaatgtttacgaaacaagtcttgctttagatagttctgtcaaacttcacgcttcccctcaagttcttggttcccaggttccaataacaaattctttcatcatattattgttcttgtcagattcttgtttgacagatatatattaactcttaagagatggtttttttaaatgtcaaaaaaattgtatgatagacttgaatatgttttcttgatttcacgtaattattacaaaaaccaaacttaaatagatatgttattgatgtcatgactttgatcttacagggtgaagatacagaatgggtaaatcttgctatctccaaccccaagcccacttcagatgattggataggagttttctctccagcaaaattcgagtattttttctaatctgcatctgtgtttgttaacttgtgaacgtgccatttgtgcattattaacttgtctttgttgtttgttagttcgggtaactgttggccaacaagtggtggcaaagagaaaactccttacatatgctcttctcccatcaaggtttggtttattacatatttaccagtgatttttttttttttttaagtcccggtgtaacattccccttttaatttctatttggcagtacatgtattgtaattctcatccagattacatgaaattcgggaatgtgactcttcaattccagattataaaatacagagctgatgtctcctttgcactgttttccaatggagttcaagaggtaagttataactattgttttttttaactttactattttggtctattaaagtgggaattaaattatttgatcctttttg

SEQ ID NO: 12635 - DNA, 794 bp, Arabidopsis thaliana landsberg
cactgtctttccttttgctccaaagctctccacaaccgagtgatcaatctgcaaattcactcaattatgttacctatttgcttctctatacaagagtaatattcagtaaaatgatttaagtttgtgacgtaccaaactccttagagagatctttccgtcaaggagaccgacatccacaaaaccagcaaacgatggtttgtacatcctctccttggcgtcagtcccggtgtcttttttgagactcgaactgttgatttattgtgattaatgttagacactctcaaattgtaattaacaaaaatcatatataaataattgaattagtgagttaggaaaacatacggcttggcgtcagagcacatgagaaccttaggcttgttggatgcggcatctttgaagactctaaagaaaacaggagtgtattcttctaagtcagatgtagccaacgtgatcaaaccaaaaggaccaactccaccattcacattcgaacctttcaagttacataactctagtggtttagttgcgaagctttcgtcgaacttttcggccttctctagacttccaacgttgaatgtcacatccacatccacctgagcaggagtgattccttggacctcaaagcgttggcccatctccattttctggttggtcatttggacattctttcctctcaatgactcaatctcttcaataggccaaaacacgagttgcttaccgctagagtcaagcaagattgttcttgggataagctgaattccggcccaacccttcacggtatcatcttgaacggtgtg

SEQ ID NO: 12636 - DNA, 575 bp, Arabidopsis thaliana landsberg
  unsure (1)..(575): unsure at all n locations
ttgtcaccattcatggtcttgatcgttgctatcctgaatgattttactatcatgacgatatcaaaggacagagtaaagccttctccacttcctgattcatggaaactcaaagagatatttgccaccggcgttgttcttggcacttacctagcagtcatgactgtagttttcttctgggctgcagagagcactgacttcttctctgtaagagagttctatcttacttttatgaccagctcgagtaagtgtatttgttgatcttcagttttctcttggtgcaggcaaagtttggggtgagatctatcagtggaaacccgcatgagctaacagcagctgtttacctacaagttagtatcgtgagccaagcgcttatctttgtaacaaggtcgcgaagctggtcatatgttgaacgtcctggcttctggttgatctctgcctttttcatggctcagctggtaagttaaagaatcagtactcttacataagaagcttcagtatatactgcactgnntggtgtttcattccaagattgctactttgattgcggtatacgcaaactggaattttgcagaatc

SEQ ID NO: 12637 - DNA, 814 bp, Arabidopsis thaliana landsberg
gacgtccaggtcctcagaacacgtggatgcttacagagccgcctgtggacaccttccagtctctcaaatcctttgattctaagattcagcagcgaacctccaatctgatagactcgctcaccgttgaagccaagactgggtcggtgtccccacacgcggtacacaaggaggtcattgagcacctagttgaagtaagcaaagcggtagcagacgtcattactgaatgcggagaagaagtgtgggagaacggaactctacaatctctggtcaaggactattttaacagtaccatggagactttgaagattttcgagactgtaacgcaatgcgtccatgaagcaaaaaggggccaacgttacattaaagcggccgtggcacagtttaaaaaagactcggaagaaaaggacgttggtgtcaaaaagaagaggtatgagaaaaccttggaggagctgatgaagtttaaagccatgggaaatccttttgatgacggcctgctcaagactcagttcgagttgatgaacaaacagcaggaatctctttttgatagagtgactgagactaaagaaaggattgctaaggaaattgaagaggttcagaaaagaattagtaatgtaaacacagcgactatagtttcgcacgtggtttttggcgctgcggctttcggttacgccgcgggatgtatagctctaatgtgtacaggcgtgggtgcccctctgggcgctggaatggttacattattaccagtgattgtggtgcaatgggtgggcgtcaatatgtcttgatacagttagaagctttcagaaacagttaagct

SEQ ID NO: 12638 - DNA, 731 bp, Arabidopsis thaliana landsberg
taccgagagaaccagagttgttaggtttggacaaatctctagcagaagtggcagaagaaatttccactgttgtgttttacccaaaaactttaaattaatgaggttctcgaacgttggtatttcccccttgcagcataacaaaatcacctgaaacacacacacacataaagaatgttttcttgtttctaaccatagagagtatgagagaccatacactgaaactgaccttaacagtggaagaagtcaagtgaagggtcttgacgttgcgtatcccactgaggagctctgtcacgttagcggcattatcatctaagaaatgaatgtccagtgtagctttagcaagtgaatccaaattcatatgtggatacttatgtcgaacataatcagagtagtagaggtcgacaacactcggtgtgttaaataatttaaggccataatcaacaaaataaccacatgtatatgtagcagagagtctcttaatggttttgctagatatatggtagggcattcctacagaatgaggcttttgatatatggttaagtcttcaagtgcagggcaagcagtgagaaatattaagaattgaggaacttcgaaccatattgaatcaaggaagagaacctttagtgatgggagagatatacaattaggtacaactgggaagcaactttgtgttaccaatgacagcttaaccaatttcgtgccggtgaagaccttggatgggacataacac

SEQ ID NO: 12639 - DNA, 1349 bp, Arabidopsis thaliana landsberg
  unsure (1)..(1349): unsure at all n locations
tcgcccgtttataatgcttattattgattggcgaacgaatatatggtatccgttattattatcagtatatagcactgtactattttttatgtaattcatgcattgtattatatcatttataggtctgaaataatacgatatgtaaggttattggtgaacataatatatctacatcaatcttgtacaaaagaggagttcccttaaaatgaaattccatgaaaatgtaaaagttatctacataccacatgtcatgctttgacatccaataaaaatggcaaaggcttttaattctattaaataacatatcatacttttcaatgttttcatcatttgagaaacaatcatcagctttaaaattattaatatcccgagttcggtccaatgcctatgactacgaagaagagagtaataataaaaggaaaagaaaaatggttttgttagatggggtcactgctgataaatacataagctatcaataatatattgtggaaagagatatacaaaacctattagatccatataatgttagtagaaaatgataacataattccccgatatactaggacaaagatcaaggcaagcatgctaaatgctgagttaaatagacagacagtaaaggaggggttggcaaaaaaaatgtacattgtaaaatgatgagaaacttaaagaaagtatctttcaattttcttatagttttttattttcttctaaaagtaccataattttagaaaattaccaaacatactgaaagttaggtaaagaggcataattttatatttcttgacgccgagaaatttgtaatagaaaaagttttcagatgatatagttagcaagagttgggagaatggtttttctggtgtcaacccgtacaagatagtgaccacctcttagcatacagttatctagcatcactttatattatggtcgttacgctttgttgatctactgtttttcttggcaaaagaatcactaaaacaatcccgatagcgaaatgaagtctaaagaggtatttctccaaataactaaattaattgaaaaaattaaggtttttgaaaataccacaattttacatattaactgaaataatattttttctaaaacatcacaaatttatatataatgttttgaaattatctcccttatttatttttttaatctaatgttacattatattcaaagaaaacatagcgtttgtacaattagtgcatcggagtttgaatataatagaaagagttagaaggagataaaatttagatcgaaattgaattaggaacgacattggagccaaacttggaaacnagcctaatatcgactgtcctttaaccgtttgatgattgtgatgttattcc

SEQ ID NO: 12640 - DNA, 1102 bp, Arabidopsis thaliana landsberg
cgccatgcaagtcacatgctgtgctcccacgtggaccacaggcttgctcactttcccttctccttcgacgctcgaacccatcacgaaccctttcaccggcgatgatattgccggagactctccctggcctgagactctcctgtcaatgctgaactttcctccttgttttgtgctcattgtccctgtccatttatatacattattagattcactaatgatttcatggagtttattagcaaatcatgtataagggtatattggacatttgttataccgtatatccaaatatattcctaagttatatgttaatttgtgtttctcatagtactttagatcaccaatgctaattagaacattatacacattaacacaaactaatatattaacctacctcttgaaggtgcttttgtattttaggtagctttaattattcgtattaccataatgaatgatttggtcggttataagacctgctaattttgatttgacccacattatagtactaattaattatctcaacttataatatatgatttaccttctgcaataggaatgccggtgctagtactgttatccctcacgagctcgaacttgtaacccaatccatcaatagctcctctctcacgccaagcctcaagacgtccccacggtttccaactactgacacaagtcccatgaggcctaaggattagccacgcaccagggtttgatctagaaacacgatcagaccctggagatgccacgaaaggagtgatcattgaagctgctgctacaggtgatcccgaaagatcatggatcgttatcatccaacctttacgttctctcgcttgtttcttttcccactggtcacctgataatgttcttgcaatccatcctctactactatatgtaaatcctgatggtatagacctatcgcacacaaaaacagaacaattacgctctaggaaatttcaacgcctattgcgacattgtaaccaagttctattagaaatttaccaagatcttccgttacgatcggagctgaatttgcagctgaagacaggttgtttgagactatcttgaatctggtaaaccacagggctacaatccgggtaacctcctt

SEQ ID NO: 12641 - DNA, 985 bp, Arabidopsis thaliana landsberg
  unsure (1)..(985): unsure at all n locations
catggccgttctggtaattgaactcgaatccctgagaagaagctcgccgtgtgagggaaatattttcggaaatcaagctcttagttcgataaatttgtggtcaatcagggaaacttccgcaagggtggtgcatgttgaggatgagagatggaacacgccggacaccaccttcttcctttattattgattgaggatttcaccgtaagcttaagggttgaaagggctaaagatggtttccaaaagggggaaaaattaagcaaaagagcagaaaaaactgaaagactagagaggtaatgagcaaattgaacagtgacagtggagaagttccgacgccggtgaacaaaagctccaccgacgccagagaatataactcgataaaggtttttgataatcgcagttggaagcgtgagagagagtttttatcggtttacaaattgcaatgactcttcatttaggctggattattaacattaactaggttttgagtttatttgatatattttgatgaaattatatttgagtgataattgttattaaatattatcttatgtaactatcataggttggtctttatttttttaatttctattaaagattttttttttcaaatacgaaattctaaaattataaaaattatagtgcttaagaattaaatctgattaaaagaatcacgaatcaatattgttttcttatattcaaattgctgccatcacttatttttgtattctcttcatatttctttttgtcatcttcttttttaatttttaatagccgttgtcattgttattttcactgtccgcttcttcgctacactcttcttcttcttcttccctttcatcttcctcattttcttcctcatcctatccatctttntctatggaaaatgttcattattatatggttgaaaacagagcaaaaaattaaacttactaatcttataccaacataccctcatcagnctatgaatacatacatgaaaagtcgt

SEQ ID NO: 12642 - DNA, 523 bp, Arabidopsis thaliana landsberg
tgcaaatgcggagatatgaattcagttcttaccggggaaactaagagcaaggccagtacaacacccagcaactccaacattaatggctgcagaatggaggaaatttgaacatataagcaaagtcatgctacgagttgaatattacatcgtacgagtaagaagggataaaagagccgcaccgtcatctttgcctcgtatttgttttagaaggcaaacaactaaactgtgtactccagataaaaccgcaaaagtctaacaaagaaaccacaattcattcagttgcctctcaagcatacatgaaataataaccttatgcagtttcaatgaacataatactcaattaattcataaagacttaagatttaggcacctttgcagactgacccgcatccacaaatgatcctttagaccctttcttcttaaacaatccagagcctgaacaccagcttatttccgtgagatttattgttcaatcacagtttcataaaaaaaacaacgacacacaaagtaattctctattagt

SEQ ID NO: 12643 - DNA, 1028 bp, Arabidopsis thaliana landsberg
ctattgagatgcttttaaaacattaaatatgaattacaaatagaagttacatgtacatcgagaggtcgctacataactagcttgatgctcgtacatctttggtcaaaacttaaacaacatcataagcagatctcctagaacacacgatgatattttctcttgtaaaaatattgcgttgacaaggtttcttgcaagaatcgcaaactggtcgagaaagattacttttgccaagaatttggaacaccgtcccatatattttgaagtagtgaccaggctttagatgtagatcttcaccattcagtatgaagagtagtgcaacactcgttgcaccaatagaatacttttgtttttgtgtctcataggttacgttcacaaactttgcaccaatctttctcacacacttcatccccacataaaattctcatttaagtgtttgtcacacttataccttactctatatgggaaagtagcacattgcatacatataataaaatcacatttgatgcaattcaatggtttatgactttgtgatctgcatacctggcatatgagtttttcttttggccctaaagctaggatcaagggatgctcatgaccccatttgaaagttgggctggaaatatggaatgcttcttttgccacactctgctttcacaaggtgaagctcctttcagatatatgttgcatttgaatcgtgcaattgacacttataaacttgatcttttggatctctgcactctttagatgggtctctcgaaaagctttcttgtaatcactattatcataaaatgagccggctcaatgtttttttggaaaaaaaataatttggaccctaactttaatagatttcattattagaataaattacaaagtgggtcttgagcactgataacacacgtgcagatccggctctgatcataaacgataagctctacgactatctactgtctaactctgatgaatgatatcaaattacacaatactatactagtctcaatcatattaacgctttcacatcaaaaagtgca

SEQ ID NO: 12644 - DNA, 769 bp, Arabidopsis thaliana landsberg
ctctatcttgcgtttcagcagatgatcatactcaacactaacggtccaaatacaactacacgagatcattccaaaacatcccctatgacgagagctgcagactaatcctcctcataacttgcttactctttgaactgccattctcttctgcacattgggcaatgagcttggctcgtctgcgaattcacccatttcaatatacagtgaagatgaaacgcgtggttgcaggctccccaaactgcccaaacaccaaaacaccaaaacagataaggtctaaggcatgcagttttgttttgagttattaccataagtaaatgtttagcaatgtttccgtaagcaagagaaatagtgggtgttctaagcaacatatataaaagcgaagacatgaaagaagagaactttacttagagggcaatcatctccaggaagtttgcaatcaggacaacaaccatcaaaagccatccgacatatcccacatgtttcgtcttgagcatcccatgtccatgaagcaactgcatgccatctattccagggagaaacaatcagttacaacaatagaaactccgcattgtaagagctcatgtgttaaagctaaagggacgaggaacctactctgttttttttttgggtatgcaggacagaagtagcatagaaagtcaagagcaacaatttcgtttttcttcttttacttgtgcaacaaagcgaaatgcaggcattttgaacaaacctagtctattaaataaaccaatggaagatgcaaaaagttatt

SEQ ID NO: 12645 - DNA, 855 bp, Arabidopsis thaliana landsberg
caacatagtaaacagttggaataatcccaataatattatcatctaatactaagatatacaaatgcctacactaaagcagatattaacttgcctccaaatgaatctctaagtaatctagttagctttgaatcacggaatggaacatgagaactattctcagcaagtgcattgatgcatttccccagtgcactcagagagagattgatagatttggcttcctctagtgtatgtccctcacttcctagtaaaatatataaacaaacaaaagttcagattcaagaaaaagataaatctcaacacaaagttattcactacaacttgaataaccatcaactttgaagttcaagttgatggttattatcaaagtgtagatgaggaacctgatttattgatacgttctgacccagcgagatccaccacaactaactttcctttccggacaacaggaggcttgagagacttagtcatatgggagtttccattactttcacttgacaaaccatctcttgttttcatagagcgcctaacatttacctgcagtttagttgactatgaatacacaagtttttttactaacaactcttcaagcaaagtcatgatcaatagtattcaccattaaaatagcatgactacgggatgactcggtgttcaatttggtattagcagcaaaccggtgagcttctccgagttgcagtagttccaagaagctttgttgatccctaatttcaaccaaagtggcacctggaagagacacatctccatttttcgggtcctcaactatagcaatgttatcattagacggatcaaagaggtcttgtacagtctccatataaagctgcaaataggagacagata

SEQ ID NO: 12646 - DNA, 939 bp, Arabidopsis thaliana landsberg
  unsure (1)..(939): unsure at all n locations
atagcgcaaattaagattatttgactgtggccttttttatttatggctataggtaaagcaaaagacttttttttttttttttggacaaaccagaaaagcgaaagacattggtcgattttattaacaataatttttatggttaaaaaaaaagtgttttgtccaggaacaaaaaaaactgctcgacggctctactatgattttttttcaaaaacatcaactagcttttgagtcacattgttagccaatgagaaacagtttgagtcaaataattggatctcgttaatttaaattccaagtttaagaggaaaaaaaccgcatcgtcatgcacatgtgtgagttgtgttaataacttcacttaatcactttgataattttaggttcattaattgcttcactttgattttagttctttaaaatatcatccgaaagtaagactttttgcattaattttctttttgtttgcatttcctaaaaataattttacttaaagtgcatttcttttgtttcttaagcctgtaatatgttaaaactgaaaagtgtgtgaaaagcatatttagcctgatgtctagaatctacagtaatacaaattaaaacggtaaataacaaattaaattttaaaatctgtaatgaatcgaggaaaatttctgtatggctaatccctctacttctaattaatgcgatcaaggaactggaagctgaattgaaatggaaaatgttatcgaaagcagaaacgtctttcctcaagaaaaggactagtaatataaactaaggagagtgataaacactaattaattattataataatttaaatcaataacaaaatatatatttgatatctttgatacaatgatctgaggattaatccattaatacctaattcattngaaacacataanacaccttgcatatacgcatatancagtgtatgcatatgcatga

SEQ ID NO: 12647 - DNA, 846 bp, Arabidopsis thaliana landsberg
  unsure (1)..(846): unsure at all n locations
ggcaacagcatatagcaactgaaaaaacaaaaagctgatgaaacagtaagaagtaacacacaaagtcaattagagaagagtgtaaatgtaccagccagatgcttcatagggattcctgcatcgacaagcgctgcacatgctgcatttatcgcacatggtagaagctaaacagaattgaatcaaggaaaaagcagcaaaaactgtcttctaaagtaatgcaccaattattccactaaaacatattcacactcccagctcatgggactacaaactttcactgctaaaaactctacaaatactaaaaccaagattgcttatactggattatatgtgtttgacacagtatcagtaaatgtttaccaaaaggcaaggatcataaaaaggatacagaaccatcatcatgcacaacctacacaggaatcaaagaatgaaaagttcagatacaactcaagttgataaatcgatatatacaacaatgaaatagctactcacctgaattatcactgaggtggtggtatttggattaacagtcaaaacacaaatactctgtatcgtccttttcaatatcatctcatactccttttcaacttttcctatcattatgcaaagtaaaagtcagtcagaatctaaaaaccaagaatcacctctaccgcatactcaagcaacaaaacaacatccagacatgattaaactaaatgcatttacgaaccaatctgcccggatttaggctttcatatgacttcaaaacaagccttctcagcattnntcgtctttttcgttcctgctttaggtccataaaccgcagctagaacttttgtatcccctgaaaatataacaagaagcata

SEQ ID NO: 12648 - DNA, 891 bp, Arabidopsis thaliana landsberg
taatgttactatatataaaattaaactataaaatataattatattagagaatgatacaaatttgaaaaacgggtagatataataaataattcttaaattttaaaaattactacttaaaaaaaaaatcacgggacgggtaaagaattacagaacgggttttattttggaattgggttatatggtagatgtatttgaattaatatttataaaattttaaaatactattaatatgctgtttttataggggttaaaacttcaggttttttaacaattttctcatggattcgtggtatagcgttccttaataacaattataaactgtaaaatataaatattttataaaaataaaatttgcaagttttaatatatattattttaaaaaaataaatcatgccgcggtataccgcgggttaaaatctagttaacatatataggagtaccaggcggtacatatcttacaataatatgattttatggaaacataatcatcatcttttttattagaaaaacaaaaaaatcatcacgccatatgaattttactagattatcatgtttttatgccctattttaatttattgaatgactttttgagtacagggcttctgatgtataaagtttagtaagatttgtaaacctattcactcaaattcaaatatatcgatgaatcgatcacatatttatgcaatgcaacaacagcaaacgctaactaacatggttttattgactatttgaacttacgggagtcgtattttgggtgggtcttaggttataagagcgccttattatcctttaacgatgatacaaatggacgagagaaaagcttaactctgtgtttgtaactatggtttgtacttctttttttgcaaagtttacagcttaggtcaacatttt

SEQ ID NO: 12649 - DNA, 948 bp, Arabidopsis thaliana landsberg
  unsure (1)..(948): unsure at all n locations
gtcttgctttaaatcttgccatctctacacctggaattccaggcttacgcttgaaaatccatttgcagccgatcactctctgttctttaggctttgtgactacagtccatgtatcatttctcaacagtgaatccatctcttcatctatgccttccttccacagaacccaatcatcatctttcagtgcttcttgataacttgcaggttcgatggtatctccatcaaaagtggtgacaagggcttcagcatttaatgattcctcatcatctgcagactcactgtaatagccttccacatcaaagcgcctaggagctcttacctcccttctttctctatctctgaccaaatggtaactgtcaagagtattagtcaccacttcattgttctctgaatcatcatcttagagattgacctgagtttgtgaaggacctcccagggatcctgtttcttccaagaggtctccacctaaactcaaatctccaaggccttttagataaatgtcgaaagaatctcttgatgtttcagcttgatcttgatcatctttgttttttttttgcatcacatccttgtaaacagcattttcctgaaatgctacattcctgctaactgtgcacttcttttcatccaacacccagactttgtatccctttacccctgcaggatagcctagaaagatgcacttctttgctctaggcaccagtttgccttcaccggcatgaacactagcnnnnnnnnnnnnnnnnnnnnnnnngctataaaccggagacttacctgaccagcacttgtcaggaatctcacaatctattgtagatgacggtgtcttgttgaagagggtgactgcagtgttcgtagcttcagcctagaacgtctttggtaagccagactcgcttaacatgcttctgaccctctacataatcgttatgttcatcctctctacaacgctgtttt

SEQ ID NO: 12650 - DNA, 414 bp, Arabidopsis thaliana landsberg
ctttcatttttaatctaacacgattttttagtcacagcttaaaatatattggcaacaagtaaaaaagattctaagtattttttttactgaaatttgctcagactgactctaattttaacaaaaataactaaaatgactcctcttggcaatggttaactagaatgactccaattttaagtaaaaagaccagttgaccttaatcaaccttaatactatatttttttttgaaaaaaaaacgaattatgaattaaaaaattaaaaaatatcaatgaagaagatcccgaaaaaactggatcttgttaatattaaaaattataaatttagaatataaattaaaaaatataaattaagattatatttaaaattataaattaagaatttaaaatgacaaaaggacccgcaatcaaaagatcg

SEQ ID NO: 12651 - DNA, 654 bp, Arabidopsis thaliana landsberg
  unsure (1)..(654): unsure at all n locations
ttatgatgtaactcaacaaatatcatttgtacatgtatattagacccctcagataccttgccgacgcataaacgagaagatgggttagactttgtcgaaaccctcttcgctagtggaggtatcgaccatcactcgtcaatgtaacccaatggtgatcggcgaccgtgagctttccatgttattgtgttctgatacttgagacttttattatgactatgtatgagatattgtctcttattagtactagatgatgagatgtgtcttattatgactatggatgagacttttgtgatgtaattgatgagactatggatttaaatattattatgtgattgtgtgtgagatgttttatgtgaaaatatgttgttctatatagttgttgatatatttgttatgttgtggaatgtggtgtaaaataaaaataaacaacatttgtaatgctggtcaaatttacttcctagaggcttattgggccgtaggaagttacctaggggctacattcagccgtaggaagttagccagctaactttctagggctagagtcagtcgtaggaagttattcataggaagttagtcagccgacgggcntgacggcgtgaagctacttacttctgagacctactaacttccgagagcttctttggctgtaggagt

SEQ ID NO: 12652 - DNA, 612 bp, Arabidopsis thaliana landsberg
acttggggaggcactgaaaccctttttgaggaacccttttttgtctaatatgttccgagtagttgtcagattacataagaagttggtaaatgattctttggtggatttatctactgttctttctggagagatttgggaaggttttgatccatattttcttctcactgagggagaaatcaaagtcagatctttttattcagatgaaagcggagcctgctctcctcctctctgctaaggtcactggtggtactcctaacaagctctctaaaatgtatgttctctcacctctctattacggaaacatttatgctttcattactgatgtagcatttgggattctgggttttcaatatttcaagctgcttgacattgaggatttagtagctccttttctcggtatgatctggctagtgagaaaagtgaaaccttatcttccaaaaaaattggtttagcctggcttatggatttctaattattaattgcacttctgtaaaaatattcatgttacctctttctacaagattagatatttgacacattcatgtgattggtgtgcgtttatgttacctgcctggtggatttatgattgttaaatttgtgttgcttctatgt

SEQ ID NO: 12653 - DNA, 715 bp, Arabidopsis thaliana landsberg
taagtgatgttaagtgtttgcataaattataaataattaatgttaaatttaataaactcatatataagtatttttgaaaataaataaaaaaattaattttattaattgatatgaaaaaacaaacaattgattattttggataatagttgcttattaagttttactatttttttacatgacaaaaagggtcactatatataagacaattatgaagcttggtatgagctatgtgagatattgacaaattgagtaaacaattacatcactttttacaactgatgtttaatttttaattagcatggtagtcattgattaaaaatttctttcctttttaagtgatataaatccatatatttgtattaatattgtgaaagtgataaaaatggatctaaatttgcatcaattttaatggaccaatgtcatacaaatcaataatgacatcaattattgcaagtgatgtaaaattataattttttgtattgattataaattcaaagaatcatttatatcccatttctttatagaaattaattgatgcaactgatccttctttatgttaacatgacaacatgatatggaaaaagggtacctagattcatgatatggtctccactcacaatagcgaggagaaactcccttcaagattgagaggctcatcactgataacatgatacacctcttaccacttgctctctctatccaaaagctctttcat

SEQ ID NO: 12654 - DNA, 508 bp, Arabidopsis thaliana landsberg
tgctgttgtttcatttccaaactctaatcacctaagctatggtcaaagctttaaagtgagtgtatctgttacagtgtttggataaatttccaactatatggatattgttgattcacaacttacttttttgagggttattataaatttagacacattttgggccaaaaattataaaaaaatgcacatttcaattgggcttacaatcctaggcatttttggcctattaaaagtctttttgccctgaatttcactcttcatcgtttccttctcttcctcttcatcccttccttttcttcttcatatttccagaaaattttaattttgttcttgagaaaattcttttttgattacaaacactaaaccctaaggaatgatactaaaactcaaacaaaataattaaatgaaccgtttgagatataaaaaacggatgaaccaattacaaaataaaaatttgagatcttatcattgtcttcttcgagctcgtttatcatgatacgtgagtcatgac

SEQ ID NO: 12655 - DNA, 581 bp, Arabidopsis thaliana landsberg
cgtcttgacgcccatgactgtgctgagttgcgtaacaccttcatggcgatgtagtagaacatccaagaaaactatacatacgttgagttatgagatggaaaagatattgttgaacaaacttgggaatcgtaatgttggatgcgatcaagtcttcatcttattttattatcttaaaagagtcgtatataattagtcaggtaactgacttatgtacgattcatatcacacaccgaaaagatatgaacagtattgttaactgcaaaacagttacacgtgtgtgtctgtatgggttttcttctagagacgtatccaatagtcaaagtgtgtcacgtaaacgaacaaacgaacaacttttaatcgttgtcgatggttttagtcgttagtgacagacaaacaaacatggcatatagttctgataccatgtagaactctgaattctcaaagaagttaaggatcagacaacacatagtttactctgttttgttttactttctggttctctgttttggaaacgagaaaaccacacacttttattagatattaggatatgagtggtacaccgatgtttatttatttctaac

SEQ ID NO: 12656 - DNA, 721 bp, Arabidopsis thaliana landsberg
atcggatcacacaagaggaagagtatgcacttaataccctacaacgtatattttggagtaaaatccttgaatatttgatatttttgctcattgacggggaaaagtttgaggcgaaggagttcgaagattattttcgcgaatgttgtcctgaatttcttatggtctgatttctttcaaaatgaaaagaattccttgcccacacacatcatttcttctttttgatttttgttttccttttttattctgtcttgagtaaaaatttttttggaatttcagagagttctcaggttctgcaatggccgaaaggtcttgtttaataacatgactaatgatgaaggcgtcaaggctgaacaagtcaatcaggttatggcccatgttgcagcaattagcaagaaaaatgatgaaaaaccatatactgaagatatgtatcgtaatataaaggtaaacacatttttctctctaattgcattcatttaaaattcatagttattgatacaatactatgacctttttaaagagagatagaggaattaaaaaaatatatatatacacttagtctagttcatgagcaagaaaagatgatgtagaattagctaatggagaatagggagaaagctagtgaaaagcaagatcattagagatccctagtggtggttaccatgactgcctcaaccaccatggtcaattgtccattgcatctcttcttttttgatattttgac

SEQ ID NO: 12657 - DNA, 750 bp, Arabidopsis thaliana landsberg
cacaaagcccaccactatggaacgattccaatctgagattaagctagttaaaacctttggaagcgatagattcagagatatctgttgaatttgggatcaaaagttttgtagcttgcggctgcgaaaatgttctcgatatctccagaaatctgtttataataaaagtaaacgtgttttgattgttgcccttagttttaggttttattacggaaccttaccactcattcaatctgagtatctgacatttggtttggtttagtttttcgattttctatttggttggattgaaaaatcgttagttcggtttgagtattatatcaattttggatctaagaccgtaaaacctttcttaaaaaaaaaagaaaaaaaacagttaaacctctaaaaattataatattacagtaaaatttctataaattaatattcgataaactaatagtttttataaattaacaaattcttccgattttaagttgtaactatagtaaaaattaatacaaatcgataaattaataaaataatttttattaaaaaaatcattgtataaaattaatataatatgctctcatcaatatcataaattaataattttataaattccttaaaatatatatatataagaaattttagtgaaacataacctttgctatattcctttttcatttttaatatttttactacattcaaaactctttttgttgctgcttatacataataaattttaattattctgggattggttctaaaaag

SEQ ID NO: 12658 - DNA, 945 bp, Arabidopsis thaliana landsberg
agttttctgtaaagcgttttagcaagtaaccgaaaaaactagaggaattcccaaaaatagcattaaaacaagttttatggaattctcaattatttcctttcatgattattattcaaaagttacaaattgcaacttacaaaacaaaactcaacatcaaatatccaaacaccatgatatatcattaaccaatcaacacaaactttatttcatcttaatctagccagagcaagagaaatagatatcaacaaagactagagtatgtctattcctcggataagaggtgttcatcaatctctttggtcatctcagctaagaaagggaggaaattctcggggtcaggcacattctcatcattcttctcgtactcaaggtgccatttagccacacttccaacccctccatccttcgtggtcactttaatcgtgatcaagaagttcttgtacacatccaaaacatctccctctatgaccctaaactttattagtttcttctctggttccactaattcgattctctcttttgccacctttgccttgcccgctacactcaaaacattcaccaataaaatcaccaaagtatttacgatatcttaaagaggtataaatttataatttgttaccataaacgtagttccaattgacaatactgcctatggtgccccattctccttcaagcagatcacatgcttgcactttgctagaagtggctttagcgacatggtctggtcttcctacatacacatggtagaatttttcagcaggagatttgatgtcaacttctacctcaacctctccccatagagaagattttagcatctcctttctagtctctgccatatttatctctctttcactagtatagtctccacacaagtattttgattcactcgcatctgggtagagctagtggcctccttatatagaggaaagaatgaatattgttgac

SEQ ID NO: 12659 - DNA, 1149 bp, Arabidopsis thaliana landsberg
  unsure (1)..(1149): unsure at all n locations
ttgacatcgaagaattcattcattattgtgttggaaattttgaaaaatgtccgcttctcaatactgtactttttttttttcttttgctatataaaaattaaaaaagtcttaaatttaagatataactaaatacgtgtgtagttttataaaaacatacaaaaattagttttatacgttgtaaaattttataaatatattgtaaaacttataaatactctgtaaaattttataaatcttacaaacgatgaatgattttaaatattttataaaactatataaaactttgaaaacgatgtgtatgtaccattcttttaattttattttgttaatatatgttaccattctttggattcttgattaaaggtaatataaaatctttgatgttatctggaaggattgaatatgttatcgttttgcgtagtctgactctctcacgggtatcggacaaaatattcgtttaatattttcataaattgtcgaacaaaaaaaaaagatgatcaaacaaaaaaagttgcaattaatatcccatacctaacctgaccatgcaaattgtaactttatagtataataaaaatgaaaattgtaaagtactctcacttatagttctcttttaacagacttaaatcgttggaaacaagaagtgggaacatcagagaatcattgctgattctggaccgtcggatcaataaaaaacgatatcctcgggtcttagcgagagccggccaatctctaaatattaaaaacttaatggccagactaaaattgtaagttgggaacaaacgtgtgaatcttggatagcactataagctgatctgttgatcatcgagtcacgtacacgatggaaggattctcgatgattcttgaccgtcaaatcatgaggagaattcatcctacggtcataattgtaatttctttgccttttagtgagaaccaaaatgtaactaattttggcataaattcagtatagccagacgaagtactggtttagaaatcaaaagagtatctcaactntaaatatttatttttagtgtgtttatttataaatttaatttttaattataaaacaggaaaaaatgaatcaacaaaaaaacaaatggtatacagtgttctagttagtatatttagtacatctntattggtcacatcttt

SEQ ID NO: 12660 - DNA, 660 bp, Arabidopsis thaliana landsberg
ggagttataatcgtgattttattcagagattggtcactgtcctttgacttttctttgttttttaaaaaatagtaaattatgtgatttccttgagggttcttagttagaaattttgttcagtttgcatgttataccaatgttgttaagcagcatgattgaatcatctgggattgtggttaatgtttttgttgcagttattaattatgctctttgttctttctgttcacagttggattagcggattagaagtcagtgctcatcatttctgttgtttatggtaagtttatctgttttttgtattagcaattgtttggcttgttcttgcttaaagatggataatttgtatcgttttatgtaaattttgttattacgaaataatctttcagtagatttttcctttcatgcttctttttaattcactgacactattttcctaacattctctatatgatttgcttgaaggctgatagaagagttggtaatcgccccatgggtcgcagaggtcgtcttgaaatacagtctggaacttgtaatgtctgctctgctccttgttcatcttgcatgcatcataatgcggaattttccggttcaaagtcagacgagtcatcagatgaaaactcccatggtgtactggcaagccagtgttctttcaacggggac

SEQ ID NO: 12661 - DNA, 1016 bp, Arabidopsis thaliana landsberg
cttttggtattagtaggagtactgtttaaattgacccaagaaatacaaaaaaatattgttgtaattgtaattgtaatagaacaggggatatgtactttgtcaacatattagagaattataagcattaatgcatatgtttgcacttgtttcctttgatttttgcaacctctttagacttctaaactacttgatcttctctttttttatttcgccgtcgatgagatttcttatggctcgccattcttcttgtcatgaaccgttttagtatcactcttcccttttgattctttttagaagtgttctcttgatttacaacatgttctattgtgtataattttgcacttttttccttaaaaaaaccaatttgtgcgtttccacacgactcgattattcaccagattaactggttaaaggtggtcattactaaacaactacgatttacttaaactcttggcttttgacacttaatgctcaaagtctttaggattacacaaaaactataatcctaactatcaaccaacttggataacaataaaaaactaaatgaatcattacgctaataacttagtaaaaacttttatttaaaaaatttgagacttttttagactttttcggaataaaaaattaggcctcttgaatatacttttcatattaataatatttttaaaaatatttgagcctttttataagtaaattttttataaaaaaataaaaatgccctgggccttcgcacctccgccccacccatctgagccggggctgcacttaacaaaactatagtaataattacttctatttttgggtatcaatgtaaagtactaataattacttaagataaaacaagcaatcaacacgcaaaacacaataaaaaaaaaaaaaaaaaatccatatatacatgcgtcgagacccttttggtcataaaggttacagtaatttgttcctaaggtttatcttctcgatttgcttttatattatgtcttactagttgtttcttggtgccaaacaaatggagaaca

SEQ ID NO: 12662 - DNA, 689 bp, Arabidopsis thaliana landsberg
ggtgagtgagatagagattcacgatggggtcaacaagaatttgtctatcctttattcatctcctccttgtaacaatggctcttctgttcctccaactttcaccactcggtctgtcttctttctctatctctcccccgagttctgtattaatctctgttaagcttatctgtattcacttgttattatgaatgtaatggtttgagttttgtttttatgaaaattgcagcatattctctgatgttgcgggtgacatcattgttgttgtcgatggagaatcatttctacttcacaaggttagtgcacacttttctggtttgagttttttttttttttctttacagtttttagatcaaacgcatcagagaataataataaacattgcagtttccgttagtagctaggagtggaaagatgaggaagatggtgagagatctcaaggactcttcttctatgattgagcttagagatttccctggtggaccttcgacgtttgaactcaccatgaaattttgctacggcattaatttcgatatcactgcctttaacgtggtctctctccgttgcgctgctggttatcttgagatgactgaggactacaaagaacagaacttgatctttcgagccgagaattacctcgaccagatcgtttttcgcagttttcatgaatctggcctagactttgtcctgga

SEQ ID NO: 12663 - DNA, 915 bp, Arabidopsis thaliana landsberg
cattctggtaaataacaaaagtaatagaaaattttatttaaagtcggctacggatctatagaaattagaaaaggataaactttaaacatacatctgttaataatccaaggaaaagagaattatttttttggttaataatccctaaatttagggaaaagagaaattatccccactccaatttatacatgtaattaacatatttcctaattaaactagggaaaaaaacaaaggtatattctctatatatatatgaacacccacagacgctctcaaacatcacaaagcaaatctgaaaaaacctttctcgaattcacgtaaccaaagaataccctaaaagctccggattctcttcaacaatggttaatacttgtagaatcagcttcataagcttcatgatactcttgctcttcatcaatcagtcatctctttcttcttctgtacgcatcggtctacaaggaggtcgagatcttattcaccaccgtacacttgatgagattgagagagacaaggcacgtctcagtttcttgtttaaaacgatggaggatgcatatgattccaattttgatgaggatctcccgctccccccatggccttatgttagggttaaaggggtcgaggtgattggacgctcgtatgcaacgaaaggcgaagtcactgaatcgatattatatccgagagtttgccgtttcttcttctgcaagtctaggcctttggtttggttcctttagggtttgatacttcgatgtatcatataaaccctctttgtttagagactttgtaactcttcttcaatgtaatggatctattcttttgtaaactcttcttcagtttctgtaataaattttctttagttttatcattcgattttgtcaatttattgatctatatccatagataagatacgtccaacatatg

SEQ ID NO: 12664 - DNA, 923 bp, Arabidopsis thaliana landsberg
aaatctcttttcgcagccaatgccatattcaaactacgaaaagcaatttgattcagttctagtgataattcagcatccgcgatagcatttagagagaagcaaaagatacaatgttttcctctatccatcttcctaaagagagtgaaagatcaccaaaattgacaaagtttctctctgattaagacaagatgcttcctcagcaactacctttctctctttccatttacattttggggtttcttatcttatagaggaataaaatttgtatagatgcaaaaactagttctagtataatgcttcaaatgaaagtgtaaacacaaatctttcatctttttcttcacaaaatgaaacaaaagaaacatttagagaaagcaactccaaatccttttaagaaaaaatctctcttctccacatactctacatatccatgcccagtttttagtttgtgttcttgaattagtcaatctatgttattgaaaggattactacgttgtggtatttaggattttggttagttaaggattggccaaatcaagaacacaaactagagatttagtggattaaattgagtgtatggatcaatccaaaccaatctaatccatggattaattgagtggagaatttggatcttaatggattaatgggttaatgggtttaatgaattggattgatatgggttagattagaatggattagtgggttactataaccaaaccaatggacagtaaacaatctaaatcaaatgtgtaaaccaaagataaccgaatcaaatgtctaaaccgatttaaataaaccgaagtaaacatgatttaactattaaaaccatgaaattaattttaccgccaaaccgagattccacatttttccgctaaaaacataatttcgtaatttccgccaaaacataattccgtatttttttttgg

SEQ ID NO: 12665 - DNA, 621 bp, Arabidopsis thaliana landsberg
ataaaaaagataaataaacgcaagtggcaaatgatatacaattaccaatagttaaatatttttatttttttaagcaccaatagctgtttttaaacataaatcaaaatgggatcttctacatttagacttgaattgttcctgtcgattaacttgtccattcattcttcttttcttgttgcctcccagaaaggataagaaagcttgggagtttccatttggtagtctcgctaactaacttcttcctttgttctttctccttttaacaatctcatgattttcttgggttcatgcagaaatttagccgagaactcttggtgatcagaacatgattaatcagatattaccctcggtgtcagagcctgttacaaacatagttctagtaggatgtactggcaatggaaaaagtgcaaccgggaataccatccttggtgaaaaactgttcatatctaaaaaatgggcgggaggtgttaccatggaatgtaagatgtttaaagctacaacacaagatggcacaataatcattgtgattgatactcccggtaagtgctcccatccattaaaactgtaggtttaacttagccactcttcaatttaaaactattggtttccttaaagcaaata

SEQ ID NO: 12666 - DNA, 1170 bp, Arabidopsis thaliana landsberg
  unsure (1)..(1170): unsure at all n locations
aaatctaaatccaaaaactgtatctataatcagcatccctaaaagtgtacccagataaagtagttcctataaaaagaacaccttatataaaatattaataattgttacactttctgctgcaccatatcatgtggcacccaactctctttaactaattcgtgaggccatgtttctagccatattgtacattccaatagcaagtgcttccaaacaaattgtatttccaatagatatgttgtgagaatctaactaagtgtattttccttcttttagcatcaattttggctattgtaaaaaaaaacatcaattttggctaaagaagaaatgctcatccaaagttcgatcagttggaagtatcttatacacagtcaaatgttgtaaaacaagttttttttggtgtaaatgttaagagttctaaaacaggttgaccgaaccaattctagcaataataataacccctaaccatgaaagactcatgaaggattcattcacaaaacaaatcctaaccataacaacagctaatgttgaaaacaaatatcaattcatctttgatgagtggagtggagccacgtaaatcttactgcatgattcagccaacttctagagtaaaattatatggaagacatcaaattggatcatatagcatcacatggaaacaagcattagaacatagccaggccgacttaaaacagagatttcttataattggtgtcgtttatataaaaaaaaaaaatcaatgaacatttacattttcatggagtaatttgcatttgtctttgaagtataaaccaaacaaaattcattaattagttttccaatttatgtttggacccaaaagctgtcgcgtcagaaaaaaggacccacagttcctaaatgttgccgcctgtcctcctcacatcctatgcttttattaattacactgttttagttaatctcttcatatctttcttactctctatatgattcattgattctatctttaatattctgtttttttttaatcataagttaagggtttttgtgaccaatacacatcatcctctgtctaatcgttacgattataaaactaanacggattgaatcatcatttagcttattgttaaaaaaaagattggagggagaaataataattggagtaaggtgggaactagttcgtacaaacatggaccc

SEQ ID NO: 12667 - DNA, 625 bp, Arabidopsis thaliana landsberg
agctatttgcttggagagaaacctgcaagaacactctttatttgaaaacagaggaagatgtgagtttagacaaagtgaaaatagtatgatgcgtaaaactgaaactgacgaaactttagtgagaagaatagaccatgaaagtgtttcgatcaacaacataagtcgtagaaaagtaaggaaacatctaagaattcttaccaatcttaaaagcagagttcggctagtgactacgagaaaccttggacgaactttgttgagaggaatgaaacttgctctcgattaactttggatgaactttgagctctctgactctctctctctttggtttttcaactagaaaaaagacttttgctttctgaaactacgagaatagtaagcgattatacagaagaagaaatgatttcaactagaaagtgtttcgaatatacgagccacttatataggcagcttcggatttcttctttcaacggctacttttctaacgtctatattttcttaccggtgtaaattttgcgtctcaaataagttaccgtttgtgcatgaggtgacaattgacttgacaggttgacaccgagatgaaaattacacaactacataaactagatgcattcataataagcccaat

SEQ ID NO: 12668 - DNA, 883 bp, Arabidopsis thaliana landsberg
  unsure (1)..(883): unsure at all n locations
cagacgaaggatatgttaggttaatttttgttcatttgcccttggatggttgctacgatggacttaaatgcttcaccccaacccgaagaagatgacgaaccgtatgtgagacatctagaagactattcttctcgggatgaacggatagagtctgctgttgaaatcgctagacgggtactattgattttcttcactcaacatggatttctgtagtcactttaatgcaggacactttaggaaactattaactaatgtcatcgttaatgtggaatctctaataattgatgcccacatgttttcttatcttcccctgagtctgaggatggattttcatatgtttttgctttaggaacgtgaagagagaaagaaacgaatgagatatgacaagccaacacataactctcagccagttttccgtgatcaatattaccagaatcgaaatactaaagcttatgatagatacaagatccctcaaggtgatattttttttaccgaatgaatacttatcatttcatgcttaagatttacttcaagtataaacggcctctaaatttactgaaatggttttagcttgtatgtgttcttttctttatctttcggcaaatttctttaaatagggtaactctttgacagcctgtccgatatcacaggttggctagactgccctccttctgggaatgagataggattcctcgttccttcaaaagttcccctgaatgaatcttacaataatcatgtacctcctggaagtagatactcttttaaacaggtgatccataaccagaggatagctgggagaaaggtaatttctggaatttctttctccttgctttgttgattgaatgagtatgtattcatcgnctatgcaacacctggtatatcc

SEQ ID NO: 12669 - DNA, 1106 bp, Arabidopsis thaliana landsberg
agtttggagactacaaaagtggaatagagctcaatctttagctaaaaccagtcactctaaccattaatcccaaatctaattttcaaaggtgaagccgggcctaataaaataaccttctcttaaccttcctaacaaaggatttgttccacagaaaacctaacaattcagtagaattggaatcataaacaagaccaaaaaaaacctgctcaatatccctcgtcactggaccggctctactaagatccgacggcgtcattcgtccgttcctcgacataaacaaaattcctcagtagcaaaccccttgagccgagaaaacctcaaaaaaaattcacactagtcgtcaagctcaaatcaatagacctcgtgcaatcacgaaatccactccacatcacatcactttgatcgtcgatcttggattcaaattcgaagccagagcagcttcttcagctccaatttagattcaaatcgatccaaacagtagaacaaaaagcgccgtttcaatcaaatgtaaaaggattcaaatatgttcttctggatgctgaattaaactcttcgagaggaattgaaacacagagaatctagctagagagacatggcatgatctatactacgcagcttaaagcgagcgagcgagagagaagaaagagaccaaaaggcagattctgactagagaaagctatacttcttctttttttctgctttctattgatttttttagatatataaaacccgtcattattctccttaattacgggatataccactgtacactcccaattaatttactctccttaaacattttgtatttctgtgactagtaatgtggaaggctttttgcgaatatctgttttttcagcaagcttttttcgaatattactttcgtgtatacatttgcttttttttttttttggtttaaatttttctaatgatgggactttaaagaatttaaatacctaccacctaattaaagaagaatgattcaatagaagatgtcatgcaaattaaataccacacagaattatgttatttgtaatggatactctataactatgatgtaatgtattttcttcaaaagttataaatcttgacattttaaaaattgcttt

SEQ ID NO: 12670 - DNA, 751 bp, Arabidopsis thaliana landsberg
tgatctaaacgcaacactaacaaaaatttaaccaacatttcttgttgctgcgttttccggaacaaaccagtttcaatcaaattctgttttcttcatctccacaaagataactaaatccgatctcgtcttcgcaatcatcaaccatcaatggaagttgaagaagaagttaaacaaatcatagatgaggtcaaagagcttcatgactccgccgcttctttcatctcatcttcttctcaacaagagctttctctccgtcaaaaagcctccgccgttgattcctctatccgtcgtctccactctactatcgtctccaacaaaaatctcgatcctaagctcgtcgaaaaggcattgtcttcttaaatctcttatctcttcctctgatttcgtttcatcaattattgaaatttctcatctattttttagcttgaggaagatctgcatcgtgctagatgcatgcttgttgacggagaaacatcttcatttctcccatccaaaccacaaggttttgttctatgctcacttcaaatgtctaatcttggattcagttttggtttttgattgacctaattgagtgaaagcaggacgctttgtgagaatgttttgtggacctgtgaatgttcgagctttgcgtaaagatgttcagcttaaagttaaagaagaatacaatcgttacagagttagaatttttttttgcttgcatgtgttcttcagtgttgattttgtgtcctgatgagtcttgtttttggtcatg

SEQ ID NO: 12671 - DNA, 825 bp, Arabidopsis thaliana landsberg
gccattgtagatatttaaaagacaccatacattcagtgtaacattgtggagcatgcatatgagcttggaaggaagattcgggtaacttggtatgaaatcagtctgcttctgcattgaagccgcgacctaagaaacagaaaaataaacagcaaccacatgaaatttccaatcagcgactcattcttgatcagccgtgaatgataccaaactttattgaacaacatacttgctcactgtgaccttgagggaagtaaacaacaagacttcctgctggaggcaacgaaatcaatggcccagcacaagcgtgccatagctctgagtttatatttctcctttctcctgcattcacacaacatcaaagctgtgattactttaaatctctaggatcttcattcagttactataatcaaaccaacaagatgagagagaactgctctaaaccaactaaaagccacaggctttataaaccaatacaatagtaacttagcttactctctaagcagaaaatgaccgaaaccaattcaattcaggttctcaaatccagcaattctgaagaaatgtgtgacctcttctacttaaaacttgaatctattcaaatccagcaatgaatttcttctactaaaggatagacatttatcagatacgagaacacacacaaaccttcaacaggattaggagaaactccatttgatgaaggagctttcatgatcactcaactttattttctctgaagaataaacccaataaataatcagaatctgagcttatacaaagctaagctctttgcgtgagagcttcatcaaaagccctaagctttcagtcaag

SEQ ID NO: 12672 - DNA, 676 bp, Arabidopsis thaliana landsberg
cgtatcattctcgtccatgcagggtttgataacataaatgtaccatcgaaaactaagtaaaaacaatgaacttcttttaaatgtttttgaattttaattataatcaatatgtttttggttaagacaatctactgtagcgaagccttgtccttgttttccccaagtttcctataataccaaaatttagctcaactagttaaaaaatcgtgttcaagtcatggttcttaaaaaaagagagtaaatttaccataactaatctaacaattaatcgggttttggttaacacgtacatgctcttgcattcttttaaaacaatttctgtataacaaatctattcaagtactattttttcactttttatttcgtttgtgttatccggggatacagatgcggtggtgagacttgtgtgcaagaacaagaagaactcaatatcggagacaaagacggacaagaacggatacttcatgctcctggcccctaagacggtgaccaactacgatatcaaaggttgtcgagctttcctcgtgaagtctccagacaccaagtgcagcaaagtgtcgtcactccacgatggaggcaagggctccgctctaaagccggtcttgaaaccaggattttcaaagaccataatgagatggttcaagtacagtgtgtacaacgttggtgcattcgcgtc

SEQ ID NO: 12673 - DNA, 596 bp, Arabidopsis thaliana landsberg
ctacccatctgcttagtctgagccacaagatcatacggtgctgaaatcttcttatcaaacgtgaacacctcatcatcatccatgttgttcaagactctaacttcacccatcaatgacctaacgttcttcacagtctctgcaatgttacctgttgcggttaaatctccttggatcctaatcatagcagcaccttctctgattctcctcaaagcttctcctgtatcacggcaaccacaaatgaacggagagcggaaattatgtttgttgatgaaatgatcatcatccgcaacagagataatctcgctctcgtcaatgtaatcaaccgcaagagattccaagatctgagcctcaacaaaatgaccaacgcgagctcgtgccatcacaggtacagacacagctcgttttacctctttgatgagaaccggatccggcatacgacgaacaccgccgcgagatcgaaccggatctgagacgattacagaacatgcgccggcggattcagcgatcttagcttggttaacagaagaaacctcaacaatggcgccgcacgaagtacctgggctaacccacccttgagagagaagaatggttttttg

SEQ ID NO: 12674 - DNA, 1306 bp, Arabidopsis thaliana landsberg
atgcagataataaatctcaatttctctatctggaatctttcaattttgttttaaggccgtgtatatgtggtcgctgaaaaagaaagaaaatacgtttgttttgtgtaggaatgatgtaatacgaaaacatatgcaccgttttgaccgcataaaaagcttttcgcataactagtgcccattactctctataattgcaacattgacctttccttctctctctctttttctctgcaaaattttcatttccacaagattccaaacaaagagaattgatagaaagtgagatttgcaaaatttattctatccctcctcttgtcctctcttatcattaaaacacatataatctctctctttctctctctaactagcgccatgacttctcatgtctccgaccatgcctcgagttctcgatctcttgtctccatctaagaaccctaatttatcttcactcctccgtctcccctgatgttgagatcatcaataaccctttgcgtcgcttctctccggctttctttggcttttccggtcaccggactctgccatggtttctgctgctgaatcctcttcctccacgtcaacccttcttcttccatgtgcgtttgccaacagttttgcttttatgaggttattacaaaaaactcatcacttctctgccgtctctgaggacgacgacaacaacaaagacattcacttaggatctgatcatcatcaggcaaaagataataatcatcaccaagtttttaggagagagtgtagtttcatggccgatcaagaagagccgaggagtactacttctaggttaagctccaaggaggacgaccacgacaacaatagcaataacaacaatattaataataataacaacagcgaagccgaagatcatgagatgagacaacaagggtggctccggttaagcttaggtcacgaggaggacgttaaaccggatctcgaccatcggcagcaacatcaaactgatccaacggctaggagagactcttttctagagcttaacctttcctctggcggttcaaatagagaagaagaagttagtcttccattgtcatctctctttcatcatcagcatcaagccggagggatgatgattaatccattgatgttccatacaaggcctcaggatatgattggtccttgggcggcggctgcgtttagaacgccttttgtcccacataacctaacacaaccatcatcatcatcatctgcttctttgatgatgccattgatgggacagtactttggtcgctctacgttttagccgcaggtaatatggaatgataaccccggtggg

SEQ ID NO: 12675 - DNA, 732 bp, Arabidopsis thaliana landsberg
aacttcttgtttcttgttgctccatttgtccaaccttttggaagcttcttccacctgaaacaaattatcttaactatcaaatcaatgaaaatatttacgtaaacacttagcgcctacagggcagcttaaagtttagcaaacttacttcttttgtccaatctgttctaaacgtgacccacgccaaaataaacgtttgtataaccgtaccaccgatcatccccgtccatataccctatagcatcattagccttaaatttgttattctaatattcaatacaagaataatggtaactaattaaaatgaaagttaagaaaactatcttgccttggcaccgaagttaaagtaaaacccaaagagagccccaagaggaattccaataatgtagtaacatccaacgttaaccttcgccacaaacgtttgccaaccgcatccaaccgccacacctataataaaattttcccaattgttcaaaaaaaaaaaaaaaatcttcgcttattcggtttgcgaaattgcggtgtatcgatcagaagggtttaccagagaggacaggttggattccgttaaggacaagtgttacggcaagaagcggacagagatcagaaacagcgtccgagacttctttaccctcagtgaaagcatagcttaaaacatcgcggcacgctaaaataacaatggctaggatcacacaagtgattaacgaataaatgttaacgatgatcacagaaaaagct

SEQ ID NO: 12676 - DNA, 548 bp, Arabidopsis thaliana landsberg
cgtagagtttctgaaactggaccaaagccagtgcataacactggaggttgcttagtttaccccatatcagtatttctcttttggtggctaagttaatgaactttattaattgttcttaaggttacaatggaggtcaccatcaaagggcagatccacccaaaaaccttccagtcattcagatgcagcctatctctgttgcggccattccagctgatgaattgagggatataacggataactatggttcaaagtccttgattggtgagggttcatatggaagagtcttttatggtattcttaaaagtggtaaagcagctgccattaagaaactggattctagtaagcaaccagatcaagaatttctcgcccaggtagatgctatagagtgtattattgcagtcttgttgggcctagaccttatacttcctatgctctgatagttctgcacgaagtcactctgttgtggttgttttgtcgtatttggctttgttactgacatgaccaactttaacaggtattaatggttttgagattgcgacaagaaaatg

SEQ ID NO: 12677 - DNA, 1135 bp, Arabidopsis thaliana landsberg
tataccaaacttgtctccccatgcttgagagacatatcccgccttgaaggcacgcgaagccctgaaaaaatagatcctactaagtcgataaaactaaacatatgtgataagaatgaagatcagaaaatgtttctaagaacctgttgcatgatctgtgggaactcagagcaaagagtctttcttccattgtcatcaaatatcttctctaaagagatgtcttgaagagcaactaatgtagtctccagcatgtcaagtcccgcctggtttgcaaatgtgaagacgggcaaggcctaaccgatgttcaaatcccaaaacagatcagcgaatacacgagtcaagtattcctatccaagtattcctatcgaatacacatttatgtgtttaacattgtgtttgttaccttcattgagcagcagattatagcatcagtgtgatgccaaagattcttaagaatagattcattgccgtcactgtttgatttaagtagctcaacacccatgtagcccctattatcaacgggtaaaatgagtcatctttagtaactacaaattgttgatttggtgggaaaattagaacatatttgatagtttggtttatacctgtaactctggcaaatccaacgagcaagtgtttgggcttcaggagtacccaaaggagtgcgtagaccaacttgtgagctgatatgagaaggagaaagagccaatgctactctctgcaccgatgatatgatacctcgaacatactgcctagccatggatgctacatgttcttgcatatggctctcgataccaaactcaaatgctattgtcatcacagatcttgtacatgtggaatttccagagagatcagttgaggcttttgttccagctgaaccaatttccagtgccgaagcaagatccaaggttcggtttgggctagatacttcctgcttttttggttcaagaaaagcttaagaatctgaataatagaagacttggacagaaaacataacttttttttacctttgcggaatcaagagggataatacgaaaaccagaaggaagcagaggtgcatcatccgcaaacgaagcgtcgattggaacaaatataagttcagcacaggttcctacagcattttcgtccatgccgctacaaa

SEQ ID NO: 12678 - DNA, 646 bp, Arabidopsis thaliana landsberg
tgtaagagatcgtattaaaaggagaaaagtgttttcctttatttatatgtgtgtatcgcatccatttgtcatcacatgtgaacacctcacttaaaaataatcacttaataaaaagacatatcactaaatcgtgcattatgttagcttttaattgtttgtgcccttaacagtagtcacaacaatatgaataaaatagtaaacaaaatagaaatataaagactaacttgaaagtttggaaatgagaaatgatatagaaagagagaattaccataaaatacaaaataaaaacctataaagttcatatcatgttcaaattgaacatttgatgagaagatagatttgccacaaaaaaatctggaattttaaacttgggactcatttgaatttgggataaaaaggaagaaaagaaaaaaaaagaaaagggataaaaccctgcagctgggccgatttccactcccttggcccaactaccccttctggccggcccatttatctcctatttcacgccgcgcctgcctttccatcactgttcggtgggcccggtttgtctgtgcacatcggctgccatcgtgggcccacatcccagctgcatcttcgtccttatcgcagcgatcagatgttcccttctctagagtttgttgcgatc

SEQ ID NO: 12679 - DNA, 854 bp, Arabidopsis thaliana landsberg
ttctcttttttttcttcttgtaccgtctgatctactctaacaccgtattgtgcactttttattacacacatatcatgatggtatccgtattccggatctagcctaagataaatagaatttgtgacacatattttgatcatctaaattttgagaatatgaaaaatataaatgtgatatttttcgttaagtgtatccgatctttgtactaatgaatagaaatgtgtatcaattaggtatatccgatctaatgtttgactatttttaattgataacagtatttaatatatatgtgtatggatacatatactaatttcattatccatgtgcattgatgatatctagcatcttatatcaatcctaatgtatatatttacacaagtctactgtatacataatatgacattactaataacacgtgttatcaaggaaacaaaggcacaaagctatatagatggtctcagcttttgtattttgaggatttaagcttagataacattttcataacagtactttttatgtaacgttatgcacacgccatgtataggtgtaacgtacattcatcatgtgctgattaataatgtttgtggcatgcgtaggacgatcgcgtcaggcacgataccggacccgggttcgttggttgggagcggcacgacggttctggacgtaccggttaaggtggcttatagcatagcggttagtctgatgaaggatatgggtacggactgggacattgactatcaactagacattgggctaaccttcgacattcctgttgttggtgatatcaccattcctgactctactcagggagaaatcaaggctccttcccttcgcgaattcttttaattacctta

SEQ ID NO: 12680 - DNA, 640 bp, Arabidopsis thaliana landsberg
  unsure (1)..(640): unsure at all n locations
tgtttaacgaagctaagagcatctccaaaagactttttatttttgactatctatttgactttttatttgtcactctataaagattaaactctaaatataacatctcattccaacagactctccaacatacaaattagcttggctagtgagatttgcttgccaaaaattagctagtgagggagnnnnnnnnnnnnnnnnnnnnnnnnnnnnngttaattggctagcctgttggagagctattttgctattaagtagctaaaatttagtttgacaagctatttagctagtctcttggagatgctctaattccatgtaataaatcgcctatccatgttatgtcttgataactaatgtattatcagtccatttgaaattcaactaataaaaccagctacggtgtcgataaaacacgtttagctacagtgtctacggagaacgccaacaaagccctaacctgcacaaccttaccccccatcgcaagcaaagccaaacagatctcctcgtcgtcgcctcgctgtctcctccgccggttgcctgcgatcccgatcatggtgagcctccgccggcctctagcgccacttgttctcatcacatctcggcctcgccgttacccatttctagtgttgtgaggctgcggtga

SEQ ID NO: 12681 - DNA, 865 bp, Arabidopsis thaliana landsberg
gaccaagaaagcgattgggaagcttcatctgaaacacaaagaacactttgctgcttacggtgaaggaaacgagcgtcgtctcactggaaagcacgaaaccgcagacatcaacacattctcttggggagtcgcgaaccgtggagcgtcagtgagagtgggacgtgacacagagaaggaaggtaaagggtacttcgaagacagaaggccagcttctaacatggatccttacgttgtcacctccatgatcgctgagacgaccatactcggttgatgacacatttcatgatttgatttctctccaatttgtttttttttttttcccttgtgattgcacttttcgataataaaaaataattcttattatggcgtattgttgtgacattttgtgttttgtttcgaataattaaataagcgcttcttaaggtgaaaataaataataattagtgatttttaatctttgatatgataacaacgaagttaaggcgggtgtttcggacgttgaattgggataagatttgtgcaattaataattacgaattatataattattgtgtaagataatctcgaatattcattacaataatatacacatgtgacgtacttacttaggaacaagaaaataaatagaagataaaattccgaagacgaaggggtggtggaatattaggtgagaacagcgtaatggtcgtcacgtgctctgttttcctagtctcatgcattgaagttcgcaaactatagcttttggtaggaaaagtcaaaattaactttgtgatatttattgtcatgagtggggaaattcgtgactctctttcccactcagaatttacttcatagattaagcataaaagagggtgaccgaaagtag

SEQ ID NO: 12682 - DNA, 767 bp, Arabidopsis thaliana landsberg
ttcccatcaccatccatatcatacaaatcgaaagcttctttcataacaacttcttcttcggtatctttttctcctccaccattgaccatcaaacacgaagcaaactccacatcatcaatttgaccatcaccatcgacatcaagaactataaacatcttatcaatttcttctgatgttatttgaggagaaaaaacgcgattcgcctctgcgaattcgtcccatgaaatttttccatctttgtttttgtcaacactttcgaaaatctctgccatagacattgaatgagtaatattatggtgatgatattgaatttttgtttgtgagaaagtcaaaaccctagtatttatatttatagaaaacgaatgttattgttttgattcctaaaagatttggttgaatcctaaaagatttggttttgtgaagtgatttcctttttacataaatttctatttcttttttaaaaataataaactttatggtttttgaaaatagaaaacgcaaagatcgtttcctatttttcttgttgttttgaaaacattttttttttaataatctatcatcacatgatttaattttataagattatattagaaaaatttgatagtgggcttcttcctataattattattttcttaaaataaatttcaaatctctgttacatatcttaagcgcattataaaaatgtcacttacaaaaacgaatagtttaaccatgttagtagattattttgtaaaacacttgcacctgattgataaccaaccgacata

SEQ ID NO: 12683 - DNA, 730 bp, Arabidopsis thaliana landsberg
gactttgttcgtaataatggagaagaacgttgagatcttatcaagagaaatagtcaaaccgtcttctccaactccagatgataagagaattctcaatctctctcttcttgatatcctcagctcaccaatgtacacaggagctcttctcttttacgcagctgatcctcagaaccttctaggtttttcaacagaggagacttccttgaagctcaagaaatctctgtctaaaaccttaccaatcttctaccctcttgccggaagaatcataggaagtttcgtcgaatgtaatgatgaaggagctgtgtttatagaagctcgagttgaccatcttctctcggagtttctcaagtgccctgttcctgaatcattggaattactcattcctgttgaagctaagtcaagagaagctgttacatggcctgtgttgttaatccaagctaatttcttcagctgtggaggattggttatcacaatctgcgtttctcataagatcactgatgctacctctttagcaatgttcatcagaggatgggctgagtcctcaagaggtttagggattactttgattcctagtttcaccgcttctgaagtctttcctaaaccacttgatgagcttccttcaaaaccgatggatcgcaaagaagaggctgaagagatgagttgtgtgacaaagaggtttgtgtttgatgcttcgaagatcaagaaacttagagccaaagcttcaagcaac

SEQ ID NO: 12684 - DNA, 811 bp, Arabidopsis thaliana landsberg
atatgcacttcgtttagagtgtggatattattaacatttggaaattaacaatttaattaaactttttttataattatacgttttctaaatttgtaaacgtaatcttaaaactatttacgatttgcatagataaaataattataaaaatattcattttcctttatttatgtttcgatttatttgtttaacataattctaaacgtcgcataatacaatttaaatttcgaagaacataatgtcaagtttataacagttattctaattttcgtagaacatagtgttaagtgtagaaaacacattccacttttgggagagtgtagagtaaaccatagaatacttgcatgtctgatatctaatattggtggtatacacaaaatataaaatgagaatctaactcgtgtcgtaacgccgggttaatgatatatatattttgtttaaaatgtgtagttatcaaaatagaaaaatatatacaaagagtttaaatatgaaaacctaacaaaactggaaaataaggcagctgttaaaacagagcatggcacgagttagggaacaaagtatatatgatctagtccgtggtagttctgcaagtatggtccgaccatgagcaatctttggagaaaaactaaatagttggacgagaggatcaaatttaacgaaatacaaacttttaaatttatatgcttgttaagttaaatttccttctcatttggatttaaatccattttgattttatttataacatgattgaaccactatctaaacattttagttgacatgaacgttaaataaacattacgtttgatatggaatt

SEQ ID NO: 12685 - DNA, 1297 bp, Arabidopsis thaliana landsberg
tgcttctctcttgtctgaaaacaatgatgtcgccgagtcgaagatcatgtgcgagagcaaaatctttccaaccgttggtaagtctctggccatctattttcaccttctaggttttattggatgcatctgaccttaactctgccgtcttctgctcatttcttccttctatattctcaaagaagaaggctaaaggaattttctgaagcaccatgcaaatacaaaaccaaaagcattattctcaatgatcttctcagagggacatatacagagtagagaaagatttaccaagtggctgtgaaagccaggaaaaagtggcttgaagaaatgttgattcgccattatttttgctccagaatctctcagcctttacactgcggtctcaaggaggaaaaagtataataaagtaataaacacaacgttcacttcacatttttttttttttttttttttttttttaactaaagactgttcggtttccactaggtgattgaacaatcaacatataggaacttgagagctttagaaaaagtaaaaccagattacttttttatataaaaacaaaaccatcaaattctttgatagtgtatgtgtcattatgttacatgctttcatattaacaatctttacccattatggtaacttcagaacaatcataaatttcttcataaagacgaggacaagaatctccctatgcttgcactacactagaggaatgatttatcgaacttgctacttgtgttcagtgaaaaataaatacctgaagcttatttcatttcttgtgcggcctatctttggcactaaggcataaataagagacgaacttgactcattttaataccctgaaatgtactggtaatctgctacagtctatcaaatttgtagccatgaaagcggcttggtaaaactgctgcagattgagtttcatatgattttggaacttctttccaatgcctttggcaactttgaagggtcacaaaaaaaacacatgagcaaagtgataccaggaacagagccggatgcatctttgagagttcatgagacgacaatttccatagacatggttgtggggatactctagcaaaaacacattaaaacttaaaaaccattgatcgagtattcaactagatacacactcaacaacaacgggtaacatcagagatcacaaaatctatatacctcatcaaccaggaaaaaatcatcactaccagatggaatcagataattgcttgggagtagaggctcagaaggcatcattatgagagtccactacatccgaataggattcgaaatgaaaatg

SEQ ID NO: 12686 - DNA, 761 bp, Arabidopsis thaliana landsberg
tgacatatggacgaagttcgtgaagaaaaaatgtatttatccttttgactcaacccacttaaaacactatggatgaatcaacacatgagtcatcaagataagaaataccagaggattcttcattgcaatgataaataaatcaactttgccataggaaagtgatatggaaccaaccaacccatgataaggaaaaccaaccgatctaagtatataggtaattcctaaaagctagtttggggatgcatagtcatttaagattatcaacctccagtcaagtaataaacccatcctatgggatatagccttgacaccagacatagctatgccatgatatactatcaaagatgtagaattgatttgtaagaaccgtcctggtcgagaaaacccatttccacaagatcacacaccaaaatcttaaagtgaggataaatctaccaacatcaaaccaaacagtggaaggttcaagttaaaatgacggttgatgcctcaaaatttactcatcctacatcttatcaaatcggtatatcagattgtagtgcatgttgtgtcaagatttagtatactcctatatactttttctccgaaacaggtgcacatcgtgtgtatgcacactaccttgttcaatatattgtcatgatagctgaaccgagaaaaggctaggcctaacgattcagatctactcactgctatctcgtagtatgcaaacaaaaacaaaactacaaacttaacttactttaattcctctctatgataaataaaaa

SEQ ID NO: 12687 - DNA, 854 bp, Arabidopsis thaliana landsberg
gctcatagtttttttcccaaccatgtaatacacgggatacatttaccaggttagtggactataagttattattttagcttattcaaactatatgttatttatgacatatatatatatatatattatttttaatacatttataaatgtttggtgaaaataatagttcatataaatttttttacatgtaaatttgaattaattttacaccctattatattactcaatttgaatcatgacaaattctgcacaaattgtggtttaattctactaaaatcaagttaaataatgagaaaaaatatatagtataaaaaatcaaggagtcaagcattgattttgcagagatccaattacgaggatcaactatcctgagaggttgagacttgatgcccggcaaatattgtatatgttaacataagagattatttggttatactactatcctttttatttcctttaataaatggtacaaccttaaatttttattagttttggctgtaactaagttaatttaatactatgtcaaccatgaagtgtgttgggcctcttctacttttcagaggagtttttttataagcaagtttaaaagttttgacttttggctctaaaaaagttgtaactttttgcatatcttttatacaacaaaaattagtttttgctcttcttattattagtctcatcattttcattgcacagattgtaaatcttacagtccgtatataaattcattcaaagcccaactagatttaaaagcccactattggcccagcttcatttagggttttcttttttttttgtatctatgtgtacacattcccttcaacgcatgaaatcatcagaactgaaaaaggggtttt

SEQ ID NO: 12688 - DNA, 679 bp, Arabidopsis thaliana landsberg
attgtattttactggaaccatactatacttttggtggggtatcaatgttaagtcataatatagggggggcaaagaaagaaaagtaattaggcgaatgatgaaaacatggattcaatactttaccaaacaaaaagcaccattatgtttcacgagccattccgccacatgacatatagtgacctaccagatcatcatatgggcccaagttattacattatgagtatcatatatacaacatggatatgataaaattggtttaattattcaaaagtaataaacggcttggatgatttcgatgagactcattttttgtttgaatctcttcttgtccgaagacaaaacctattataatatatccacattgattaccctaatcattgtggcttctttaattattctctgtaccaatcaaagttcacaacaaatacgttaaattcaatcaaaataacacaaagatatacaaacaagaaaataaaaagcgttgagacagctgtaaagatgtcacaaccaaaaatttgaaaatataaatcagtcccataaagactaaatcgtatggtaaaaaaaggagaagaagaaaaaaaaaagactaaatcgtatccaaaatgcttactctaatgactctcatcgttcttgtcctcttcttctttttctcttccccacctccttttacggcggcaga

SEQ ID NO: 12689 - DNA, 883 bp, Arabidopsis thaliana landsberg
aatggctggcggataggaaacgtttaaccaaaaaactaatgaatttgatggataattttgttctttaaacatcaatttcattttgtagaaacaatgtcctatgtcggctagaaaatatattagtcaaaacgaattttggtatcgccatgtgtacatgtagaggtcaagtacgtgaatataataacaacctctagctcttagctctactgctctaggcttgtttcgtaaaaccttggaagcttgaaggctaaaagcgtaaaagaaaagtcatgttttcaataaatttcttgacttttagttataatatcttgacctttgttataatatctaacctatagtttttctttatatataatgtgaatatggaaaacacaagacttcatatcttattttcatcaatcttattcttattttctctctgcagttttcaaaaactttctcacttttttctgcgtctctttttttggatcaatggcaaacgctgaacgtatgataacgcgtgtccacagccaacgtgagcgtttgaacgaaacgcttgtttctgacagaaacgaagtccttgccttgctttccaggtatttacctttttgatggctttttgtgttaaatggttaaagaacaaatagtctgatcacttcacatgattcttttagggttgaagccaaaggtaaaggtattttacaacaaaaccagatcattgctgaattcgaagctttgcctgaacaaacccagaagaaacttgaaggtggtcctttcttcgaccttctcaaatccactcaggtacgttatttacactaatttccaaatgggtagtgaaagttttgatcttttttttcagaataaagttttgatcttttttggtttggttaaaaacaggaagcaa

SEQ ID NO: 12690 - DNA, 2090 bp, Arabidopsis thaliana landsberg
ttatgttatttccgacaaaaaacactaacagatagtttggtcggttatagttcttaaaatcaaacagcgtaacttgactttggaataacaatttacattcgctttgttttctttttttgctttaagattagaaaacaaaacaaatctacaatcatcatatcaccatcacaaaaccatcccttcaccgtcacaaaaggcctctcctttaacttctctatctccgtgatttacttctccagaatccttcttttgtctcccgcagaatccatcagtcccttcttaggtcgtcaacatcttaatttagtttttttgcttcactcgaggaaaagtcactacaccaacccaacatattattatatggatacacaaatatatttgtattatttatatttatatgtacattattatagtttagaagagagctgtgttttgtgatgctcttgctttacttctttctctcctttgtttcattccatttcacatgaagatctagatctgggtccagacaaatttcaccgaccagctctttcacatatgtagacctctctctctctaattattcagtaaggttttgttctctcttgtcgtcttcttgttttgtccgtagcattattaataatcaaactcagtctctgaaatactctcagtgacaaaccacttctgtcgacttttgtctttgtctctcactagctataaccaaaaaaatccaaaaacccaaaccacagtttcttgtttttgttatcaatgtctagttatatgcaccctcttctagggcaagaactgcatctacagagacctgaagattccagaaccccacctgatcaaaataacatggaacttaacagatctgaagcagacgaagcaaaggccgagaccactcccaccggtggagccaccagctcagccacagcctctggctcttcctccggacgtcgtccacgtggtcgtcctgcaggttccaaaaacaaacccaaacctccgacgattataactagagatagtcctaacgtccttagatcccacgttcttgaagtcacctccggttcggacatatccgaggcagtctccacctacgccactcgtcgcggctgcggcgtttgcattataagcggcacgggtgcggtcactaacgtcacgatacggcaacctgcggctccggctggtggaggtgtgattaccctgcatggtcggtttgagattttgtctttgaccggtactgcgcttccaccgcctgcaccaccgggagcaggaggtttgacggtgtatctagccggagtcaaggacaagttgtaggagggaatgtggctggttcgttaattgcttcgggaccggtagtgttgatggctgcttcttttgcaaacgcagtttatgataggttaccgattgaagaggaagaaaccccaccgccgagaaccaccggggtgcagcagcagcagccggaggcgtctcagtcgtcggaggttacggggagtggggcccaggcgtgtgagtcaaacctccaaggtggaaatggtggaggaggtgttgctttctacaatcttggaatgaatatgaacaattttcaattctccgggggagatatttacggtatgagcggcggtagcggaggaggtggtggcggtacgactagacccgcgttttagagttttagcgttttggtgacaccttttgttgcgtttgcgtgtttgacctcaaactactaggctactagctatagcggttgcgaaatgcgaatattaggttttatttattttttttttgtttctcttaaaacttggtgtgtgaaaaaagaaaacgaacgcttaattttcctttttctgtttgtttttatgaatagaattggtaagtttcataaaaaaaaaatagtattaatttgtgatagcttgaattaacccccttgttgttaaaacttgttctaatccctaattattagggaaaaatgttatttaatacctaaacttacaaaaaatggccaaattaaccgtgaactcgtgaaatggccgttttatctctcaacaaaaagttgacttctattttaacttttaagtttgcgttgattcggcctaataaaccaccgttaaaaatttcta

SEQ ID NO: 12691 - DNA, 760 bp, Arabidopsis thaliana landsberg
gttccaagacacaagattggtcatgaatgtctttatgtaatctggtcttcggttctgctcatatacatttagattgaaacaatcaacaacacaaagaaactcaagaaaaccttgttgctaacaattatgaataagctgttacctggaagtcaaggtagtaagcatgctgttcatgtagcaaaagaaaacaaaaattatcaataaaatttgtaagaaagaaaataggttttaagacaaacaagctataaaagtgtttatttacctcccagacatcaatggtaagcaatggctgcaagaaaattaaccaagattaaaagttaaggatttgcattaactctacggtgatatttaatcaagtaaattgtgtattcaagttccttaatgaaaaacttacgaaagagccgagcacaaggggattcacagcattgggagttttcactactttgagtttttcatttgaatctgaaagcattgagataagagtaaggaagaagttaatatatttatctaaagctcttaaacatttgaaacacttacaagcaagccaggcccagccagctccaaactgagtggctgcagcagcattgaactcttcatagaacttctcataagaagtgaaatctctttcaagcaaagcaagaagctctcctgatggttttcctcctgcgcctggtttcattgactcccagaagaactcgtggttccacaaactataaacataaccaatggatcatcagctaaccaatcacacacccatttt

SEQ ID NO: 12692 - DNA, 608 bp, Arabidopsis thaliana landsberg
taaacaacgatgatgaaacacgtgtccacacttcggtagctgtctaatcttatcgtcggatacaaaatcggataagcaaaccgtgcagcaatcttccggatcggttaagagatcggagaaacgaaccaccgggattaactcgttggcaagagttgctgacgtggagagagcgagtcgggtcgggtcggatcgagaggtctcgttgtggtcaagaaaacttggtagaccgatgtaaggacaaagagcatcgaccatgtctctaaagaaaccgatgacgtaaagtgtttttagtacgtaacctggaatctgaagctctttgaaatctgttggaagaccatgagtgtgagagaaagatagagacgagagagagaaagagataaagcttgaaatgttgagttatagagacaagtataatatatagtgagattgataattgtgtttgaagttataataattgaatccggcggctcaagataagtatagtcaatttgatcacaatggtgggtcttatttagtgtataatgtaaaatagtaaaatattttgcttggtatagaaacaaagagaatatattactacaattttctgtgatagataatgtgggtgcgat

SEQ ID NO: 12693 - DNA, 921 bp, Arabidopsis thaliana landsberg
aattaaaaaaaaaagaaggttgtctcatattacaaaggcatcatttaattgatgatattaatgttggttatcagcatggaccattgggaaaacgatatttttcaacccaaactaattactggcgggtttttctaacccgaactcacatcccagtctatttcaacctgaaccgaaattaaatttaaattgaaaacctaatctttgttacagtagccaatttcaatatagattttaacggtgttaattgatgtttaagggatgttgagtcaacggattaaaggtcgacgacgtggcatttgggcatagtaaagacgacgtcgtttaactcgtattgagttgatttgacaaaacgacgtcgttttaattggggggaaaattaaaattaggtctttcgtgttcattgtttcgaatcagagaaagagtgaatgtgcgttgccgagaggggaaaacgatgaagatagtgcagtaggaaaacgaggaagaggcttcataatcggagaattcgagatccttgagaagttcaaatgaggtaatgagttacttttaaaactatgaatgtcaattttgcatgtttttggttgaattttcagttttaaagggtattgagtgtgaatatattccttttatacattttctttatatgaaattgtctaaaactctatttgttcaagggtagtgttcgattttaggatagacactaagtgttcgatgaaatgcctaagagaattttcgtttgttttaatgtggatgttcgatgtctttttcagttttccgatagaggtaagattcactgtgtaccacagtggacattgggtgattaatgaaaacgaagatgttgcttatatgggtggtggggtgttaagttttgagtgtgaacacgaagagttgttcacaaaattgaggaataaattgggtgatgta

SEQ ID NO: 12694 - DNA, 568 bp, Arabidopsis thaliana landsberg
  unsure (1)..(568): unsure at all n locations
cattgaaggatgaggcttcatcgcaagttcaaagtgatgagtcgcaatatcctattcagaattttgttggatatgcgaagttttcgcttgtacacagagcatatctcacttcgatctctgttttacgagaaccacgatcatactctgaagcagttaaggatgaaaaatggtgtgtagctatgcgcgaagaaatctcagccaaacagaagaatgaaacatggggcttagaaacacttccatcaggcaagaaagccattggctgcaagtgggtgtttactatcaagtacaaagcggatggttcagtagagcgttacaaagcttgactggtagctatgggtaatagacaagtgaaaggtgaagattactctgatacatttgctccagttgtcaagatcacaaccgttcgttccctcctaaaagtggctgcagctaggaagtgggaacttcatcagatggatgtgcacatgcatttcttcatggtgatttagaagaagaagtgtatatgcgccttcctcnnnnnnnnnnnnnnnnnnctccaaacttgtgtgtcgcttaagaaatcgtgtat

SEQ ID NO: 12695 - DNA, 967 bp, Arabidopsis thaliana landsberg
gtcttttgatttttggaatcagtctgacatgtgtattgtttatgttgcagggcaggagaccagaggagaagaactcttggatctctttaacaatctgctccttgactgtgttccagtttgcttggaagaagctgggtgagaaaccgtctggacctggcaccttgtctagatgaatggagaagctcgctattctgatctcttcttctgaaggtatttctatcaatctgttatttgtagcctctgaaatgcacggtgataatgcttcttgaactatggacctgcaagtttcatcatgagtatcttgctttgtgaatagctgctggtaatagtctaggataactccaagtatcttgtcctcctcaaagacacttataccttcctcattttcaatgacagagaatttgttaatagctaacatgcttttagtgatagcatggaaatagccagtgtttctgtcgcctagagttagccacagttgccgacttcgttgtttccagaactcttcttcttctctgtaagcataactcaggtcaaagctgattttattgatcgtttctatagatgaggtagggtcaatcattgctgtttctagctaagattggtgatccttgattttcttttggctgttcacttgtttctctttattccactcaataatggcccttctgcatcttctgattttggtatctacctcctcaaaaacactgcctttccaatgtttgaccactagttttgatattttcttatttttcttgtggcgcctatcatacctgaagagccctttctttcttttcttttgcaggtcaaagtaagtaactaggggtctgtagtctgaagcttcaaaaagaaggtactcacttcttcctgagggatactcttcagcccagctgctatttgacatagacttatcgagtctacagaaaactagatggtcatggcgtttacctctccatgagaggatgtttca

SEQ ID NO: 12696 - DNA, 723 bp, Arabidopsis thaliana landsberg
atgtcattttcctaattaactgaaccaaaattatacaaaccaggatgacatcaagttgatgaaagagctaaatatggacgctttcagattttcgatttcgtgggctagattaatacccagtaagtaaatttacattattactatatacgttcaataaaaattaatatctatttaaagattttggtgaatctctgctttaacttttggtactatttaaaaggtggaaaagtaaaagatggagtaaacaaagaaggtgtagaattctataaggctcttatcgacgagcttgttgctaatggtaagttaactaatcaaagatattatgcgttataatatcttatattatatgttctaatgaacaaacatatgcaggcattgaaccatcgatgaccctctaccattgggaccatcctcaatcactggaagacgagtatggtggtttcttaagccctcaaatagtgtaagcgaacttagcaaattgatggttatattatatcattaagatagatataaaagaaataatattaactaatatttttaattctcctaaacagagaagattttcgagatttttcaagagtgtgttttgaagaattcggagacaaagttaagatgtggactactataaacgagccttatgtcataactgttgcgggctacgacactggcagcaaagcggttggacgatgctcgaaatgggtgaatagtaagtgtcaaggtggc

SEQ ID NO: 12697 - DNA, 1053 bp, Arabidopsis thaliana landsberg
gtcagttatcttgggtttgttggtcgaataatttatttattcataaaatagtatttttgtcttgcggtttaattattatgttattggttggtttaattagatatttatggaaatatttaattatatttaaaaaaaaaaatgggtagagttgtttcactaataatctgtttaacaatgtatgactgtatgtcatgtactttttttaagaacccatttgtttcacacaatcaatgagatgtcaatatttatactttacataagttttgttttatattctaccatgcatttaaaatttacttttattctaaaactcattaacacattaacattttgaagaatgatcattttaaatttgtatctgttaaaatttgaaaacttgaattatattattactactaataaaatgtttataatattattttaacatcttatttatttaatatttctattaattataagtaacatatatatgcattaaatgaatgtttttaatttatttaattgtgaagtaaatagtgttgcttacgtgaacaccctagacgaagagagaactaactctctaatcatatgtatgtagatttctaaaacaaaattcatcacactaagcagattcggaactaattgtattttaattcaaaaaacatttagttgatagattcacaatcaaattgatttttaaaaatagatctcaataaatctaaagaaacaaatgaatcatcaaaatagatctttttatttgttcctaatttttagtttaatcaaaaccggtctggttgatgctttcaaaccggttgtgatgatttcggtatttaaacaatctgaaaatgttttggcaagagaggggaaacgaacgatccgagcttttttttccggcggcaattgggagattttgtggaagatcatagttggttctcttctcgattcttaggggttttagagacttggtgctcttgatttcgagtgatcatacagtattacaaggcatggacaaatcgagtggtttggatttcatcaaccagatgttcccagtaggtaacttaatttgttttttct

SEQ ID NO: 12698 - DNA, 646 bp, Arabidopsis thaliana landsberg
cgaccacatcatcaaccattaccttctagtcccaaggtagataaccaaaatatcatttccctttctttcataaatcctctttttttacagttgacgttgttatgtgtagggttgctgttttcctccatggagccgaaagggaagctaatgaagatgatcatttccctttcttacataaatcctcttttttttatttgcttctgcctgatttttttttaataatatcttgttattcttatggagatgtaaggagtagtttttgctaaaacattatgcaacttctgttactctatttgcgtttttttggaacaatactcagattcatttataggggtgaatccttttattcacctcctattataataaacaaaaattaaatttacttaattataatatccaaaccttaactattcttttataaacccaagacgatatttaatttcgtttagttacaaaaaatctaaactctaatctctttttgtaaacctaaaccgacacttaacatcgtttaattataaaatataaatcctaaccgttaattctaaatccaaaccaagttttaacctcgtttaagtgtaaaatcagaacccgtttataaacccaaactgaaatttaacttcgtttattataaaattaaactctaccc

SEQ ID NO: 12699 - DNA, 663 bp, Arabidopsis thaliana landsberg
gagagcttgtcttgatacgataatggaatataaatagaactaggattcttagttcttaaagagcaaaggctaaaacgaaagaaaaattgtccaaaaaagtaacaactcaaatgcaacagtagctaaagcctgtgttttcaggttaaaatgctaaatttcaactgtgataagtcatgatgttggcatatataactatacaaaacacagtgaagtaaaacacaaataagtacgagcttagagatttgatgcgtcgtaccgtgaacctaagaagagtcattcctcattgtgacaagctactttctaagagggtctcagactcagagagctgctttcttcacctcgaaaaaatttgagcgttctctgtttgctgcatcaatgtcttcttgtgatgccacggccacggcaacgcctttatcactaacagagtctattgcctctgcgaattccttgaagtccttcaaactgaaaaaggataaaatggaagttacttttcttatctgtttgataataactatgtcgaagaattggaactggctatttggtaatattcaaagaagtcgttaaacttctaacactacaaaactcagatcacaacattgtccccaaggatttcataaatccccacaggatatccgcggcataccattatgtggaaagtgaaaa

SEQ ID NO: 12700 - DNA, 975 bp, Arabidopsis thaliana landsberg
atgtgcgtcagagggtcacagtcaagttaatcccattaattgatctgcaggcactagccagtaagctggtggggattcgggccatgcataagataaagatggtgctttttatgtttggtaaagatttctgatagagtaatagcaaaacttagcctgttagagaaaattacgaagactgtcctggcattctaaggtttttgagtgtgttctagtcattcaaacgatacaattatttagacacactttgcttgactaattgcaggacggaagagaagtttcaaagaaaaaagcctttgttccacctccacgtttcatgaacattgatgaagcgaggtactccttttagatactgtacgttgcactataatattataaagcctgttatggataagggtttaccacagtgctgaattttcaaaaattgtcacatgcctttagggaactgcacatacgtgttgagcgtcggcgtgatcacatgactggtgattactttgaaaatattggtggcatgcttttcaaagatgggtttcattacaaacaagtatcattgaagtccatcactgttcagaatgttacaccaacttttgacgaacttgaaaaattcaataaaccaagtgaaaatggagagggcgactttggtggtctgtcaacattatttgcaaacagaaagaaaggtcatttcatgaagggtgatgcagttattgttatcaagggggatctgaaaaacttgaagggttgggttgagaaagtagatgaagaaaatgtccttatcagatcagaagtgaaaggtctccctgtaagcatccttactctttggctgttcgtaactgcttgcatgtttttaaaatgatccagccaagaataactgccgagattgactcttgtgttgcaggatcctcttgctgtaaatgagagagagctttgcaagtactttgaacctggaaatcatgtgaaggttgtctctgggctctaaag

SEQ ID NO: 12701 - DNA, 778 bp, Arabidopsis thaliana landsberg
aggtatgaaaacatttctacaataacacatgagaggataaacacatttcccattgagaaacatcactcatttctcatatcttccatctttgtgtcagttcttgagacctcaagaaaaggtccatacgtgtatgaagacatggtgaagatgggaaaagacgcggggcaagaattgctatctcgtgctggtcctggcttcttcggcaactgagccattcgaagaagaggaggaagagatgtgacacggacaaagtctagtgtttaggagtgattcaacatcttgaagtcccgtttcttcctccgaactgttgtaacttttttgattttgagagaaacatgaccttttgtttattgattgttttgttgtatttagattaaattcatcttgcaattgtacccctttttttctgtcccacgatgaaactagtacacaagaaattagagagacaaaataaaatccagagacttcagcttcatttcctccgatcttcttattcatcaagtggaatataccactcgagtcttttctcggaattgctcagcctgtaattcagcatcagttcctcattgcacaacgcttttgtagccacgagaacaattgtcttcagcacatgagcatccaaactgctattacttcctgtcctagacaagaagctttcaaatctccccatctttacatctcctgtgttcccgaaagctccattcggaatgtaagctcgcatctctgtctaaaacaacaggaagtcgtaagggcaaatcatgacattagattccagttc

SEQ ID NO: 12702 - DNA, 990 bp, Arabidopsis thaliana landsberg
aatgcgttccttataatcaaggtcagtttgtttaagccaaaatttgacttttttgtttaacaaatagacatttggaattttgggttaaaaaatggaagcatgggagtatatatatatttcttttttttgtcggcaattcattttcattcaaaggcccaattggcaattacagaagggattaagtccagaggattacaacaaagttaacagcccactaaaaacataagataaacaaaagttgcacatatgctttagtattagacacgtgtagaagacgtatattgctccagcccacgcgtccactcctcaagcatcaccgttaacgttgccggacatcgccgtattctgactaaccaccgtcgatctgtcctagaacgatgtaaatccttttcccttccgccgatctccaatccgaaagatagatagcaccgaaattcttttggttcgattctataaagttgcttcaaaattctcttggtaacaccaatccggggaagctccaccaccagttacacccaatttggtgtagctaagatccatctttgctcacacgatttgagcaaaaggagagtgatgaagatattactcctcgatcaattggggaaacagagagaaattggaagataaacaaagaaatacggtgaagatgtatagatagaatagagatcgaatctcgctaagagcgagacagagaaccggacatagacggtaggaacagtccgactccaagccggaatttattgatctcgtacatagacgagaatattcacaaatccggtcaaataccggaaacaaaagtgactaagcttttctcttctgcatgggagtatatatataactcgccaaatcgtgacttttgttatattaaagaaaaacaaaatttacaaacttaaattaagatttggttttgtttgataatcacagaatccttacattgagagggcaataccaggttgtcttaggaacatcatttaactacttttaccagat

SEQ ID NO: 12703 - DNA, 856 bp, Arabidopsis thaliana landsberg
aagctatatgcactgtaatgattggataaaattttttctgttttatggattgtttaatttcatatttgtgtttgtgtgagtctggccaattcaatgcagctgattaagttcaacttacagggaagccaaactaagagtttaatcagcttgaaacaaattgtataactaacaaatgaaatgactcactcatgaatgatagatcaataaccaaccacattacttatcttcttcatgaaaaggctcataactcacctcaaccgttgactacaccgctcgataattaatatagcctgtgggtgccaagatgtcacctagagtccccccaaacacttcagtgttcatcagattgattgatcgatcgatagatgataacaaagtatgaacaatgaagcgtttaagggaactcaaggggacatttgactttacatgttatgtctcttttgcaaatgcttcttctcttactcaactgaccttagcgactacccaaactgcatatttatagtctatagatacttgccaatgaaattttttttaaaagagggaccatagattctatattcttcattgaatggcaaaacatgcgggaaatatgaggatgaaccaagtcggaattttggtaataaggagccaagataatatttaatattaccatcagtgtgctacaaaagcacattcttcacaagatctttcgtcccgcagatctgtattcaactcttttttccgatgtagaattgatttagagacccaatataatagagtaacaaggtatcttaaaaatctcgcgatagtagaaaaaaaagaaaaaaattttccctaaacatggcctttaacgcttacatatatatgcattttcaag

SEQ ID NO: 12704 - DNA, 683 bp, Arabidopsis thaliana landsberg
gacatagaataactaggaagaacattcaaatgaagataaaaggattatttatccatccatataatgcaatttatagagtttccctcagccaataaatggaaagctttgttaatttcttcaaagcttaattcgtgtgtaatcagatcctctagattaagctcctgccatttatatatatatatatataaaaaatcatatcgcatactaaaatcaaataatcataactttcaactttttatatataaatgataacacaaactatatataactaatatatacctttttcaaataacgatccacgagaataggaatatcaagtttgggtttcaaaccgccaaataaagtgccgcatacagttctgcctctgagaagatcataactacccaagcttattggcaaagccttttgttccatccccaatactatcgttttacccgatccctacaaggaaatcaataagaaaattggtttcggttttatccatgtaatgatgctaaaccaaatagaaaccggtaaaaccgtaccgggcgagtactcttgaatgcctcttccatcaaggaagctaaaccaatgcattcaaaactgtagtcagctcctacatctgtcatttctgtaatcaccttattttccattatcattccaacaattacattagtttatttcagcatggttcgaattacaat

SEQ ID NO: 12705 - DNA, 831 bp, Arabidopsis thaliana landsberg
gaatttacctgccaggactttattcgaacaccattcgtagtttcattcttcgtgacatcacggacagtgatgtttgaaacacacgcctttgtattgtcctttcccagtcctccaatgctaattccatggccagggccacagtctacatcgtgtatgttgatattcgagcatccagtttgaattgatatacagtcatctcctgtagaatgaaaggaattgttatttcttcatcgtggtaagtttcatcatagcttcaataagtagagtctgtggttaccacaagccagcgtgctgcgatatataacggcatcttgagagttttgcaggtggattccatctgtgtttggggaatctccaggggatgaagttgtgaaatcagaaacttggatgcttatgcagttatcaaacttgaggtgggtttgagggctgttctgtatggttattccactgaccgtaacaccgttactcccgtagaacctcaaagcctacataccaaccatggtgaatccaaaataaatgttggttttaatttggcaatatccatgtaatttactcaggtaaaacttactgttggtttggtccttggcatttttgtacccatctgtcacagttgaaaaagaacgttagcagatgtcattgcaagctttcacaattttgtttagccaagaaaattgaattaactgtttaccatgtcgttccaccatactgatcctcgtccatcgatgatcccttttccttttatagtgattccttgaagtgctttgaattctatccattgcaagagacctgatccccatgcacttgcactcgttggagctatgatctttcctt

SEQ ID NO: 12706 - DNA, 850 bp, Arabidopsis thaliana landsberg
  unsure (1)..(850): unsure at all n locations
acgaatacgaagtaccatgaaccctaacactgataatttggagaggattgtatcttatatttcgacatgctacatgatagactaggtgatctccaggatcttttgaatactttgtcacaacttggcttttgtttacaattcctcttttttgtttgcctatttttctttcttcttttctctttttgcttcattacttgttgatttcttgcgtgcttgtttgttttcttcatttcttcattggttacatgacttgctgttacttctttgcctccttcctttgttccatgtgtgcttgtttgtttcattctctatttctttgcatgcttgtttgttttcttccttggttacttgcttacttgcttgttttcgtcatttcttccttggttacttgatttgattttgcttctttagtttcttcctaggttccatgcgtgcttgtgtgtttcattttctggttctttgcttgcttgttttgatatcttgcttagttgtttggttcttactagcttcttgtttccttggttccatgcgtgcttgtgtgtgtttcattctctagttgcttgttttggtttcttgtttagttgtttggttcttacttgcttccttgttttcttcaaacttgtttgacctcttttatttagatagttctggatctctgtttgacaatagtatagatgaagactctagagtgtgtaccaaggaaaaggcatcgtcgtcaatagagtactttctgtgnnnnnnnnnnnnnnnnnngatttaagctatacaagaatcaaggccctgatcattctacgctccttagttattcaaagatcaggtgattgtggatcttttatttatatgtgtatat

SEQ ID NO: 12707 - DNA, 1068 bp, Arabidopsis thaliana landsberg
tgagttgagtccttttggtaagaatcccttagcgaaaaaagattgaacagcgagaacaaattcttttcctatgatttcccatgaagccttaaaaaattctgaagtgtaaccatctggtcccggagatttgtcgttaggcatagcaaatagaacccgttttatttcatcacccgtgacgtttttagtgagcttctgttggtctgagtttgaacaccgatatggtaataaactctgcaacccatcaattgtggtaccttcaaagtcagtagggacatattgcaagaaatcttggaaataacgtgcagcctctgtttttatatcatcttccttcactagaactcttccatcttggcagtgtatttcctttatactattctgaatttccctgattgcagcagccctacgaaactgtttattgttgccgtcacatttaaccagtgtagtttagatttctgtttgaggtacttctcctctagccctgcgacaaattcccatttgttgtatgcttctgtctcttctgccattgtgtctggggttggattcaacaagttcgtttgctgtttttgacaaagagtgtcataagcttcctttgtcttcttcaccaagttccctaagcgatctctagccaaatcccggagttttggcttaagtccttttagttttttggaaaaccgaaacaaagtggaagtagatagaaacaaatcctctgtatctttccaaaaattatcaaccgtcggtagaaattctgccatatcagtgaggacattaacaaatttgaaaggtcttcgacctttgtgtttgctaatgtcatctcccatatgcattatccggcaatgaagatgatccgagcaaccccctgcttcaaagacactgtaagcctgcggataagacctcagccacacatcattcatcaaaactctatcaagttatttcaagattaaatcattttctctcttattacaccatgtgtagaccggtccatgtgagctcatatccgagagaaagcaataatttatcatatcctgaaaatctctcatccccaaagtgaccaatggactaacttcgaca

SEQ ID NO: 12708 - DNA, 732 bp, Arabidopsis thaliana landsberg
ttgtcaagagacataagaaaataaacaagaagaaggtaaacctcatctgttcggattcctcttcttctttcagaccaattttctttactctgcctttttctaattgcggctactcatgtaacaacaggtgacaacgaaagctattgcttttagtctccagcagaacgacttgttggttacaaagtctgatcaggctaatttaatctcagtcaaggtttaatttttgaatcattataatattgtactgtttgttacatgtattgtacaagttttatgttcaattgagctacttttttttggtttgttatgcaatttaagacttgcctgttaataatcaggaagctgccgtaagagaaaagacgctctttgttgccaatctcccttatgaaactaaaataccaaatatgtaagtagtacctttaatttcctctgttctcggatccagtttttcatgactgatcctctacttttgcagcatcgatttcttcaaaaaggttggagaagttgttcgtgttcaacttattgtaaacctcaagggtaagcttgtgggttgtggctttgttgagtttgcttctgttaatgaagcagaggaggtgagggttttttatagtaatgatgaaaaattgtacgagtagttatttgaaagtaggattgctgattaaatcttttttgttgtaggcgcagcaaaaaaagaacggtgaatgtttagacaataataagatttttcttgat

SEQ ID NO: 12709 - DNA, 907 bp, Arabidopsis thaliana landsberg
gaattttagtcaattaatcctaatgcactgtcctatccttgtagtattttaggagtcaatccaatcaggtgtgagcaaacagatgggatgtgatcagaagtcattaagttaaaccaagcaataacaggtttgagatttctaacggtcctaagtgaacatgaagaaaataaaattctaagagaattacacaaatcactcaaccaccactagctgatggcaggaacatgatgtggtcgagtaataggcagaaaataaaacaactaaatctcaaatataacaaagaaaacacccaattggcaacgacaccaaattgataatagaattttagtcaattaatcctaatacactgtcctatccttgtagtattttaggagtcaatccaatcaggtgtgagcaaacagatgagatgtgatctgaagtcattaagtcaaaccaagcaatagcaggtttgagatttctaacggtcctaagtgaacatgaagaaaataaaattataagagaattacacaaatcactcgaccaccactagctgatggcaggaacatgatgtggtcgagtaataggcagaaaataaaacaactacactcgactgcacaatctattaccagaaactaggtgtggtcgagtaagttggtgataacatgtaagaaatgcgaaaactaagcaacatgcaatgagaaagattaagcaatagcgatgaattagagaaatcaaatagacgagaaattcctaaggatggggttatcaaatggattggtatcctagcctattcggatggttaacaagcgcaatcaagctatccctagacaacatgttcaacaacagattaattcactcccgtgatagaagtcctcaagcaaagctagcccaaactaattcccattaacggaatctaactatgtaggta

SEQ ID NO: 12710 - DNA, 317 bp, Arabidopsis thaliana landsberg
tttccattaactttatatcttcagaatatttccgaggatcaataatatagaagaaaaaaacgaaatttacagtgtgaaatctgaaaactgaaatttccattaacatgtttcaagattagtttggaatttaatctgaaagttctttagatatggtctaatgtattgtgatgaaatgttattagatgcacatgtggggacatggttcacaatacagaaaaggaccggagtcgctgagagggacacaaccaacggcgatgctgaagctgccttgctactgctgtgcaccgggctgcaagaacaacatagaccacccaagg

SEQ ID NO: 12711 - DNA, 706 bp, Arabidopsis thaliana landsberg
agtatatcattttaatggttagtcaaaattggctctatatatataaataaaaatcagggaacaggtaaaaactgtaatgttggggatggagaagcatgcagcgccaattagtttgggtagttttgatcttttaagaggcagagttatttgcggaagcttgttcggtggtctgaaatccaaacttgatattcccattctagtggatcattacctaaaaaaggtaaattattgtacatatgtgattacatttttttaatttccaacctctatgttatgttgtcatgggattaaatatttcctacaaattgtaggagctcaatctggatagtttcattacacacgaactgaatttcaaagaaattaataaggctttcgctttattagaggaaggaaagtctctccgctgcattctatggatggataagtaactatccagcttcatatttgcactttataatcttctcgtggatcttgtttagattatcttcctttgtctttcaagatgctttgtcttgttaccttgcaatttttgttctttccacacgagctacaaacttatcatttggtagtccaaaccccttaacattgtgttttctgatggttacaaatattatgacaccttgtatttgttgatcaatgatcattatagtactaattgcttctatcattgaaatgcaaatcttaaggtcttgtcttcttgatacat

SEQ ID NO: 12712 - DNA, 918 bp, Arabidopsis thaliana landsberg
aacaatagaagttaagtagaaaacttaagatggaacacattacacattcatgggctatgtaaagatcttcaatccgctccatcatagttgaaaaagaaatctatttcaccaagttcatgttctatacaaaataaaagaacatgaattagaattacaatatcacaacctcatgatagaactaaaaagaaagatcaaaatcagaacttacttctcataagaccattttccaaagtgatctcagaaagtatttgctttattgtggagacacctctttcattgatatggatttcacattttaaccattgctcaaggcacatcaacaattcaaccatgtagtgcgagagacatcttctgaatggattcacaactctatcacttgtgctgaatgcagattcttatgctatggacgccatttgcattgcaagtatctccttggcaatgagtgagagaatatgatattttccggtatagaccttccaccaagatagcaaatcatattatatacctttaagaatgaccagagtctccacattctctttcaaacatccacctcatgtgatgtatcattccatgtctccttcacagtctctacaaatacgttttccatatcctcatataaaaaaccattacgcaaaacaggtctcctaaaagaatcttgagactgactccaaccactttcagactgagactgagtagatgacccaccagttggtccactactagaaccgctaccacttttggtcactaaattggctcgtgtgaactcatcatacaaatcagtcatgatgtcataaactgaatctgaaagatgagtagcctccacactatctctaccatatagcctttcaaaatataactcagcaaatttcattttcttcctcgagtcagacacactttccactattacaagcctattca

SEQ ID NO: 12713 - DNA, 913 bp, Arabidopsis thaliana landsberg
  unsure (1)..(913): unsure at all n locations
caagatttggtaatgcgtagaaattcaagtagtaatgtgaaacttttcattattgcagtgccatctttacaaagactagccattcataatggcagtggtacaccacaacattgtggatataccataaatactccttctttgaaatacttgaaacttgaagggtctaaggcttttgagtcttttatggttgagaacgtatcggagctgatagaggtaaatattactgatgtctctgagataatcgacgagaagcttcgggtatttcttacttcagttacacgtctttccttggctttatcaccatcggtgtttacgtttcctaccggtatcatcttcaaccagttagtatatttggagatatgtacaaataaaacatcatggtggaaactacttcccctcatgctccatagttctcctaaactccaagtcctcaagctcatcgatgtaagcaatatatatttcttgatcatctaaataagatacagattgtgtgtgtttttttctgaatgttcgttggtttgtctcaggacacagatgggatgaactatgttgaggctagtggagaatggaatcaaccaaaaaatgttcctgaatgtttgcaccatcttgagaaattcatttgggaaggctacaaatggaaacgtgaagagatagaagtggcgaaatacattctaaagaacacgaatcgtttgaagagagctattttctccctaaaaggtattagttctgaagataggcttgtggtggttgaagatttgaaaagtgttgtcatggctacaacaaattcatgccagtttcaattcatatgaaaacattatattaggtaacgtttagtttgcttttattctgccggnttcttgggatttttatctgttataaaatgtgagatttgatattttgtctcagaatgata

SEQ ID NO: 12714 - DNA, 992 bp, Arabidopsis thaliana landsberg
  unsure (1)..(992): unsure at all n locations
ccatttcctcgagctcttttggtattccctcgcatcttggagctgatcagtccctcttctcacaaacgagcttgctttcgccacatggctctctatgttgtttaattgttgcccttgagcttctactagagctgccatgtccaagaaaacctggtgcagctccagtagattcttctctatctccttcactgcatcatgtctctcctggatctcagatatcgggtctaggatttgacctcttccttgctcttgaatcgctttttggagaaaattctcgctctcaccgctcgctatcaagttatcgattgtttgctcgtctgctttttctcctgttattgtgaaatacctgcaccaattttaacataatcatataacttgcaacccaaacagagcatagcttgcaacacaagaaacctaaagaaaaacaaagacctgcgctctacggtttccttatactcattgttcatacgagcacgtagaccttgaaaactatccatcaagtctttgagcttcttcccgagaccgctaaccacagaagatcgagtcctatccgtagacgaaccaggcccacaacccgggacattacggctattagcattcgctttctctagggcttcgagcttctgcttgatgattttaaccctcttaaggaccattgctacgtctccatccatcttagctcgtagctctttaaccttcttggcattgtgaaccgtcttgcactcctcgtttgagtcttgaagcttcttatagagagcctcggctcctttcatgtcgtccttctcattctcggcatcctcggtgtgtttttcggggttcttcgtttcttgtcctgcctcggcgtccccctgttgggcctggttcttcttgtttgccttngtgngtgggtcgttcgttttgnctctgtatttttttctctggcttngttctgtncngcctgtttatgaattttactttgggtatttaagtgtttattctttggtttttttttg

SEQ ID NO: 12715 - DNA, 794 bp, Arabidopsis thaliana landsberg
aaacatgtcagtggtatataacgaaattattaatttttccaaaacttgagaatatgaaaactcaatgagtattttggacgtagaaacgtaaacaagtgagataccattctaacccctaagaatttctgattttcgtgttaggttttgaaaaagttaaatttaaacaaaaataattttttattagctccttgatttcaagttcacgagttactcttttattaacaaaaacaaaaataactttactggtactatgtttcaaccgagttccactatatacaaatatttgaaaacagtggactttggtgtcgtgctttatttattgtagccttgtaggtttaagaaaaaactatgcactaagaagtctgcttatttctgaaattgagtgatatatatcatggcttataacttcaaagtaactttttttttttgctaaatagtaaatatttcattgataatgaaaaagtttaggttacaaacataaatttggaacctttgcatatgaatccatggcaaaaagaataaaaacatggaagcacaaagacggttagttaaaaccatgatttcggtccatcttctcaaccgtgcaatgaagcaatgtgaaaagatgaagcgatgacgttctaaattatccttccggtatgaattgcaagaggagaagggctactgctaattgtgaaacacctcaatgtgacggatcaaagctttagaagcctttcgcaggaggcccgagaccgagccgtcaacggtttggaactccaaagcagcaaacaatccaagctccaatccatgagctt

SEQ ID NO: 12716 - DNA, 636 bp, Arabidopsis thaliana landsberg
gagacaatgtactatattagtaacgaacagttttttttttcagtttattaaaacttgaaccaggatacttaagataatgtactatattagtaagaacaggttacaggaaaatttagtactgaatcatttttacaaaggaaaatgtaggttcaagcattcatgaacatttcaggctgcttcagaaaacattactgcaaacaactatctcatctgaccagcagaggcgctagtagctgcagagatggttggtcgagccatcatggttcttctctcggttcttttaatcactctaagattgggtgattttgcttttgtggtccccttgttggacttctgaggtaagaagggtttgttgaagttaggcacaggtctggcatgaggaaccattgtctttctcatttgcttcagagctctctcttcctccacctgacgaagttggcagatattattgaacaaagttcatgagagtatattttcaagctaggcattactaatgttacataccatttttgcagcttcactctcttcacggtatcttttggactggttctccttctctttgatctggttgcaacatagaatggattcatcaatttcagaggttattgaagcattcttttgtttgctgaatgactg

SEQ ID NO: 12717 - DNA, 538 bp, Arabidopsis thaliana landsberg
aaaagttgaaagtttctctcatagccaatgatcactttagctttctaaaacctcatttatgttacacatatataacagccccaactaattaccaatataacacagtttaccccttagttctgattatagtaattgtacccctcccttgtgtttggatcttagtaagagccaccacagcttttccggagaggcccggtccacggccagagacacatggtcgagaggcaaagtctcctaccggatgtcgaaccggtcgagatggagccatcaaaattctctcgttgatatcatttagggttacatcattttctcgaccacctggtttcaccaatccaaatgggtacactagtttcgcgattagtcttttgttcttattaccacagttggatgaggatggttcggttggagatttttctcgaacataaattttgtcataagagacagaagtgtcgggagactcgtaaacattcgatatcgtctcctgacagtaactgactccacttatacgttcacctgtacattagtaaaatttaaataa

SEQ ID NO: 12718 - DNA, 963 bp, Arabidopsis thaliana landsberg
aaacctgttgaaaaaaaattcagggaaaattggaaaaagtgatgatgatgacgagagatcaattcaaatcttaagtcctccaaattttaaaaatttcgatctccactaccttcgtcatcttcctctacttctgattctcttttctgggtttgtcgtttaatgggttgattttgtatcgtcaaaacggagaaaacaagaagacttcttttggttttcttattgcgaagaagatatttctagggtttcgagattttctgggttttctgggtttttgtgtgttctttgattggatttgattattgggcaatttccttggaattcaagaaacttctaaggttcttaaagtgtaaagctttgtgattttctcttattcatacattctaggactttggttttggagttgtaatggcttttgggtctgaaaatgagagcgagacgaagatggaaggttggttgtatataatacgatctaatcgatttggattgcatttctctagaaaacgttactttgtccttggagatcatcttctcaagagtttcaagtctatctccgattctaaaaccaaggtcaccaccatttgattaatcgcaagttcgtttggttgttcataatctcccattttggattaggattttaacttttagtagaatctgaatttggtttttacagaatgctggacgaagtgcggtgatagattcgtgtatccgtgttactgacaatgggagagaaaatgttcatagaaaagtatgaaagttctcatttttaaatctttagttgtggagtttagttatgcttttgttttaatggtttgtctggaatacttcgaggcattcttcatatttacactatacaatacatcaaatcacaatgatcagctcaaggtaaggcaatttctgttgtttcgttttatgttggcacactatatacatcttcttttttcaatttgtaaactttcttgttta

SEQ ID NO: 12719 - DNA, 920 bp, Arabidopsis thaliana landsberg
aatcatattcttattctttttatgacagatcttctctttaacaaactgtttgttttttttaagtgtaacaaaattctccagttctttttcatatatcatcactttcttcctcctactcatcttcgattctctacatagacttctcttttgtaccgtctttcttcagtttagcaatttattcttgattcatccttgattttggaaactactcacatttccacgagggctttccaagcaaaaacattgatgcctcttatcactgatttcaaacttaatttccaaaaacaatacttttcttcgttcagtatttatattggaattatccgattttcctgataattctccatcttctccgcgggatctcacatgtatgcaattttaataagtgactgctctaataccaattgaaaacgcaagaactaatcgatatagaaactaagtcacaaactaaaacatggtttcatcaaacaaaaattctttattagaaaatatgtttagtgaacttagaagtttcacttaaacaatgatctaagttcttattttcatggatttatatgtaattcaagaacctctcaagacaaacctttagaccctttaaatattatactttcttatatgaatcctaatgcattaattaatgtctaagaattcttttactctttttatcctaaactctacaaagcctaataggctaatacaagcctagtttctattcaattttcaagaacactatccaagcttcctactcctgtagagtatatcttgacttgaatattaacgctataaactaagttcctttctccaactgtcaagaaaccctagaagatgtcaaatgttttcttatcgaatacgatacaagaggtttgccttatatacatgtttagatgctaatacaatgtcgttaacctaaccaactaagt

SEQ ID NO: 12720 - DNA, 731 bp, Arabidopsis thaliana landsberg
gttgcatttgaaactactaacagttattatagatgtagatatgaacgtgactatgaaaagttggaacttttgtttttaaactaccaaaatttggatatgaaactaacaaacaaacaaaaaaagttcacctttcacttcaaatttgatgttcttaaactttaatccgatttcattttccacaaggactgccttctctaaaagattaagaaaaggaagttgaaaaagttattacaaaaacaacatagaaaaagtagcatctgaaagtatttaacaaaaaaatctcacctttcatgttagttttgatgttcttaaactttaatccaatttgttttttcacaaggaatgcattctctaaaaacttcaaaccattgtcctgctgaggatttctcctcgacatgtggatttgacattcaagttataaagcaggtgttttagagattccttgcagagatagaaaatggcgagcgcggtaaagactccattaaacatctatcggacgattctcttcaagatacgagaggagattttgaactccttggtatagaaacatgaactgcaaacaaaaaaacacagaattttactcgcaattcataggaacttaagggtgatgtatagggttcatggggtaactttggataccttgtaactgtagcgatctaagacatcttgatcgaaaaatctgttagcaataacaagaagggaagagaagaagatgttccacaacaaaaacc

SEQ ID NO: 12721 - DNA, 1203 bp, Arabidopsis thaliana landsberg
atcacgattttttctacagttttactttaatcttaaaaaccaatattattacaaatagccaagtcaaagataaggtcaaccccaccagacaaaacttagttcacggcacaacaagactaagcactgaagtctttgagaggaagattttgaaaatctcgtgcaaagactaaaacatccttctttactatttatatctttggctccactacgaaggttattttcgtagttctacacaattccttacagagaataaagcgaacagatcaacaactactctgctcttacaggcgacgacgtcaacaacaacccaaaataccaaaaaccctcaaaagtctcaaacaaaactcaaaacccaacaattaaagaaacaacatttcaatatacagatttacttccttttacagattttcctaaaaaaccgaaattgaaacaaacaaaaccaaaagacgttaccttttttccattgattcctcaattctctaaacaaatgagttaatcttccatggctgccatgttgatgcagccatggccaccgtttcttcctcatctaaccctagttttcttaaccctaatcctctttttccctaatcaatccttttctcaatccgattctcctcgaaacatcgaaacatttttcccaaatgacacaatcacccctccagttcaatctccggttctatcgccgccgcaaaacccatcatcttcgtcatcggattcagacggaggaaatatcttgagggctgtgcttataacagcagcaagcactttacttgtagcagccgtgttcttcttcctcgtccataaatgtaggcggaggagaaacagagtcggtggcgttgacaacacccttccaccaccggttcctccgttggcggaagcggctttagctcgtgaagggtttactcgattcggcggaaacgtaaagggtttgattctagatgagaatggtctcgatgtgttgtattggagaaagttacaacagagtcaaagagataataaaggtggaagctttaggaaagagatcatccacggagacgatgaagagaagaatgtgatttattcaaagagtaagaagaaatctggaccggtgacggagactcctcttctcagaggaagaatctcgacttctcatagtgtcattcacaacgacacttaccgaaatgccaccaccactcatccttctcatgtcaagactgattcttt

SEQ ID NO: 12722 - DNA, 1093 bp, Arabidopsis thaliana landsberg
gtggtttgaatattcactgaagcatcataattcataaattcttcatatttataaccatggcgttccaaaacgtccacatctctgtttttactcgcaatgtatttattcttcaagagatgaacaaactaaagattttttcacaaacagtatgattgatgttcaattattatgttgttttgatcataaaataagaacctcttacattccacagtttagttctgtaattttgcttaataactccatcattttgttttaaaatattacgagttgaagtttatccaaaaaaacgttttgcacgttagttttaatgtccatgtatatttacattcactcctaaaaagggaaaaatgtccaactataccactatttaattttcttccaatgttagaatttacatgagaaatgtagcttctataaattagtgtggacttggatttggatatttcggctaccacctcaataaatatacttttatgtgtaagaaagtaaagtataaatatcatttgactactatttatcactttatttcaataaataaataatgtaaaaactctacagaatctctccacgtcgagatcggaccacgatcgactgctcaatataaattcgtcgaacaaaatcattggacatgtaggccatgtacaataaatcacatttatcgcatacaaaaacaaacaactttaatcgattattcgtatattctgatttctagctctctggatcggtgatcattcaatttcacatactggtttcaaatttggtttgcataatttggccaaagtatttcacaaaaatagattcattcaaagtaaactaaaattaaaatatagggttagcttttttaattaatggttgagggaaaaagctgatttaacggattgtgttgtctgccatgctttccattagtaatgcggattaatgaaaattgggcaaagtttttgtttaattactgaatttaggtttaggtccactaagatttgagtcggtcctaccttatttataaaatgaagttgtaccactaactattcggggtcgggccaacccacacactgcttgctgctggcatctcaattttattaattttctacgtatg

SEQ ID NO: 12723 - DNA, 746 bp, Arabidopsis thaliana landsberg
cacatctgctcctctcccattgcagacatgacagacacaacaatatccttaccctcctcaaatccattcttgagctgtgtgagtaaagcttcatctgttggcagcttcagatcatccttagtgctaccattatcagtaagaagactaacctgtaaatgtaatcaaagaacaaaaccctctaattcaaccatatgggcaaagacaaaacacaaagctgaactagtgaaaaagaagatcacatacaaagccatcttcagagatatcaatcaactgataatcaacacgattcacatgtggaacctgtgccaataaaaaggaaacagttttgtgttgtgagtcaaaaattatagactttgtataacgtttataatccattcacaagactcacatcacaattgtgggaagaaggaacgatatcttcaagcttcttagaagtaaagatatcaatggcaacaaagtgacacttggcgtgaccatgcttcccagtcttcgaagtcgatacctcaaccacctatatcataaaccccacatatcaccaattgaattaaaccctattatagatttaaaaaccctataaatccataaacttcaaaaacagaggtttttctcaacactaaacaccagatcacaatccagaatcactaaacctcaaaaattcacaacgatcaggtaacggaacactgctttaatacaatccatgaagatgattcctctaaaatcaataataatcaaatcagagacaaaac

SEQ ID NO: 12724 - DNA, 856 bp, Arabidopsis thaliana landsberg
aggcccggcatgccttctcctttaccacctcttcgtacgacggactgatcacattgtttaccggaactgttaaggttcttccgtcaagagtagtgacctgtgcggtgtaacctgtgagagcatccactagagaaatcttttgcattaccacaagatcattcccgtctcgtttgaaaacgggatgcggtttctcgtctacgatgaaaacgagatcggatggtatgactccacgatgctcattacctttttccaggaaggttatctttgttccttttttccaaccgggtttaatttctatcgtcaaaatctcctcaaccggtgttggcctcctgcattaaaggataaacagaggttttgtcagtagaagaacgtagaaaataaaatttcagtaatgtctttatactcatggctgtggaaatcacaaaaagtaggaatgaatttcgatacttgagattgcgaaaaggaagatattcaagagagctttaagcagacattctaacaaggattagagatgaatcaaattgaagacaagagacaccattacaatttgtagagttgaagagatttccgttttcatgaaaaaacagatgaagctaaaatccataatgaaagtggttaagtaggtcaaggaatgtcctggttagctatagctatcggttcctacacttacatctatcatttatgtgccgatagagagatcaaatactgaataaaggtcacagagtacacaacttagatgctaacaaaaacctgttcaaaagaagaactttctaataagctgactctatagactattatagctttcatagactaaacatttggaaccaaactccacagaaagagagtttaaactgtt

SEQ ID NO: 12725 - DNA, 680 bp, Arabidopsis thaliana landsberg
ctacccgacgcagctctatctacagaggagtcactaggtttttatttttttggaaattaaatgattggttgttgagattggatttgggttttgtcttaaaactgcatttgtaagattgcatgttgttttgtgggattttgcagacatagatggactgggagattcgaggctcatctttgggacaaaagctcttggaattcgattcagaacaagaaaggcaaacaaggtttcgtcttcttctttttttcttcgtaactcatgattttgtttgttttaataaagatctggactttaactgataaatttggtttctttgatctgttgtttgatctcaacttcgtcacaacttcaccagtttatctgggtaagctctaattctctgaaacaaaagatcaattgtttttttactaaattgaaagagaaaaaaaaagagagagtggatttggtcagaagaatctcaactgctttcacgcgtaattgcaggagcatatgacagtgaagaagcagcagcacatacgtacgatctggctgctctcaagtactggggacccgacaccatcttgaattttcctgtaaaccaaaaaacaaaaatcagattgttttgatatgccaagtttgggaattttggaaatctgggatattaaatatttaaaaaaaaaaattgggggaaaaaatcaagg

SEQ ID NO: 12726 - DNA, 1302 bp, Arabidopsis thaliana landsberg
taaaaccgaatttttgaggtatattgtatgaatcttttatgtaaaggttcaaacttgagattgtggtggatccagagctggcctcaaggttgaatcgccactcattgatcatcctagttataggtagaatgtgaaggctctccaaagcaagaacctgttgcctttcttactttggttgctttacttaggatttaaagtattctgttatgcccttaggtttctcagttgttctactgaagagtttgttattcttgaatcattgctttacatcaattaaaaattcttgtttgtatttgtttggtttacattgctgcttttttttttggttacaggttttggcagaagtaatattttcttgtttgtttcgactgttctaggcattggcagctaaattaacgtggagtgaatgcgattcttgctggctttgagatcacgttgaattggttgattgatatggctgcaatagaagaacttcctacatatgagtttaaaccagcttcttcaagcgggactgaattagatgatgctgtcactgataatgtagaggctggaacgggaactaaaaactgttgagtcaaagaacttcatcaatgaggtttgtcaatgagattctagattctaaattcgcagacttcaaggagcttcaagcggtgtgtgatgtagatattacttccgaggaatctgaaaaagcattaacaactcttgagaaagtactggcttacctttgcagtctggttcaatagggaacaactcttttatccgtgagaatgtaactgctgaatcaggagttactatagatgttcaagttctggatgtgcggtcaagaaacaggtagaaaggtcatcttgtgatgcgaagttgcttataacgacatacgagggaaaacatgaccatgatatgcccccaggaaggacatttgctcactagaagatactgaagcaagaaattgatgaagttaagagcaaagatctgagttgtatagcagaagatgccaatgcgactccacagagtttagcccttttgaccattacaaaaggccaacttgatgatgacagtggcgcttcaatatggaaaatcaggcaaacaaagactgatgccaaatctttggagtaaataataggagaatcagatgaaaccaaagacctagctgccaatcaggacatgccacaatcagaacaccaaagcatagcttgtcaggagaatgcggtgagaacagtgtctgtacaacgataaacattttgttgcaggtttaaggcttattaacatagattagtacaagggcagggtaaattatgagttgac

SEQ ID NO: 12727 - DNA, 716 bp, Arabidopsis thaliana landsberg
catgcaaaagtttgtaggtagcgaatgggtgttgaagattacttatcaaagtgatgactccatcgaacaatataagttgagattagtagctatatgatatattttttttggtgggaagtagctatatgatattgattcatgcaaacatacaacgaagatattagttttacatttttaacaaatatataaaatcaaaatcagctaagaattaaagagaaggcccaaaacgtgccatttgcttcattatcaatcgtccatatcaatccaaagtcgacgattatcggcgcacgttacgcacccggctcgcttattttcatagttagcgcacgttagcatctctcccaagctgcattattattggccgttgtgtgactcccataaaggcttagggttccggattcaggtcggtgtcgccaccgcccttcttcgtgcttctcttccttctttgtcggatcgtcaggtttacagatcagcccttgtggaggatatgggtgaagaagacaccgcgacggtggatcagaacagtttcggtggtggcaaagattcattgcttcgtaatcgtcattcgtcgccattgccttcaccgacacagcttttttctaaagtgattacattgcctaccgtattaacccttggccgtgtagctgccgttccgattttcgtcgccagtaagtttacttttttcgactctgaattctggttggagtcattgtact

SEQ ID NO: 12728 - DNA, 988 bp, Arabidopsis thaliana landsberg
  unsure (1)..(988): unsure at all n locations
acactgattccagtttatctcggttttattaccctgcaagatttattgtatacttgtatataaatcttttgaagttaattggcacctgtcggtgccttgcaggttttggagagagatttagcaatttttggattcttcattgctttgggcaggagcacacagtccattttagctgcaaatggttttgattctctggagaatcctttggaagaccttgttaggtaattgtcactgtttcaccctattctcattcctataaacttttgtaagtttgtattctcaccaatactcatgaacttttaatattcaggcatcttattggaggcagcgtcctgtactatcctccactttcagccatcagttcataccagctgtatgtagaggtagacattaatcacatcatcagttgaaattccctaaggattatattgatgtcttttcatggaaattaattgtgtaggttgtttgcgaagaactagaatggattcctttctattcaaacaatactggaacacagccaccaaaccaatcacatgggcataagaccaaaccagaaggaccacccaattatgaagttattccccaactgttggatgtttgttcttattggctacagagttntattaaatatagtaaatggccagagaatccatctaatgtcaaggcagcaaaattcttatctaaggggtatttgacataatgtttaattgtttactcaatatttggacaagaaagaacgtttttatttatcctgctgatggtctttcttaatgttcaggcacaagactttggttcggtgtaaagaagaactgnggatattaaagtaagataacggaacctctctctctgatttatacattcttgcctgcagntggaaaatcactttcctacttgattggtatactcgactaaaaattgtgattgtccctgtgtgaaaaatacttccaagcaaaatccanagcatatgtcttggatatttacaattatg

SEQ ID NO: 12729 - DNA, 1061 bp, Arabidopsis thaliana landsberg
  unsure (1)..(1061): unsure at all n locations
atgatatgaccaaagttttattttatttctcagttaggtattactatttaaagccaacatagacacacatttgctaacactcaaaagagattctcacgatcgagcaagagagagatggatggtcgattacctgacaaaggcattctcaagagcgaggctctaaaacaggttttaatttactagtcccttaatcatttaagaacgatcaataaatttacaaatatatgtgtttgcttacacgactgcataatgtgttgttacatatgacagtacatcatggaaacaacagcgtatccaagagaacacgaattgcttaaagaacttcgagaagctacaatccagagatatggaaatttgtaagtcttaatccatatttgattttgtaaccagataattataattaagaaatatgatttatgtaaaaatttataaacgcagaagcgagatgggagttccggttgatgaaagtctatttttatcgatgcttgtaaagatcatcaacgcgaaaaacactatcgagatcggtgtgttcaccggttactcacttttcaccgtagctcttgctttgcctgaagatggccgtgtaatgattcttcttcttgctatcataccaaataaatagggataacttttgttagtatagttattatttgtttttgtgtatgcagattactgcgatagacattgatcaagcaggttacaatttgggactagagtttatgaagaaagcaggtgttgatcacaagatcaatttcattcaatctgatgctgttagaggcttagaccaattattgaacggggtacgtaagtagtagtacgactcacacaattaattactaaagcaaatggtccctttttaaggaatagttatattttaggaccaccaaatttgtatatattttttatatataactaatgaaagattgattgaaacgtctttaatacagtttttaaaacaaaatcgttttcagatttttacagtattttttgatgtacatatgaaaatacagtntttttatttggtcataatttcattaactgctactacctaatcataattt

SEQ ID NO: 12730 - DNA, 1087 bp, Arabidopsis thaliana landsberg
ggtatattatctcaacatcatgtttttgtatttgaaagagttttcattttttttttctttttgaatatctatattgttcaaacatgaaaactttattttccctaaatttagaattcacatctagttaaattcatatttttggaaaaaaaattcatcccaatagaaatataatccagaacttctacctgtgagatttatcaatgggccaactccgtattgataaaatgttttcatttatctacaacttcttctaattttgattataagtaaaattgtcatcgtttttctatgtaaatatttaaatccacgtatttgatgttccttcttttctatatataatatataatataaataaaatgatttattgttattttaaagattaaaaaataattatagtgtttgatgttgtatctaattgaaaataatatcaaatatctcattataaatttaaacaattaaatttttaaaatatagatatatatttggtttataatactacgagcgtcaaaaactcaactcaactcattacccaataagtttatagctaaatgagtatatgagttgacccaaccaatttgtttaaatggattaacctatgcaattaataactgtttaaataattaataaaaaaactatttataatgattatgtgaacgtaatttgtatcgattaacgagagtaattgaatgcaattaatgcactgtaacatttttaagtcaataaaacttcacattattataacaattcacgattacaagaatgtctaaaacataaccaaagctatccactaccatttgaaaacatcattcatattttttttccctagaagctggatctctaagatctgatcgaataacattctagatcaacttactatacaagaagaatgaaccaaaagaaaaaataaaattgcaaatcaccaattgcaaaacggaaaaggaataacaaatgaaacaaagaactcgtctccaacataaacgatagaagaagaattaacgataaagctctgataccatattaaactccgatgatcggagaagagatgataacgaaaacttaacaaacttttattaccacataagtgttt

SEQ ID NO: 12731 - DNA, 933 bp, Arabidopsis thaliana landsberg
tggcttcttctctttagatttttcattgatacttgcaatggcttctctaagagcctcactttgaagcttcactgtcttcccaacgttacgtttcttctcctcagattttccctcaatagttgcaatggcttctctaagagactcactctcaagttgtctatataaccaacaaacccatttcactaagtaaattagatctagcaataatccattggacaatatatgatacatctatgtacgacaatcttagcataggaatcaaaaactagaacaatagcaataagagatatcttaatgaaagacctttcaagtacctcattttgagtttcctctcctccgatgggcgagtgatattttcaatggcttctctaagagtatcactattaagcttactataaaacgaacaaacccatttctcaattgttagatacattgagcaataagactatatcaatagagagatctatatgaaaattggtagaagagtaaaggaagaatttttcaagtacctcatcttgattcttgagtttcttctctattcacgaaagataacaacaataagacgaaacgagaagtgatgatgtggagacagacgaatgtgatatagaaataatagaatgatcatgaagatgcaccaatcaatgtgaagatattctatatttattattgagatatgtaaagatttgtagccatcttcgtttaggaaaccatttcactatgtaagtaataacccaactgcggctagctctttaaatctccaagccttgattccaaaatctcgattctaactttatcatttgccatatctataatatttacaataaaaagtatcacaccgtagatcttgctttccaaaaaaactcacaaaaggcccaaagtactacaataaaatttagtttatcttttcttttcaaagatatcttcatgttatta

SEQ ID NO: 12732 - DNA, 685 bp, Arabidopsis thaliana landsberg
gattgattaattacttaccaatatctctatatttgggttccagtcaatatctctctgggacctgcatgcagtttttttagcctatatctaaacccattgaattcagttgggccaaatctgagaacaagcccaattacaaatggaaatcattttccgcgtaggaaagagagagcaagggtttacacaatatgcagcagcgttagcttgtgagagccgcaacatacaaacagagagaacaagttggagatgcaaccttttaagggaaacgaaatgttcgagtttttttttccttagtgtactctatagctccttctctattcttctgcgaacaaatatgggctcgtctttatgtgttgccgtgaggaaaaaggaaaagcagaagcagaagaagaccgtggtgttcttaccagagatccctgaagaaatgttgatcgatatcctaatcagattgccggcgaaatctctgatgagattcaagtgcgtctcaaagctctggctttcccttatcacctctcgatacttcaccaaccgtttctttaaaccctcatcaccaagttgtttgttcgcgtatcttgtggacagggaaaatcagagcaaatacctgttgctccaatcatcatcgtcatcgaggcatgatcactcggacacatctgtctctgtgattgaccaacattcgaccataccc

SEQ ID NO: 12733 - DNA, 1164 bp, Arabidopsis thaliana landsberg
ccattaagttgctgagaagctcgatttcgatgttactcttcttctccacggagatctcttctcgtaaaaaatcgatctctttgacacaatctctccattttcttacaccaatgtgatcaagaactcggagaatttcatccgagttcggattaattctgttctcgaacagattaaagaaccaataaacagagtctatagctcgtttgtcgtctcggtcgggtcttgcctcggtttttcgagtctgacgcattactagatagattagctcattgacttctccaggtaagtcaacagacctgactggaaacgtgtcgaggctagtggatatggatcgggtcaaagcacggaaatgagccgagacttgaccggagttcattaacatatatagcttagctccatctcttgtacagtcgtctagtaggaatttgagtttctggaagatgacgtgaagctctgaaaggctcaagattactgaacgacccgccggtattgacccgacccggatttgaatccggagctcttcaaagaatatcacaagagtttgaacatgtcggagagtttctttaacacttcttttgttggtagagaagtgttttggtttgaagctaagaatctcgccggctatttgtaaaagtgagtcgacgagagtggttaaagagatcgattcgcatggattcaccgccggaaaggtcagaatccgacgactcgacccggtttgtgtatggatcatttaaaggtaagatttgggtgaaaacaaagatagttctttcaagtctttgtttgaagtaatgtttatgtttgtgttgtgaggaggatatatacacttcgtatgagtggggggtttcaacgttctacaagtttgcgacacgtgaagaggtttgattagttcataattttggggtctgtaattgccacgttgtattggactttgttacacgtgaagaggtatgattcgtagatatgttttggtgtatgtaaaattgacacgtggtatagcgtggcgatgaagtgtgtgagggaccaagtgtttcgtgaaggttccgtgcatggaggtagccgacaatttctatgacgcttttgatattcttcatagtgtgcaattattataatcgcttctttattcgagttagtttagataaacatgaattttcgtggatccaatga

SEQ ID NO: 12734 - DNA, 857 bp, Arabidopsis thaliana landsberg
cttatttcataagtaaatttcagttctgttcttcacatttgcggacaaacttaagaatctatgcttttatttatatatgaagttattatatgtgaagttacctatcggattttttcatatgtgaagatattaaattaagtggtacttgtccactatttggcacaattatataaacaagtcctcgaccgttacctcgtctccaacattttatggaattgattttataactgcatccattctccccagtaagctttatcgctctcgaatatcaataatttatagaaacttacatttcattactcactttgtacaccgttttgctcaatacaaacattagagattcttcccaccccgccgatccaaatcttcctactcagtcatacatccatccacattccggtgccatcattgttgtaccaaatcgtgaacacactgcaaaacaggttttagtttgcaactaatcaaacaaatatgtttcctttacttattccaaaaatttatcattcctcttacttatcatcgccccttttagcagaaaatgaaattccaggttatatattccggaaccaataacaactgaaatatttttacaaaaacatagcaactagttaaagatcatacatattttatattaacaactgaaatttgaatacacaatttctcaaattggattagaacaacttgtcttgttatgatccaatcctttgtagcgtcagcacctgttctgctgcgtcattcctgtcttaggtttctacgtttaacatgtgaaacaacatgttacattagtttggttaggtttttcaaaagcttagacaatgtacgagatttacaaaatatttatctaaccttatattccc

SEQ ID NO: 12735 - DNA, 823 bp, Arabidopsis thaliana landsberg
aataaattaccttttcatcccatacttagcccaaaaccgggccatggcacgttcataaggatcttgaggcaagatcgtgtgagttgtcttccacgtatcttcgatgtattcgacaatcaccaatgattcggctatcgatctaccattgtggatgaggacagggaccttcttgtgtatagggttgtacttgagaagcatagggctcctgtttccataaacatcttcttcaatgtactcataaggtatgcccttaagttttaggaccatctctactcttttgctaaaaggacttccccataagcccagaagctttacgtgctcttcttggttcatctatatatcctgtttaaagaaaatataccggtttggctttccctttgtgtgtgtgtgttttattgagcaatgatggttagcagttatttataaccactttggatttggttaaatgcatgtatgaagaatagttggtcacgagaataatcagattaatgtttcgtaaaatttgaaattaacaaataggatgaatattaggtggtcaactttttgactttaaatgagggtagtggttgagtagcgtgctgtgtttttattactacatcaaaattgtttaaaattccacacaaattagggtggtaacacacggtttttttttactcccctgtttttttttttgcaataatcgtttcgcaattgaaagaaaatttttttgagtattatattttactccgtattaaggggaaaacttaatgataccgacagcttttgacggattaaatactttcatgctaagctttgtttttcgaatctttttataatttgggat

SEQ ID NO: 12736 - DNA, 1097 bp, Arabidopsis thaliana landsberg
aaaagaattaaaaaacaaaagtttctgcatctaacccacatatttttaattcacatttttgaaccgcaccagcaggttctatctaaatttaatttctaaacctaaactacactttcatatacaatatgtgtgattggtgaataaaattacttgatccgcctttaatcaggcccgatcatgtgcatgtgctgagagtgccaaagcaaagcgtccatcagaccttttgggttttttctttagtaaaaaaaacccaaatattttattttcaaaaaaattatgttgcaatattgggtctaattaagttatgggtccgctagaaatttgagctcggtctgtctttgttgcgaaagctatatgcatcatcgaaaaccaaatggtctaattcttgctagagaacaaatgcagcaaatacgtgcttcccattcatttccaaatggcatatgtattttttaagccaaaacacatgttctgcacttttgcctttgtttttctagcattatgcaacggatttttactgattaaacactttcataattgcatgaaaaataattttccaatcgaagtaaaaataataatattaccaagattcaaccagtttcattcacacttctactatatatgctatttgtttgtactttaaaaaaagaaatcactaatttgagcatggagagataaacatgtaatttatcatcttattattaatcagttgcatagaaatattaaaatgtattgacctctccatctataaatcaccatatatattatatttaactaaaacaaatgatatttttgctcttctaactccatgatgggattcctggctctcactgcaactggtggagattcgtagcattttttacgacaagccgcacattcagatgctggtgatgagcgtttacagtgctctcgacaaatcttactgcattctatctctgattttgcgtcgccttctatcactattaccgctagtatcataattataaacgtcatgctaattactttggccatttttctactttaaaaggtttcttcttttatggtctattgaaatgaaatttcttaatgaaaaaaccctcaggtattttaataaatttttt

SEQ ID NO: 12737 - DNA, 650 bp, Arabidopsis thaliana landsberg
tatttactacattatatgttactagatgaaattatgcttgccttttctatgaaatgaattatacaattgtcaaaaacccaatttaagtcaaataattgctatttatttaatttatctccaaaatattgtcatcttgaaggaaaaaaataatttttctgtatcttaactatttgcaattaacataataattctttaactattgtgtacgtaaatttaatctttaatttgtcgttaaatcaacaattttggacaaaattttggtcaatagttactagttattagagaaatgccaattgacttgattaaaaccataaaaaattcaaattttcttccaaattgaaaactaagaatcgtagatgattttttctcgaggtcgattgaaagacagagattgaaatcgaattcacatattgtgacgaaaacaccatgaataaatgaaggacaaaatttcaatttttaagggatagctaaaaattttagaggttttatgagtttattcggaaatctagaaaccttccaaaatctgcggatttaatttttaattaataataatttaattacatggagttttctttggttttgccgggacacgagtttacttactatattaccagtttcaaagtgacaagaaagaaaggaatggtaaatga

SEQ ID NO: 12738 - DNA, 401 bp, Arabidopsis thaliana landsberg
agctacaaaaacaagatcttcgttccacatcggattcgtcgtcttgttaggacataactttgttttcagaatctgattcccaacttgtactttaacgaaagcttgaggtggttggctcctgtcactaggctcaacatcttgcgcctcgatgacattaacccgcagataccacaatttgggagatacatagactttagacctcacgctttggacaccttctccttgaacagaggaagcatccgaatgccaagcatcaggaaatgcttcatcggcttgcgtcccaagccaaaccgctaccataacctctcctcttttcttactctcacctcgccgatcttctaatctgtaccactgaggtgcaagtggactatcaggaggaactcttgtaggaacttcacgca

SEQ ID NO: 12739 - DNA, 975 bp, Arabidopsis thaliana landsberg
ttaaaagattccatcctaactcctctgttattaagtcttcatcgttccattacggacattaatatcagtttgatccaactagagcgaactagttagtcaatttgatttcattgctaacttgttttgttgtaaaaaaaaaattgtgtttgctgtttttgtttacaaaactcgatttcccaacattaataatctttttcattgaagaacagtccttatgggaatcggaatggttaaaaattgaaagaaaaaataaaccaacattgattgaattgctaaagcgataccttacccttcaaattataaaacattaaatttaacctcatttgaaatgatacgcattttttgtattgaatttataaattataaaacaaacacaaagaaaaaaagcttttacaaatccgagtagaaatatcaaccaaggagagtctcgcacatgttcatgaggttacacaagaaacagtggcaggacgatctcttagaggctatgttaatgttgtctattagtacattaagcgatctcttagagtctatgttagaaatagaaaaatggctgtgcttgaaatattccataacaactcctctgttgctgaacctccttggttcaattacggtcattactagctcatgtcgattttagtcatagttggtcgatgtgatctcgttgctaacttgttttacttacagcacattagatttcacaacattagtaatccatttcaattaaagagaatttaataattacgaatcatgggaagattaacattccttatggttgaacttgaaagaaataaaaagctcccattgattggacttgctaaagaaagattttactattttagccttcacttagttttggtcagcttcaaataatgggttcttctggtggacttttgtagaaacaaatgggctgggccatttacataggttctttctcaagcaataaatagaaaatatcttttagtcaaaaataacggg

SEQ ID NO: 12740 - DNA, 964 bp, Arabidopsis thaliana landsberg
  unsure (1)..(964): unsure at all n locations
aaaggaagaacgaagtcaacatttcctgaaacatagaggagcaaatgaaagaaaggcgtcacatgaagaagtataccatctgatcagcaagcatgaggacagacttcaatgaaagtttcctgctacaaaaattgaagagatcttcaagacttggtccgagtagatccatcaccaaaacattatagtccccttcaacaccaaaccatttgacatttggaacaccagctaccaaagttaaggcaaaagaaaggtcataagtaacacaaactttacattatcagaaatcaatatctcattcagaagaaaagaatcattactccccccctgaagaatcccgtacaactacgaatcataaagcagctgtggatgctctgtcttcacattttcctgggaaaacaaaaacaaagagaatcaaaacctcaacttttcaacataccggacttgatcaaactaaacatattgtgataatgttacttataaatccataaactttttgatcatcaaattattaaaatgggatgactgaagaactcacaagcttaatagccagttcttcattcgtatgaatattagtacctggaaaatcacaggttaacaacaatgttagagataatgtgacgaattcgataatccataaaattaaaaactagaaagtgagagagagacgaaccgagatagatctctccaaacgaaccactaccgatctttcggccgagacgaaacttgttccccacacgaggttccataaataaccacgaaaccccttgtacaatcttaacaacccagacgcagattcaaatagagcgaaagggaccccaaaaannnnnnnnnnnnnnnnnnnccgcaccagcaatccagaaaaacaacccagagatcacgaacaatgagattacggatttttaaccgactaaatcaaaacccagtaatcatcttcttcgtgctctcgatctgggaaaaaacgcat

SEQ ID NO: 12741 - DNA, 875 bp, Arabidopsis thaliana landsberg
ctgatgagagcaacaatgaagtttgtgtacacaaaatcaaccaattaagaaaaaggatcaaagcattgcccaagagatgtaattacaaaaaatcaacctcaaagtgaaaaccctttttttattgaatacaaagtttacattcattcctacaaaaaaaacaatggagtctgtgaagatcgtggcttctgtattttacttcacgcagcagcattcgccttgatctagaagaacattcagcaaatctagaagagtgttttctagagcgtaaaatacaaatcaaagcataggtattcgacttgtacacagtcatttacacgctttgatagctttgccaccttgttttatagttcaacgaggagactggacttctcatcatcaggtagcttgagttctgactttgtatgagtcgaataccaatgctttggtttgggaagcttagactacacccatagttgacttgtatttgatttctttttcagttgtttcttcttacaatcgacaatgtgccttttgtgaacaatagaaagcttcttctttgagattgagatgaatggtaatgtgtcatcacctcctggccattcacttttttgaattgatgagatttcattatcaactcaaacatatatgaaactttcatgtctttcacctcatcatcccactgtgctcaactttggtctacattatcatcagtaattattagcggatccactggcatttgtccaaagctaatattagtaaataagacgggatgtatagaaacatgttaaaaatacaaataccttaaggtcattttatagggcgttaatatgaggaagcaaaaataattgtgttaactgagtaatttttttctaatggaggatagtcatggaggtaga

SEQ ID NO: 12742 - DNA, 987 bp, Arabidopsis thaliana landsberg
tgtggcatgggcccattcatgtacattaaatttcattatctcatttttaaaaaaaattattagctttttcagaattcttgataattagggattggtattatctaagatattaatcttgacaattagtcatttttactcgttactcaaatacgaatttaaacatgtatatatatatttttctaagaaaaacatgtaattaatttatacttaatttttgaatcacttgttcatattcttggagtttcaaacttgtagtccttagttcttcctagcactagatatatttctttatcaattcttgataactcatttgtttctcggcagctaagttatagttatccatttcaccaggtaaaattaggtggggtaaactgacgagtataaagcatctatgtttgagttcaatttggaataattggaataatgattgcgagaaaatctaaactttcatgatcaaagttgagagtgacatgtattgtatcggactttggagttacgagataagagctaatgtggtatgataagacttgtatttaaacagaaagaaaaaacacaaaaaaacatataatgaatgagactatatatatatgcatcatgagatttcattaaaggagttagaattctggggccatccacatgaatcatctgaaatatcctattgtaaaatccttctacacttaaaaaaaagaaggtgaattacttattaaacaaagatcaaaagaatatacacgagatatgaaaagatactcctatatctaaaaattatcaatgactagtgtttttaccatcatttttaaatattattataactaaactaagttatttactatcttttcatttactctgactatatctcatatcaaactttcgcttcccaaaaaatagtggtttgtgcacgaggtgttcattattgaggtgatttttgatgaggggctgattaaagtgttcaaagaacttttgttgaagccccatccggatttccaattt

SEQ ID NO: 12743 - DNA, 595 bp, Arabidopsis thaliana landsberg
atgtaatctggctccactgaagaacaaaccacagaacacacacaaaaatttcatcttttccacaaaacccaaaatctgaaaacctatcatctattcaaaatcctaaccaaggatgctactgaaatcaatggaaacttctcaaaaccacaaagttcatttctttaagctggaatagccaaatctgtgaactttctacataataagtattaaaaggaagagaccttggatatggaaacatgtcgaggacgtagaacttaggtttcgaagtatcaacatcgtctggtgtccggaaaattcggttatcttcccaataacgttgccacttgggttcaatttcgtgaaatggatagacccttttcaattcaatcgatgtagtcgccgtttccgacaccaaagcttcttttttgctaccatgagtctccgtcgttgagctcctgactccgccgcgataagagcggcgccaacggaaagggagacatgaaaagggccgctttagaggagattgaagcgtaagagagctggtgaggcgtgtgttgcggcaacagtgtgatagaacaaatgggtcagaacaaattgggggatttgatgatgagag

SEQ ID NO: 12744 - DNA, 911 bp, Arabidopsis thaliana landsberg
gcttggctttgacgggatcgactcgggattagagcgaggcggcaaagagggcaagtggtatgtgatgtgagccaaagatcaatgtagtccatgtgaaaagtgtgtttacataccgggatctgttgaagcttgtcatttggttgatagtccccaaggcacactgaacatctgtaaatcaaaagtccaaaatcagattattctgattcttagtcatcacaagttggactctcagcgtcagaggataagtccaatgacctatgcgaattagaataacaactcttccaaataacataatacacattgtcctgaaactatatcaaacataatctcctacaattatctgatcatagaagcaactgttgtgccactttaataaggcagaccagaaattctaaccactagagataaagattagaaacctctcatcttttttcacttccttaaattgtacaacataggtctaattcataaatcatgtaacctaattgtttttgaacttttctatcagttatcgtattccttttttcctgcaataatctcacttatggtggtgagtccttgagtaaaaagagatcacaaattttggagagataagaaacatgaaactcactgtgaatccattatggtgaagctctctttaaagacaacaatgggaagcatctctctcagctctttgctcaatcctaattcaatctgttcatgtgacaaaacccaacaatcattacacaaataaaccagataaagcacagatctttacactgacaaacccatcaaacagagattagagtgtaccgtggagagagagttcccggggatgaaagtagttcgcattccaagagaagaaaaatcagagctactacgacggaggtagatcaagtaaaacaagaagagaataataaatgtgaaacaaa

SEQ ID NO: 12745 - DNA, 594 bp, Arabidopsis thaliana landsberg
aagaaaaacaaatttcaaattgattgcaaattaaaacgacatcgttttctatcaatagttgagaccagggaagctacacaaaaacgacgccgttaattccttaactatcatagaaaaaactacgtggttgtggagatagtcccctaaaaaaaaagagtaaccttcattgacctctatgaaccaaaatcacggtgagatctcttcttcttcaagtcttcgtttgatagtttatttgattgtttctctgaaatttattttttcaatttcgctacgtagagaatgatcaacaccatgattggtagaaagaaatcgaaacaggattgttccaaagggtttagtcggagattgaaggaagatacgatgccaagtttgtctctttcccttgtatgaagactatgcatttagaagataatatgtatcccaatgaatccactttcaagaaacttatctcttgctgccctgtcttggaagacttaacggttatcatttatgggatggatagaaaagtctttcgggtgcactctcaatcactaaagaggttcagtttaaaacgagtctcttctttcctccatgaggttgctctttcgggagttg

SEQ ID NO: 12746 - DNA, 793 bp, Arabidopsis thaliana landsberg
gtctttctctgaagctgtcatctatctctctctttccttatagagctctgtttctctccacattcacacactctccctctctctctccattattaaatcacttgttgttgtctttcttttttcaaaccttggaagcaaggaattcttttttgatgatttaatcgaaagcttcttcctccaaacaaacatacatcaatggcggtttatcctaacgttaatggcgataagaagcactggtggttcactcacagaaaggtataagcgatctctaacctggaaatacagttcttgattcaaagatcatcatcaatcatgttaactttttttgggttttctcagcttgttgataagtatataaaggatgcaacaactttaatggcaagtgaggaggcaaacgacgtcgcttcagctcttcatttactagacgcagccttatctatctccccgcgtttggaaactgcgttagagctcaaggctagatctctcctcttcctccgtcgtttcaaggatgtcgccgatatgcttcaggattatatccccagtcttaaactcgacgacgaaggatccgcttcttctcaaggctcttcttcctccgacggtatcaaccttctctccgacgcctcttcccctggctcctttaaatgcttctctgtttccgacttgaagaagaaagtcatggcaggcatttgtaaaaaatgcgacaaagaagggcaatggaggtaatataactttttaactctcttttttgttttacttattacttttcaagcaaaacgcactcgttgatttttta

SEQ ID NO: 12747 - DNA, 1182 bp, Arabidopsis thaliana landsberg
aagaatcttgtgtttatgttaaaaaatataaaaaagaagtgatatcttttacccttgttatatattaaaaaaaatacgtatacatttctctcttctttttgttaaagggttcaaatgaatttatctcattaattaacaatatcactagcaaaactataattctactaaaaaagttttcaaataattaaccaaaaaaaatatcatacacctttgaaatccacttgtcacaccaccatgcaatttcaaacttcctaaatatgaaaatataatttgacccactagtgaaaaaacaaggaaaatatataacaaaaaactataataataactagaagatgaagatcaacgataaagattgcgtaatcttgagtttagattagattttagggataatagtctgttataaaaggttctttcctttgtgtaaactcacttgttagtgataacaatctttttctctttctctctcgcaaagaacgctttcgatactctctctgcttttgccggcgaaaacgaaaccatgggtggttgttgcttctcgacgcctcttgataacaatcaacaacctccacaacagccacagattcctcccggcgaacgcaagaacgacggattcgtcaactggcctgtcacagagttcttcctctccgatatcaccacggcgaccaataacttcagttccgacgagatcatatcagagaacgcagaagaatcttccaatgttgtctacaaaggttgtttattagagaatcttggcttcgtagctgtcaagagattcaagaatacgccttgggatgatcctgactacttcacggtaccttttctttgcttttaaaggttatcaaagtttgcaacgttcatttgatctcttttgtttcttcaggaagacgcaaaaacagctggggagctaaagcacaagagacttgtcaagttgttgggatattgctgcgaggaagatgaaggacttcttgttgcagagtttatgccaaatgatactcttgctaagcgtttattccagggtatgattccttctcttctttcgttttcagatatagaattggggaatatgagcttaaaagtctggattgttagtcgatctggtctatagatgtatgtgctctgttttgaatcttgggagaaaggctgcattgttggtttttgcggcatgattgggggtgtaaaatg

SEQ ID NO: 12748 - DNA, 833 bp, Arabidopsis thaliana landsberg
tttcaaaacaatcatttctttcttcataaaataaaaacttttatagatttgtattgaaattagagaatttaaacatttttttttcattgaagaatagaaaaaattatgatattaaattgagatactaaaacgatatttttggaactgtaaggagtagtagtacataataacaacattactcaacgtttcttcttgtgaccaaactttgaaaaccacaaggatcaataatctttcttatttgtctgttttagatcgaccgtatatccgcaatcgcagctaaatacgtaggcaagccagtctcaaactatccacttatgtctcctcctcctcttcctccacgtccactagaactcgccatgggaaatattggaggagaagcttatggaaacaatccaaacgatctccttaagtccatcactgcaccaacagaatctgacaaacctgtcatcatcgacttatccgtggctgcaatggaagagctcatgaggatggttcaagtagacgagcctctgtggaagagtttggttttagacgaagaagaatatgcaaggacctttcctagagggatcggacctagaccggctggatatagatcagaagcttcgcgagaaagcgcggatgtgatcatgaatcatgttagcatcgttgagattctcatggatgtggtaattaacattttcattttacttaaaagcaatcttgtctgcttagcttcaacaacattgatatgatgttgcagaatcaatggtcgacgattttcgcggggatggtttctagagcaatgacattagcggttttatcgacaggagttgcaggaaactataatggagctc

SEQ ID NO: 12749 - DNA, 742 bp, Arabidopsis thaliana landsberg
actaaaaactgaaaaatatttctgaagttttgatttaaactgcgaatatgggatggtgtaaaaagaagtgcataccgatgaagtcgataatgaggcggccatcggggaagatgatttgggtcggagagatgaagaaagtttccggtgtccgaaatcgaatcaccgaagctgatgatcgatttataacgttggaaagactctgagcctaagacttcggtggctacagtgatcagaaaacatttgagcttccacaaatgaaactttgaaggcgacattagatgggaggcccggccggttcataaagctaaatatagtagttatacttatatgctttttaggtcacaagttaattattattaattttatttttgtgcacaaacttatgctttaggccgatatagtaatttatcatagcctagaatagtgaaccgtagctagttgaaggaatatgcatgtgtagtctaggctatgataattgattggttgaaaatacatataaattagtggttcatcgctttgtgttgcatatggacggaaatattcgctcgcactaagtatttatactcactcttgtttagatcatgcagataatggccatgagtttaactctataaggagcaccagtacgatgttggttttgggtgcgagtataaatatttatatatctaatgaaaaaagatgagtaatatatatgtcagcaatttttttttctaaatgaaaaatttattgatcaaaataacta

SEQ ID NO: 12750 - DNA, 917 bp, Arabidopsis thaliana landsberg
ggcttcctctcaagtcccacatccactaatcacatgataagctaaaaccccaactagtaaattattattattatcttccgtaaacattcaatttcgttttaactttttcctcattgtcgtataattgtttttgtcggtcgctaagatattttcacagcttcggagacttcaggaaaaaaaaaaatcatttcttctctgaaacgaaaaaccaaagaaacgagaagaagaagctatggcggatcagctaactgatgaacagatctctgagtttaaggaagcttttagcctcttcgacaaagatggagatggttagtctcaatctcatcttcttcttttaaatctctcttgatcgttgttaaaaccataacggatctcattttttccgatttcgtctgcgatcagcttcagattcagaaaatatttgagtctgattctttgatacgctttggatttggtctaatctctggttttgctagattcgatctctgattcaggtgattcgtgtggtgaattgttacttcgttgttgattgaatcgtttgattgtctcttttgatgtagttttgttccatctctaagcatggatttgtgattttgatgtttctttgaaggtgacttatattgaaatgttactagctttgtgcagaatatcatgttcctgattcttgttctgaatcgtctttttgtgtcattcttctgtagtttaagtaggtatattgctatagatttaagttcaaagatactgtttagttttagcacctgtcatgctttttccatagccaaagatattcagattctagtgtttttatgggattcatttaatggtcatgtttttggttgattagtggcttttttttgctcaaaaacgtttaaacaaaagacctggcttcattcatgtttcgtatgtatatcaatctg

SEQ ID NO: 12751 - DNA, 883 bp, Arabidopsis thaliana landsberg
  unsure (1)..(883): unsure at all n locations
acgctagcccctcttaagcccttaacgaaagtccggatactagtaattccactttcttctcccaacggcgttctgatgctctgagtccctgtggaatcgctcccgcaagaagacatagaatcattcctcgatacagtagaaccgaactctaaatcaggaaacgcaatcttgtgactctctggtcttccgaggaaacctgtccctatgttttcaggcggagtgctcgggcctgacacagtctctctgcggttccaacttctcaccctgacgttctggcttacactcgtttcaccattagcatcctcaccacagcctaaaacgttttcaggttctgctctcttgtctttcttgttattatagactgtgactgattcctcagtctcaatgcattgaacttctctgcaatattcttctgatagatcttccgaacgcctaggcaagtcttcatccagatcatcatcgtcagagtgagaatgaacataagctcttgatattgacagcggtgtagacattccatctgatatataactccttctgtctgaatcgaccacgcctgatgtctccgatactgaaccatcctcccacttgtctgtgtggttgccgaaatgtggagttccaggcttccattgaggaaaaacagaagcaaaccttttagtaaaattgccatagaaatctaaggcagaaccgtgataattgggaaaacgtgatgaacaattcaattatctgctgacaaagtgggattgggggaagaaccagcaatacctttgacgccacattgtgttcaatcattctcatgaaatcttaagccgggattggcaagatccctctggtttctcactctgcgatctccttttnatctgttaacataactcttatcagcata

SEQ ID NO: 12752 - DNA, 988 bp, Arabidopsis thaliana landsberg
aggaaaaacacgttggagtctgttactctttcgaaactcacagctgaggatcgtgcagcgcatttagatggtgcattttaagaatgtatgaggcagataaggaacttgaagaaagaccatgaagtgaaactgcatgatgttgctttaagcaagaccaagcaaattgaaaaaatgaccatggagtttgaaaagaggatgtgtgactatgaacaagagttacttaggtctgcagcggatagtgatgctttatctagaactttacaggagcggtccaacatgctggtaaaagtcagtgaggagaagtcaagagctgatgccgagatcgagaccctgaagagcaatttggaaatgtgtgaaagagaaataaagtctcttaagtatgaagtccatgttgtttctaaagagctagagatacgaaacgaagaaaagaacatgtgtattagatctgcagaatctgctaataagcaacacttggaaggagtaaagaaaatagctaagttggaagcagaatgccagagactgagaagtcttgtgagaaagaagttgccaggcccagctgcacttgctcaaatgaagcttgaggttgagaacttaggcagggatagtggtgatgcccgacaaaagagatctcctgtcaaggtctctagtccgtgcaagtcgccaggaggatactcgtcaactgggtctgagttctctctcgataatgcacagaaattccaaaaggaaaatgaatttctaacagagcgtttacttgcaatggaagaagagacaaaaatgctgaaagaagccttggcaaagcggaatagtgagttgttggagtcacggaatctttgtgctcagagcacaagtaagcttcaaagcttagaagctcaactgcagcaaaataattctcagaagtcctcacttgaagtgtgtccaaatctgaatacgagcaatccatcaagctcaatctctgtttctgaagatgggaatgacgactctggtagct

SEQ ID NO: 12753 - DNA, 1180 bp, Arabidopsis thaliana landsberg
acgactaaggaccttatatatgtaccaactttctaaaaacatttgtttaacccgttcatttaagagatcatattcgttgcattgatgttaactatgtaaagtttttatttctaaaaatgacatccagtcagagagtttattttttaattttagtatgtggttgacaaaaaaaatacaatatttctaatcaagtggttcaatcaaattgttttgtcatgatattatttttagaaaactaaaatattgtaacatgcaattttagcatgaagactttaatgttcatccgattcgaataaaattttatttcttataaatagagagtttaacaagaaaacaaatttctctaacatattattttttgatcaagatcattctctaaaatatccattattagtcaccacacaaatatatgaaagtgtgtatgaaaacttgaaacttttcccacgtgaccaagtggcaaaactcctgctacgagttccaatctaaccttaaaagagttatactgttcaaatcagaagaaacataatgaaaggagttacctaacaagaaaaatgagagtttctcaaagttagaggctatgagtgaatgaagatcttggccggcccaaacagggcagacaaagatggagataatgacgcaacttagtcctcctatgatcactgtggaaattctcttatgggtcagctttacaacctgctcttctctgaaccccgacactgatatcaacgcaaaggtgagtatgaatatcagcagactgtaatcgtatctagccttcacccgcgggaagaacctcacaaacgtcgacaacgcagctgaaaaaacaacaaaaaaagagagtcaatcttatactagctagtgattaaacaatttaggctttgaaagggtaacttttacatatataacatgttatattgtaatatgtaaacgcaaaacaaatgtgaatgcaaacaaagaatcatgtcttagtccctatacatgcaaaacttaattggtatataaatataatttaccttgtacaaagacaaagactgcgagaagaatgggttctcctgtcggaccagacatgctggccaggtgatgagctccgattccaagtcccccgcaaatagtgttgccgcactctgttaagcctttccaagcgtggccctacatatataacccgtagtccgcaacacaccat

SEQ ID NO: 12754 - DNA, 1185 bp, Arabidopsis thaliana landsberg
ctttacggccgttggcctgaagttagggacctctggtggggtctctgtgggccgcactggatggcggaggccggtctcaaaccagctcttcaagctcttgagatcactttccggttaatcctcaccgttgctgctgacacacgtgcttacatcaaccgccgcgaatggatccgacggttggattccctcactaccagccagataaaaatcgtggcggctatctgcggagatgcagacaactacgaagagaacgtatcgtcggctccggtcacaaatggctggagcccgttgagtttacttcgcaagatcgccacctgtcgtacatcggagagtgttggacagaagatcttgtctacgatcgagaatgagatgcgttggtgtaagtatacgctcggtttaggagaaccaaacctcgccggaaaaccgtatcttcaatacgacgccgtttgtctcccggaggagctacatagcctcaagaacaatccttatgcttatcacatcgagaaccaagagaatcaaatgctctacactattcatcagattcttgaatcgtggatttacgtttctgtgaatcttttatatagaatcgaatcgagaatcgaagagggaaaattcgaaaaagcttcttcagacgtctacttgttggagagaatctggaagcttctatcagagattgaagatttacacattcttatggatcctgaagatttcttgaaggtgaagaaacagttacaaatcaaatcgacgtttccaaacgacgcattttgttttaggtcaaagggcttggtagagatggcgaagatgtccaaagagctgagacagaaagtgccaactgttcttgaggtggaggtggatcccaccggaggttcgaggttgcaagaggcggcgatgaagctttactcgaggaaaacagagtacgagaagatacatttgcttcagggaatgcaggccgtggagtctgcagtcaagagattcttcttcggataccagaagttggttgcagcgatgattgggaatgcagaggcgaatgcaaatagaacggtgtcgaatcacgagtcctatgactcactgactcaggtgtttatggagccaccgtattacccgagcctagaccccgaaagacatttttgggagaagtctggaggcattgtgatggaatggaagattttgacacactacttaaca

SEQ ID NO: 12755 - DNA, 781 bp, Arabidopsis thaliana landsberg
aatcatgcaaagcatcagtccagaaatttttcttaattacttccaaaaaaaccaaagatacgaaaggtgactttgctctgcaactccaatctgttcttaattgattaaaaccaagaagtttgaagaacaaaataaaccctttaagcaaaggaggagcaaagaactacacacccatatgtaaggatctaattaaagtaatgaaacttaagaaaactgaagttaaagagagacaaaggaaagaaaaacaaaaaacaaattcagaaaatagctggtacaaaagccatccgaatcaaaagcgaatcgatagagacaaagttagccgacgttgctaagaaagccaacgacgctagagtaaagctgaccaacaccactaaaaaagctggccgttgccggagccaaagtggaacatcggagaagacttcctctctctcaaagattaaaacagaaaagagaaaggcattgttagccggatttaggattgtattttctgccctagttgcagtatcaatcatgaacaacagaccactacatgtgctctctgttcccaacagatcactatatgtgctctctgttccccaaggcgtcgtttcatctcattgctctatggttgtcaaggttcatggactccaagatatcgtttattgcttgagttgtatgttcgcctgtatctatcttgtaattttctgttgttatggttttcgcttggcatttgtagcagcgaattgcttagccttcatggcttggttttcttcccttgtaatcaagacctcctttattgagt

SEQ ID NO: 12756 - DNA, 582 bp, Arabidopsis thaliana landsberg
taatcctagtgattagtttgttcatcattatgttgtttcctttaaatcaagaatagtgttgttatgtaacagtgtctactaaggattctgcagcaactcaagactgaaaatgacatcgctcttcaagtcacgaagtccgtaaattccttcggtttgtcgttacaattgattttataattttcatacactccttcaatacacatttaaactatacactaaacttttttttttttctttcgtataattattttgaaaaagccctgcagctatcaactctgacgtcgaggtaattaatctttattccatcaattaattagaacacatagaaatatactataagtaatgaataaatttccatacgtattttaaccgtctcgcttatctaggaacttgagcatgaagtttgtaggttacaacaacaactccaaatggcagaagaagaactaaggttttttactcgagaaataaatgttttatgttatagtttataattttttttaactcaaatcatgattacttactatataatatgagcaggagatacgaaccggatccaataagattcacgaccatggaggaata

SEQ ID NO: 12757 - DNA, 737 bp, Arabidopsis thaliana landsberg
ttgtggatgttcgatcttgcggtaatccagcaaatgcaggtacgaatttgaaactgagatttttttttgtcttgtttattactgattcaaagtttttgtttctcttgagttaagttgtgatgctttgaaaacattgctttaggatcttgttccggaatcggaccgttgtgtggttggaggtgttcagaactcgttgcaatcggctcttgacttgatggctaatcttttgggtatcattgtatctaatcccaaggtatttaatcactaaatgcttatcaattatttctctttttttcttaatgttaattttgttacatttgtttttggatgtgatttcaggatttttggatgttgacgttgatctcatttgctacggtttcgttagccggaatactctatacgattcacctctaccgtattcgaaaacatctatttcacttggagaagattcccttattgaacaacttttttgcttcatgaaaaaaggtataaagtatcataacatttctctattagtcgtcagtgtttttgtatcatctatcttttgtatatatgcatgtttaagaaagaaaaaaaaaccatttgaactacacgacattttgtgtatgatattgttataatgacacagcgacaatgaaagaaacgtggtcacccctgaaaaaaatccctttatttcatttagttcccagagagagtttttttattttaggaagaaattttaccgaggtacccaattt

SEQ ID NO: 12758 - DNA, 182 bp, Arabidopsis thaliana landsberg
gataaaaagagtcattatctatatatggatccttagaattttttctggaatttatttacctttggattggggacaatgatacctaaaagatatgccatcaagtcaagagccgattgcagtgagttctgaacacctccaaccacacaacggtcggattctgaaacaagatcctaacacatgac

SEQ ID NO: 12759 - DNA, 931 bp, Arabidopsis thaliana landsberg
aactatttagcaagcatggattcactgttaagttagatgcggataagcatgtccttagcaaaaatgggacaagaacagagtgctctgctcttatgcattttctttataattgaggaaaatgctaagcgcatctgtgcatgttatcaaaatttgattaaagagtgataatgatatggctctatctttccaaatcacttcacattccgtcgatgaaaaaaaactaaaaacgaagtctaatctcaaatgcacacacaaggaacagagaactctgtaaatatgactatttgatcatatactaccaaaaccacatcggatgcacaaaatgactcaaattttacatttaatttttttggggaaaaaacaaaaacccagatattttcttggaacagagagagtccaaaagaggcaaaaaaatatattaaatcggtcatcactaaaggctaaaagcatcgttgtcaacaaaacccatatatctaaagaagcacaaaaataaaataaaaataaagagtatttgatgaatagagtttgattcaaaagcaaacgattatgatcaagaaagcagaatcttgaagcccaaggcaacaacaagactcagattgaactcaagaaaagatgatcggaccttcgaaacaaaagcagattgtgcaagtgaaatggagaccaagagcatataatctactattccatgattcaataaatatgtagagaaaaaggacggagagttcgataccaaactagttatttcaaaatcttgttggccactgtgaagataaaataatgaataaagattgggaaaatgtcgaaaaaacatcaatttttaaatttgggacgaaaagactttgaattttcaaaatgtcatttaagtcataaagttatttttgattctttgataagttttgttaactggatcatttcagacatgtagtaaatt

SEQ ID NO: 12760 - DNA, 583 bp, Arabidopsis thaliana landsberg
  unsure (1)..(583): unsure at all n locations
tctttcttttttctgtcttctcgggtaattacgtatctgacatatatcacaatccccttcgattttgcagaagaaggaagcagagcatgatgctgacggtatgaggagaggggttttggttccttgcaaattctctgccagcaggtaatctctctgctaaagaattgagttattttttgttgggtttggtcacaacaatttgtgtgtnnnnnnnnnnnnnnnnnattttttttctagggtttctttctgtcgaagtgagtgtatatgaaacctgccctttttttttttttttatgagctatataaaccaaaatcagttgtagtttcgtccttattagctactattggactcaacagtgggagttgaatccttcatctctcagaatctgagggagatcacttgtttttttttgttcttcttttcaaagttgtagctgtcttggtgcagcatatcacgttatgatgtcttgctttttgatcatcgaaaccaattgtgtaaaaggaaaggctgacttgacttgttctgcatatatataactcagcttgggagaaagacaggaagaccaaatggtgaagcacactgg

SEQ ID NO: 12761 - DNA, 1060 bp, Arabidopsis thaliana landsberg
tgttcatgtgaaaaagatgttattcacttattctactaaacttcttcgtgaatatgacttcatacttggactctttaagtcgaaacaaattttattgaaattccatacttaggatgcataaaaaccacaacacacagtcactaaggctctctcgcattattagggggggaaaaaaaacaaagacaaaaacagaacacagcttagcaacaagagaacaacaagattattcaaatcagagattgttcttcctatactcagcagcatatgcaacaatcttctcagagtcagggagagacttagacacactctctttctccatgcaccgctttgcccaagcgatcagtttcggactctctgactcgatgctaaagttaccaaacttctcataggcttggaaccaactcgagaatgtaatcaaggaaatgtctacatacccaaagctatctccaccaaagtaaggtgtatctcctagctcagattcaagaatcttcactgcctcaataaattccttcttgcctgcttcttgttcctcacctttcttcccccataccttgaattgggcgtcggtgaactgaatccattacagaacatcgaattatgtcagaaggaaccaaactcattttttcagataaccctaaatcacattgtttcagactcaagttaagaaatctagggcacaaaagggattagttaccttcttgtccacgaaatcggcccagaatcgagcctgagctctctcgtaaggatcggaagggaagaacgggttcttttctggccaagcctcgtcgacgtactggacaacgttaagagattcacagaccggtttaccgttgtggaccagaaccgggattttcttgtgaatgggattactctggaggagtaaagggctctcgttcgagaaatcttcctctctgtattcaaactcaacacctttctctcgcaaggcaactctagccctcatcccgaacatacttggccagtaatccaaaagaatcgggtggttcgccattgctataggatcattgaagttcacaagagcgatatagtcttgattttgttg

SEQ ID NO: 12762 - DNA, 976 bp, Arabidopsis thaliana landsberg
atgggtatttatttaattaaagaaatgattaaagtttggatcataattagaaaaacaccaaatgcatataatatagtttgttttgtctaattgtcatcaaggcattattattgactctgaattgaaacttgatccaatatagccccaaagttccgttggactaaattcagagcaataaaaaggtcctctgaagaaaaaagttaaacattcgtgaaaagataagctccctgggcagaattctcaaagcctaaaagtgcaaaacaaaacaaccacagggatgctcaagagagaaagagacttgtacattctatcagttttttttagttcacacaccatttgggatatctcctcttgatctctagcctacattagcatcttcagttagggaagttaaaaacgacgacgaaacccaaccattcttcttcccatactccacgtagtcgttgaatttctcctttgcgtttgggatgtctaaagcaagatcttcaagtccgtctttgactcttgtgaaccctttggtcatctggtttgtggttatgagtccttcactgaaactctcctgcagaagatccagcatcatcttgtccttcttcttctccatacccatcaccagtgctttcttcaccacctcatggttgaagaaaggcatgcctagctcatggatgcatttgcatgcttctgataccagccctgagctttcgtattcctccaggagatttgatatcttgtcctttgcatcttccactgcccaaccgctcccacctccccagcatcttagaagcctctctcctgcatgtcgagcaaagatgagtgacctagccatcttcacggtttcagttccgcttgagttagggcgtagtttgctactgatctcttccaggttaaaaggtgctaaaacatcatcgatcacagctctagctaagaacagagcaagttcgttggacgcatccagaatgtcaagagctgtatcttctgc

SEQ ID NO: 12763 - DNA, 736 bp, Arabidopsis thaliana landsberg
tttgccagctcgattatcggctgtgatcaaaaggctcaaagaaaagatattgttcttgcattggcagttgctagtccatgaccatgagaagtgagaactgacagattctgaacggctctaatccaatccacaccaccaatggagtggaggatttcccgggctcgttagggtagttctgtcatttgacagacaggtggcatgttgctccaagaacaagacccaactcctgaggatgccccaacactcatattcatatagtcatttcctatgtcatcgccaaggagaaccgcgagtgcgtcgctcatgctacctgtctctttcacaatccctaaaccatggtcaagccagctcgatgcaagcaaaacgtcaggccttgttatatccaagagaggtttccgctttttttctctctgccctgcataattttttaagtttaggtgagttcttgatcagctcaaaatctcggctataagaaacaaattaatgcaagtgatgattctcaaaaagtaaaatcaggataccaaatagaattctagggaaaaagatgaaatcttcaacaaactatttcaagtgatggtaaggtgaatagtaactcacttggtggagtttcatctgcattttgtgtggacatttcggaatgaaccaagaagctcttaagggaattgtcaaactcctcggatttagtttgggatacagtaacctggccaagatcagctgatggaatagttgaagcgca

SEQ ID NO: 12764 - DNA, 838 bp, Arabidopsis thaliana landsberg
aatactggtggaatcacggtctcatatccgattccacgtatcaccaactaaagaccgcgtgctacttagtatcatctcagcatccttcaatgcagtgtatggtggctctgagaaatgccgaattagagcaaggaaatatcgatccatatagcattttcaccaaaccttgcaacagtactgtggcacttaagagattcttaaagggtcgctacgtaagtttcacacatccgaaagaattttcaggttgtttgtttctatgtgctaatatgctgcaactttgtattggtaactcagccatggatgtcaagagcttatgatccttgtacagagagatattcgaatgtgtattttaaccgcttggacgttcagaaggctctccacgcaaatgtcactcgcttatcttacccctggaaagcatgcaggtcagctgaaaacaaagttttatttctggtttagaggtataaaaacttgatcgaaattttgatattttctttgtctcttgcagtgacattgtaggaagctattgggacgattctcctctgtctatgcttcctatatacaaagaattgattactgcaggtctcaaaatatgggtcttcaggtaccaattttgtattgaactttgtgatgttcacttgtagtaaatgaatgtttacagatgcgactagtgtagaagatgtatgtaaagtcttgattacaagtgaagattgcttgatcagtctgcctacattatatgcagtggggatacagatgctgttgttcctataaccgctacccgatactttgtagatgcactgaagctagcaaccatcacgaactggtacccgtggtacgacca

SEQ ID NO: 12765 - DNA, 958 bp, Arabidopsis thaliana landsberg
gctccattattttcccaatgttgtgaatttgagaagaaaagtctgtttttttattgagatttttttgtttctatagattctatcgaaatgccgatgtttcagccgttaaagagagatgggttaataggatttgaaggtggtggtgatgggcaagtcttagatctggatactgcagtgaaagatggagttctcggtggtgttaatggtggtggtgtcggagttgttgatgagaaattggatctgacgaagatgataaaggcgctagatttacaacgatataccttctgttatcatttgtcctatctctttacagccgacgcaagatcctgtgactttgtgtactggtcaaacctatgaaaggttgaacatttacaaatggtttaacctatgtcacttgacttgtcctactacaatgcaagagctttgggatgatacgtgtaactcctaataaatactcttcatcatttgatctatacttggttctctcagaagtatgtgttgatgaagaaacgttctgaggatgttcaaggacgagctattgagattttggggactttgaagaaagctaaaggtcaagctagggttcatgctttgagtgagcttaaacagattgttgttgctcatcttatggcgaggaagactgttgttgaagaaggtggtgtctctgtgatctcttctcttttgggtccttttacttctcatgctgttggatctgaggttgttgctattcttgtgagtcttgatcttgattctgattcgaaatccggcttgatgcaaccagctaaggtttctttgattgttgatatgttgaatgatggatctaatgagactaagatcaattgtgctagattgattagaggattggtggaagagaaagggtttagagcagagcttgtttcaagtcatagtttggcttgtgggttaatggagatggttaaggataagagacatagaaatg

SEQ ID NO: 12766 - DNA, 624 bp, Arabidopsis thaliana landsberg
agctgtttctttaccttcttgtcgtttctaccatctttaattaaaaatgattttaattcatccaagagtacatccctattcataaagtaatttggtaatccacaaacaaaaggttatacacatggtgcttggaaagatcctaattgcataaacatcctctgatctgatttctctataggttagaaatggaacacatataccaaaatccacaagtctcttgaagtcaaaacgaccgacacacaatatctcattataagttcttaagagcaagtaagaagaagttattatcaagagtcttttttttttgttattaactaaatcacagaagctttcgagaggaaaaaatcgaactaaaggaaaatcaaaaagggaagtctagatctgcatgtggcatgtgggtacccaaacttttttagtaatgactttcatttaagtttcagtttataaattttgaaaagtaaatttgtttaatatttacccttagaaaatttttaggcccccaaaatttcagggccggccacttacaagtcacaagtagagctgtagtcgtcagttaaaactttatcccgaccaaacccgaattaagcatgctcgtttaaactcgaattttaaatgccaactatg

SEQ ID NO: 12767 - DNA, 1380 bp, Arabidopsis thaliana landsberg
  unsure (1)..(1380): unsure at all n locations
aggattagccatgagcaatcccacagcggctgcaatcacgcatgtcctgcacaacaagcaggagtttccgtttgtgcgaggtgttgaggatttgcttgtgttgtctcttggtatgggtcagttgcttgatgttagctatgagtatgatcggattatcaagtggaaggctaagcattgggctcgccccgcagctcttatttctaatgacggtgctgctgacactgtcgatcaagctgtggccatggcttttggtcactgccgcagtagtaactatgtccggattcaggtatgggccacactgcagaattgcatttgataacttcaaaaattatttttgattttcttgaatacctagtatttctttcgatttaatgaaatttgtgataggtaataatcttcgtgttatataagttcatttccaaatcctacttgttgtatatgagcttagtaggattgttggatgatataaagtatgcacttgtaggtttttcacaaataatagtaatatgtttgtgcaggcgaatgggtcgaacttaggaccttggagtcctaacatggacacagaccctagtgggagcaatgtgaatatgctgatgggagtagcagaggagatgcttaaacaaaagaatgttgaatctgttttgtttggaggtaaaagaatcgatgaacagagcaacttcgagaagcttgactggttagctggggaacttgttctcgagcatcaaaggagaaatagcagaatcgctccaaccgtagcgttcaagcaatccgtgcatagagcagatcaaaagacaagtgataaagatatcggtgtgaccgcaagagaacgatgaaataagaaatggtttacttagatgatttttttaagataaggtttttatttctttcttcttaggttatgatttgttgtatagatttgtgttttggagattgagtttctgagacatgatgagaaaaggggaaacacctatcatcttgcaaagagggctcaagctccttaatccatgctgcccaaaaaaaaaaaaaaatatgattcctgtaatttcggtttgtctttgttttcctatgtagtcatcatgatttcttctttgacatttccactagctcaagaaaagttattaatcagctttatgtaacccaaatgaatgcaaaatgtgtttttttttttaattgccttttgcttatgtggaaagagacagtttagattctaacttctgaaccataaggaatttaacaaataaatgaatttaaaacgcaaaagttatctggttgataaaatataaggaatgaatcacggnaaacattccactagtccgggccaaattcaacgaggttactacctagtctgactacttacttaaatcaaaatatttttaaatc

SEQ ID NO: 12768 - DNA, 1083 bp, Arabidopsis thaliana landsberg
gcaccttccggtgactcagtttagctcttgtgtttttgtacattttagactcttgactcttattcattctcgtagtggtgtgagttgttactatcttgagtcttgattgttcttatatggaagttttcaggcgatggtcattggaagctatggatttaaaactgactttgattttccatttttctttgaagaaatttctatgtggcgggaggctaatatttggtcctgatgcatcatctctatatctatcaaccatcttgatccttggtcctgctgtaatgttctttgtcaaaatgtacactaaaatggctgatcctcgtaccaagaatccaaatctatgtattccaattctctgtgtgtcttggatactcacaattttggtatgtcttctgctttcgaactttttttaaatgatttttttgtgtgtaaaaagtgaactaaagtttcaatagttttcttcaggatatatttttcctcttaatgacatctagtagagatcccgggattgtgccaagaagttttaggcctccggaaaccgatgatgcaccggattcaactactccatcgatggaatgggttagcggtagaacccctaatataagaataccacgggtcaaagatgtaactgttaatggacataccgtaaaagtgaaattctgtgacacttgtttgctttaccgtccacctagagcttctcattgttccatatgcaacaactgtgtccagagatttgatcatcactgcccttgggttggccagtgcattggagtggtaagtttactccatgactcttgccatatattcccggttctatgttttgaacttgtttggattcttttgcagcgaaattaccggttcttcttcatgttcatatcaacatcaaccactctgtgcatatatgtgtttgccttttcttggttgaacatatttcaaagacatatggatgaaaagattagcatctggaaagctatatccaaagatgttctatcggatattctcatagtttactgctttattactgtttggtttggtggaggacttacatatttcaattctatctcatctgtactaccaggtgattag

SEQ ID NO: 12769 - DNA, 575 bp, Arabidopsis thaliana landsberg
gaatgattacatgtacatatatagctttagagaacaagatctttgtgctatcacgatatcgtatcttaccgaaaatatagaaacaatattaacaatacagattttatggagtaactttgatatacattcctgatttaacgccaacgttctcttcacgcaactttgtagccaagtttgtaaaccaaaccagttaaaccggatctccaactccaacagtttcttatcaataatgtcttctcgatccggtgttgtatcttttggtaactttgattttgagctaatttgatggttacccacatcactagcccctgcgagacatgcattcttcacatgaccccattttttacaattacaacaccgtgggggaagccagggttatgtataactgatcaccacgtccagttctccctcttcttcaccaaagaaacgatattcctttggcaagtctttggtaagatctgcttccaccaatatttaggcttcatcgaaactaacacatgcctctgtttttgggtgtagccgtagcggtttccccactgcacttgataaaaactccaaacccttatccgtaaaca

SEQ ID NO: 12770 - DNA, 573 bp, Arabidopsis thaliana landsberg
tttttggctttgctgcgcaggtgaagcaaccgggtctggagatgcaaaccgtgcagagtgaactagacctatcgtacaagcagcgttaccaagatgtctcaattccagaggcttacgaacgccttattcttgacacgtaagaatctagtaacaatagttctgtatatcaaaaccttcattcatctcattagttgacccttattgtgtatctctctgcagaatcagaggcgaccaacaacactttgttcgcagagacgaattaaaggtaattttacctttctacttcaccacttagaacccctggatacttcacatcactcaactttgtttgaaacttccacaatctgatttttaccatatattgagaagatctttaaacacatatatgtatgtgatcaatcacaaaacaggcagcttgggaaatcttcactccactgcttcacaggatcgacaagggagaagtgaaatcggtcccatacaaacaaggtagccgtggcccagcggaagcagatcagctacttaagaaagctgagttatatgcagactcatggctacatttggatccctcctaca

SEQ ID NO: 12771 - DNA, 651 bp, Arabidopsis thaliana landsberg
ttacctctccttcctcgctgattacagtgattccatcgctgcgatattcgaaaactggaagctgagtgtgccgacgccgttgccggattctttatacataagcggcggcgatgaagcgaatccggagatctgtattcgtctccggtctctgtacgtatcgcttgggtgattttactcacgctttgtaaaatcgacggtaaagctcagccgtataaagacgttgctttgtcttatctcttcctcgctaacaatctccaatacgtcgtcgttaaagtccgatcgtcgactctgaaggttcttctcggagacgattgggtgtttaggcacgaagagaaggtgaagctctatgctgataagtttgagaagcttgcgtgggggagagtgctggatttactaccggagattccgacggatgagatttcgccggaggaagctaaggttttggtggcgagattcaacgatgagtttgagacgtcgtaccggaaacagacttcgtgggttatacccgacccgaaacttagggaccagattaaaatcacgttgagtcagaaacttatgctggtttgtaccgagtttcaccggatgaaccggtttgcatatggtatggttggagataatgagcgtattcagatatacccctgagatatggga

SEQ ID NO: 12772 - DNA, 524 bp, Arabidopsis thaliana landsberg
ctgtcgggttcgcttgtttgagaccataaatggatttcttgagacgacataccgtattaagagggagagagtcccccttactgtcagcatatccctctggtaatttcatatagatggtctcttccaaatcaccattgagaaaagcatttgaaatgtcaagttgattcagaaaccattgtttagaagctgagactttcagaagaagtttcagagtagccatcttagcaactggagagaaagtatcagtgtaatctaaaccctcatctgagtatatcccttgaaaactaaccttgctttgtaacgctcaagactgccatcagataaaatcttcactgtaaaaacccatttacagccaactgctttcttaccaggcggcagactagtgatttcccaagtatctgtgatttccattgcatcaatttccttgtcaatcgctccacaccattctttagatttctttgcctcagaatatgattgagggattggaatttgtgaaatgttattaatgtataacatatgtgatg

SEQ ID NO: 12773 - DNA, 637 bp, Arabidopsis thaliana landsberg
tttcacatattcggagatctctctctgtgttactgtatcttgactcttgagtgttttggtaatgcacatagattgtgttctctgagtcatggtggattgggacaaaagaggagaatccagaagaagctcgtcttgatttccctaaagaactagctcaggttgatacatttcacctatttttacattttctctttaagactatggttgcgacagagatgtttaacatgatcaggagaattctttggtttcaggcagagaatactgagtttgatttccaaggcggtgctggaggagcagcttcggtgaagaagctggcgagtcctgaaattggtagccaaccaacagagacagactcacctgaagttgacaacgaggatgttttgtctgaggatggagaattcttggacgataagatccaagtaacaccaccagttcaattaacaccaccagtccaagtaactccggtccgacagtctcagagaaattctgggaagaaattcaagtatgatcctttcaacttcttcactaagtgaaaacacattcgtagcgatgatacgtttggattttgatgagttattagatttctttactgggaatcattcctagtcatttgatttgtatatactttatgatgctg

SEQ ID NO: 12774 - DNA, 867 bp, Arabidopsis thaliana landsberg
gaacttcttcatctcatctctggattttggtagaacattttctttgggtagcatgtcgtgcactaatgtcaggagctgttcgaagtagttctcagacataccacttttaacctttatgcgatagagtgccatgattgcagaaactttagtatagctgggacacgtcgagtatagaggagtttctgcatcaatcagtttctgcctaaactctgattcttctttactctcaacatgagaactctgatcaccactctcagtctgagactgcagattttcttctccctgataaaatgcagtcctaatcaagtcataagcctcaaactcagaagtctgaacatcagtccgctgatgatccctgatatctccatgtttgctccaacaagtattcatcatacacttttgatccatacctctaaaaaccaaatgatctactactgtccctaatggttgatggcaaacatttcggtaatcactgcaaggacataaaatatcctcaggattacccaatctcctggctgacgcctcaacaaatttattagctccttctccatagtcagggctagccctgttagtcaataaaattaacaaattaactccaatataatcactgtaagtataagagaacaacgtaaataactatcaaaagcttaccttggcagccaaacccaagacttctccatattaaaacaataactccaaagctcgaccagcagttaaacacacaagtattatagttactctatatgtcagacaccaaccatgaggatcaaataaaggtaatcacacaaagagaaaccaaatacctgcacagaagaagaatctatgagggatcttgtgaattgtaaaacccgagactgcaaaaaaact

SEQ ID NO: 12775 - DNA, 579 bp, Arabidopsis thaliana landsberg
ggacagagactgttctcacatgttaggagtgttggttgcttttgcatcccaaaatcttcttcaaactttctcttgtaaacacagttgtagttgttttcaaattcaggatactgctgattggtccgatgagtgccaccaatcagttcaacatcatagtctgtagattcaggaaacaaaacatctgggtctccaccggttgcaggaacaagaaagttagaagtgttgttgttttctctagacatggctatttgatcaacaatagccttttctcggtaaagagcagcgagccataaagcgccttctcttgacgtcattttctcctgcaaacttctagaccgtctcacgagattcggtatgttgctaatgtcagaagccatatgtctgattacaccaatcaaaacaccaattttccacagcttcttgagatcatgaggcttcttgtaaggtggcggaacacctcgaaaatcaacgggtaaagacagttgatcccaccaatcttctttccccgttggccaccatggcggtgtcacgcctttctccaacggaaaccgtctctgaggagggttgcagtgaggaaac

SEQ ID NO: 12776 - DNA, 1053 bp, Arabidopsis thaliana landsberg
gattacaaccgttacctggattggcattagacaataatacatgtatctacaaaggttcaccggaaccatcgaatacttgaccgatactggctaacaaattaccatctaaaagagtggctatgagagtccatctgtctcaatgactgtataaccctaattagactgaataagactcaactaatgctgcggattccgttctgcagtgtgatctgatataagagatcgcaaagctgataagctatacgactacttagatttcaatgcgaatgcggttgaaaaacacacaagcctcattttcttagtaagatgagtaaggaatatataggtttgagataacttcgaaacaaaggttcaaaataaagacatgaagtatggtcttaattactactagttataggaaagtgagtatttcaatcccaacaatttgcctagtgtttttctttttctacttgcacaacaagttcaatgcttttcctctccaaacccttaaaattcaaaaagtataaaataactcttcaatgttcgtaaatcaaagttgtttataacggatgtttgtgacccattactccattagagaggatgacttatcattacccttactcaaatgggagctttgaaacgaacctttctaaatttatttttctctcaaaagcgttgaagaaagaagtggaggttaattttcaataaaactttgatctcaattttgagagagtgagctggaaagattctgtctttctggtgagaactaatttcggtcttagctcatctaagaaaggacagagctgtcgagtaaggattgatcgaagtctttagccaataaaaaatagacaaataaaagcgtaatctaagcagacagaactaaataatacatgtagggtaaacgaggactattgtcagatttgagttgtcgagtaacgggcctttaaaaattcgagaaaagaggggaagtactctatacagtgtgttctattattgtctgtaaacgaaaggctggatatctatttttacagatcaaaatccgaatattgatatccgcagataatagatatgaac

SEQ ID NO: 12777 - DNA, 979 bp, Arabidopsis thaliana landsberg
gtcataatttactccatatatacaaataagttgatatatattttcatgtttggtaatagattttaatgtatagaaaattagacaataaaacaagagaaaaaatcataaaattgtttaggctaatattcttttcgaaatatcgacttgtctattttagcttctctatttcttgtttatatcaagattgattaatctttgtaattaacaacaactcaaatagataactagaaaggcatcatacaatatccttcgagatatccaaaccattgggtgttgcaagagtcttggtcgtcccagcattgatttatgtttattccgtagcaataacagtttcttttaaaactaaaattagggtcacaattgatatgaaaaaatgtcggtacatgttgaaaacctttttagaccggtgcgcgcgcgatgaagcattcttataattaatgcttaattgtactacttatctttttaattattactatatacttcagttcaaataagaacgttattcattataattagcttaattctctatataatctgaatttgattgcatgcatttactaaagaattgatacaaactactacgttaaccagataaaaagaaatgacataaagttaagaaaattaatgaaacaataagctacaaattctcaactttaagtcgattttggacgaaccaatcccaaaattgtggaaacatgtgttttgtgtgtttacaagttacaacaactcagataaagagataattcaaaaaaacaccatacaatatccattgagacatccagaccatgaaatcatcacatacatctctcatatgcatactcatgctctctctcgtcgctctacatcaatgtatgtatatcatatacatatcaaaactatctctttaaattgttttgatgtgtgtttcaaaatcaatgtgtaggtgtgaggatgaaggtaaaagagataggaggtcgaacaaaatctatatacctgcatg

SEQ ID NO: 12778 - DNA, 363 bp, Arabidopsis thaliana landsberg
gaggcattactttctgaaaccaataacaatgacattctttctgaagaaagcagagaaaaaggtactcgtatatatggatctacattgctagcgaaacaacaaagaaccaaccaactatcaggaatcaatcaaatgccataaatctgataaaaggaaaaagccacacagggagagaaaatagtacccattctttgtctttctcagacagaaaattctcaaagtgaaagtgagaaaaagaagatcagagctttcacgcttttaggatctcactcttcaaaagcttccctttctctgtttttccatgtcagtcatttaggttccaaccttgagttattattctttttccttggaaaaggcaaaagc

SEQ ID NO: 12779 - DNA, 487 bp, Arabidopsis thaliana landsberg
  unsure (1)..(487): unsure at all n locations
ttcagttgcaatctgctctgttgatttttccttagggtcaacacgctccatctcgatgggcactgaaggcccagcttcggnnnnnnnnnnnnnnnnnnnngcttcgatttctgcctgcttagaatcagcttcgggttgcgccttggaagcttcggcaacttaccttgtaggagcagggctcaaggtttttgttgtttctaacacaacatccagcacatttgccatccttctcctcttaggagttacgacagaacccatttgtaccttcggtactgttgcctctattggagggctcaaaatctgtggcatcttcgttatttcttcaatttttggctcttcagccttatcaaccttcgtttcaaccaacttgactgtaagcaccttcggcactttagtgtctgcgcagtcgagatagtttcttttgttnnnnnnnnnnnnnnnnnnctgcgccaaactcaggcacacgaccggttcaatgtacgcagcg

SEQ ID NO: 12780 - DNA, 258 bp, Arabidopsis thaliana landsberg
cttggaaggtatgtcttctaacatagattttcaagtgtgttcccacaagcgtaatggatttgctacctcacaatagataagcaaaaggacaaacaaatgccgtaattgaaacggggttgcccattgatatgcttcatcgattgcattatgccactctttattgttgtctagcaaccctcttgcataacatgctgccttaaaactctattttatttaaccgcaaaatgttttcaattcgtcatagctttgtaaccttaa

SEQ ID NO: 12781 - DNA, 1106 bp, Arabidopsis thaliana landsberg
agagattttttcctacacactagcctttgaaagctgaaggtcctctacgattcatatgttcagcaacatcaccagtgctaacataaacaccatgtgcatgagccatttcaatagcccgcctgatgaatgattttggaatcaaactgttggatcctccagagaactttaacccatcaacaaactgtcccatcgattcaaaaatttcctaacaaaacgattaaccaaatttgtaagagcctaaatccgctaaatgttcggtttaatctcaagcaaaattgtgaatcataaccggaataattaacgtgtagggacctgaagaaggttctggctgagaacggagtaatgaggacctcgcatctccgtaacaccgtaacggcgaggcttctctggacgatcttcgttctcctcgaaactcttccatctgtagtaagccgccattttctctgttcacttcttcttcttcttcttctcctgagaattcgaactctcgaagaatcgaacatttctcgaaaacttttaagaagacaaatgtccaagtcgaagaatggagctgcttctagagaaatatgccacgtcatgttctcgaatttgttactcttttgtacgtagccacgtcattatcatcaacgagacgggatttaggataagtctctgtaaaggcccacttaaatttattgggccagagcgactggaaaacgaaatttttgtcttcaacagcgattcaaaacgcaaacgtcctcttctttgcttggctgctctgtcaagaatcgaatattgaaaaggttttattattaaacatggaatggaagagaggaataaagaaaacaaatcttttcgaggacattgcacattactaataaacttcttcaattcctcagaaacatcaaatatgattttataaaagttaaaattttctcatgaaaaagagaggatcacagctaaattttattctcttaacatgatctttagtacaaatgcaagaaaaggaaacttatgttgaactttattcttattccatccaacgaagagagtctctcaaagcttaaaactctaattgcctataaattacaagaacaagttattacttcaacaacaatactttgtgc

SEQ ID NO: 12782 - DNA, 592 bp, Arabidopsis thaliana landsberg
gaacgttcgttaagaatcctaattttacaactaattcgtgagaaataccctaaatccgacgttgttatcatctaaattttacaaccaatttaatcagctttcatgtctttcaattttctactatttaatttagtttgatttcaaaactattccttatgtgaacaaaataactttgtggaattctaccctgaagtattgaaattgaactcatgtttgagagagtagtcttaggttcaatttgagtccatatcaaatttgtcgtcgttgtcgaagttcttgggaatgatcactaagatttctttagaaattttgtttaatttttttttttttgatactaacgtgtttcttctttcttctttctctggtatttcaggtttatgcctaatcgtgtcacaaggaccactaagaaaaagaacctgatcaaccttactggacttgatttgggaaagctagagcgcacaaaccaaaaagcaaagaaattaacaacaatcgttactggagaactaagagctgaaagaggtttttgagagatgatgatggtcaagcctacaatgagactagtcagagactttatgatctcaaccgcccaaat

SEQ ID NO: 12783 - DNA, 510 bp, Arabidopsis thaliana landsberg
cagtcgagcacgtggtgtttagcttctgctcgtgttccagcgctcataggctccaaatcttcacgtatttgggcaagatcccattttaagatatgttcccccgactgagctctatcgtattcgtgtggaagccgaggggtttttgggtctgtgcatggaggtagtcatgctgccaacttgggtgtgtttggccgcgtcgtcccgaagcaaatccaggctaagatcatgtcaactggccagggtttgtcttcaaacttcgccagggcgttcctaggatattttggcgccattttgttacttggaccatgtagttttgagttttggaactaggtgaacgcggttgatttttgtgagaaggttggatttcagaaatctgaattcctgattgctatttgaagtcccacttgagtggcttgtttgaggattttgcaaaacccctttgggtaaactatcttactatgtgttgtagagtatttagtgtccacaacgttgataagtggtcaaattaag

SEQ ID NO: 12784 - DNA, 714 bp, Arabidopsis thaliana landsberg
cattcattcatattagtaaatacaaccatcatcatacatctataataatgcggcgtcgttgtgttgtttgtatttcaaataagacacttgtctctgcaacttgatctgctcatagaacttagcaatgaactcctctgctctcacatccacccctttctcttcttccgaacaagattcatcgtaaccgtacgattgtacctcgtcggaataatcttgaccgtccatttcaaagtcatagtcaaaatctacgggaggagcaatgcaggggaggaggaggaacctcatagacgtagtaggacaatgtatcttcttcttgacgttaaataacggcgtttcatcaaaggaaagctggcgttctccgtaataacggtcaccgttactatgatgatgagctagggctttgagatgcttgaagaacaagctacgtagttcgaacaatggccattttttgaaaactccaccttttcttccccatagaagagccatcttcatgagactccatgctttatgtgttatcgcgtttcttctgattttcttctgagacgaatccgccattgatgatttattatactctcgatttttgatcagagatgagttttctttttccttgatgatgaagtttttgttgtgtgttgcttatggttcatgaaatgattgtgtgtgtatgtgtattatatacacaaaggtatgcagctttttgcttgctgtttgcaa

SEQ ID NO: 12785 - DNA, 540 bp, Arabidopsis thaliana landsberg
cggaatacctgctgaagcagatccggaacttgttgggcccatggcaccgtaacggtactcgatcctgttggaagtttcatacaaccaggcctggaaagtagagttggccggacctgaagtagccctcggaatggtcacgaaccactgtacgataaagatcctgttgggagcagtaccggttactaaggtttgtacgttacctgtggtaccagttgccaggtcatcccagtaaggataaattttaggaatgttggtcgtacttgttactgagttggtgaactggttggaggccgtaccaccacccaggcggatccatccgtcaggtgaagctgaatactgggtataggtcacgccttcgtatacgaaattaaatccgatagaggcaggtgaacccattggtgtatcgtcatcaccagtaccgattactgtagtggcaccggtcattggatccagtgtagcaccggtcgaggtactgaaaatataaccggcagacggtatattggctacagctgcaacattcaattgcgaattggcgcccgt

SEQ ID NO: 12786 - DNA, 581 bp, Arabidopsis thaliana landsberg
  unsure (1)..(581): unsure at all n locations
aacaggcgctacgcttgatccaatgaccggtgctaccaccgtaattggttccggtgttgacgatgcaccaatgggggcacctgggtctatcgggtttaacttcgtatacgaaggagtaacctatacccagtattcagcttcacctgacggatggatccgcctgggcggtggtacggcctccagccagttcaccaactcagtaataagcgccaccaacacgccaaaaatttatgcttactgggatgacctggcaactggtactacaggtaacgtacaaaccctggtgactggtactgctcccaacaggatctttattgctcagtggttcgtgaccattccaagggctacttcaggtgctgccaatgctactttccaggtttggctgtatgaaacttccaacaaaatcgagcttcgttatggcgccatgggaacaccttccggatctgcttcagcaggtattaccggngccacatcaaccaaattcaacagcagtacttacagctncaacacatcaagctcgagtactgccaatgatgccaatgcagatgcaccggccagcgggaagatgtatactttgtcgg

SEQ ID NO: 12787 - DNA, 486 bp, Arabidopsis thaliana landsberg
tgtagagaattctttagaatttatatttggtccatcaaattattggataatggatccaattaattaaaaatcattcaaaatcaagtgtaactttcaacatgtcctcttaaattttattttattacaacaaccaaactcctcatcttgatagtcttctcgttcaagaggcttagtgaaaatatgggctacttgatcatgtctcttcacatactccaatttcttgcacatctttcttgttaacacactctctaatgtaataataacatgtgtcaatgtgcttactttgatcatggaaggtggggttctttgccaaagttattggtcacttcttctccacatagatttttgttggttcatcttgtggcaaacttaacatggaacacacatgaagtggagagagtaacaaaatttggttacttcttcgacatcatgtgaaagccgatctccaatgtagaacaggaagccacttgtactttttggtgatcg

SEQ ID NO: 12788 - DNA, 604 bp, Arabidopsis thaliana landsberg
tgccttaagcttagcagctccggggagagcccaccatgcatacaaaaaatccgctcatcgatgagtgcagcgacggtgagacagttgaagcaatcggtgaagattcgccaaatcttgacactgaatctacgtttacactcgtcatagaagccgtaaatacgattgattgatgcactttcatggtttcctctgagaaggaagaagttttcagggaacttaatcttgtaagcaagtaaaagacaaatcgtttcgaggctttgcttgccgcgatctacataatctccaagaaacaagtagtttgaattaggagggtatccgccatgttcgaatagtctcaagagatccggatattgtccatgaatgtcccctgtttattatttgtttaaccaaaagattacataggagcacaatctcagaaaagagtcagagagaaacaaagagaaacgtaccacatattttaacaggagcctcaagttccaagagatttggctgtctcaagaagatatctctagagacgaaacagagctgtttgatctctgtttcagacaactgaacaatctttcctggtttttctctagcttcaagcaacctattgatcaccgag

SEQ ID NO: 12789 - DNA, 1056 bp, Arabidopsis thaliana landsberg
  unsure (1)..(1056): unsure at all n locations
aggaaattaacttttaaccatatgagcaggaactttactttgtgattttttccctttttgttttatctaattctgttttggatcatctaagacaaagatattcaccaaatttactatagtttgacttaagattatgatgaagttttatacctatcaatacgaggcaaaatgttctcggaggacataattaccaccggtacttctctaaaagctgaggattcctgtggaaaatcacgtaaaaaaggattagataaacataaaactcaaattccattgactaattatatcattatatgtttgtttgcttactttgatcttcttcaagagttcatatccagtcataccgggcattgagtaatcagtcataattaaattaaccttcaaatcctgaagcacaaatcacgatttaacatattgcttgagagctacggcaaaattttgttttctcttggaaattgttttatacctcaaaaccgactgatttttcctcaacatccaaaccaaggtattggagagctcttgttgcactatcaacaacagtaactgaacaaccaaaacagagctttttactcagataacttgcccgaattcagagactgatttttcaaaatatgagtaataattacctttgcaagaagatactctgagcaaacgctcgatgaatttacgatcaacgtgactgtcgtcgacggcaagaacatgaagaggatccggtgatccaaactttgaagaatggttgagaatctccatcttcctcggtagcataacttcagccattgatcaacgaatgttggaggatttggaagaaaaaggaagagaaagatatgatgtgaaaccatggtggcagtggttgggccatttatataagtagaaagaaagaaagaaagaaataaaagagggaaaaaatatgaatgaaatcgagagattttgcatatctttaagattttgtcaatttgctttcaaaatctttattttatattttatataaataatagttcggggatttttattattaaataagttaaaacaaaaaacggaanataagtcaaaccaatc

SEQ ID NO: 12790 - DNA, 1178 bp, Arabidopsis thaliana landsberg
tgttcaaaattcctttcccaaaaaaaaaaagaagttgatatgccagctgtactattgcttgtgcaaattgctctttatctcaatcaatctccattctccactattaaaaaagaaaaaatgcacctacttttttgtttttgtttttaaaacaaattttgaattttgtttagtaaattgaaattgttttagtaagtaaaaatagtaaagagatagtaaaaaaaaaagaacctgagcttcaccgatccagcgcataggtttggaagaaagaccgagttcttgggagggaatagcctcatgccaccagtcactgagtaagagattaaactcaccatcgtatctcaatctctcgctctttcctttagccacgtccacaatcaacgatccgtatagcccagctgatctctgcatgccatagtgtccatggtagaaatgtgttcccggctgcaccatttcatttatccccaaatttgttactatttatttttgttacaataatggaaaaagagaagaagaaaaaagttaccttttcaacagtgaaattgtaggtaaaagtctctccagggttaattgctcattgagtaactcctgctgctccatctgcccatggacttccgaactatattcacaaaacgcagttaaagtattcaggcatctactaagtagtaactttacactgaattaggctttaggaatgcaaaataaggtaaattatagagtagtgtcaatgcactattttgttgcgataattttaagggacaataaatagtgtttatggggaaaacaaacgtcgtaaatgaagttattgaatcaagaatagacaaagtgatcatgcatggcatgtgctgcttaacccattatttctgcaacttcacccattttctttcttcttttatcatctaaaatcatgacaaatcataccaatctacaattctttatacaatggacacaatcattgaattaatgtatagagaaaaaagacaacaaattaagccgaagaaaatagaagatctgaaaaagttcatatggtaagtgatgatccgagtgatgacacttagtgtatccatcttaataataacttctgttggtttacaaaatactcggcgctttctagatccatgatctggttttagtgaaaaaaaagagagagaacctgacggattccatgccaatggatgaca

SEQ ID NO: 12791 - DNA, 808 bp, Arabidopsis thaliana landsberg
ttatctttggtacatgacgaggtaaaagaaaaacccgtctgctaccttatacaatgtaaactttccctagcttcaaagtgattctcgacacgtgctaacaaacatgtggaattggtatgtagtgttgatatcggtgacagtgaatcattcttgcatggaggagagctaccaactctcattattcaatctacaggccatgccgtgcatatatttgtcaatggacagctttcaggtatgatacttccactagtttggcctgttaatttgttctattagagaatttctgatgcaaacttataatatatgaattgcaggttctgcctttggaacaaggcaaaacaggagatttacttatcagggaaagatcaatctgcattctggaactaacagaattgcgttgctgagtgttgctgttggattaccagttagtagtcttttctctcttccgtgtaaacgatgtttttcgtttttctcttatcctgacccctttcctctttttcgtttttgaagaatgtgggtggacactttgagtcatggaatactggaatcttgggtccggtggcattgcatgggttgagtcaagggaaaatggatttgtcatggcagaaatggacataccaggtgttttatctatcctattttctcgtgatttctctcttttgatcccttttttctgtattaagttgtttaactctgttttcatcaggtgggactgaaaggtgaagctatgaatcttgcatttccaaccaaaactccctaaattggatggatggatgcgtccttaactgtacaaaagcctcagccttta

SEQ ID NO: 12792 - DNA, 584 bp, Arabidopsis thaliana landsberg
actaacacacagcgatgtgaattcacaggactgtccacaatacaatcacccagaaacctcctaatgattactcacagcagatctatgatcggtatggtggagtatatgttgattacaataaacaaactgtgagtaatataccatgtttgcgtttgggcgttgattctgtaacgctgttctgtacaacttgagcaaacggtctaatgtttttatatgtgattaggtgttgccggctatacgtgagaagcatggtgaatatatgctgagagagcttgttaagagatgggccaaccagaaaattcttgttagatggttatcccacttcttcgaatatcttgaccgtttttatactcgtcgggggtctcatccaacactgagtgctgttggcttcatatccttccgcgacctggtttatcaagagttacagtccaaggccaaagacgctgtactagcacttgtaagcatctctaactgagtagctctggtttacttattctggtttatctaacgcaatttgtattgccagattcataaagaacgcgagggcgaacagattgatagagcactattgaaaacgtatagat

SEQ ID NO: 12793 - DNA, 612 bp, Arabidopsis thaliana landsberg
gactaacgcaacttgaacggaccaaatcggagttaaaatggattagttatgattttcctagggttttatgtatttggtatgagattagttaggatataaattttaatgtcactttcatgtaaaaacagtggcactaaatgataaacgataatattacaaaattataacaattggaatgaatcaatttggagttacaatgaattatttatgaattaaacaagttcctagaattatttttatactagaaagtcatttcccatattcatttatcaaattcccacggttctggactgcacgcatgattctgtagttctatgggggtttctctgcaaaattcaggtccctggcgcactgtctttataagggctcgggactgcgggttgattcataaaaagaacagggactcttaagcaaaacgtccacggcgaaggggtacggttgaatatcggccgttggatcccaatccaacggatcgaattaaatcggcatccatgtgaaccggtacgcaagggcagccataggatcggaatccgacgtctctgattttatgaacttgatctatccgaacgtccgatcaaacctcctatggccagattaaacagccaggagagt

SEQ ID NO: 12794 - DNA, 726 bp, Arabidopsis thaliana landsberg
  unsure (1)..(726): unsure at all n locations
agaagaaatcttgaattcgaaacatccaattttgaccaaatctaatgacatacctttaagatgatcctctcagattccagcaagcaatccaaattcgaatacgagcctgaccatgaagctgactgaaccaaaccaatcaaaagagaacaagtaaacattaggcctcaatcgattttccccaaattgagcttctcaataaagagatggacaacaacgacaacaacaacaacacaaaacgatatactcgtgttgcttgcttaattaggttaaggaaaacgcgagagagaagcaagaattgatagaaaagttacatcgagtttagtccattcaagcacgtcccagcttccggtaccttccatcttctccgacgaacatcgcagcgatcgtgatcgcccggagagaggtctcagcgccgtcatgtaaaaaaggagagatagagaggggagagagagaggtgggagagacggtgattcggcttggggttcaccggccgctcaacggtggcaaaggacggatttagcacgctgcctttttgccacaaagacaatgagacatccaaatacgacgctgtttccgtacggccaaagtttacgtttctcaccttctttnttttttcctctaaaataatattatttctcacctatataataagattaggaaaaggaaatttgtctctttttcataaaataaaaaggacatttgttgattaagagtttcttaaaaagg

SEQ ID NO: 12795 - DNA, 987 bp, Arabidopsis thaliana landsberg
agcgtcacgtgatgtagccatggctacagcagctaaagccaagcttctcctccgtgaattgaaaacggttaaagccgatttagctttcgctaaagaacgttgttctcaattggaagaagaaaacaaacggttaagagataaccgggataaaggtaacaacaatccagctgatgatgacctaattaggcttcagctagagacattgcttgcagagaaagcgagattagcacacgaaaactctatttacgctagagaaaaccgattcttgagagaaatcgtcgaatatcatcagttaacaatgcaagatgttgtttatatcgatgaaggtattgaagaagttgctgaagtgaatccttctatcactagaacgctttctatggcttcgtattcggcttctgaattgccttcgatctcgccttcgccttcttcccctgcttcgccttctcggctttcggtttctacagacatttatccgattttggttcagcagagttcgactaacgatattacggttgagagtcctaaaccggttcgaccaccttctttgggatacacagatgatggtaagagaccatcatcacagctaccatcgtcacagctcgctgtttagaattgatgacttttactatcactttgattatgtctgtttcgaaatttttgttgttaatttttgatcttgattaataacttgacttcacctttggcgtaatctacttgtaatagtggtttgattgatgaacatttttgcctctaccttcttcatgttaatcgttttattgactttttcttttgtttggaactttggaattgaaaatgttgtaaattagtttttggtactaggaaatgaggtgacttatgctcgaactttgaggcgtaacaaactctatttgtatcaacttacaagtaacccacgtctaacgttatttaaatttggtaaaatcggtcaactcttagtatacgggcctggtgcaggctgtttagcccatc

SEQ ID NO: 12796 - DNA, 838 bp, Arabidopsis thaliana landsberg
tgtaggaagttaaacataaaaaaaactgctcagattataacaaaggctaaatgagtccgggatgagggtttttagtctagaaaatcagaaaatagtagctagcaagcaaacaatgtcgagagcctttaacttaaatatcaagataagagtagaataagatagatcaacaagagctgatcgaatttgtgtatataagctactacaatatttactcatcttaagaaaaataaatgcacatgaagactctacataaaagagtcagtttttaccttctgatggtactggtatatatttagctgttctatatttctgcaatatgaataagaaaaattgtagacttttacaaacagactatgaggattaggataaacatatgttaggaaaaaataaaaaataaacctgcaaatgacttttgacatgaaaaatagtcaaaccttcgactttcatatgcttcaggacacctttaggagttgcttctacattaaaataaggcacaaagcaagagcttcatcatcgttaactctattcaaagacaaggatcttaaaatcaagaaacagagagagagggggacagagattctcaccattactgccaccgagctggttaacagcgtcaacaaaaacctcatgaagttcaggcgtccaacgcatacgtcccttagctgctgctgctgcattattactgttgctattgttggtgctgtttgaggatactgtcctatcaagtgggcgcaattccacacaagaagaaggctgctgcagaacagcttggggttgttgaatctgcgattgcatacttggttgctggacctgaaacaatatcgcctcataaaacatg

SEQ ID NO: 12797 - DNA, 729 bp, Arabidopsis thaliana landsberg
gcagagaataaccaattcgttcttggagatttaatcgttcatcaagagaaattatgagaccggtggcctggtacgaaagactatccaaagctttccatgattatccttctctctccaaaattctcgtcgtctccaccatcaggtcagtgtaaccatctcatcgccgattcatctctatttcacatttgaatttcgctatttgaaactttgtgtatgtattgtgaacctatcctccttttgcatttgccatgaattcatctgcgtaatgagacttttcctatgcaagattttgttttcccgttcatggaacagagtcttgttatgtttacttgtcatatacgttatatggaaatctgtgtttacgagagcagagctgatgatattcataatcaaacaaatagatgactgattttagatctgctgttctgttctaattactatttcttgtttcatagtggtgggggacttatagtttactctgaggcaaatccatcatatagcaacaatggtgttgaaactaaaaccaggaagaaaaaagtagtgctgctcggaactggatgggctggagcaagttttttgaagactttgaataactcttcttatgaggttcaggttatatctcctcgaaactactttgctttcactcccttgttacctagtgtaacatgtgaaactgttgaagctcgcagcgttgttgaacctattcgcaacattgcgagaaaggtaagt

SEQ ID NO: 12798 - DNA, 812 bp, Arabidopsis thaliana landsberg
gtcataactcagaatactatgtcataggagacagaccaattgagcttaatggactaattgtagaaaagcccattttcgtagtattcaatcgcaattactttctatccaaaaccggagagttttgacactatggttcattacattcaacatttgggctttgtgattacccaaattggaaccagctagttatttgatcaatggaattatacggctcacggctgaacgcaaagaatgatatcgttttgatggaacaaactggcaagatagtgttcattccacaaatagtattggttcggttttaaacattgcatgatttgagttttaaccggttttcaagtgtgttcatattcatttgagcagaggatcaaataaacagagaagcattaggaagaagagaccacgatatagagagaaaaaaaaattgaatcaaaaccaaagcgaagcagtcaatggcagcattcagacagacaagaacatggtctctccagtttctatcttaattatacgtttctcaaaaaaaaaaagaccattcctttacgaccttcttgcatccaaggcaacaaacataggcgaagctaagagcttagtaccgtctgaaactgccatcatctcacaaaccctttttacttcgaagcgcctgttacaatttcacaactccatacatcagtaatcaagtagtttagtgcgaaaagccaatctataagtacaatggttaatatcataccctccagaatatgcgtttttgagaataggaagtcatagattggtgctcaatattggcgccttggaggcctagcctcagctttcgagac

SEQ ID NO: 12799 - DNA, 811 bp, Arabidopsis thaliana landsberg
  unsure (1)..(811): unsure at all n locations
gaagtttttggttgagttatataattaatttctaatattctaatgaagttagtaagctatatttccttatattacttttgtttgaagcaaaaaaaacacaaatttgtttttattattcaactaaaatagacaacgtacgaggaaaatctagttttcaaaatataaagaaacagattttctagattttatgaaactaatttctaaagatgagacacaaattttgaattatttctaactatacagaaggataaatacaacaaaaacacttaccaatcaacgtttaaaattgttatgagtaaatataatttgatggtaaaatagttgcagagaaaaaaggaccaatatacggatgagttgggtatgtcgtgtcaggttataattggataatattgatccgacaaaacaatcgacgagtacaaaacttcaacgaactcactcacactccaatctccacaatccctttttaacagccgcgttttcatctctcgggtcaacccccttctcctactcccacgtacgttttatccccacttttatgacgtcattttacacaactcataattattctttttttccttcctaaataattatttatccgtaattctatttttttttttcatcaaacattagctttgttattgacgagcggtgacatagtcacgatgaagaagatcagtaattacatgtggaacgaaagcataaaaataaagaggttgttcaaggaatatgttgttttgtaaagtatctgccccatattcgacatctncgtattctttcaagttgggatcaaatccatttcttagttcctttt

SEQ ID NO: 12800 - DNA, 1006 bp, Arabidopsis thaliana landsberg
gtttttaatatatcaatcacatatatatttttgtcacatgctaaaaggctttatatactgttatacactcttctcttttatacttgatgagttcatataatcacacttcatcccctgaggttttgttgattgctttgttcaatggtggagtatgaacatctttaatcagtagactctgaaagaatccgatcaactgtgcatgcaaaacatgttggtccatcataattcatatacaatcaaatcaaagttagtcttgatggatgagattttcatatataccgaggacaacgagatgcaaaggaggctgaatccagggaaatagaacggtgcattttttgaaagaaacaacgctatatacatgaaatcaatttattgaatgtgtcaaaacaaatgaatgaaacttggtagtaatttgtgttcttatggctttacaaacctgtcaatggactgaagacaaatggtgccaccactttgccaaaggacctcactccagatatgcatccttgcacttttccctacacatttcaaattaacaatagttaacttgtgtgcttttttgtataaatgttgatacaacaaaaatcaaaaaccaatgataacaagaaactggtttttacctgttcaccaggtccaacttgtctcgaggcaataccacaaacctgcagccaaaaatgttcaaactcttaaattttatagacatcagattcaaaccatttgaaaatgaaattattgtccatctttagttattatatagaccaatataatccattcattatatatcacttaaaattcttgcctaattttagatgtgtgatattattatttcctatacattatattatacattactctaggccttatttcattttcaatgtaagattcttcacaaaaaaaaattaagtagcaaaagcagtaatattaatgatcaattaatagaaatgtcaaattaccgatggcatcacaaataaggctccaggtacaaacacagtggtgagataaggaacct

SEQ ID NO: 12801 - DNA, 413 bp, Arabidopsis thaliana landsberg
ccttgttttatactcttgatacagttctttcaaggcttccactgcgctcgaatctatgtgttgtacatgagacatttccaggattacaaaatttattctatccacctccagtccccggtttgtgtatttgtcaacagctacttcatattctcgtagtctgcactttgcaaaaaaagccagcttgttaatgtttctaatagattcataccacaaggaagaataaacgcctttctcacctgtccttgatgtaacttatgttggcaaagtaaataggagaatcgattcgaactatcacaatcccgttgtatgtgtaagcctctggatactgctttatgtttctgtacacacgtggtgcctggaagccgccccaagacagctcccaggagaataattaagataagaaatgacccctt

SEQ ID NO: 12802 - DNA, 585 bp, Arabidopsis thaliana landsberg
attatcatacatgtgttagttctcatatgtgttttaagaaggagaaagccatctgctgggaaaggtacttaaaggagaataacatatagaagaatataatcccatattgtataactctcatggaattctgttaaatttttctatgcagttacacgctcatccttcaaatcggaaaatagaagatttacttactctgacgttaacaaaatgacaaataactttcaagttgttattggtaaaggagggttcggtgttgtctatcaaggttgtttaaataatgaacaagcagctattaaagtgctttctcattcatcagctcagggctataaagaattcaaaacagaggtattcttattaaaatcttttactaaagttttggaaaaagaggttaatgtttgagatcaggaatcaattggttacacttttttctttatgtcgtccttgattgttaggtcgaactacttttaagagttcaccatgaaaagttagtaagcctcattggatattgtgatgatgataatggcttagctctcatctaaaagttaatgggaaagggaaacttaaaagagcatctctcaggtagaa

SEQ ID NO: 12803 - DNA, 842 bp, Arabidopsis thaliana landsberg
tctgtattagatatatatatacttcgtaaaacatatctttattaactggtagttttaaaaaaatttggtgggatgtctaacaaagacatatatagtcctctacacaccaaaaaaaaaacaagacatagtccttaagcattaatttaggacaacttgtttgcctttgacctgagttgaaaacaaatcgagactaaaaatactgttttccaagaaagtatttcatttaaacttatagttaatttagtaagatatactaaatagaaatgcagaatatttaatttttaaaaattgagaaactaaaaaatttattatttagaattaacataatggtaagtataatagtttatgaaatttttgacaaaaaaaatagtttgtgaaatttatgggctattttaatgactatacttttacaaatatgttcgtctcatgtttaagtctctaaacgttttactaacaaatactagtaagcgaaggacaaatcttttctcttacgcgtgaactttctcttttggaaggccaatcttttatttttggtcaaccaccaaacaaataatatataaatccataatatttgaccattggtctaaaatggtcagcagaaatatgccaatgatcactatatattctcaccatctctatctccaagcatacttcatctatcatcgctacaaaaaaatcaaagcatcactaattcactatatacactcacaaaacggaattcttcaaattctgaaaactcaatatctttctatttcataagattaatcattaagatttattaactttttactcgatcggcaaacaaaaggaagaagatgatgatgttacctgaagcatgcgta

SEQ ID NO: 12804 - DNA, 488 bp, Arabidopsis thaliana landsberg
ttcttatggcggggaccccccttcaggtgtttgctctatcttattcttgaatatttggacattgaagttttctttgttaagttgcttctaattgaatgttgaaacaacctttcttgtacggctctgtttgcactcttaacttttgcttttccgggcacttttaatatttaccgtataatgactgtgtagcctgctgtactcatattgtcctcatatatgcagaataatctccatgaactgtgggctcttctaaattttcttctgcctgagatttttagttcagcagagacttttgatgaatggtttcaaatttctggtgagaatgaccagcaagaagttgtgcaacaactgcacaaggtatggatgcacccattcgttgcattgagtttattctgttctgtgtgagtcgtaggttaattgctttcatgtatctttttaggttcttcgaccaaatcttcttcgaagactaaagtcagatgttgagaaag

SEQ ID NO: 12805 - DNA, 624 bp, Arabidopsis thaliana landsberg
tcatattcgactccaaatactaaccaagcttcttcttgctgctgaactctacgatggaccactgaatctacatactagtcgaaatgggagcctttagtctcatacttcctgtcgtcaaattccaacttcaattggtatatgagtgatttcttatccaaatctagaaaccctgttgacaaaaccctttaaccccttgtatctgaagttagtttggttaaggtccaatccaggaacacgttgccaaatatatctccatctcgtggacaagatactggttttaacagaatctttcgtcgcaagttttaggagtatctcatgcagtacgtggtccggcaataattggctaatcaaatctttgttttccatgtgatttcgtcttttgtaatcgtgacgcttttgtttagagacctcagcaatgatgtaatgctgaaaaattaagcagaaaagcacagatcaagttaagtaaattcatagtagagagactaagaagaacaacgagagaactgacctgcagcggcgcgatccgatcacagataatgacgatgtaaaagcgaagcgatgagagatcgtcggataattgacgacggtggcgacgctttcaagttttatttggttttgggaaag

SEQ ID NO: 12806 - DNA, 712 bp, Arabidopsis thaliana landsberg
ttaactttaacttggaaacctaacgttgctagtgttacttatacagttgcaggaacatctttctacgatcttagggtagcgtaatggaaactccagaagaagttaatgaacttcatattcatagtgacgtagatagtgcctcccaggctcaacatcacactcttggatatggaattaatcaggccgcgccagggacagatgtaagtcgtcgtcttgcaattattgaggctcttatgaagtctcacggttggacgtaagatgcctaagcaaaaagaagagtttagttctgactctatccttcagaacatcgcagcaggtcttgggaacaagaagccgaaccattatgagtatctcaagtcgcttgaaaagaacactcacccgaagcaagttgccttccacaagtcacaggcaaatggtcgtcaattccttgggggtaaccgttcaggaaaaacggttgctggtattaacgagacgattatgtggttacttggtaagcatccgtttcttgatctacctgagcctcctatctttggacgaatcgttacagttgacttcaagaatggagcgcatggtattatcattccacaactccgtcaatggcttccgccgtcagcattgattaacggttcgtgggaagattcgtttaacaacaacttaatgatgcttactcttgcgaatggctctcaatgtgaaattcgttcgtatgagcagg

SEQ ID NO: 12807 - DNA, 383 bp, Arabidopsis thaliana landsberg
  unsure (1)..(383): unsure at all n locations
ttatatttccgcaacttcgtcagtggcttccaccgtctgcactgattaatggttcgtgggaagattcattcaacaacaacttaatgatgcttactcttgagaatggctcgcaattagagattcgttcttatgagcaggnnnnnnnnnnnnnnnnnnnnnnnnnnnnnnacttcacttactttgacgaagagccgccgttcgatattttcaaggaatgtaaggcccgtcttactgactacaacggtcgttggtggatggctatgacacccgtcgaaggcatgacgtggacctatgacgaaatttatgaaaagcgtcatactccgctgattgacgttatccaagttgaccagaatgacaatccgcacatttcagcggaagggtcg

SEQ ID NO: 12808 - DNA, 582 bp, Arabidopsis thaliana landsberg
tcaggcaacggcatcaaacgcttgcaaacttctttgccttgttctcttcttatcattcgctaaccaaggtatattatactttatatacaattttaccatagtcttcaattttcgtatatattctttgtcttattctcaaatttcgtattcccaaatcatctatactacatgatttccgatcactataaccctatagtctctatatccattggattaaagcttaacgttatatttttagaacatataacattatgttatatagttaatatatttttcttttcttgctattacataacggaaataaaaatttgtttttccttggaaatttggaagggtatggagattgtagtctaaattccctatctgtgaaacaatcgaaaaccgggaaattggtttcagaacaaaccggagtgggaagtgagagtgacgaacccttgcatcaattgcaaatttccaaacacagagttgttttgtgttcggtttaacttaggtacacccatcgataccttgttgttgctgaaatctggtgaggcgtggctcgttaacgctggttaatttatagttcctcacgtggacttggtt

SEQ ID NO: 12809 - DNA, 637 bp, Arabidopsis thaliana landsberg
ccatggattcattataccgaagaagcgctgcatccctctcagcttcaagctttgcaagtgcttctgcaagtatcttagtctcaatctcagctttgctagcacgttcatcgagaccactaacatccttttgagcaacctcaaggtctttttccagtctagaaaatttgttcaagcttagctgatactgaagattcaaggcctccttctcagctccaagctcaaccaatgttctcttcaagctttcaacttctgtttcagaatttcctaagtactcagtcagctgactcaaacctcttttactagtggcactgtcagagtcataaaatggctggattccaggtggcattttctcaggcgtacgtggctcagaacatgaagatgaagcagaatcctcaatcatgtcgaaaggcacttggttagggaacgcctcagccatggttttatgcgcgtgacaaagctccacagtggcatgatcatacctctctgctaatgcacgataagctctatagaattcttccacaagtttcatcagctctggacgtttcttgtaatacatctctgcccttcttgcaaaagaatctgcatcttcttcgatgagtttaatcattgccttcactttggaatccatatctacatc

SEQ ID NO: 12810 - DNA, 570 bp, Arabidopsis thaliana landsberg
tgtctaccataaaagctcaatctgcaaactaaacaccagctttgtttccaagtctctcccgaagaatcttgactcccatgtatctgcaaagattgacaaatcctctgtttatatattgaactaaaaagaaaacctccaattcattatgttggtaatgattttgatttaccttcccatcatcatcatagtagcttgcgggttggttcctggagactcgtcaaacgttgaaccatcaataactctgagcctgtcgacgccaagaactttgcggttagggctcacaactttacccacaagacatccaccatggtagtgccagattgtgacaacagtgtctttgcagaactgagccattgatttggtatcgttcagttgctttggccttagattgatgtttgccttgacgcttaagctaagcatcttgtgtacgttttgcttgtcacactgcgtgtagtttaagaaacggttagacgtcaccactttggaaacaagacgaatggcttcaacacagcgttggagatcaccgggtgtttaaagtattgaaggtgactgaggggttgcatcacattt

SEQ ID NO: 12811 - DNA, 639 bp, Arabidopsis thaliana landsberg
  unsure (1)..(639): unsure at all n locations
taagattcaacgtacaaagatgctctttccaaataaacatcgatatttgtgtatataatacatgtaagtacgtgattgtgagggcggactctaataagacgacctctgtcaataactctcttcccctctcttctctcctctggttcagtggttcctctatctttctctccctctgatcactatgatggacgcataccacaatccttcggcggtggagtcgggtgacgccgccgtgaaaagcgtcgacgacgatggtcgagagaagagaacgggaacattttggacggcgagtgcgcacataatcacggcggtcataggctcaagggtgctgtcgttggcttgggctatagcacagcttggttgggtggcaggaacacagttttggtcgctttcgccatcattacttactacacgtccaccttgctcgccgactgttaccgttcgccggactccatcaccggtacacgcaactataattacatgggcgtcgtccgatcttagcttggtatggattcatataaacgaattcattttgtgtctttatcagcattgtttccacaggttcttcagttttntagacattttgtctcagatgaacaaggattttggtctactgatatcattagatgttgcctacta

SEQ ID NO: 12812 - DNA, 883 bp, Arabidopsis thaliana landsberg
  unsure (1)..(883): unsure at all n locations
atgtttctacctgattacatatatccatcagaagatgattgttaatctcagatttgacttgcttgtgtgctgcagagctgagtatgacccggaacatgatctcttggaaaagaagtttatgatgaaaggtagatggtatcagagaaaagatttagaggtaaatgccttgtctcttctgaattcttctgtatctacgatagtaataaatgggggttgtaacaatagaggtcctaccgttttttgttcttgtaaagtcaatctatttattgaagtaagatgagagtatatagtttttgaaacttgtgatggtaataataagcatacgaaagtaatagaaaacttggttagtaagtgaaaactgttttcattagccattttgttttcttcctggcttgagtgttatttcggtgtgttgttggcaggttaaaaacagtaggggagatgttctccagtgtagtcattatatgccagttgaacgccctgaaggaaagcttttaccctgtgtaatatactgccacggaaacaggtactggaacgtttgttaaagattttttgagctagttaatacctattaattatcaggaatatgattgagttgtactactcatgggcctttggtttacttttggccctcttgattcttcgcattgcttaatggccctgcaattttatcttatagtggatgtagagcggatggtagtgaagccgcaattgtgttgctgccttcgaacatcacagtttttacccttgacttttcgggatcgggtctctcaggcggtgaacatgtcaccttangctggaacgagtatgtgctccttaatcattctggttatctctctactcttcaaatatatngtactttgtaacatgtttgtcaatttat

SEQ ID NO: 12813 - DNA, 715 bp, Arabidopsis thaliana landsberg
gaacacctcaacatgaagtgttgctctgtcaaaagaaaggatctagaaaaacattatgagaggatgttaaaaagattctacgctttaaacagtatagacgatgtcaatctcaaacagacgtatttgaattcattaccagagccacttggaaataaaacttcacggttgttatccttcaaaaatgcaacagttgctcaagcctcattaggagaaatattccagatgtctcttgcgacactagaaaagctatgcaatcaccagaagttcttcaagcagatgcatgaggaaggaaaactactaaggagagcatgtgatcgttcagatttctctataaaatgcaaagagaagaagtgtggatgttcaacaaattatcagaaagaaaaaaaattcaagaaaaaatggcagaagaagtatcctcatctgtctagcaaaaagaagtggaaattcttcaggaaaaagtcacaaagagatttcaagaaatcagacaggtattacatctgcaagaaaaaggtcactatgcaaaacaatgcccaaataagaaaaaagagataatcttcttggatacttagcatagatagaagatattgatgactccgacattgaatcaatcttctcccttgatgatgaaccaaccgatgatatagttctagcaatggatatcaaacaaaaggaagaattcatattaatccaaccccttgagaaagaaaaaggagga

SEQ ID NO: 12814 - DNA, 921 bp, Arabidopsis thaliana landsberg
atgattgggaccaagtaaagtacagaaactatcgtgtttcgtcttgtctccttgtaacttgtcagtcactatggctgtgggctgaaagagcaaggttctaatcttttcagatatgaagccccatatgaattgtttcgttcaaatacctaagaattctttttaggagaccgaagtaagatattgtttgagcctgcattctttgatacacgaagttgacagcgtattgagtcaggtcttgttatggttaaatactgtaacttctcggcaaggccttgaaaataagtaggctcagagaaaagttctgaatcgaggttgccaatttgttgtggcagaggagtcgtaatcgagttgcaattagacatggctgcttgatgtaaaatatctttggcataagctgattgatgtagaaatagacctactaagtgagcttcaatctccactcccaaaaaatatttaggtggaccaagatcttgaatagaaaatcatgagttgagagatatgagcagttgatccaagagagtttgatcacttcctgttagcaatatatcatcgtcatagagaagtaataccagagtttcgccatctttgtgataggtgaagagagacagatcagacttacaacatatgaatacaaagtctattagaaaattgctgaaagcgtaagaccaagctcgtagcgcttgcttgagaccatagagggctttgattagtcgacaaacatgagatgatttctctggatccacaaagtcaggtggcttgagcctgaagattggttcatgtaaattcgccatggagaaaagcgctcgtgacattgagctggtctatggtccaatccttcgaagtattggatgtcggaacccaactggcttagagcccgttcgaacaactgggcctaaagttttaaaaaagccccaagccctt

SEQ ID NO: 12815 - DNA, 554 bp, Arabidopsis thaliana landsberg
cagagccgtgctatgatattaatatagagggacgtggcagagtgatcgtgttgataacatgttgaaattttattttataaaataaaaacctttaccaattcattcaatttaccaattcgttagtcaattttttagatctttctagctcttccatcattagtcaatttaccaattcgttcctcaattttgttatactctaatctctaggattttgttagaatttgaaattcaaattttgctctctctctagttgctgcaaaattaatttgaatccttactctctggtatagctttatcagtcaagtttcgactatggccatgtacaaaaacgatgtgaagcaatttgtcactgttttaagacgtaacgccaagcacatccgccactggctcgaggagaatcctccacgccctcctccaagttagtcctctctctctcacatgatttcttttgatttcacgaaggtgtttggtttggtgatttgatttcataaaactggtttagtgttctatttactgaattcctttttgtatggttttgattcggtgaaagtatt

SEQ ID NO: 12816 - DNA, 393 bp, Arabidopsis thaliana landsberg
atcctcgtctggtctttcttctccattctcttcaatctccacaaatctcaccgtgaaaaacgaagaatcctccaacaaatgttcttcaggaatcgatatgagccaagatccaaccgacccggtttactacgacgacccggatctaacctacacaatcgaaaaaccggttaaaaactgggacgagaaacgaagacattggttaaatctacacccttcgtttatccccggagctgagaatcgtacggttatggtaacaggatcacaatctgcgccgtgtaaaaatccaatcggagatcatttgttgccccctcttttaagaacggagtccattcctgtcggatttaccgtcatgatatataataaacgcgttctggcataggaagaaatccattc

SEQ ID NO: 12817 - DNA, 456 bp, Arabidopsis thaliana landsberg
tgatgatgggaagcttcttggctggaagcaccgaggctcctggagcctatgaatatcgagtaattgcacacaccttcctactttggatattgattaaccaacttccttgatattttcctcaatatcttgctttgtttggtctgtttttatagaacggtaggagagtgaagaaatacagaggtatgggttcattagaagcaatgaccaaaggaagcgaccagagatacttgggagataccgcgaaactcaagattgcacaaggagtggttggagcggttgcagataaaggctcagtgttgaagtttataccatacacaatgcatgccgtgaagcaaggttttcaagatctcggagcttcttctttgcagtctgctcacgagctattgagagataatacccttagactcgaggtatgtcgataattgtactccttggaaaactatcttaagctgcgat

SEQ ID NO: 12818 - DNA, 628 bp, Arabidopsis thaliana landsberg
tttttttcaagtcttttcacaagtcttcttgtgcaaggacttaatgcttaagttacgctcccgcaaattaccatctctcatcttaaagaccccatttttttctttctttttgcatctgtgtttccaagcaatagagacatatttgaacataaattaaatgacaaaagatagattctctttggattagactgttgagtttaattttcaacgtttggttgccttatctttataacttagaacactttgaattttctagtcaagaggacttgttatgtaccattcctcggtttctaaggacttgcgcactaatgcggagtcatattcttcttcttttttatacaaaaagtattgttagaggatatagaaatatgttttagtgtatatactatgcaaattgcaatatctaactttgaaacaattctcaagacgttgtttcaaaacatatacacttatgtaaggattgagtcattgagatcgatgaataaattacatgatcgacgtgatgctgtgaatctagatattatacaccactcttctgactctcagatcattgtcaaagctctcaatcagaaactccaagtcaaggagtttcacgggattctccatgatatcctttctctatcttctt

SEQ ID NO: 12819 - DNA, 818 bp, Arabidopsis thaliana landsberg
agggaagccgactgtttgtttttcaaatactgtctgtataccctggacaaagaattgaatctgttatgtgatcattacagttttgctattaacgataaatgggctgtgaattcggcccatgtatatacccttaattaccttaatgggctttaaataggccgccgttggtcgtccaactacaaatttccttattaacgtctaaataacatatgcaaaaacaaaaacaataacaacatttctcaaggataggctcttttgagcttaattattatctgttgacaaaaaaaaagaaaacaatttcgttatgtaacatatttgaataaacgtatttaaaaattaaagcaaaaatttgcaagatgtcaataaaaaaatcaaagaccgtaagtgaattatcttggatgatgtgtttgatctgactaatgatatgtgaccgaataagcctaatctggccacatcaatgtctaaacacgtcggtttaatcaaataaatctggtctagtttttttttttggcttatcgagtactcatcttgctaatggtaaaagattaatctccgaacgaatggtcgctaattggccatgtgtccaaggaatttaacaaacagtaatacttttttttgtctaagaaaaaattgaattccttaaaatccttttccattatgtaattaatagatatttttctgcaatccttttttattatgtaattgatagatattttttgcaataaattgaagtttatcaattagtgattataaaagattttttccactcaggaaatgatactataatgattgagaaaaaattatgatattttattaat

SEQ ID NO: 12820 - DNA, 1064 bp, Arabidopsis thaliana landsberg
ggcaaaggtaccaaatctgtcaatcaaatatgataatcggtgtatcgctaaattacggcgttttttctacaactttactcttcagaagcacggcaacagatcttttctagctgtataggccattcctctccaagaacccggggattaacctccatggcggcatggaaatccaacatcgatacattagacaccgctcgcttttgttgacttgctaaactcaaacaaggctcgatcagccttctcatatatgcattcaacccacgattaagaagattagcagagtccatagataactttatcccttccatctccaatttcttctctaaccgagctctcaatgttatcatatcaggtaactccccgctgctttgacacgtctcacggttgataccattgtacgtactaaatctagctttgctcttaagatggaaagaaacaccgagtggagcggttaaggggcttctgctttgcacactcggactacccgtcatttgctcaacttcttctccatcttcaacagagacaacttccataggaagtctttgagcctttgacattgactcatcattcgtagtagtgagactttgaggcttcccaagtggaccaagaggactaggccggtctctaaacttcctcgacctgcatttcctcggcgaaggaggaaacgcgggatccccgtaaagagatttcttcggatacctcggcggtggagacttagcaacacttgcattcttcagaatcgaacgtacaagacggttgtgtagagaaatgttctctctaccaaccgtcttgctacatagcttatcgaactcggacttgcttatcctcgaggtaaggaattttccgagctggtcgaagtaagtgtcagctctctgatgcccaattttctgataaattagggctttaatctcaagtgtattcaatctcgaaaaacattgatctgaccccatcttccaacaaatttacacctgaactaaatccaaatccagcttcattcaaagatccaaaattggtctcttctctcaattccaagacctaaaaaaaaacaattcaaagtcaaagac

SEQ ID NO: 12821 - DNA, 729 bp, Arabidopsis thaliana landsberg
taaaagacaagaagaaaaggagaagaaattcaagtcggttttcaagaaacaagtgaaagaggcagaaaaaaggcaaagttgacatggaagaaagtggatattaagggtaaggagtcagattttgacaaggactaagaagaagtaaaaacttttggtttgtgtcaagacttggttaatgtgtgttttttggtattattatcatctaggtgtaactgcggatcagggaaactcgattactactaacgaaagggtggttgttgaaccgtcttcgaaagtgggaagttggaaacttgcttctaatctcaagtccacgcggcagtataatgttcagtaagactccttacatgtgacctttctcttgttcctgcactttaagatctcaactttgatcaatataatggtgtgtctacagggtgggttcttcacttcctccttgctctatctcttgcgttgatgaaccattttctgtctcagtttcttgtaaaggtaagccttatgctttaattttgtatagtaatatgtctgtgctgcaaaatcttaaatagtgttactccaactaactgacatttttataatttctactttgtttatggaacagagaaatttgacaacagtaggaaatgtttttagttacaaactaacctgatttagaagagtacttttctgtagaatgataatttacttcacaagcttttcatatttcagttaatcctggacctttgaagcatg

SEQ ID NO: 12822 - DNA, 710 bp, Arabidopsis thaliana landsberg
tctttcggcgtaacgtacgatgaatttctggggtacatcgttaccaagcgagacattgaagcaaactcgaagcaaatacgcgctattattatttctcaataatgaacaattgcttctgtttatttggcaaagtgtctagtttctatgtcattcaaccaaataattaggtttattgttttcaaacaattttgttgattatatatagagaagattatatatctactttacaacaaaaaaatcaagactgtggctgtgtttatgaagagatgacttgatttctaatgttttcattcaccatgttcaagactgctcagtaaaaaagctttcaggtccatgatatgaaacaaacagaagataagtgtggaagtctctcaagaccaccaaatgttatgagccaaagccttagacagttagacttagatcttttaatcggacatgtttgctaaagtttgaaagtagaaaaagattaaagcaaaactttcttgtaacccacgtctctcttaaagaattaggttaatctttggaagttgagactttattgaaaccaaggacccctatattggtcaccaaaactctaacacttatcacgagaatgcggagagaaacaacaaagaaagatgggagaagatgaataccatctcaaacacacgaccttagcgcgctggaaatcaacaaaactcaaacgttcgaacacagatcttaatatgtca

SEQ ID NO: 12823 - DNA, 607 bp, Arabidopsis thaliana landsberg
cgcacatggtgaagatgctgtcgattctgatcttgattgattaagaggagttgaagattgccaaccggataggtgcaagagggaagggtatagatagaaaaggtaaacctaggtggattaaagagagaaaagggagagcacccaactacctaactctatggcactcacctagtaaactgatgtcattgcggaccaagggacacaacacatcaacactcatttcaaagaagcaaatcagtcataacacaaagacaaacatcatgagcacacaacaacaaacatctcgttgctatatgttccttttaattaaatggtggtcttttcatacaaaggggaaactactttaaggccatcgaaagacaaggggaatgataagacatgcaggataggagcatgagcacaataaaggatggagctaaggcaaggatggtaaccgataatggagaaaatgcaaccaagatcagggtaggtaaacaccattctcaaatcgagatggaaaaggggatatttcaaaaggcaggcataagataagcatcatggaaagatctatatattacaaaggtaagggagataacaacaaaagcacacaaaggatcgagttaagaaa

SEQ ID NO: 12824 - DNA, 738 bp, Arabidopsis thaliana landsberg
atacccatgaacaggaatgttttcatcgaaccatcggtctgtttctgaagaccatgaaaagataaaactgatgtaacttaaaacaaacacaaacacacgaactttcttttgtccaaaagccttatggaactgacctcgatgtacggagagtttatcggaaatttgatttacaacagttaggcgaaatcttgcgtgtcttctccatccacaaggcaaatattgaaaatcagcaacaaccagaaacagagaaaaataattagcatttttttctcccataagaatcctgcaagaaccaaaaaaaaaacaatggacatgttctcgttaaaggaaactagacgaaaaaacaacattagacatatataacaaaattatccttttcttaccatttgcagccaccaatcacgaattcatcagaatcgattaactcagattgcaaattagatgagaagttcttaatcatccaagtgaactcattccccattggagacgactcgtcgcaaccaaataggtccaacactatcaaagcgtgaagacaagcagcaattttgtactcattcaagtgaactcgttccccactggcactgttgtgtcttaaccacgcttgtgtcgtcgtttggtcttcttcattatgggtttggtcttttcttaacttcaaaaatcattagtctcccctaatgagtgatgaagtttcagattttcttagagaagtaaacttttgacagattaaaatatttttaa

SEQ ID NO: 12825 - DNA, 587 bp, Arabidopsis thaliana landsberg
cgtcgtcacggcttgcacatttttacgaccataccgaccagccaacatagcttctaccggcttagaagccttcctgcttcagaggaagcaatcgtggtcaaatgctcctgccagtgtcaaattgaggcaactttttgcgcgacagacgtgggtccggtgtgtgcaaaactgagggtggctgtcacgtgggcgcccgtagtctgcaatgtgatggtttgccaaatagggatggggtcggggtgtcgggctgatcaggtgtgtaactgggaattgtttccacgatggggatgggaatggaagggcaaaataggaaatgaaaaaaggcagaatagaaaatggcaggctaccgttgcagccttaataagtagtagagattagtggtgattaggaaggtatgagtttttttggtctagccaccaaatatgtaggataagagatggattggttagggtgagaaatgctagagcaaggaaagattccatctcagatgatcatgactcatctcacgatctggtttgactctaatccttccttatcgaggttgatctcttcatttatgggtcttggagttactatcagagttaaag

SEQ ID NO: 12826 - DNA, 781 bp, Arabidopsis thaliana landsberg
tgcattgtgaactgattttcatgtgtcgtacgtaagcataaattttaatttagtactaggtgatgaaatgatctggatatttttcatttggctcataccatatacttcttatgaaggttattgtccgtcaagatctgctgtaactaagtttcgagctgaagctatatgcgtcgaattcatgaagcaatggaatgtgggagtatatttttcactgaggtacgtgagtaatatcatagatgactgtcgacttgccaattttttttttggtcgggactgtcgacttaccattagattagtggtttctcagcttctctaactcaaaaatacataatttcaggtttcaggagatagctggagccttggattctgctcttacttctccttctctggttttcattcaggattcagataaagagagttcgctcaacttaattctcagacagagtgatactcttttggagtgcttacgatcgtgctggaaagaagatgttcttgttttctcggctgctgataaatttcttcgcttgaccttgcagcttctttcgaggtttgtaaaatttgactgtaatattatccacgtttactagtttcaattctaattttgattatgtgtaaatggcctgtagatatagcttttgggtgtcatctgcgttgaataatagaaagagtaatgccagcccgagtcctggatgtgaatgggctgtttcagcaactgcagaagactttgtatatgttagttactcgtttctgggcatcctcttattttggactttttggcatt

SEQ ID NO: 12827 - DNA, 771 bp, Arabidopsis thaliana landsberg
ccatacaaattccagcatcctgtacagacggaaaacttattaagttatgcctagccgtaactaatttgaagatcaatatttaacatggatattgtacctcagtaccgagttgtatattaagtgcctcgatccacatattagcagcatatgcaggttgtacacgagtccacatagacatgacagaaataacctgaaagttcaatgtggcttgttgattaccatgatgatcttaatgatgatagatctttaagaatatcagggattaaaaagtaccaagtgagcatcaaggggaggtgggtagttatcgcctagagtgtcgatccagctgaatatcatgttgtgatatccatacggtttgcccaacatactccgtgcatattcccacgcagcagtattgttgaactttgcccggatatcaggatgtagaggaagcaaagctacttgaggatttgaattatccttcaaagtcagctcccaccattcatcccaagggatcacaacaatgatttcttcaccctatggggaaaaagatagtaaaatatctctctttctatccactaacttcaaaatgtttaggtctaccttttcgttctcatgtcctgattcaccaacccaaagattccccaaatcatccttcaaacaaacagcagtatgaccagcaaaagccccagtcacccatttctctaacgtctcaaaaccaccccatctacctcgaatcttcgacaccgccaagaaatcaccagaatgcacatcttctgggttaatcattga

SEQ ID NO: 12828 - DNA, 805 bp, Arabidopsis thaliana landsberg
agaacattattgtgtgaaccatccgggaccatccgcaccatgtggttagtataaatcatacatataacactctaagagttgccagaacagactttttacagtgcatttgcctctctccattcccattcgccaacgcgactttgccaccagaaatattcgatattttgccaacctacaagagcgtcacactctaccgttgctaccctgttattcctgaccttgcaaggtacggatgtcctgcgataggttcggtctcagtgtctgacaaccttgaaaatcctgttagctgcgaagcccgtttcaccgtgaacattcctacgagtttcgttccaaacgagaaaaggttgaatataacaagtttggtaagggatgtaagaaatggatttgaggtgaggttgagaatcgatgaaaattcgtgtcaagaatgttcatcttctcataaatattgcggctttaccggaaccttaccattagaaactaaatgccggccactcaatctaccaactcgtaagtatcttaatcctttcatatccattttctttaacaactttatactgaaatgaaactgaaaatcattattgtaggcttgtcttctgaagcgaaaataggtgttttaccttctcctattctttcaaataaacttaatttggttatgaatactgtttttgatctttttaaccaaacaattttgtggtttcagctacaatagcaggtgtttctctacttccattcttggtcttaacattggttgtccatattatccgaaagcaaaaaacttcaaatgataagggtcaacaagacctcc

SEQ ID NO: 12829 - DNA, 1115 bp, Arabidopsis thaliana landsberg
gatcctctgtactcttgcagggaatgcacatgacgtagtcaactgaaattaacagcaattagagatttcactttaagaaatcaacagaaggatgtttagttgaatcctaatcttgagaggaaatgttacttacggatatatcctcgtaataacgattcaaagtccctctgtgtaaatctccccctaacaaccaacctttgctgatcatcaagtttacccttattacccagctcagcaagcaagaacgccataacatgatcagggtttcgatgcatcctgaaaaagttttagttccaaatacaaacatgaaaactcactacgttctagtaacaatggttccaaaagtaaaagtaaaaaagtttgaaggggcagagatatggaaatttcttcatacgtcttgcaatagtccataaagttgacaaagactgtcttctttgtgcctttcgctgtctcttcacgaagaacttgtggtggccatataattgtaagaagccaaattccaacaagctccggactattttcacgcaggatattaaagaccctacgaagaatctgtacatataattcccatcagaaaaagaaaaaaaacgagcaggaagaagtatgcattgacttaaggaaagaatgctccaaagcaatatttatgtaagtcgcacgttctagtaaccaaagagaatcatctaccaactatgcatgcttaatacaagatcctgaagtacaactgtttacttggttttcatttttggttgggtcaaaggatagctgatgtaaaagggcaacaacaacaatcaaaccaaacgaaaaaggaaacaaaatctattgtcttaatttagggaattaatcaaggagtccttgtagacaaaaacaaaatgtcaaaagccaaacttacttcttgctcatcatccttcacttctttcttgttctcattactttcatcagccatgatttactgccaagaaaagcattcagaaaacaaaccaaatactaaaatcaagaatagaatgtgtatgatcatcaacaacaaagattggactctgttacctaaaacatgataagtagtaatttctattccgagtctaaaacatgataaggatttacctttggtaacgaagccc

SEQ ID NO: 12830 - DNA, 727 bp, Arabidopsis thaliana landsberg
accgttttcatgtgtaatccagattggtatgaatttctatttaaattgttggtagcttaaccgattgaggccaaatcaaaccaatctataactcgaatcggtactcttttcttacaaatgattcgattcaattggcatccaatcaaatgtataccttttttgttttaaatcgtaagaatattttcataaatcagagctaaacttaaaactgtaccaacaaaaccaacatcaaaccaaatggacaccttaatccggtacacggcgaattaactgtagaggataaaatcaacaattcgacgagtaaaacgaaaaatatctaaaaatacagggcaccgaaccaaataaaggtgagaatgatgagaagccgtttcttactcttcattgttttcttctctctatccctcttcatttcctctctgatcgccagtgatttaggcttctgcaacgaagagatggctttagtcggaggtgttggcgatgtccctgctaatcagaacagtggtgaggttgagagcctcgctcgtttcgctgtcgatgaacacaacaagaaagaggttccaaatctctcatcatcttcgattttttcacatctctcgtctcgatatgtgtgttttatgctattatagtcttgatccagaacacgattagactaattttgtccggagtttctctattgatctcaatttcagttaccagcagatcttagagagtgtatattattcggtga

SEQ ID NO: 12831 - DNA, 873 bp, Arabidopsis thaliana landsberg
gaacatcaaatctttttgtgaggaaaaacaaagatagaagaaggggctccatcagttgttaaatattggtctcgtcttgatcaacttagcttagaatgccgaagcctcaagagattaacatatgtcccgccaagcataactatgctaagcctaagctttagtgatatagagacgattccagattgcgtcatagatctcactcggttacgaactcttaccatcaaatgctgcagaaaacttgtttcgttgccaggtcttcctccttccctagagttcctatgtgcaaaccattgtcgatcacttgagagagtacattctttccataacccagtcaagttacttatattccacaattgtttaaaactggatgaagaagcaagaagagcaatcaaacaacaaagggttgaagggtatatatggttacctggcaaaaaagtccctgcggagttcactcacaaagctacaggaaactccataaccatccctctggctccagttgcggggactttctcggtgtcctcaagattcaaggcttgccttctcttttcgccaatcgaagacttcccaactaatgatataacatgtcgtctaagaatcaaaggaggtgtccaaattaacaaattctatcaccgggtagtgattctagagtcgtctaaaattcgaacagaacatctgtttatattttatggtgacttgttttcagaaaaaataggcgtagatgtgagtacaagcgagattctgtttaaattcagctgcagggataagcacaagatcattgagtgtggtgtacagatctttaaggaggaagctgagagtagcagcagcagcagcgaagaggaatactttgatgctgaaagtagcagcttcgatctt

SEQ ID NO: 12832 - DNA, 470 bp, Arabidopsis thaliana landsberg
cacaagagtaaaatcataaataagacgagagattggttccttacatttgttggttcaacccctcaatgaatagtttggaccactaaaagcttggaacttggcttccttctcagcctcttcctcttgctttctatctttcccagctccaacctaagttacagatagatcaacattatatttctactccatctcttatctctgataccattttttgcacatactacttttaaacaagttatttacctttgttgtctctttagtagaccgctctacatttgaaccgaacacaagtttccctcgattttgttgcgtagccttctctgacccactactactactacttgcaacaggatgtgattggccgttactgttagcagcaccaggttgcggttcataggataaaggtcgtccatccaaacgtcttcccgaacccgtgaaagggttaaactttggatctgttttcagccaca

SEQ ID NO: 12833 - DNA, 840 bp, Arabidopsis thaliana landsberg
tactgtttctgttattatcaatcaatagcgtcatgaacatttgacacaaaagcaacatgcttgattcttagcttaaattatatgaggataattacctacttttttatatattaaatcttcatatgaatgtcaaagtcaaagactatagacttttgcaataataatttgacttttctaaaggaaaatctaatgttcctctgagagaagagaggtaattaaagagatatctaaccggaaaatatcccatgcactgacgagatcatcaggcggttcaggaaaaccgtctttagcatagatactccggtacactggaccgaccgatggacttcctccatcaacgccttgctttcccttctcaacctcaacgatgtatcgaccagtcgccatttattatatctgcgtatttgcgtttctttctatgtatacatgtgttttgttcgttgaaatgtaaaaggagcaagtagagagaaatttaaaatggggtgtgaatgttataatgatgattgaggaacaaaacatttcaaggacacgagggtagctgaccaatcctcaatattgggtggtatttataagaaaattaaatattatttttttttccctcaatgaagcttattaaattttgtctatttatcaactaacaaaatggaaataatttgacaaaaaataaaaaagaagacataataaagtgttaatacacttttgattttattacctttccgtattttatgatcagaatgactattctcgactagttacagtgatataaactataaagtttgacttttcttccacattgttaaaacatttgaatgatataacaattgattaaatgtaaataat

SEQ ID NO: 12834 - DNA, 1133 bp, Arabidopsis thaliana landsberg
ctcactttctctattcatgcgacccaaaaaatggaatctttaatgagactcgtcttagttctgtttccgttcttcgtcgtcttcttcgtacctcttgatcacgtttcttcagaatctatcagcagagcaaattttccagatggatttgtattcggaacagcttcttcagcttaccaggtgacattcttcttcttcttcatcttctccaaactgatccaacaaagaaagaacgaagattttgacaatcgcaacattttcttgcaagaaatcagttcgaaggagctgtgaaagaaggaaacaaaggagaaagcatatgggacactttcacgaaggagaaaccaggtatcaaagaaacaaacccagaaaacatcacgaaggttttagttaactcaatggtatcgttcttgatcaacaggaaagatactggatttcagcaatgcggatactacggttgatcaatatcataggtttcacgtaagttttacctaacaattacaaatttgttgacttaagcttgaagataaaagtagggttgcttcttgacagagcaacctcatccaaacaaatctaagataagacgcaacaggacacaaatgagagaatctaagaagcaagagcctttcttttgttttgttgctatcacagaatgacatagacctgatgaaagatctgagaatggatgcttacagattctctatatcttggtcaagaatattccctagtaagtctatttcattcagctgtgatatgatgagtaatgttgtgcgtttcgacgggtctatttaaactctggttttaacagatggaacaggggaagtaaacccagatggagttaagtactataacagcctaatagatgctcttttagccaaaggaatcaaaccttatgtgacattgtatcactgggatctcccacaagccttagaagacagatatgaaggatggctaagcagagaagtggtgtgagtatatgatattttgataaaaatgtgaaatcctgatatggtgagattattacgaaattaaaaagctaaataaatggtgcagggatgattttgagcattatgcattcacctgttttaaagcatttggagatagagtgaagtactggatcactttcaatgagcctcatg

SEQ ID NO: 12835 - DNA, 689 bp, Arabidopsis thaliana landsberg
aggagacatcccgccgcctgctggcatgtcttgaagaacagctagaatcctttggttatctgatggatctcgctgaccggaaactgtaagctctcttcatcgtctttgacgtagagaaaacgctcgaagatttgctgagtatgagatacacaagcccttgaatcagagcaaaaatgctcactttcattaacatgccttcaaagcttccttccattgatgttttaaagattcagacaagaattatcggtacgttgactttttttttgttgttgttgtcttaagatctatgagttagagattgatgtttctaatcagacagtcgctggtttatatagagatcgaaaagagaagatggccttatttgaccagaggcagagacctcgaagctacgaaacacaagtaaacaatttaatttatcgcatatgtagaagatttccatttaaactttgattttgacctggtcaaagtagacgtgagttttttttgtgtatgaatattatacatctactagataattcgaactcttgtacaaaaaaaacattctacaatcggaaacaaaaagacaaagaacatgttgtcatgagatacgttttgtttattaaacacgtttttttccggaaaaaaaccaagtgtctctaaaaacatcaatattcaaattgtcaatatataatgatgcgaattgggatccc

SEQ ID NO: 12836 - DNA, 1357 bp, Arabidopsis thaliana landsberg
gaacatcttagttgtttctgtctttccagacccactttcaccattgaccattatacatttgttcctgccctcattggtcattgccctgttgcaaagtttctcaaactaataaataaaatccacttctgccacttttatagataacaacaccaaaatgaataaataatcacctatatgcgatgccaccaattgcaaaaacatgaggattcagctctttgaaataggcttccttgtacttctccataacctcagcatcatagagatgggggagtccttgaaagggattgacggcaataagaatatttcctgtataagtctgtcatgatgtcaaaatattataacagactcgcctatctctgcattaactaatggttttaaccaaggaacaagatgaaaataattggttttacaaccagaaataaaatattcttacataaatttcattgagctcgtatctggttgccaaggtgtcaagaactgcaggctcatgcagataagataatcttgtcctgtcctctactccctctgaaggagcttcagtgtcttttggatagagtcttgataagttagcaataacctgaccagtaaaaggaaaggtgaatcaggagtatggaaagcaaaacagcaccagtaaaagcttgaaatggcattagacacaaaagcatcatataactagaagacaaaaaaaaagttttacatctctgccatcattggttttaatctctgcttcctctccctttatattaagtacaaccccatcaatccatgctctttctgggtcttccacccaaacatgagaatccaccattatgttttcagccatttttgtaaatcttcctagcatttcagcaaacaccacaagcttttagcagatagtaagggtacagagctaaccattctcaaagataccaacatataatcaaattatggaatccaagactagaaagggttataaaatcgctggatctaaaaccattctcgcattgacaaagcaaaatacctatgaaccagatttctcctaatgacaaaagaatcgaattaggcgaaaagacaaacacctgtggctgtaaaacttcagcaattccgatcgacggagctattagacctttcgagaagacggtgattttcgatattcgtataacaccaaaaccgtcgaagctcgaatttcatggacgtgatcgcttcttcttcttctgggttcaaacgcaaaagtgagaaatgaatttcctttctcaaggcgtgtgatcgatttctgcagagagtgacgcagaaactccccttcaatttcgccattcctgtggacgccattgtctctctctttccctcccatttttagctcaaggagcaaaaacgccag

SEQ ID NO: 12837 - DNA, 727 bp, Arabidopsis thaliana landsberg
  unsure (1)..(727): unsure at all n locations
taagatggatcgcatctttcgctgcattgtcagtcatatgtttcagatttaaaatattttgatcttatgtataagtcttcttcttattttttaatatatttattgcttatattttgttttgggagtcttttgatgatactggatcaaacgaaatggaagtactcaaacaatatgttaacttcgctattagctccttacctcttctgtagccttcctttagttgttttccaattcttgaggtaacaattcatacacacaaaaaataccttttgttgttgttcttgagtatgtaacaatgatcggattatgtatttgatttgtattttcaggaccgggtttgggacatggatcgctctcctcagtcattctcaggcttttcctcccaaaccgtttttctggttaacaaccttagaatagtaccaatgagatttgaaacaatattagttacgatattaatagtcttcagtgttgatatatagtaatgttagagaacagtttgcgatatgaatttttattctatttaaactagtaaaggtaggcaatccggtttagaggcttcgcacgattactcgatactcgttactcgtctagtacacgttacttgcttcgtaccaccttgagaaaataagtacccgatactcggtttctctttatcattttatatacatacanttcggattgtattagtttttaaaaacatatgtgaaatttagattaaaaaattaaa

SEQ ID NO: 12838 - DNA, 800 bp, Arabidopsis thaliana landsberg
aagttctgattgtttttttcctatgtatgttattgaggggaatgtggctgtattctaaattcgaacatttaaaatagtaaagatgtttgagtttttttttttttttttttaaaagatgcttgagttatcgatgcaaaaaaatgttctatctaaaggatcaatcaccaataaattttattttactataaactaaaaattgcacccacaaaaaaagtatatataaaaactaaaataattactgcgaaacttttgtgattttatgtgttgataactattgattcgatcttcaaatgaaccaatacgtctggaattaagtctttaactcaatacagtttctgtgaatttagttcgagaaatcatacaatgttgtaatcatatttgttttatagctagtaatcatgccaaaaataacaaaagtaaaaacagaagaaaataagatcatcttcattggtagtccttaaatagagtttttcactaataaaataattacaataataataaaaaaaaagagagtgaaaaactaaaaagtttctagaaactataaaatactctctacaagtgagaaactatgaaatactctctacaaacaatcatgacatttttctcttctcaattggttaatttttttattaaaattaaaattaataaaattataataactttttgttttacaaaattatttggatttctcctcgatggaaatattctaacacgagaagaggtagaatacaagtggcccttacaaagtgtatattaagccgttggtatgtcttttatctcaacgatcacatgatttttga

SEQ ID NO: 12839 - DNA, 551 bp, Arabidopsis thaliana landsberg
ctaaagcacatcgaaatgaccacaattcttatttgtaatcggctatggtttgtatctacattaatctcctacttcgttctgatacacatcattgtaggactcgtcttctttgcctagtgccacagacactaggcaaagcctcttttacactcggcaaatgctttgcctagtgttgcactcgacaaaaagaagtcgacaacgaagggatcgacaaagtgtctttgttgagtgccatttttcgagcactcaacaaaaactttgcctagtgccacacatcactcggcgaagaaaagtttccatgacggcgggaagcacggtaacggaggctttgccctagtgcagcactaggcagaggcatctccgttaccgagcgcacgactaggcagaggcggctcctttgccgagtgcagcactaggcaaagtgtgtttctaggctacccgcgcttcttagctggccgagtactatggttattgcactcggcaaagaccctctttgccgagtgcaactactagcaaaatgaccagagcaccttttttatttatttttatat

SEQ ID NO: 12840 - DNA, 1058 bp, Arabidopsis thaliana landsberg
aatcgaggatctttgaccacatacattagagcgtataaaaccattaactaaagagtgactagttttgtacaatgaaatcagtagctaaattgtaagcattgtgaccgattcttagtaataaatcataacgaagttgagacactgaaatagtggcaaaaaacagaactgattgatgacgtcttttgtagtcaatacttatgatgattttgttactatagttccgtcataatttgcgacaatattgtaacgttataatagtaagaaattaatacgttttggcgacgataattttagttagtaattgtaacgtataagttaccatttgttagtcaccttttataacgttcggtgactatttttgagttgtaaatagagtcggaaatgtcacgttactatagtatccaaatgtcacggttttgagactagatgttttgttagtaatattaactgttttgtcactcgtatggtccgttacgaagtgtgacaaaatagatactacatatatttgtcacaagattgtgacgattttgatacgaaattatttttgtgacgagtatattgtaactgatagaaattgtcacaaaatcgtctcagtatttatattgtgacgatttttaaattattgggacgaaatgtttcgtatcaataaaagtatattcttgtagtgctaccccttctctttcttttttttcttatgggatgaaagctaaaagttacaggagtaaaagaaaaaaaatcctactagtttatatactcaaggatcgattaaggaaaggagagaaaccttaattataaaataagcaaaagtcaaagactcaacccctgaaaaatgaatataaacatataaccaccgcctaaatcttttcaaagtaatctctttacaaatttatagctaaactagataattactggaatatataacatataggaaggacctaaaacctaattacctcaataaaataagaaaaactataattataaaaactcctagacttaaaagtttaaaagacttaaacctaataatgtaatgaaacttatgacctaaaagcatcaacaat

SEQ ID NO: 12841 - DNA, 501 bp, Arabidopsis thaliana landsberg
  unsure (1)..(501): unsure at all n locations
tgaatttattcaatatttgtatcattagggaactttaattcattcgtccatcgaagagggattggtggggaggtttcagcaccactttgttaatggtgaaagcaaaattatcgacactttcagttttgttgattatgacggtgactataggacgagtagtttaggtttcaaaatagtcttctatagaactactannnnnnnnnnnnnnnnnnnnnnnnnntcttaattttgctgaaattttgctgaaattttgtctgggacattagacaggcagatattgattggtttgtattaaaaaaatttatttttctaatttcgctaaactatagttattttctaaagtttttctttatttgtgttgcgagatgtacttggacaaatcgttgatgtgtgggaagtctcgatagccgaaaagcgaaaggcaaagatacagttaaattgagttacgaaatacaagatttggggtaaaaacttttgggttgcattcacgttccctttatg

SEQ ID NO: 12842 - DNA, 928 bp, Arabidopsis thaliana landsberg
cggacaaggaaggccagtaaggcattccggtcatatcatcaaactctccggcgaggactttattaagttccatagccatatgatgaaaaatgtaacacagacactcaggcataaaacgaagattagcagattctccccaaatcaatagatagagagcaacatagagaagctcacggcggagattcaaaacggcgttcgtttggtggcggctttggatagggctggtgacgtggcacctcactccgagaaacgagcaccaatttgtataattacgaagcagcttcttccgaaatctccggagaacggtcggatcgagaccgtcgggatgacgtggcggaggttgcagccgcatttgagagttagccaagtgaagaacgagattctctcgctgattacgaacgttatcgatttgaaaaccaaagagaagaccaagccagtccatcaagtccatgcgaggtgtgaaatcagcaaacggaggtttcggaagatctccgactattctaagcgccgccgccgccgctctaacctccggataacgcagcgacggatgttccgttaagaaatcatgaattggaatgatattgtatacctctagtgacggcgcatcacgcgcggtggctaccgattgccgctgccttctcatcgccggctaacggtttctttgcttcgaatcttttttttcaaaattatttcatctttttttctttctttctatttcttctcttttcttttaagtttcaaagacagtgacgaaacaaaaactgtgcatagagataataattacgatattaccaaaaacataaagagagataacgatgtgtgtctcgttgtacaataatacatgcttctttcagctaatgaccgttcgattgattaaagactttaatcaaagatctgatctgacggtggatatgaagtaaaccgagcg

SEQ ID NO: 12843 - DNA, 583 bp, Arabidopsis thaliana landsberg
aaattcggcatgaaaaaactatttcgagggactagatggggtatatcacattcgattggtgaaagtaaagctaagaaatagattttaagatcatatgatactaaaaactgtacaaagatgacttaaagctaaaaaattaatttttaacattagaccaaaaaaagaatgtacaaagatgacttaaagtcataataaggccagctaaagacgagatccaaaccagagacttcacccatcctctatgaactttgagcctcttctacactcttcatagacagttagaagcattaatatctgatgttttggccatgaatggatgttgtgttttaattcagattctgaatcttgtttttagtttttggattttagattttagttttagcttttattattaaatttttgttttaaaaactctaaagaaatgatttttggtttttgaaaaaaaatatgtaggtggagtaaaaactagattccctataataggataattaaaaatctgtagtttcagtgtcagcgaaaggaagccaatctaagaatgtaaattttaacactttatcatgcaactttagattgtagttcacct

SEQ ID NO: 12844 - DNA, 629 bp, Arabidopsis thaliana landsberg
accaccacgctcacccacattcgaattctctgttacgtggcttacaagttttattggtagacaccaacgattcgaaccgggcagttacacgtaaactcttagagaaactcgggtgcgatgtaaccgcggtttcctctggattcgattgccttaccgccattgctcccggctcgtcctcgccttctacttcgtttcaagtggtggtgcttgatcttcaaatggcagagatggacggttatgaagtggccatgaggatcaggagtcgatcttggccgttgattgtggcgacgacagtgagcttggatgaagaaatgtgggacaagtgtgcacagattggaatcaatggagttgtgagaaagccagtggtgttaagagctatggagagtgagctccgaagagtattgttgcaagctgaccaacttctctaagttgttatctcaacttctcttctacattcaaaatttttacaccatagatttatgtcaaatatatcaaaatgaaatttcgaaattgttattatatataccacccatatctctatgatttgcacatcctgtttttttttgttctttttctcattttgaaccccacgaaattgcattgaatcttaatatttcgtagggtcaaga

SEQ ID NO: 12845 - DNA, 1181 bp, Arabidopsis thaliana landsberg
tacaatgttaaattgtttatttaaatacctatgttcatatttgaattatgtaagatacatatatcatcatgcttatcatttttttgaatttatcaatttttattagttggtcataaagtcattgcaaacgagtatatgtaagaatcgaacccacaacgttagcttggaaaactaagagatttagtcaacgttgatcgatcatctttaattatattggtgacgtgtataatctaaaatgattttggtttcattcgccagcactacgatgaatatttttaattttagttcttcaaagtctgccatgagttattggtatgttatgtatttgttattcaagtaatttcttaatcagtagttttagtggctaaaaaagcaatacaacaatggaaataatttttttttctttttaaagataattatacttaaaaaaaattaattattttttaatttcattttagttatagaaaattaaaatcgttcattagagaggtcattatctagtatatatatatgtacacgtttatgtttttagttattaggggagatgggcttttattgggagtaaatggaaatagggatctcataattatacagaggaatacaagccaaaaacccacccactcatgctcttgttacagctaatttttccttaaatgcttactcaatttcttatacaaaaaaaaatataacccacggctcacgggaacccgggtttagctacgacaggtggagttctaagggatgtagaagggaagtggattcagggatttgccttgaatataggggtttgctcagcctcgttggcagaactatgggaggtttactatgggctctttatagcgtgggataagatgataacaaagctggaggtagaggtggattacgaagtggtggtcggttatttcaagacagagataagtgagactaatcttttgtctttcctaatacgtttgcgctatggctttctgaaaaaggattggacagttcgtttaacttatatgtatagggagtctaatcatcttgtagaaggattagcaaactatgcattttctcgacctttgggcttgcagcttttggacccatgcccgaagagtgtttattcttcatgtttggaggatgctcgtggatcgtcatggccccgatgtgttcgtttgtaatttctgatttctttttaataaact

SEQ ID NO: 12846 - DNA, 615 bp, Arabidopsis thaliana landsberg
  unsure (1)..(615): unsure at all n locations
tcatattttctgtagaaaagccatatagaaaagtggtaggtaactttattatcttacttgtgttaaaatctaacagccataaacatgatcgtgctttggtgtggcggcctattaagtcgctacacaagaggaagattgcgggtttattcttaaaattagatatctcaagggcattcgattccgtgtcatgggccttcattattgaaattcttatccatcttggctttggtccaatctggcggaatcttatttcctccctaatgttcacgtcttctacgcaagtacttcttaatggctcgcctggtgnnnnnnnnnnnnnnnnnnnnnnnnttcgtcaaggtgatcccctttctcctatggtgtttgtgatggtcatggacgttcttaatagtctatccagggcagctgaaagcagggggctgttacaagggttggaggcagctggggttcggaataggctctcgatctacgctgatgatgtggtgctttttgttaacctttggtggatgatctgaattgtgttagattgattttggattgcttcggtgaacaacggggctggtacaaatctgcgtaaaagttttgctatcccaattagatgtgaagggctgggga

SEQ ID NO: 12847 - DNA, 929 bp, Arabidopsis thaliana landsberg
cttattaacagaaattttgtggaatttttataccccttctttcggtgtaaattaaatttcctagatgatgcatgcgagtcaggttactacagtttgaataagattattttttgggtaagaaagtttgaataagttattggtaatcttatttgtttgactaaacgaccaaatcctgaagttgcttaacttcgatttttctcatatcttcattaaaaccaattagatatatattgtatatatagagactttcgagcttcatatcaaaactttgattattacctatagaaagttcaagtcttataagtacatgcgtgtaaactgttcttatgcattatttcaggtttataaaagtcaaattgagttttttttaacatttctgatattttatggtatttctccatggcattttatttttaaaaatcatatttaggatactacgcatgtttatatatataccatgttagatctggtctctattcactatgagatctagtaaacattttatttaaagatgaagaagaaatcaatccatcatctcataaaatatcactaaaaagtttgaacagtctatcgaatcaaccgagttcgaaatttgggatgttcacaccatatagataaattgaacaccggccttatttttatctttaacaaccaacacgattggtcgacatttgtagcggaattgacttcctaccgatctttagtttgtttttcccttatttttatattagatttctttctcgtagttttactacctcgagttgattgtcagctaaaaaagctcgggttcaaatagttttttctttcgtataaatattttgtttctgaatagctccctgtagtggaaaatttttcccgataacttaaataaaatggtgtctaaggaataaatattatttttacctgacccctcttatctaaatttttat

SEQ ID NO: 12848 - DNA, 828 bp, Arabidopsis thaliana landsberg
gggccccgttgtgaaagcagagaacactggaggagtaacaggttgagtctcatgagcgtatggtccaatagtaatggctgaagggggatcattgacggttagggaacaaagtagaccaggatcaggagtatgtgacgcagagggaggacctgatggcagaaaggaagcaggagatgaaggaggagctataaagggcatgaatattgaagtagaattgctcgaagagttttggactggagccaccgcagctcctgatgcagctggttcgggtacaagcaccgcgtggcctatccttttattgttcttcttggatccaaaacaccagtacaagctccaccagcttcccctttttttcttttgaaattcaaaggacataataaaaacaagattagtgatcagctaaagattcaatggcttatagctttatcaagaagtttaaatcttgctgaaaccacacctactctggtgctgctgataaataatagacatttaaaataagttcaaatctcgaatcttcttatatttctactttcgtcaaaaactctttaatcctagttaagtaaagcactaacaggtaaatgagcataacttataagtaacgcaaaaatctcttacaaactttgtttaatttcgtcacgtaacacttgcgaaaacagatcaaacatcaaaaacatcacgaaattctcacttttacttataaaaaccatgtctctgagcaatgaaaactacaattacgatacaccggtagaaacgttgggaaatcaaagcaactacactgatttttaaaaaaaaaaaaaaggaacctaaattaaaaaccttttatcttag

SEQ ID NO: 12849 - DNA, 459 bp, Arabidopsis thaliana landsberg
agctgaaggtattaatgtaacatgaactttgataatttttatacatttattatgaaataaatatataacatgacatcacattttgcatatatattcttacttttatgaatgatgaagacctgttcttcatgaccttcgtctgaagaccattatacccgaaaggagataatgctctaaagggtgaaggtccttaacgtttaacaattgtgttgccttgtttttggttcacaacaataaaaaacaagtgaccaacaacaagtaccccttgcttgtctacccagtgatcagagaaagccgagtcaaaaaggctgctggtggatggcgacacaacatcaacgtcaccttcccttggacactccaagccctgggagtttcagtcgccgacctcacccactcggacaccccttcttcagcatcgtgctgacagagggagaataccgctgggagacctttacaatg

SEQ ID NO: 12850 - DNA, 805 bp, Arabidopsis thaliana landsberg
ctatactgaggtcggatttgtatatattcagatagtttttttggataaatttacgtggctttaagaagaagaaaaaattagttttagttttactaatttaggactaacttgtgtttttgttgcaggagttattacagatgcacatatcgtaacatacagtactgttgggctacgaaacaagtccaaagatcggacggtgatccaacaatcttcgaagtaacatacagaggaacacacacttgctcacaggggatcccacctccagagaaacgagaaaccaaaccaaaccacacagtagtcgtaaattaccaaaataacctcctcgacaatctcaggatggtacgtaccggcagacttggaagcgaagctttctcattccccgtcaggtcgccgttgtacacttacgagtccatcaacggtggtggaacgttttaccaccacgtgggaagttctggtccgtccgatttcactggattgatctcaacaaatacttccacaggaagttctccaatcttcgacgttaattttcagtttgatccaacggctgagattgacacaggcttccccacttttttccacaattcgatttaagtagtacagtattgaatattcttgagattaatatagtgtgcaactagagaaaaagaaagatttttaaaatttgattaaactagatcaatttactaattgtaaaaccttacgaattcttaatgttgaaatcctacaaattttaaaaagcagagtcaatttatttgcataagtagagatgtcaatatgagcaaacctgaacattctctcatttttt

SEQ ID NO: 12851 - DNA, 664 bp, Arabidopsis thaliana landsberg
tctaagacccaataggataaataactaatattcgtacccaccccgaaccgattttctcggatcggtttcggttcggattttcgagtacgagttttttgcccaggcctagtaacttatcataaaaatgataccaaaaatgataaaagaaaagtactttcaactttttgtattgctatcttaacatttatttcttagaaatggagagtatataggaatgtaaaaataaatatttaactacagattaacacctttactgcagtttagtgcttttattttcacttttgaaatagactattaggaaaaaaatctagtttaaaaaaagtagtaggaaaaataaaatcagacggacggaagcaaaagacaaaaagaaaaggaaacacgttaacgagtgaatgccacgtcatcactagacagcaaaactaaggatccgacgaacacgacttctttcacggtaataacgaaaaaccgacgtcggacaaaagtcaaaagttgacaactcaaacacaaacacactcttatgactttttttttcttcaacaacgcttcttttgttagctcattcgttcaacaacaatctaacccattttgtctcttcacattggacacaactacaaatatataaaattccactttttacaactttttgtaatttttccgcaattac

SEQ ID NO: 12852 - DNA, 582 bp, Arabidopsis thaliana landsberg
cctaatggattctttgctagttttttccagacaaattgggacacggtctgtgataaggtgatctctgaagtccaagctttcttcatctctgggattctgcccaaaaagatcaaccatactcatgtaagactcataccaaagatcacaagcccccaaaaagttgctgactatcgacctattgctttatgctcagtatattacaagataatatctaagctactagccaagagactccaacctatcctacatagctgcattgctgaaaaccagtatgcttttgtacctcaacgcgctatctctgataatgttttaatcacgcatgaagcactgcattaccttaagacctctacggctcagaaacgatgcttcatggcagtgaaaaccgatatgagcaaagcctatgatagacttgagtgggattttgttgagacagccttgtctagaatggggtttcacactcagtggataacctggatcatgcagtgtgttagtacagtctcctactcatttctgtttaacgggcaagctaaaggactagtagtacctgagaggggcattcgacaaggagatccactctcacct

SEQ ID NO: 12853 - DNA, 1327 bp, Arabidopsis thaliana landsberg
  unsure (1)..(1327): unsure at all n locations
agttatgctaatcggcttctgggtgttccatttcataagactcttggtctatgaatacatgtgcaagggatcattagactctcatatatacggtcaatacagtttccaagttagttaaagatgttgttaacctaaaaaacacttaactagagttatctaactaactttcatgaaatgtccatttaggtcgccataccgacactttgggatggcctgcaagacaaaaaataccggttggagcggctcgaggtcttcgatatcttcatgaagagtgtagagtacgttgcattgttcaccgagacatgaggcctaacaatatactaattactcatgattatgaaccactggtatttatattttcttgaaccacaatttacacttttttatacattcgcttgattctggccttgttactctttcagggtggagactctggtttagcaagatggccgcctgatggagagctaggtgtagacacgcgtgtgataggaactttcgggtaacaaaatttataactaaatcatcattctcactctagagtaatttctcaactactttctgtgtttcttgttttagctatttagctccagagtatgctcaaagtggacaaatcacagagaaagccgatgtttactcgttcggggttgtattgatcgaactaatcacgggtcgtaaagcaatggatatctacagaccaaagggacaacaatgtttaactgaatgggtaaatccataagtttcttctttttaaggtttcttagctcattttcagtctcttcttgtaaatgaaatctaaaagtttctttcttgaagctcattttgttattttattctctttgtgagcaggcaagatctttattagaagagtatgcggttgaggaattagttgatccgaggctcgaaaagcgatattcagaaacacaagtcatttgcatgattcatacagcttcattgtgtatacgtagagatccacatttgcgtcctcgcatgtctcaggtaaagaaaagattcaccattcttgaaacatgttcatttctttaagtcaataaaactctctcaagtgagtatgctcttttgcttgttgttgaaagtgttgcgtttattggaaggatatgtgttcatgaatgaaatctcagccaggtttaatggaagactatccactgagaaaggtctcagagatcataactaaaagctcaacgagccaatctgatctctttcttttggtattgtgcgtaggagccatggtagaagtttgtccaatctgagaacacatgaatactnnttctggtggcttagcagctttatccaaagtcatcagtgtttgtag

SEQ ID NO: 12854 - DNA, 822 bp, Arabidopsis thaliana landsberg
accgccatgggatgtaccgattaaatgactgctcaattccgcaacgtcctaaggttttgcttggaacaagagaacagagactctgttttatacaatcagaaacttcagaagctcttacctcagacacaagcatctcttacaggaagcaagatcctttactctgatgtctatgaccctatgatggagatgctccaaaaccctagcaaatacggtatacataatacatagaaaaaccattcttgtttcacaagttatcactataagacgatattgatggttgattataacatcgttgtatgtggaattaaaacagggtttaaagagacgacgagaggatgttgcggaacagggttcttggagacgagcttcatgtgtaatgcttattcttccatgtgtcagaatcgctcggagtttctgttctttgactcgattcatccatctgaagctacctacaattacattggtaatgttctggatactaagattcgtgggtggcttgaggcttaagttatcaagatttgcaaagattgaacaaaattatctgtttcataatgtgactatttgtggacttcgtttgtggatcaaggattaactttggctcttactggcgctttaacttagcgaaatatgctacaagaaaatcagttgaaaaataaaaacgacaaactttcatatgagatagccataagtggcaatagtaacacaaagcagcaagaaacacgaatgttttagaacctaattaaacggttcttctaaagttatatcttgcaagaatacggggaaatgtcttgagataaatggttttagacggatcaggattac

SEQ ID NO: 12855 - DNA, 970 bp, Arabidopsis thaliana landsberg
gattgatcacgacacaggaccgagacgaaagcctcttctatgtttctataaataaagcaaagaacagaaacacttagcctttgttaactaagatcttgcctataccattttgctctcttctcgattatatctctaacctcaaaggtatatattatatatgtttatatatatgtatatgtattgtatgctcactcaacaatctcctatgtatatcagaaatccgatttcttagcaaaagtgtgttaaaacacaaaggatatatatatattatgcttctgattaaaccccattattttctcttttcttttgttaactttttgtccaggtacatttaatagctagatgttataacaaaatggggagatcaccgtgttgcgatgagagcggattaaagaaagggccatggacgccagaagaagatcagaaactgataaatcacataagaaaacacggccatggaagctggagagctctacccaagcaagccggtttaaaccggtgtgggaagagttgcagattgagatggactaattacttgagaccagatatcaaaagaggaaacttcacagctgaggaagaacaaactatcattaaccttcattctcttcttgggaacaagtaatcaatcttaattgatttcttcttaatttcccttacttactttgattaattataaattatatatatgtgagattatcatcaagagcaaaaatcagaaaacacatcaatattttctattaattaatcaatattattgtgctatagaattttttactgctttttattattagtgattttaatagaacttttttgctaacactttagaatttcattttgataaaaaaattcaagaagaagaaaatttaactacaggatggtaatgtttgattagataggttctaggcaaaaaagaaacatttccttttattaaatacagattaaaatttaaaatttctaataatctaggttc

SEQ ID NO: 12856 - DNA, 1060 bp, Arabidopsis thaliana landsberg
aaaaaaaaatcaacaactaacaaaaatacttactttcagaaacgaatccacacacgaggaagaagatcgaagaagaagaagcttcgcttgagaggaaacaatcgagagaacgatggaagcaaacgcggcgcagagagtgaggaagatgaagaaacaaggttgggtttaactcgtacctttcccaattaaaaccgctttgatttttaaatcaaaacattgaaccgggtttaaatatatgaatgaatcaaaaccggaattttcatttccttcttcttctcttctctctcacacagcacaaaggaccaacgattcattcattgaagaagatgatacagagattgattcctctaaatcgaaaagcttcgaactttactcagattcttgagaaaggtacttctttattacactattctagtatcaccgaagcgaagctttcttataaagagagattaaggaatgggattgttgatattaaggttaatgatgctattgatctcttcgaatccatgattcaatctcgtcctttacctactctaatcgatttcaatagattgtgtagtgctgttgctagaacgaaacagtatgatttagtgttaggtttctgcaagggaatggagttgaatgggattgagcatgacatgtatactatgacctttatgatcaattgctattgtaggaaaaaagaaactaattttcccattttttgatcttgggagagcttggaagcttgggtatgagcctgatacaatcacgttttcgactatggttatacgggttttgcctcgagggtagagtttctgaaacggttgcgctagttgatcggatggtggaaatgaagcaatgaccggatcttgtaaccgttagcactctgatcaatggactttgtctaaagggtatagtgtctgaagcttttgttataattgataggatggttgagtttggtattcaacctgatgaggctactaatggtaccgatttgaatagactgttggagtcaaggaactctggtttggcttggagttgtttatacagatgaagaaagataaatcaagcttgtgtt

SEQ ID NO: 12857 - DNA, 599 bp, Arabidopsis thaliana landsberg
cagtactctgccctgaacactaggttcaatgccattcataatcatctaggatcgggatgcactctcagtttgattatcttcgctctcatattcaggatactgttcatgatcccatcatgagaaaaataaacaatatgcaacatagctttcaggacaatatgggtgctctgtccaatcagtttaagactctgtctactagtgacagcatccatactcttgatgagaggcagcagcaacatcaaaatgacttcagccagttcacctccatctttgacagctttagctctcattattatcgcatgtaatcgcgtcctccgctaggtgcccagtgcgacccctcctttgtggcaatcgatgccaacaggggagaaagatgaaggtggggattttataatcaaggggagctcgcgcatgccagtagtggacatttagacatttgcatgtgcatgtttattatgcctatgctttatgcatcttttgtattgattatgaacaaatgttatttgtttgcattcgaactatgtaccatgttgtaacttctcatggttctattagttcgaagtatcatgtgaatggttaatcgagctgtggttgcattg

SEQ ID NO: 12858 - DNA, 793 bp, Arabidopsis thaliana landsberg
tctaaggaggaacattgactcaaagcattctcctttatgtttgcactgcgaaactacttatatgtatctgacataaggtgtgtgtgccttacaaatttcttccgatctgatttcgtgtacttatgctgcttccttcctctgagtgataaatcatgtggtcaccgaacttgcagtgaagttcgagttgagggtttggagacactggattatctagacaacttgattggtaaagaaagattcactgagcaagcagacgcgattacctttgacggggaggtgagtaatgtcagccattgttttccccttaatagtttcaaagaagagaaaaaaaaccaaagattgatatagagtcagtgtgctgtgcaggtcgatagagtgtacttgaacacaccaacaaagattgcggtcatagatcatgagcgaaagaggaccatcgagttgcgaaaggaaggcatgcccaatgcaggtaaaggataccatttgttcttcgtattttttttttatgaatgaaaccttttgagagttggtttctaatggattgagttggaaacgagcagttgtgtggaacccctgggacaaaaaggcaaagaccatagctgatatgggagatgaagattacaaaacaatgctttgtgtagattctggagtaatcgaacctctggtattgttaaagcctcgtgaagagtggaaaggcagacaagaactatccatcgtctcatcaagttactgcagcggacagcttgatccacgcaaggttctttacggagatatctgatccttttgggggtttatc

SEQ ID NO: 12859 - DNA, 1014 bp, Arabidopsis thaliana landsberg
gatcttgaagaatcttgggtgggagaggtactacagtggagacaataccgatcatctgctccagttccacaagataacttcgatcgatctcatctctctccctcgtgacttctccaagtttaactctattcacatgtatgatatcgtcgtcaagaaccctaacgtcttccatgtccgtgacatgtagtagtcaatcatccaaaacaatggttcaatatcattctccgatcatcgccgctggtgatatatctatcatgtatatatatatgcaggtttttattttgtcgttgggtgtttttgtttttggtttattttgtttttaatgcatttaatgtacgtgttttccgttcgacgtcgatcgattggggtgggttcaagctagagccattctaataacttttatcattttgtgattttaatgaaattgtatcatgttgtcaagttctcttattatggagtggatcaaaaaatatatacagtacatcaaatttcgaatgttatatgatgaaatatcataatttggtctatgatttgcatttaaataatatgatgcgtggaatttatgtaaataatttaatcaaatatactcatggaatgcaaatatacctaacatgtgaagaaaatttgttctgtcaaaaattactattatatacagcttaattagcaatttaaacaaaaactactatatatacaagggccgatagattatacaaattttcatgaaaataaaaaataaatgtgttgtttttaaaaccccaataattatcacaaataaaaactacagttacgtttttgtattttttcaaacaacagtctactagacgtaatttttttgataataatacataacttcaattgattgatcatccatcacatatttgagtatcgatgaagtaacatgggagattaataagttagaaactttaaagtcataatcatattatcttatcgtttaagttttttttttttgaaaccgtctggcttaaaaaaacagatatgtatacaaattaaaac

SEQ ID NO: 12860 - DNA, 736 bp, Arabidopsis thaliana landsberg
  unsure (1)..(736): unsure at all n locations
actatcgttgatgatgattagtggcacgtcaacaggaaacaccaatgtgaccatcctctatcattgcaaggtgtctctaaattatcatgtccagacgactttgcctggtagttttatctgttcttaatttatctgaatctgcatcaggccttcgtatgttcctttggaatcactcacccatcttactctaggattctattgccgcgacaaagattgatnactacattctctgaaaccaaaagttttaaattctgtaacttgaaaaaacctttccctaatcttcaacagatgatttcgacgatttctgtctccgagcattgaaactagctgaggaatcaaacggtgctccattgttcacagtgactcaaacccacacagcgataaaccaaagcaactacgggtttgcggatgacgacagcgaggatgaacgtgaagatgactggcaaatgctctgatcatgatcatcgtcaaacattttaacaatctcaagctacaattctttttttccttttgttaaccagctctttggtttttatatggtgtggggtatattacatcagatcagaccacattgttgtactataaaatcttttgggattttcaaacatagattgaagcatgcgaaaatggaagagtagagaaatcacaaggtatatgaacatgatgacttcattttcccattttcttttaagtcgtcatcttcatcataactcctccttcaccttcaactttcact

SEQ ID NO: 12861 - DNA, 1042 bp, Arabidopsis thaliana landsberg
cccccttaatgttttccctattaattcgtttactaactattacaagcttaaatctttgaacttttcctattctatagagtatagaccatatctatgtatatataacgaaacaggaaagctaactaaattttttttaaaaaacttttcctattctatatatagaccatatacatatatacgtaaatataacgaaataggaaactaactaaaaataattttacatttactaatttacatgtactgtatataagtttgcaccacataatattcaaaccaaaccatttatttaccacaaactaatacaattaatcgtctttctatcagttacttgaaagaaaagtaactgaaactttaactgactcctcttggctttaaccctaaatgtgatagcataattctatatgtaatcagtgacaaatacaccaatttattcattagttattgttatctccttcgacaaacgtactcattaatattacttattaataaactcttcaagtttcttcacgacttgacgagcattatcactattaggattcttcaaatgaaaaacatgaccttcatttttagtctccattacctcaacttcaccttcccatccactcttcttcagcttctccgcgtaacaccaaccttgtctcacaaacagatcatctccagctaccattaccaaaacccgcccgcaacctaatccggatggatccgatccgacaacgttgagccatggatcatcaactccttgtttactattcggacttgcgactctccaacttccttcaacacctttcgtcttccccacgtctctaacctcaaactcatcaattggagtcttactccaaaaatatggatgaatcaagattatccctgatattaaagaatcacaaagcttctcttttttcgctcgcatcgttagatgatgagatatgtttccaccggcgctatctccggcgagaaacacttttccgaaatcgccgtgtttgtttatccaagttcccggcccggttcctgtgatatgagttaacacccatttcagtggatccca

SEQ ID NO: 12862 - DNA, 736 bp, Arabidopsis thaliana landsberg
ctaagttacgatccagctcatgctatgagcagaggtgggagtatgcggcaaaccataagtcgtagtgtaagcaaagcaagcagaaacatggaagacatattcaatacaagctccagacgaaccaaatctgtcaacgaagacgaagaagctctcaaatgggcttccatcgagaaactccctacctacaaccgtctccgcacaagtctcatgcccgaattaggcgaagatgacgtctacggtaatcaaatcctcaacaaagcagttgacgtcacaaagctcgacggtgaagaacgtcagaagttcatcgacatggtcttcaaagtcgcagagcaggacaacgaacggatcttgacaaagctaagaaacagaatcgacagagttgggatccaacttccgacagtagaagtgaggtacgaccacttgactgtgaaagctgactgttacaccggtgatagatctcttccttcgcttcttaacgcggtgagaaacatgggagaagctgctctaggcatgatcggaattaggcttgccaagaaagcacaacttactattctcaaagatgtttctggtatcgtcaaaccttcaaggatgacacttttgttgggtcctccgtcttccgggaagaccacgcttttgttggctcttgccggtaaactcgacaagtctcttgacgtctctggggaggtaacctataatggttatcgcctcaatgagtttgttcccattaaaacatctg

SEQ ID NO: 12863 - DNA, 653 bp, Arabidopsis thaliana landsberg
ttgagcagcaatttggcttcagtaagtcttacctttacgtgtacaagaattattgttcagtcaagttttagactctctttgtttaatctccaagtgaaacatttgatctttatcgcgggaatgttactgtgcagtaagagtcgggttgatatacttaatatcgggtctcggtggaagcatactttcgtcgcttttccttcaagaaagtatctctgttggtgcttcgggtgctctctttggacttcttggagcaatgttatctgaacttcttaccaattggactatctatgccaacaaggtacttatgcccttttcgctatacgcgccttaaccggaacttaggattaacggcttcttttggcaggcggctgctctgatcacacttctgttcatcatcgcaatcaacttagcattaggcatgcttcctcgggttgacaactttgcacacattggagggtttttaaccggattctgcctcgggtttgtcctccttgtccgacctcagtacggttgggaagcttcccgcaccaacacttcgcgaaccaaacgaaagtatagcatgtaccagtacgtgctgtttgtagtctcagtggtgctacttgtggttggagtaacggttgcattagtgatgcttttaaaggagagaatgggaa

SEQ ID NO: 12864 - DNA, 623 bp, Arabidopsis thaliana landsberg
ccgactctttgccaaataatctcgcatcctccagatttgtatccagcttagcaagacattaaatgaccttttgtcgagagatcccgaatcaacgtgaaaacaaattctacctgttttaaaagttttctctaatccatcttctttgaaatttgaagaacattttttccaaccctcctcctatatggagagaactctctatgaaacttaatgtcgttggcttcaggctactaagccgagcaagcacccgagctccacaatcctttcactacttcgtgtagagtgtcacgcatcagcgagtatcaaggttttggatgcttttcagtgtcactatgtctaataactgtgggtaatctctcactgcctgaagtgttcgttgtcatgatcccgactaaccgttttcttgcttgtggcaacctcaacaattgtctccaagatcttttagactcatcgtttgtctattcatgttctttttatgttgcatccttagatgcttgtaatcttatttttgtattatctaaacttgtagaacttgtcatctttagcgtgcttagagtattaatgaaaacatgcttgacactaatgtcaaagcatgtgggcccaagcccgtggggttgaaggttcac

SEQ ID NO: 12865 - DNA, 1008 bp, Arabidopsis thaliana landsberg
gactcttttttctttgtgccattatcacagactatgagcatacatacgccatcatattttgatatatttagccaatgtgataaagaagaaagttagaacattgtggtgttgtgcaccttttgcatgattttccagactcaaacgcagtcaagaatgtgtttgtttggtgatcctgaactggatcttgtcaggaaatgctaaggaatccttgtttattatctctagcttcttttgtctcttgtttattatctctagctgcttgtatcttgttaggccatactcacatttggatggtatacatcttgatgggtttcagcaactgctctatgatgcattacttggttaaagtccatctttatgaagcagtatttggtgacactgtctacagttgtgctttgcataggacgctaatgcaatttgctctatgaaatactctgcaggtggtctcttggagcaatcatgtacgaaatgctagtaggatatccgccgttttattcagatgatcctatgtcaacttgtagaaaggtaattttcggaaacaaaaatgacaaggaaaacatagaaacaatcataagaatgaaattttttaaccttacagtgacactgacatcacatcaaactcttgttcctgtttttggttgcagatagtaaactggaaaagtcatttgaagtttccagaggaagcaatattgtcaagggaggcaaaggatcttattaacagtctgttgtgcagtgtcagacgtaggcttggttccaaaggtgctgatgaaataaaggtgtccttgtactcatttctttaaaagtttttgttttggatgcatgaatattagtttctcatattcgcaactaagcgactgtgtatttgaatgtagttatcagagtccaatatatatataatccaaagcctgtgaaaattaaagtacatgatttgttttctgcatctgcaggctcatcccaggtttggaactgttgattgggatacaatattccatatggatgcagcttttg

SEQ ID NO: 12866 - DNA, 581 bp, Arabidopsis thaliana landsberg
gtactcgcgctcacgtcacctaataccctaaccgaaagtcactacatagagagaatagtaacgcgaaaaaggtgggtgagaactcggcagtgtttagagtcgtgaagctatttgtccaaggcacactccggattcgtggcggacttcctcaccggcgagcaagcgccagtgctccagctgatctcctcaccccactatgcttcggttacgctcggatccttctaacaaagctctaggaatcccaacagagacacggtcaacatcccaaacccgcttccacatcagtggccaccatggtggcgcttggttcagcgatgagggaatcgcacccctactgttctaatattatagaaataagtgacgtgctttcaacatatttaaatagattaaatattataattctaaataaaacaggcatataactcagataaatgttatatgtaattgtaacagaatgaacagtagcaattccagtatacaaaaacataaaacatagctactcaagtccattagatgattaaacatggcttgtagatgaagaaggcagattaaacacataaacataattgtttatcttttta

SEQ ID NO: 12867 - DNA, 743 bp, Arabidopsis thaliana landsberg
aaaattccgatcttccgctacgggtttccgggtaaagtccagaatcatcctaattcaagcttagatccgagaaatcttcatgcctgcactaagttccacgatgaccgaaggcaaaatcgtctcttgggttaaatcagaaggcgataaactcaacaaaggagagagtgttgttgttgttgaatctgataaagctgatatggatgttgagactttctatgatggttatctagctgcaatcatggttgaagaaggtggtgttgctcctgttggttctgctattgctttgttagctgaaactgaagatgagattgctgatgctaaagctaaagcttctggtggtggtggtggtggtgattctaaggctcctccggcttctcctcccacggctgcagttgaagcacctgtgagtgttgagaagaaggttgcagctgctccggtgtccattaaggcggtggcggcgtctgcggtgcatccggcgtctgaaggagggaagaggattgtggcgtctccttatgctaagaagttagctaaggagttgaaggttgaattggctggtttagttggaagtggaccgatgggaaggattgtggctaaagatgttgaggcggttgctgctggaggaggagttcaagctgctgttgctgttaaggaagtagtggcagctcctggtgtggagttgggatcggtggttccttttacgacaatgccaggggctgtgagtaggaatatggtggagagttttt

SEQ ID NO: 12868 - DNA, 772 bp, Arabidopsis thaliana landsberg
ttttctctttctatggacatttttcaacccaatcaaaaaaaagtaaagtaaactgaaatctcttacttagaaaattgattctactatactatatccggttttaaatctggtccttgtttggtcttggggataataattagtggcgaaaacggcgtcgcttttgctttggttttgggttaaatgagtggtgtttgctaatgaatgggcctctacgccttttaacagcccatatttgatcacatttcaatctatcacatgattttaaccataataaagccgtagccatttcttcttcttcgttccttcagatttttcgcaacagagagagaagtcgaagcttcacgatcgtataataatggcgacggcttcaggtacccatttccttcaacatttcttctaattcatttgaaactggttttcaatttagctttaaatttcccttttggtgctaaaaatatctcgatttcgaatcatactctcgtaattttgtatcattaattttaaggttcttactgttttggaagttgtattatcattgattttctctattttggttttacatccattttgttttacttacgagtctgattcaaatttttgctattcttattgatttgagactttctgtgattggtggttctctctctgttatgggtttggttagattcaaattgtgattcttaagagtctgaattcaagttcactattcttattgatttggttctttgttagcaatcaattttctttaaaggtctatccttttatctttctg

SEQ ID NO: 12869 - DNA, 890 bp, Arabidopsis thaliana landsberg
actccttaacaaacaaaggaaaatactccatatagaaagcgtcatttaagaaaattattatgattgtaattattatatcatgtaagacaaaaacaaaatgaaataaaacgatgtggcaatctggtcgttggattttgggtcattgtcaaataatccaacggtgttaatgtccacacgctggcgttgaaaatccagtcaaacttgggagagctaatcactcgtacctataatttctctctaattaagctcaagacattgattgtcatttgttcttcttcactctctctaataattctccagaacattttgcacattccgtttcactccgtgttgttggatcccccaaaggtaaaacctttttccccagattatttctatttcgttcctctcttctcgatttcgactgattttccgtttttatgctcttctcttttccattttgaactccaattttgattctttaaagaaaatgagttgcttcgggtgttgtggggaggatgatgatatgcataaaactgctgattatggaggtcgtcataaccaagccaaacactttcctccaggtatcaaagttggatcttgctatccaaaaaatcaagactttacttgtttcctgtttcctcattggagttttggttttggtgtgaaggaaatgatgcaaggcaccaccaagtctctgaaactgcacagaagggtcctccagttgtgaagttgcagcctattgaagtacctattatcccttttagtgaactcaaagaagcaactgatgattttggatcgaattctctcatcggtgaaggctcttatggaagagtatactacggggtattaaacaatgatctgccttcagcgattaaaaagttggattctaacaaacagcctgacaatga

SEQ ID NO: 12870 - DNA, 727 bp, Arabidopsis thaliana landsberg
gtattttaggtttgggtttacttaaagtatccaaaaaatgttgtatccaaatatatcctaactacttaaaagtatccaaaatgtataaaaaaaatctgattatttttacctaaacctattcacaagtagcaaaaatatcgtaatatacaaaatatctctaaatccgaatattttagatacttaggttattacaaatacaaatattatcaatatatttatatttcaggtatgttgagatacttgttcggttttcagaatttgaaacttagaatccactataatattttaaaacttgggtacgtgttcggatcggttttcaagatcaaatattatgccaggcctacaattgagtaacatcaaaacaagcttatatttcttctcaaaaaataaagaaaaaaaaaaaatctatctatatctacaagaacgtacaacattgcttgtaaagccaactatctgttttttctttctcgcgacagcaattgtagacaaaactatctacaaagttaatatacaacagtttatatctctctgtaaatcccaaaatttcttcaacttggtacaaaattcagcggaaaagatcttggaatgaccacattataaatctagcaaatatatcggactccaaaaactcgatgtgagcagcacgtccgatgaatgagttcaggttacgaccataaacggtcatgtcaaagttgacgtcgcagcgcatgaacaccctttgctgatg

SEQ ID NO: 12871 - DNA, 643 bp, Arabidopsis thaliana landsberg
gaggtgctgctttcttggagatgcttaataactgtatggaccaaatacgtgggccatcccctgaaactccgcaccaccagagagtgttcatgcgctgtgatgtcaacttcgacacaaccttgtatggtcgtaacctgaactcattcatcggccgtgctgctcacatcgagtttttggagtctgatgtctttgcaagattcataatgtggtcattccaagatctattccgctgacaaatcttggtttatggagatatgttttgagatagatcagaaagatacaaccaaaaaaaaaaaaactgttgtatattaagtaggacaattctttggttagtttttgtgcactcgccagcggaagaagttatcaagtatacgttacctcaacttgtaggaagttattagtttttttttacttttgagattaatttactatctgctaatgacgtttgctctatcaaataaaaaaacaaaaatgtaaaatatgtattcctatgcttaggaagatattaagaattgccgacttctttcagaaaaaaaatacaagtttattgttcgaaccaatgcagagaaacagtattgtctgcttgtgaagaatgaagaattatacaattttcgcttaagcattattggcttctttctgatag

SEQ ID NO: 12872 - DNA, 1062 bp, Arabidopsis thaliana landsberg
attgtcccatgatgagatggaacacaaaagctcatcggggttgttgagtaggacatggcaatatccggggtgaaattttctcggaaagaagataactcagcaggaaaattcaatctaccagctgcaaagtttgaaacagcggaaacaggtgattcagatgagtttctgtcaagctgatccatggaagattgaacctggcttgtaataaccgactagttcccaagattttcatcaaaacccatatctctaggacttggtaaaaatgatcctggaggtcctggaataggaatggtatcaacctctacaaataagcttccttgtcctacttcagaatcaaacctttcatcctccttgcaagaggtttgcccgtaaatcatattcccagcttcggagtaatacattgctcgctcgctgggtaagatttcaatagatgttggactgtctgactctgactggtagaactcagcacctgtataatcggtttggtccaacacatgagctcttttgttattatctccttcctcttcactactttcttcgtcatcatcattataatcatcgtaaccactagatgaaggatttgatctcagtaagacctcattattttccccatcatcaccagaaacataatcatcatctcgcagctcacgttcatgagtcatttcagattcccatttccctgtttcttcatcatctttttcctcagagaaatccaaccgagctttctttagctccacaggcatagatagtcgtctccaggcatttggtacaaaaggtggggaaaactttctcatgctagttccacgaggagatgcatctgagcaaaacttctttccaggtggatacttatcttcttgaaatgaagcaacgctcttctttaatcggtttatattaactccctcaagtgactcatcctctttttcactctgagggactctaaatgaacgactttgagcactttgactcctaaacaaagtcttttttcgtccagcaacttcgctccccagcttctgtttctttaaaggataagaatctgtggcagacaaatcagtaccgctcaac

SEQ ID NO: 12873 - DNA, 1232 bp, Arabidopsis thaliana landsberg
ccggagattgagatattggtaaggctctcggctcaaggcaatgtatgggtaccttacttctgacatgtctaagaatatacctctcatattattctcgttctgaaaggggtaaagtaagcatgttacaaccatcgccaaattacttaggttttggattagcttctggagtaaaaaacgaacccaagactttcaaaatataaatgaaaaaaaaaaaacaagtacaagactatcatgtaagtaatggctcaaaaggttatatatgatccaagacatatgcaaatgttatatctaaagccaaatgttgcaagcatagttggctattctctcctctgcaaaaaaaatatatatgatatataaaataacttacagtttctcccatttttcccagcttgttgatgatatcttcgtattcccacagcctataccgccggggaggacgaaggtacttaccgaacgtgtagaccagatcattcatctcaatccggctatcggagattgtaatcaggaacttgttagctagatctgtaacttcactcacagcaccggcagagtcaggatttcctgaatccagtatactcctaacaaaatactcatcctctgatttgaaataacacacaatgtcgagaaacacttctttctgctgctcattaagttgatcaatatagaatttccaaacatcttgcatcatcacattggaactttgtgtcttgtctttctcacgaattttgttacccattagcttgagagctagtgggttgcctccagcattatccaaagatgttctagaccgagccaacaatgtccgcggactacacatctgatcattacgagcatggtgactaaagagttgaaaggcatctgcattgtccatttgcggaaccaaataagtatcatgggaaattccctccagcaacgatctatcacacgttgtaatcactattttgcttcccttcttaatccatttgaggtcgccaagaagatactcaaactgtttcttgtcactcacgtcatccagaacaagaaaaaccttggtctcaagcaattctttcttcacagatttatgggttgtctcgtcatttatgattggaaaatccccaccgagtaacacttttaagagtgtcgttcgcagccacacaagcccatattcttttgacttcttacgaatactcagaagaggcacacaacgtacaaagttgcagttccacttttcgtgcagcatcattgaaagtgtg

SEQ ID NO: 12874 - DNA, 618 bp, Arabidopsis thaliana landsberg
taaattaaacaaattctagcacttatttttgcattaaaaatcattttctaattcatttttctggattttataattctctagactagccctcaattacaggaaaatccaggggtctcggtacaaaatttcttaagacagagagcgccaccgcatggatggcgggttggttcgggcaaagccaagggccccttttataaaattgcagagccgaaagggtatctagtgatgctggccacaggatctaagatccacgggcaggaatcattcccccgcatcaaaccactctagcccttggattcaacactaacggaccaaattcaatatttgaaacggccactcttgatctaatctcgagcacacgcctgcaatcgaacggccccgactaaatcagcgaagaggtatggctacatgcaatcctagtcgtcactgcgagatcgatggccagtggccgttcttcagctatcaacgcatctcacgccttcttcaacctcagaccgaccggccgccatggcactcgccagcccaatacgacgcacgacaagcacattgtccggggcaccagcccccacgccgaatggtgcacgagatccatgaagacatcgaataacaagggcatgt

SEQ ID NO: 12875 - DNA, 520 bp, Arabidopsis thaliana landsberg
  unsure (1)..(520): unsure at all n locations
taactaacttgagtttttttttttaatggatctttcctttcttttgtgcttgcatctagactatcaacgatgttgtgttcggaattacacaagcatctctttctcactatttgaaccgacaatatggtaaacaataaattcaatatctatgatgttttgttaaagctaataaaagtcaacttatactaatacagtgaaaagaaattgcatgttggatctattttcaatgttttcacacgtacattttgtttcttgacaaacaaggcacgaagaaggaggaggatggagcgttgacatcgtatcgaaacaatcttcctgatggaatancgatttcgtgtagcttgtacagtaaatcttaggtctgacattggcttcaaggttagagacatacacctcaaatataaatctcaactctttaacaaattgtcgaccaaaatatgtaattctttcttttttgtataaagcctttggcagatatgatggtcaaggattcaaaatgcagatggggaaactacttcag

SEQ ID NO: 12876 - DNA, 782 bp, Arabidopsis thaliana landsberg
  unsure (1)..(782): unsure at all n locations
ggatacacgctcatcgactttctcagaaaccgcagtaggatctttcatctgttgaaaggataaggtgctctcaacttcagaactgacctcactaacggaatcaatgtccgaaatgcagtcatcatcatcttggagaagctggttcggaagagaagtagtgggtttaagtctggtctgatgagaagaacgacccaagagagtgacgtagccgttgtacaggtccagacaaagtgagagaagcaaaggtcgtccctggtaaaaccattcagctcgttgagcaaaggtatcatcatctccttggctttcttgaaaaccagactcacgcaggatttgcatccgagcttcaaggtctgtttccaacattttttcagacaagaagtgatgagagagaaagacaaacagagaaagagagagagagaaaaagggggtccactgtttctgtagcatgctttgtgatttgaaaatttgaaaatgtgaaaaagctccaaaaagagagagagagagtgagaagaaatttgaaaatggaaaatgaaagtaccagagagagatggcaactgtggagcttccatggatgctttgttcttcatcttcttcaacctgaaagatatacttgttttagttagtgattcgtatataaaattataaagggaaaatgagaataatggcatagatgatgaagacattgatggcttttccaagaagataatcaatgttaagntggggntaaataaatctaagagnttntgtggatcggagtgggagaagaaagatacgaacccgga

SEQ ID NO: 12877 - DNA, 558 bp, Arabidopsis thaliana landsberg
  unsure (1)..(558): unsure at all n locations
cgacagaagtgttcttaagttaaacagtggaaacatgaatgatatcaaaatgttatacagaagggaatcaagattctcaagaaagtgtacataaactataaatcaaactcgagcagagacaaggaagaagatggaatcgttttacgacaatccgaggggatataataaaacacacacaagatcaaaggtggaagacgagtcatctacacatatatgaatgggtgcaaaaaagaatgaatcagtaaggattgttgtagtaataccccgtaggtggcggtcccatcccgttgacaggtggcattccgtaagccggaactggaccggtgttcatcttcgccaaactggcttgacctctcatcccnnnnnnnnnnnnnnnnnnnnnnnnntgctgctcttggctcagtagatactgcttcttctccatctcggccatttgcacgtacgaaggtggtggaatggttagtgaagctgcgaatgggtcttggttcactttctcaacggttccatctggtgcaggtaaggctaatacttgattgttggttttccaggtaagggtaa

SEQ ID NO: 12878 - DNA, 638 bp, Arabidopsis thaliana landsberg
  unsure (1)..(638): unsure at all n locations
tatcgggtttatcgcgggctcaaaagcttcaaagtataaaccttgaaggctgcacgggactgaagacgcttcctcaagtgctgcagaacatggaaagtctcatgttcctgaatctgagaggatgtacgagcctcgagtctcttccagatataacattggttggtctaagaactttaatcctcagcaactgctcaaggtttaaggaattcaagctgattgcaaagaatcttgaagaattgtacttagatggcactgccattaaggaacttccttcaacaatcggagacctccaaaagcttatctcgctgaaactgaaagactgcaagaatctgttgagtctccctgactctataggaaacctaaaagctattcaagaaataatactctctgnnnnnnnnnnnnnnnnnnnnnnnnnnnnnnnnnnnnnnnnnnnnnnnncttgaagactttactgctagacggaacagccataaagaagattcctgacattttgcatcatctatctcctgatcaaggcctcacttcttcccannnnnnnnnnnnnnnnnntgaatggccgcgtggaatctacggattatcatcagtgcgacggttacgtctgagcagtaatgacttcagaatcttgccgaagagtattg

SEQ ID NO: 12879 - DNA, 714 bp, Arabidopsis thaliana landsberg
caataaggggatcttcgagctcgcctactacacgtacgcggttgaattaaaggtgcgtacaattaaactcttttatatatatttaaagtcagaagaattagtttattttcataaaaattaatcaaatctttggacatgtttcacagctaataaggccagaggttttcacaatcctagctgcctacaccctcttgaactctatctttataccaatgctcttggagctcgtgcatgacccaaccaaaagattcagatgctaccgaaaaaggaatttgggcatcttgaaagacggtgcggctctccaatgtcttatgtgcgtctacagacctgatcacataacttccatgaccgacctcttggaaacttttagcccatcacaagattccccaatggcgtgtaacatacttcacctcgtcgagcttgtgggtcaagccaatcctatgttcatttcccaccagttgcaaaaaccagagcccggaagtacttctctgtctgacaatgtcataatctccttccgtggcttccaaagacaattctttgaatacacattcgttggatattttcacttccgtctccgtgtcccaacacatgcatgaggacatttgttggctagccctatccagaagcctatctctgattgtgcttcctttccaccgaacctggtccgttgatcgatccacggttatttccaacgatgataatctgagaatgctc

SEQ ID NO: 12880 - DNA, 690 bp, Arabidopsis thaliana landsberg
tgtgtgtttataaggatatttaaccgttaaccattataaatgcggaagtaccccctacactcttttccttaactttctctttaactttgctgaatcccatattcgagaaaactctcaaatccatcagtctcctagcaagatcagaagtctaagaatcttcaggcaaatgtctcgactgagaaactcggcacagttgcagctatcgaaaaaggaaagtcttggagacaacggaggcgcgtggaacaccacgcgttcctctagacagaaacaggggaaatacggtttcacgaggaagtgtgggagattggtgaaagaacaaagagctcgcttttacatcatgaggagatgcgtcgttatgcttatttgctggactgatcataataataacaactctgaccactcctaaatcaacgtcaaaaccctatctttctcttctttttcttgcttctgttttgaactttattttaagagtagattagacacaaaatgtacataaatgattctacttctggttgtaatttagatttgaatgtttgtgtttgtgtttgcttttggtcatcactcatcagtttcagtgtatgcacttgaacatgtagaggatagaaagcaattagtataaaatggtgaattagattcgtttttcttattattgtcttacgccgatattgtcagatcacgagttatgactta

SEQ ID NO: 12881 - DNA, 1258 bp, Arabidopsis thaliana landsberg
tgacttgtgtatcctttgctttctgcaaacacaccaataaaaagagcttagattgaatagttccaattctaaaagcaaacaagaattttcacatcatgtagtagaagaaagcacatatcttcctcagccatcttcccattaaagccttatgctaaatcacaaatctcttacactatcagattctagactcatatatgcattagtctgcaaccaaacaactacattttctacctatatagaaatttctcattgactcaatgttgaatttatataactaacataaaagcttccacacgattttcttttcacgaacgaaataagaacaccacgatagaaactaaatacaagatccacatagtagcaactaaacataaaatgggtccttacaacaatcaaacacaagaactgatcctacgtctacattaattttctcatacaatgtcatctacacgaaccattatgaagaattccatcaatgcacaaatcatcatcatcatcattcacataaggagctaaaattcaaatcgaggaattttacctaagtggcaccgacgatgatgttgttgatcggaatgaagattagcttcacaaagaagccaacgaatcccattaccacaaacccaatcgcggtacgaactgcaactttcgtgaattctacaaaaccgaaaccaaatgaaaaatcaaaaccatattcaccaatacacagatctatcttcccaatcggaataatcgaaaccacagatcatccaaatcgaaggaagaaacggagatatatataaaaataacctttgcgatctggcttgtggcaacgcttgacgagacgaatactatccttagcgaagtctctgagaggatcaacgacggaatcaatggcgtccatggcggcgattctttagcttcgattaaatgatctgaaaattgaaattgaatctcactgtttctattcctttggtttctctttattaaaatcggaggacacgatgaaagatcgtcacaacgaccaatcacaaaacgagctttgatcactcgtcggatacgtttaacacgtcagcttattaaatgggctcgtaaacaatatatggcccatatccagtacaggcaaagcaaaccacatcaagtaataataattacgttttttgattatataattcagttcttgtaggaagaaacatcgtaatttaatatatacaaaatgtgcagttacttttggtaatgagatattggatacaaaacaaagaatattttgcgtttgaaggtt

SEQ ID NO: 12882 - DNA, 469 bp, Arabidopsis thaliana landsberg
tgttgtcgaatgcagcaacctgttaaagaacttaatattaatccctcttgtagctttatcagtaaatcaagaaatacatagcctgcaagtatttcagaaaacttacaacagttttctttgcatcttctatcccgaataatgtcaagaatggcattgcgaggttttcgtttgatatgtcaatatatatcaacataagctgcacggtattagcataaacataaatacaagagagagtgggtttactaaatccatttggcttttactaagagatttgatattggaaaatacctttgatttgaactttcttgcaatatcttctagaggctgagctagactttcaaagtcatcagtcttcgaaaagaccataacctaaccaagaatattatggcacaactgtgtaagccaatataccataacaattaacacccgacagagatggatgggaacccatcaggttcaaggtgaaaat

SEQ ID NO: 12883 - DNA, 490 bp, Arabidopsis thaliana landsberg
acttttggctctctctctttcattatcttttgttaactttggcactatctcttccattggtggtgttgggtggcttggtaatatacttgcttctagttgctggacatttgctttgatcgtagcttctcctctctttgcattttctagagttgatttgtttttgattactgggtttgctctcgaactttgggttgatttcagttcagagaagtacttggcaaaggggcgatgaagacggtttataaagcatttgaccaggttttaggaatggaagttgcttggaatcaagttaagctcaatgaggttttccgatcacctgagcctttacaacgcctctactctgaggttcatctcctcaagaatctcaatcacgaatccattattcgttactgcacgtcttggatcgatgtcaaccgcagaacaaaaaacttcattaatgagctgtttacatcaggcacccttagagagtgatagaatccccacagtgtgt

SEQ ID NO: 12884 - DNA, 1033 bp, Arabidopsis thaliana landsberg
aatttagtgttcattaacatgtaaatgtgaacgaataatataatgtgagtaatcgatatgcaatcaatccttaaactttgttaccactataccttgtagagaataatagaacaaaatcaattctcatatgttaattggtattggaaaccccatttcaaaatcaacttgcatattaagtaaagggaaaacaaacatgattgattagtctttattccaccactatattactagctttataaattcttggaattaatatcatctttagtgccctaaaaacaaagaaataaagctagttttctctagaggagaagaaaacaatgttatttcctaagaagagcataaagaaaactacaacatgaagtcattttctaataataaagagggcccaaattcttctttcttctcacccaattggacccttcctcaatcccttctcctctcctctctttaaattccgctaatacccttctcactttcactcttatatttcataaaaacctttttttatatctcctctacctcaaagtttgagagaaagaaagagagagaatggtgggttcttgaagcttctcacattattttcttcatcgttcaagaaatcaatatttggtgatgtttccttttatagaaatatatgtctttttctcaaagtcttgttttgttctttgccatattattacaggaagtggaagaagaggtctcaagatgggaaggctacgccgattggagaaacagagcagccgtgaaaggccgtcacggtggcatgctcgccgcctctttcgtcttaggtcagtttcaaaattccaaatttacccctcgattctcttaatgcatctttttctttatcatccacacatttatattaagaacgattctctaatggatcattgtgattgattcatatatatttgtctcttatgaagtggtggagatattagagaatctagcgtatttggcgaatgcgagtaataatgtgctatacctaagagaatacatgcacatgtctccatcaaaatcggcaaatgacgtcacc

SEQ ID NO: 12885 - DNA, 654 bp, Arabidopsis thaliana landsberg
tacaccagaaagaatttcggctctagtgaactatatattgcacaagtattttttttgaaattttacaaccgaaaaggaaattcgtcaaagaagtttgatggaggcaccttttgagactgcccgatcaagctagttcgatcacaaatataaaaatataaaagaattgctccaaactcagccctacaatagaagaaaatggtcactatggagcctaatcagtaagaattcaatattgctgagaactaaggaacctacattgctctcaaggttgctcggttttcaagcaagaaagagtcttccaaagtcagaaacctacgaataaacacaatgccaatggttaagaaaatattatggctagagaacattactccctaagaaaaacaaatagctataacaacctaatcaaatttgtttttattggtgagctataaaactttgaagaggcagatcttggaagacctccttccattaaaactgttccttcatcctctttgttcgtcaccatttccagttcaaccaaattcttatctgaatgactgcaaatgtggataacgtgaaaccacaaaaacagtaagttccaaagaaattaaacacacataagcgagatatcagtagatgagactcaattagataataatcatccatccacatacc

SEQ ID NO: 12886 - DNA, 792 bp, Arabidopsis thaliana landsberg
gtcttggttctgtgcttgaatcgtgacccaaatgaccaagatcgatcaaaatcgaaacttaacgtttcagaagatggtgctgtaccagagattaatcatccaccatggaagaaaagaagataagtttagagtttcttcagcagaggaaagtggtggaggtggttgttgctactccaagagagctaaacaaaagtttcgttgtcttctctttctctctatcctgtcttgctgtttcgtcttgtctccttattacctgttcggcttgtctactctctccctcctaggtactactatttgtgccacacaatcttaacttcttcttcttttttggtatttctatttgattcatcacttatcttctctgttttttactcttctccagattcgtttcgcagagaaatcgaaggtcttagctcttatgagccagttattacccctgtgtgctcagaaatctccaatggttagtctttttatttcacctttttaccaactcctgaagaaaacagagttttgatcttttcatcttaatattagaaacagagtttgtgtataatctgcataaaacttacggttatcgattcttgtttatgcacgcaggaaccatttgttgtgacagaaccggtttgagatctgatatttgtgtaatgaaaggtgatgttcgaacaaactctgcttcttcctcaatcttcctcttcacctgctccaccaataacaacacaaaaccggaaaagatcaaaccttacactagaaaatgggagactagtgtgatggacaccgttcaagaactcaacc

SEQ ID NO: 12887 - DNA, 590 bp, Arabidopsis thaliana landsberg
  unsure (1)..(590): unsure at all n locations
ttgtctgcgattgtatgtcattctggcaattttttttaatttgacaaaactgctactactccacagatttttttgtttaaagataaaaatctgtcataacataaaaaaagggtgtgtttgcaaagtagtcagtttctcaaacttaattatagaattaggcagttcactatttataattgttgaaacaggtacgttactttttcgtataataaagcagcgtctggtagaagcaggggtggggtagtgggggagttttgaaaattaccttgagatccttttggctgaggagagagactaatgtatgacactagatgaggtagagatttagaaacgtgtatcactcactcccctttctatctctacacacactctctctctctttataataaacatatatattctttttttcttttctttttataaccctctaatctaataattgaaatactcatcaatataaatttgttttctagattaattcacgataaataaacgtggggatangataatgatcatgggattgtagattagtagagatgatctaggggtataattgaattttgtaaattggctagagaaaaaaaaggagt

SEQ ID NO: 12888 - DNA, 562 bp, Arabidopsis thaliana landsberg
cccaaatcaagtcatcccggaccttcctcctctttgcctctatataataccaccccaatccagagcaaagccactcaccattactgagagcgtgcaaagagggggagagagagtgagggagggatggcggacgtctgcggccgcttcccgcatccgacattgttcgagtgttgctggggtcgagaaggattcaccttggtgcacgaattgtgtatggagtcggtggaagcatagaaccgagtagtgttcgggcggaatcgctcgcaattggtgccatcgccgtggaaccgcccgtctccgtggacagggtagatacggcgaaatatccgacgagaaaccctcctaccattcgcttacgtagtcgctttgtgtagccatcctcagcgcttggattaggaccctaagggcaagattggacgtctctggcgtgttcattgcagtgtgcgcgcgatgcatcgcctcaacgttgtcgggatgggaggagctctcaggtcgttgcttatcagatggtggaagggaaatgtgcccttggcgaatttcaataatgtgttggtgattaagt

SEQ ID NO: 12889 - DNA, 1043 bp, Arabidopsis thaliana landsberg
atgattcaattttaactcaaacttatttaatacaaaatacgatactgtaaattgggtatatgagatatttattagaaattatgaaaagaaaataaaagctaatttattataattaaaatttattgtatttccatatttttttgatttgcgagcggacataaaaaaaaaaaaaattgcgagcgtatgtcttaatcaattattatataagaaaaatgaatcaggttaattgtttatttatagaacataaattaatgatattccattttgggagttaataaaagtacatcatttggttagactcactttaagagcttcatttcccattttttttatttcttcattctccacaacgactaatggaagaagtaatatcaatttgtaagttccttagatattctcaattttctattatctatttcacaatatctattaatgattttgataaaatatattaagaaactatattattttcaatcttttagctttcagattagtttgttagattttttttttctgtaatgataaagcatgaaatgaaaatcttgtaaaggatcatgatcaaaaggtctttgctcattttatatcaaattgaatcaattttatttttgcttaaaatatttaaagttcaataaaaaataggtgaacatagatctttttcagataaaataaaataagatataaatctcttttccactattcgacattacgattgctttattctatttgatccatttcgagtcatcatttttatactcgagtttcatataaattatgttttcgcaaaattcagttttaattttgttgaattataatgataatttatactccctcaaatccataatatttgataatttgttagaattttgatgtaaagttttttatttaaatatattagatttagcatagtcatgattttctaagataataaattgtttttctaactgaaaactatccttgttttcatattttgtaacaaattattaaatgtataaaactcgatgaattattgacccgcaggcagaccaggtcgatcaagacatctg

SEQ ID NO: 12890 - DNA, 996 bp, Arabidopsis thaliana landsberg
  unsure (1)..(996): unsure at all n locations
ccaagtgctagttcctacgagattttaatttttcactttttaaaatttttagtattaaattgggtaaagggggaaagattcttttgaattttcggggtgttacataagtgaaaactcaccgcattcaacactagagaaattatatatgtatatgattcaaagttgacgtaaacaatcataattactctaaatgaaaaaaccctcaaatctgattttcgatttttctggtgatgaaaaaatgataaaattttcaggatttgctttataatatagaatgttggctttttttacaatacaaaaacacaaaaataaaaataaaaaaagacacaaaatagaaaacccataagtaaaccataacattctcgcacgtaggtgcggatcaggatctagttacctatgtaagcaatattgctcagtattagcttatttgagtcaatctaataaaattgtaagaaaaaattacgattatttctgctttagttatacaaaaatcattctgatattatatcgtaatcggagatttcaagaattagtttattccataaccgttgtgacaagaacgcatgtcaggtttggcaaggagtgaataatattcatgcaccatcaatacttatgcataaacatatgatcatttaagttaatatattcttactgtcattacaaaatattgaacgaaatagtaaaaacttatataaagatctgtttaaaatttagataagttttagatttatagtttagtatgagtaaatccgaattgtatgtctatagacattgattttcttataaatcactttcacaaattttcaaattagtagcggtatgcatagatattttgtcatctcccatcgtgttatagattaatatatttgaataaggagtacaagcttaaatttgttgacacaataatgacacagtacctgagttttttttttagataaggttcatgtcactatntgtatatgttgatccctaaaacattagtgtttttttttaccg

SEQ ID NO: 12891 - DNA, 1156 bp, Arabidopsis thaliana landsberg
taaaagagaatacatcaattagtaagatatcactgaataatatggctgttagttatgccttaattatcccaaagaagtattataaaaaataaaaaaaatggccaaagaagctaggaaagattttttactcctgatgacactatgtattgacaagagtagattacagaaagcaattacactccaaatatattctcacctggatgatcaaagttgtattcatgaactctagcaagttcttcttcagtcagattatgatagaacgagtcctgccaaaaatcattatcataggatattaagtcgagcaatttgtggtttatcatgatgccaaagaaatttgagaattagataaatagactgacataaatatctaaacaatggtgacaaggttgaacaatgttaaacttcagccatatataagttattagctggtaatattctccttttagatctctaaattgtgtggaattcaattgacttcatatacattcgaaacacaaatcaaaccggtggttatcacttagctctatgaaactttattagcaaaacaaaattaccaggttaataagtacaacacgctgatcatgcagttgctggattatcatatcacaaacagtagtctttcccgatgctgcgcctccagcaacacctaaccaattcaagtcacaacatatcaatcaagaccattcgtcaagctttttttatccacgaccatatattaatcaaaaatgaaagcaaaagcagaactcacctattacaaaaggctgtctttggatatcttctgatgcagaagtggtttccttaagtgcacttggttccaacccattcatgtgcccattcacgtgtaaaccagaaaaatgtgcccgcgaggcagcttcgatcatgtcaacaacggacttagaacccatcccgacgacaattctggacattgtacattggtaaaataacttaaatctttatcacaatcatgcataagcaaacacaatacaaggaatcttacaacttcatctagattctaaacaacaatgtgaatcaaatccaactttatccagcaaaccatagaagaaaagagtgaaaaatttcaaaagcaaccaaaaacggtaaatccaaactcttttgataaccatagatcagcaaagtgcgagaacaatcaaaaaga

SEQ ID NO: 12892 - DNA, 954 bp, Arabidopsis thaliana landsberg
acaacacaccgtctctcctccacctacttccgccgccacagacttacgaaacggttcggcgtagcattgtttcagccgacgaacgagaacgattaggtccatactcgaagtttctgactgagacagaggatcttcttctccttctttgttatgagagatggttcgaaaagtgaagtgtgggtggcgagaaggatcggggaagttgtaggaagtgtggaggatcgtcacggagaagccacggtggtggaatattccagcgagctcgatcatggggttgaagtgccctggaaatggaagagggaacatgattattctcctcccttttctctcttccatttttcttactgactttgtttttttttctgtatttgggagattttttagaggaaaagagttttggagaagtttaattaatttgtcgttaagggtttacggttacatgagcatagcttatatttatgaattatgacactcatgatccaattacaaattgacagctgtcatagcaacatgtgaaaagagaataaaatcgtttgctcgctgactttgacttgtgagaacttcctgtccaagattgtttacctgcatgcaacaaattttctttctcttgtctcacagttttaaactcacacttgcatactaatatactaaacaaatgttaaataaagtttcatgatgacgatcctttctgattagactaacgcaagtgaaaatgaaatttcttgtcctttctgattagattattgcaagtgactgtcctttactataagaaacatattttcaccaatatatagttaggcaagaccggaaaatgtcacgtttttctaaaatcatcacatggaaaagacaacgtggtatgtatatacacaaaatatgtaacaatataattaaaaaaaaacggaattaagagttacaatggaactatacaaagtagtattgaaagccaaagtgtgg

SEQ ID NO: 12893 - DNA, 718 bp, Arabidopsis thaliana landsberg
cattatgcaattgttccatagcctcctgagctgtttttttgcttttgaaatcttgtttttgtctctcaggtggggattaggtgcaattatgtacgaaatgctcgttgggtatcctcctttttatgctgatgaccctatatcaacttgcagaaaggtataaaatcttgcttttatgttcactatcctagtgagtttactgtgtagtataaaacagtgtgagcaatttgactggcgtcctatggaactgaatatgactgtttgtatacaaaagtgttagtcacatggtaggaccataggagagtgttcaattctgtgaccaaattttggattataagggtgtcaagttatgtagaaaggccacaattttgccagtttatgcgcgtccaagttaggaaaatgttataatattatgtcagtcttttcatataaatttgacaactatgctttgatatgtgggtaaaatttccattgtcaattccttttgtttgttctttgtggatgcataaaagaaaaacaagagattttgtttataagattcactgatcatgttcatgaagtcttaattccttctgctagatcgtccattggagaaaccatttgaaatttcctgaggatgcgaagttttcatctgaggcaaaagatcttatctacaggttgctgtgcaacgttgaccataggcttggtactggaggaggagcccagcaaatcaaggtaagga

SEQ ID NO: 12894 - DNA, 624 bp, Arabidopsis thaliana landsberg
  unsure (1)..(624): unsure at all n locations
agaacaccctnnnnnnnnnnnnnnnnnnnnnnnnnntggtttttcaggcccgatttggttaaagaaacagaagaaaaggttcaacgtataagacataatctgaaagaagctcaagcttggcagaagaattatgcagataaacgacgtcgaccattggtttttcaagccgacgatcatgtatacctgaaagtatcaccgatgaagggtgttagctggttcggggtaaaaggaaagttggcaccccgatatattgtctcattccccattcttgagcgatgtgggccagtggcgtacagacttcaattaccagaatcattatctgcggtgcataatgtgttccatgtatctcagttaatgaaatgtcttcggattcctgatcgaactatagatgtggtggatgttactttggaaccagacttgacttattcagaacatcccattcgagttctggatcagaaggacaaaatcactcgaaagaggactctcaagttctataaggtacagtggaccaacacactgaataagaagctacctgggagacctgagacttcctatagaaaaattttcgtaggtttttagcttcatgtaacatgtaagatttatgtactttantgtaaagttaga

SEQ ID NO: 12895 - DNA, 671 bp, Arabidopsis thaliana landsberg
aaaacggaaacccctacctgagatttttagtttctgtttaagtttgaaatgaatgatctttgattaaagttttggtctttttttaaattagactaatcaaagttctgatctttgttgtgtattttactgttgcagacattgtatctacttcacttgctgtagagatatggtatcaagatcttattcaaacctcttggatcttgcttctggtaacttccattcgttttctcgagaaaagaagaggtttccaagagtagcaactgtcactggtgtcttatctgagctagatgatgataacaacagcaacagtgtctgctctgatgctccttcttccgtcacacaagatcgaatcatcatcgttggaaaccagcttcctattaaatcacatcggaactctgctggtaaattgagtcttagttgggacaatgactcgcttctcttgcagcttaaagatggtatgcgtgaagatatggaagttgtctacattggttgccttaaggaacagattgatacagttgagcaagatgatgtttctcaaaggttgcttgagaatttcaaatgtgttcctgcttatatcccacctgagctattcactaagtactatcatggattctgtaagcaacatctatggcctttgtttcactacatgcttcccttaactcctgatcttg

SEQ ID NO: 12896 - DNA, 940 bp, Arabidopsis thaliana landsberg
taagattctgtaaataactattttgatacttttaatttttgaaatatgaagcaaaaaaaaaaaaaagatgataataaataaaaaatctttaggattgcttagaaatgataacttcggagctatgcttaaggactgattcttctgctttcctttttgcattcttctttatttgaatcagtttcatcctatagaaaaaagcaagaacataattatcttagtttcatcctaattttagccttatactactaatagtctcaataaaattgactcacctcttgaaagagataattttctctatctcttgcttttgttcagccttaaaggctaaccattttcataagtacttaaatcatccaatgttcctaaatctgtgcattcataaagaccaagcttaaaatacttaacatattctcattaaaaacgtaaacaataagttagtaaatttcacactttaaagcaaaaactttgctttttctctaaaccacatcagtttctagagaacaagaccattgtcatccaatatgattaggtcagttctaacagtttcacatgttttcatctctacaaacatatttctttaagttaatccttcatagcaacatgaaacagaaaagtataacataacaactgtaagaccattgatataaaaacttcaagggatttaaacttacttctagatgcaatcctttttgcctccagcatctcgtcatgagcttctttatctttagtttttaattgagataaaatttctttgtgctcttcaatagataatagagctccggtattttttcatatggattttggcaatatgactttgcatcgtctttctcaattgttttttcctacaaaaataaggtttaacacatagaatttgatattaaaaaaaaaacttgcaggatttttttaaaaataccattttttttgccatttgccagacttt

SEQ ID NO: 12897 - DNA, 584 bp, Arabidopsis thaliana landsberg
  unsure (1)..(584): unsure at all n locations
caattcagaaacatttaattatatctaataatcataattaaatcttaatcagttctcaggtggaggagggaaattaagatccaagtccaaaaccacacgtcgtccttcatatctaacgacatccatcaccaccgacgaagaatccgattcactcctttcatcgaacaccatcatcccagccttaacctgaatcttaggaaaagggaatctcgaactaacagagtcagatccgaggttgagattaggaaannnnnnnnnnnnnnnnnnnnnnnnnnnnnnnnnnnnnnnnnnnnnnnnnnnnnnnnnnnnnnnnttgtaacaagggaagttggtcttggctttactccacgaaactcaatagcacgtttgtcgtaggcacgagcggcttcttcaggagtgtcgaaagtaccgagccagacacgtgacttcttgaaaggatctctgatctcggctgcgtaacgtcccgatggtctcttctcactcctctgtaacggactccgttactttcgttgggttttacggctgcggttttaactgtcggtgccatgacacaacaaccacaagatttgtttatgtaagaaaag

SEQ ID NO: 12898 - DNA, 602 bp, Arabidopsis thaliana landsberg
  unsure (1)..(602): unsure at all n locations
tcatcatctactcataagcttcggatcatctgctaagcttcggctcaatgctcttcgtcttcatcatcctgtacacatcaaagcattataaggtaaattcaagttttaaggaaaaggtaagcgcaaggtatgagtttattaccggtttaaggtgacttcgagcttcgtcaccagccaggtttcgcctgccctttgcccagatttgagtaatgaatctgtttctgatgcttcggggcagaccggggatgtcatccaagtctgctggtgataggctgaagtttggtctgtttacaatatnnnnnnnnnnnnnnnnnnnnnnnatgaaagcgacactttgcctcgagaagctagcagggcacagaaatcaccatgtccagctataatttcatcgagagcatcaacttcaccttcaatatgatcaaatgtgcccggcagatcttcaaccgaagatttaaatttttcggagctggctcaacggagttaaagacctatttcagccgttgaatgcaccgagtcgcgaagcctaggcatttatcttgaagaccttgagtgatttttgtagatcgaatttttttagctttggctctgagttttgttttgaa

SEQ ID NO: 12899 - DNA, 872 bp, Arabidopsis thaliana landsberg
  unsure (1)..(872): unsure at all n locations
ctttaatagctggggagattaccaggaagaccagataacgagatcaagaactatatggaacactcatatcaagaggaagcttctcagccgtgggattgatccaaactctcaccgtctgatcaacgaatccgtcgtgtctccgtcgtctcttcaaaacgatgtcgttgagactatacatcttgatttctctggaccggttacagcggaaccggtgcgtgaagagattggtatggttaataattgtgagagtagtggagcgacgtcggagaaggattatgggaacgaggaagattgggtgttgaatttggaactctctgttggaccgagttatcggtacgagtcgactcggaaagtgagtgttgttgactcggctgagtcgactcgacggtggggttccgagttgtttggagctcatgagagtgatgcggtgtgtttgtgttgtcggattgggttgtttcgtaatgagtcgtgtcggaattgtcgggtttctgatgttagaactcattagagagtcaatcgagaattctttaggaatctttttatatatttagatcgtcaattgtgttttttttttgttcacatttgttatgtaacatcaagtaagaaactagcataattatttgatggcaaagccaaaagattgtgctcaaagaaatttataaaaacaacaattagggcatgttgtacttgcagatgctaaaaaacggtaatttttataaatgttataatttcataatctagcaaactaattaatttaatactacattntattcgtgattaatcttggtatatgatatacgtcatnatgtttaagagttttttttggtttcaaattctatgtaagaataatgtttcattttttaattacgtat

SEQ ID NO: 12900 - DNA, 491 bp, Arabidopsis thaliana landsberg
  unsure (1)..(491): unsure at all n locations
cggccgcacctggagtcttgtcccgtgaggccctcatcggtcattgacatcgcccatttcccccggcggccagctatgttggcatagtcccaccgggtaaccaccatacggaaaatggtttaactcaaaaacacggttcagcctaacgtttgaaaaacgaatgtttcactccttaaagtctccgtctttggcacatacttcactacaattttcacggcctcagccttgacttcacgcacaaatgcggctgcatcacgaccgtgtagatccactgcgaaagctagacttcgcaccatctggctgctcagggttggcatctggcggggggnnnnnnnnnnnnnnnnnnnacatgtgccaaggccacaccgcataggcaataaactcctccaccagatcgcgcctgctactcaagcgggcagcatatcgtacggcccttcgacttcgtcttcttctgccagctcaaatcaaggaaatgccacataacaatgtga

SEQ ID NO: 12901 - DNA, 422 bp, Arabidopsis thaliana landsberg
  unsure (1)..(422): unsure at all n locations
nnnnnnnnnnnnnnnnnnnnnnnnnnnnnnnnnnnnnnntatgtaactgatcacgtgaattagtataccggaggcaagaactctattcaccgtggagcattgaggagatgactagggcatgatcaaatgtccatgtcgtgtgctactcggagctgcccggttcaattctcctcaggcgcttgtggattcgacttcccgtttccaaacaggcaaatcttgccgtgtcctcaccctgcgcgacataccgacgaagtggcttcatggactcgctcatgcgcatcgagtgcatactgactctacttgctcgccagacnnnnnnnnnnnnnnnnnnnnngtgatgttcaattactcggaaggatgctatactggtgaccttctggacgggatcgtctcgtgagactctgagcttcagaagtcttcgg

SEQ ID NO: 12902 - DNA, 1451 bp, Arabidopsis thaliana landsberg
agctttgctgtaaactaatcatcatgaaatttcaaataacaaaaaaaaactaatcatcatgattgtatttttaaaaaggaaactctctttcctataatacgataataatgagaacgcatctcctatcataatatacgtttctaaacacttattgttgttctcgtgtagaagcatgctcgaaattaatcaaaattatctttgtttttgttttgtttcacgttagactagcctcatcgatgtaagattaatgaaagattacccgttacaagtcggtaactagtaacattagtgtgtatataaataagaatattagtggttacgcgaccaaattattgcatagtggaaacatttaaggctatttttccaccattactttgcgtacttgaattgaagaactctttacattctcagcacatcaaggtgtctcctttgagatcaaaaaagtaggaaaaataaaacgaaaaagtactataaatattaatttcgtttacgaacaaaaaagtattaaaattccgtagacatttttggggggacaataattttagactcgtacaatgctttcatggaaatgagtttgttgttgaccgatggcttccctttatttttctttccacttttttattactaattaggaaactagtaatatttatactcgatgtataattcactaatcatatactttccaaaacgtagcaaataattcgactagaatatattgtccgtgaattaaatttcctcttttctttttctatgttaaccatcatgtatctgttatttgttgattttaataaccatactattttatacttttttaaaaattattgaaaataaattcagattacaagtctacgataatgattcttcttctttttcattgtagataaatttcttaaaagttgactacttttctgtcagtatatgtcacatttttctatctatcgttcgagaaaaaaaaagaaaaaaaaagtttacaagtgttacctctaaagtcttaaccaccatttctttctattttgtaaaggaatcaaatagttatttactatgtttgagttcatctcttgagttttctgaataaggtggtcccataaaaggtatcaattaattcacccaacgattataaaacaaaagtgtttacaccagaatatcgccaatcatagtttctctcattttataataattttctccatcttcttccttcctcttcaagcttatagaacctccaagaaccataaaactctctctgcaacaatctatactttcttcattacttttataaaaaatgggaagacattcttgttgttttaagcagaagctaagaaaaggcctttggtctcctgaagaagatgagaaacttctcaattacatcactagacatggtcatggctgttggagttctgtccctaaactcgcaggtttggtctctatgtgcgtctataatatatatagcttaa

SEQ ID NO: 12903 - DNA, 1219 bp, Arabidopsis thaliana landsberg
tgtttagctatgaccaacatttactttaggaccgtaagtaaatgtgaattttcattggtatttcaaaaattggtgaaagtatttccaagatttttcataatttaaccaattatgtttagcagtttgtgatcatttatgctggctctaaattaaattcaagcgtatttttgcttaaatctatgttctattatatttatgaatttattttttcttagattcttctatgtcatgataataccagttgtatactaatttgacatttttttcttaaaataaattgaagagcaaagcataacaatcgaggctagtgaaggcaaagaatgtataggcaaatgttatagatccactactccttctccttcgatgatagattcaaaagaaggagccaacatagaatgcatagaccagaaaggacttagcattaaatgtcctcctaatctttccctttcaatgctagattcagaagaaggagtactcaaccaagaatatatggacggtactaaagaacataaaagaaaatgtcattgcaagtgtcataaacatagacctcctactcattcaccttcaatgatagattcagaagtagatgtcaacaaaaaacataaaaaaaaatgtcattgcaaatgtcataaagctaaagctcctaaataaatattatatttaaaatagatgtaactctgaaatatatattcttcatataattattattaataaaaaaaaagatctattctctatttttgtttgatagtgatacaatcaatttccaaatgacaattcttagtcttataacattaaatctttcaaattttttgaaatgtgtgaccgacctctagaaaacaatgtgagatccaaaaaccaaaattggtttagacacacgaaaattgtgcgagtgaatcccacacagataaattggatgataaatcaagtcgggtttgacgatgatttcaacaagactcgagcttcaccacgagagaattgactaattggaattttgtttatgatatagttgcacatcatggaggttgcctacgtacatttgtaatgagatcaagccatgtgaagttcatactagaaagggtcttttaggtttttgtgtgagagatttcatccaaatagatgattatctctttatatgaacatgtagtcagtttcgagatatgttgaaattttttattttttgaaaggagatatgtatcttttcctcttttctgggattctt

SEQ ID NO: 12904 - DNA, 1404 bp, Arabidopsis thaliana landsberg
aaacgcctgtttcagactgtgtcattgggattccatcctactttacaaactcacaaagacttgcctatttggtatgctgcagccattgctggcctgaggccattgagattgatgcatgattctaccgccactgcacttggatatggtatatacaagacagatttggtagctaactcgagccctacttacattgtgtttatcgatatcggtcactgtgatacacaagtgtgtgtggcatcgtttgagtctggaagcatgagagtccgttctcatgcttttgatagaaacttgggcgggagagattttgatgaggttctcttcaaccactttgcccttgaatttaaggagaaatacaacatagatgtatatacaaataccaaggcgtgtgttaggttaagggcatcatgtgagaaagttaaaaaggtcttgagtgcaaatgctgaggcacagctgaatattgaatgtctgatggaggagaaggacgtgaggagcttcatcaagagagaagagtttgagcagttgtcagcaggcttgttggagagattaattgtaccgtgtcaaaaggctttggctgactctggtctaagtttggatcaaatccactctgtggagctagttggttcagggtcccgcattccagctatatctaagatgctaagctcgttgtttaagagggagctaggcaggactgtgaatgcaagtgagtgcgtagctcgaggatgtgcgcttcaatgtgcaatgctcagtccagtttttcgagttagagattatgaggtacgctcttctctatatgtgaaaatactcttgcttacttctcatttctttttgagtatcgtgtgtattaaatacatgatggcatttatacatttacggatttattttctataaatggtgatgtgtcttttgttaatgcttccctatttccaggttcaagattcttaccctttcgcaatcggcttttcatctgataaaggtcccataaacacaccatcgaatgaattgctctttccgaaaggccagatcttcccaagtgtaaaggttcttactctacatagggaaaacactttccagttggaagccttttatgcaaaccataatgaactatcaccagatataccaacacagataagcagttttatggtatgatatctttcaggcttcccttattcagatatatattcagtctttagagttctgattacgcactggatggttatgccactattgggcactgcatattttatggaaagttaattttgctgtgtatgttttgttagattgggccttttcatatatcgcacggagaagcggcacgtgtcaaagtaagagttcagctaaatctccacgggattgtcacgattgattcagctacggtgagtacaatctcatcagtcctctccagat

SEQ ID NO: 12905 - DNA, 563 bp, Arabidopsis thaliana landsberg
cctgtccttccattggcttccgggcctcaattcgacagttttggaaaactgctgaggcatgaccgaaaatgaagtctacggtgcccgtgatgaagcagtcacggtaaaattgtctgtatgaatgggcatagagggtatcctgataagcatcaatgcgacaccgctagatgactacagcatcaccgctcactcgaagagcaacagcctgtccctttgctggtccagccgtgttctgtatccaaagatcctgggccatgaaccaatttccatcgatggctgcaagtttataaaacatatgtgagtttaagaaatacaataataaatagcttccgacatataatccgggctttatgtgaatgatataataaaccaaatcgtgatcaatgccttagatttatttggtttcttttcaattcacttaagatagtccatattgtaatttttacagaaacaaatataatgacattaaaagcttaactatcgaagagcatttacagatgattacaatagtttcattaaaccgatttggtttaatacggtttagtttttcatccagtaatatg

SEQ ID NO: 12906 - DNA, 931 bp, Arabidopsis thaliana landsberg
cctgtttctctctccagttttattgtagaattcgctgtcattttcacaacgactcacttctttcagctctctccattcggcgctctcttctggaattgaagaatcaaggtaaatgatcccacatagatcccaaatgtttataggggatctggttcttaatgagattggtcccttgttgacttttgacaccattttgtagattagcaatggcccatacatcagaatctgtgaatcctagaggtaacaaaacactttcattagtaaactgaatttgaaggatgaattttttttttgatatatgaatgttgatgaatcagatgtttgcattgtgggtgttgcacgtactccaatgggtggctttctcggatctctttcatctttacctgccacaaagcttggatctttagctattgcaggtattaaaaaacagttcatgtttctgtgcaaaatctttagctttatgtataattgacgagcccttgttgttgtttttaatgatttagctgctttgaagagagcaaatgttgatccagctcttgttcaagaagttgtctttggcaatgttcttagtgctaatttgggtcaagctcctgctcgtcaagctgctttaggtgcaggaatccctaactctgttatctgtactacagttaacaaggtttgtgcatcaggcatgaaaggtgagaactttggaacatttgcgctctgcattttttagacttttgatttgatgcttttgacaatgtttttctggtttggttggtggtttttcagcggtaatgattgctgctcaaagtatccagttagggatcaatgatgtagttgtggcgggtggtatggaaagcatgtctaataccccaaaatatttggcagtaagcaaggtaaaatgatgtggttttacggaatacattttgtcttttttacctttatggca

SEQ ID NO: 12907 - DNA, 1017 bp, Arabidopsis thaliana landsberg
gatttgactgtttaaaaattaaatctttgtgtttatggataggtattttactacggagacttagctcaaagccaattaggccagctgtaggtgttgttggctgtgttataatgcctcacaatgtgtttttgcattcggctcttgtacaatcgaggagaatcgatccgaagaggaaatcccgggttcaagaagcgcttaattactatttgatcgagtcatccgtcgcacttttcatctccttcatgattaacttgtttgtgactactgtctttgcaaaggggttttatggaactgagaaagctaataacattggcctagttaatgctggtcagtatcttcaagaaaagtttgaaggcgggcttcttccgattctttatatctggggtatcgggttgttagcagccggacaaagcagtacgataactggtacatatgctggacagtttataatgggcggttttctgaatctccggcttaagaaatggatgagggcagtaataacaagaagctgtgctattgtgcctacaatgattgtggcaatcgtgttcaatacttctgaagcttccttggatgttttgaatgaatggctcaatgtccttcagtctgtacaaattccttttgctcttctccctcttctaaccttggtatccaaagaagaaattatgggagacttcaagattgggcctattctccaggtaaatttccacttcttttactacaagtctccataggatacaacaataggtgaattagtgttgagtcttatcgttttaggtgtctcgacttttttagtttcactgtttgtgcaattatcttagtaaacatgtagaattgaaagtccttcaatggaatagagaagcatgaagagtgagtatttgtaagttgattggatttattgattacattgcagagaatagcttggactgtggctgcacttgtaatgatcatcaatgggtatcttctgttggatttctttgtatcagaagtcgacgggtttctgtttggagttacggtctg

SEQ ID NO: 12908 - DNA, 614 bp, Arabidopsis thaliana landsberg
  unsure (1)..(614): unsure at all n locations
tcccgtatgccgaattctcatataacaacagccatcaggctggtattaagatgtcaccgttcgaagcattgtatggacgaaagtgccagacccctctaatgtggtacaatgtaggggaaagggcactggaaggacccgactttgttaaagaggnnnnnnnnnnnnnnnnnntgatccgcaagaggttacttgaagcaaagagtcgacagaaaagttaagcagacaacagatggagagaactcagatttgaggaaggagacttcgtatacctcaaggtctccctgatgtgtggagtcaaaaggttccaaatgaaaggaaagctagcaccgcgtttcgtcggcccctatcccgtcattagcaaagtgggacccgcagcataccgccttgaattaccagaatctatgccagatattcacaaagtgtttcatgtgtccagctccgtaagtgcctgcaagtaccagagaacacatcgaggcagagacaattcagattcaaaaagatctccagtaactgggaaagcccaataagatcttgactcagcagtcaaaagacccgcacatcagagtaagctctgtaaggttcagtgacagagaggagagaggagctcctgggaa

SEQ ID NO: 12909 - DNA, 799 bp, Arabidopsis thaliana landsberg
gaggaaaactgctttccatgcccatgaatctgaatacaggatacgacgccatcatgaggggcaagtttacgcagcaatggtaaagtaatagtcgagcaatgcattttccctgggcttcaggagtattacttttggtctgcaaaagaccaaacaagagtacttgataaatctagaagacaagctaaaccagttatcactttgacattaccattggggaaatgagaacactgacaacttggtgatatctttccattcagtttatatttgaacagacacacaaagctattagttagaagaccactgaatcatgagaagaaaagacaaacctgaattttgtagttgctcagaaaaccagtcctttctaggaaaatgtaagggagtccagacaagaaaaacacgctttcatgaagtataaaactcccaatacacgccagttgaaagtcactgaaatgcgtaacaaggtactgcatcatcgccacaaagaagggtcagtgtcacagctagaactgtcaaactaaagagctaaacatgattgccaaagggagataaaatttgttcaattccacgaaaactgaaggcaattgtatatcattgacaccatccatgctgttacgtcacgcagaaaagcgagttatgaagaccttgaatggaaacctattgctgatgaacacgtatcacattcacatagtctctaagctagtcctagcttcaacatcaattcatagatcccactgaaattccagataataagtctagcgctcacagatatcacatacgacatctagtattgtgtgcaact

SEQ ID NO: 12910 - DNA, 698 bp, Arabidopsis thaliana landsberg
agcaccggagttttcgaaaatcaaaaatgcaagcgctaagaccgatgtctacagcttaggaatcatcatattggagcttttgactgggaaatctccaggagagccgacgaatgggatggatttgccacaatgggtagcttcgattgtgaaagaagagtggactaatgaagtttttgatttggagctgatgagagagacacaaagcgttggtgatgagcttttgaatactttgaaattggctttacattgtgttgatccgtcgccggcggcgaggccagaagctaatcaggtggtggagcagttggaggagattaggccggagactgaagtggagacggagacgacgccgtttggatctggtggtgaaggaggtaaagatttagggtcaaatgaggagttaaggactgttttggggtttatgtgaaagaaaataaaaaagaagggaccgatatacaaataccacatttatattttcattgttgattctttgattcaagtaatttgtacattaaaatggtttgaagtttgggctaataatgcaatgctattagaccattcattccttcttggatgaagatgtcatactagaattgatgtggaccgtacttattttctgtgctgtagtattattcagctgtttctggttcataagagagatgaacatgtttccaaacttcatatcgacattgattcaccac

SEQ ID NO: 12911 - DNA, 1325 bp, Arabidopsis thaliana landsberg
taaaggtctgactcaatcacagcttcaagaccgttcttccctatcttaacccgtgatgcaaagaaaggaagatcagtcagagtcgactccacaaacgagcactcgtagacatctccgtctccatcaagagcacgaagagatgactctacaaatctagcagcagcataagccattgacaaagtagctgaacctgcacctgccttagcatcaacaacctcagtaccagcgttctgaatcctaacagtgagctcttggatctcttcatcagtaaagttaacagacggttttgtcttcgagaggagaggcaaaatggtgattccagcatgtccaccaataaccggaacatcaacatcaataagcttaagattcttcttctgagaaacaaaagtgttagccctcacaacatccaaagtagtgacaccaaacagcttcttaggatcataaacacctttcttcttcaacacttcagcagcaataggtaccgtagagttaaccgggttactaataatatgaatgaaagcattagggcaattctcagcaacagcttcaacaagagtcttgacaatattggcattgatgttgaaaagatcgtcacgagtcataccgggtttcctcggcacaccagcagggatgacaacaacgttaacatctttcaaacaatcagctaactcagaaggaccagtgaaatcacgaacttgagaaggagtgttacaatgacttagatcagcagcaactcctttaacattggcgatatcgtaaagatgaagcgtagagactaacggagacatcttgatgagaagtgataaaggctgacctataccaccagcagcaccaagaacagctactttgtacgaagcgttgattttgaatccgtaaggcttcttgtcagatgtttgtgcattcgttacggaaccgcggagagtcttggttaaggaagaggaatcagatccggagatgagagaggttgatttgagaccggtgaagctagggactgagttaaatttcacagattggagtcttgaatgtgtgatggagctagctttggagtaagatgaagaaacagttgaaaacagagaagctgatggtgctgttgccattttttgttctcacataacatatttaaaaactttgttagataccctaacggaattcaatattccagaaaaacgaaaaaccggaaaccgattgaacaccaaaattagaaaaacccttaaatcgacgaagaggaccttaaaaaaaccccggatacgaaatttccataaggtttttatcaaaccgagaacttcaaggtgaaaatcccttaaatttattgaagaaggaaaaaa

SEQ ID NO: 12912 - DNA, 955 bp, Arabidopsis thaliana landsberg
  unsure (1)..(955): unsure at all n locations
aaagaatggacgatctaaagttataagaaaggagagattaagattaacatgaacctgtttttatttttgtaaaagaggcttatacggttgccatttagatcgtaatttaactggcaaatggattgaaagatgggagagaaagtgaagaatcttaagatcgtagaaggagcagttgctaaaaaagtggtcagatttttatttattttttgtcaaaaaaaattctgttgaaaaataatagtagaagacagtgaattgttttacgaatgtgaaagaccaaaattttagacttaaacatatgtggcaaaaggagagactaaggagagacacgcagttttaggaaaagtgactcttgatttattataattagatatagcagccaatcatattagcaatagttttagatttaaattaaccgtttagcaacagtatcataaaattcaaaagttcaaaatatatttacggacagagtatgctgcgacaaaactcaattaacttggggtatcccccggttttgtgacttgatttaagatttcgatttggtttgattttcggtttggttcaaatgtggaacttaaaaggtgactctctctctgtgtcagaagtgtcttcctttcctctgcattctcttcttctttgtgccgtgtgggtgtggcatttctcttgtagcgacaggaattgtgccagagctgcaacagcaatggcgacggaatcaatttttctcaagcctgtatctttcgcatggtttacgaaaaacccattgtatcaatttcataaaagaagacagctttcctatcgaattcgtcgttttcgattcggtgtaatttgctccaagtcatctgattatcaaggtaaccgccaattntcgactcttgtgataaaattcggaactttcaattctttagctgtctcaattgggtggtgatggttctgaatgatcatcggagtttatgtcaaa

SEQ ID NO: 12913 - DNA, 986 bp, Arabidopsis thaliana landsberg
cgtaactcacactagtgagttaggatcgtaattaaggaattgagtaatgtgtggacaaagggatttgataaagaagcctggtaatgcatttaggagatcgtgagatgaaagaatgccattagcttagacttatatctataatgatggtttcaacagtccttcatgtagaggatagcaatttgttgatccttgcatctcatcgatatgatatgttatcttggtagttggcttgttctgaggcattcttttgtaatgactttattcagatatgagaggaagtacatggaggaacttaagaccaaaggagagcatggaaatgaagaagctaagaaggctccagcgactggagagacagaaacagtagaaaagaatgttgcaatccgtagaacatctactgcgtcttctgagcaggatctggatacattcctgttgggtgatctagaagacagtgatgaagctccaggtgagaatttctcttctctgctccctacttttaactgtgtttaggttatcttcctcttgtatccacgtcactaattttgtcattataaacgtatatcaagttgtttgaatcagccaaggcgttgaatttggttttgtgtatactgtgtctctagctcagtttagcaggatgtataatctattaatttgtgtttaaccccttccagatgatggtgatggaagccttgaggatgactttgacaagattggaaactcagtaagcacccttttacatttccgccaaatgtagaccttgttgttcatgaattcggactaaggaacttcctatgctgcgtgtttacaggatgttgaagacgagaagcaatcatctaaagctacaacaaatgcaggaaacgaagtgtcttgttagttttaagttccaattagaaaagggtaaatgaagaagatgcttgaaatgtatagttttgatttaagtagtgatgcatacgaagaccttgatttcgcaattcatatatgattcattg

SEQ ID NO: 12914 - DNA, 1054 bp, Arabidopsis thaliana landsberg
ttatttttctgaaatgaagaggaatggtgttagtccaaaggaattcacttagtctgtcattctcacagctcttcctgtattatctccatcagaggtccacgcacaggttgtaaagtctaactacgagagatcttcaactgttggaactgctcttttagatgcttatgtgaagttaggcaaagtagaagaggctgcaaaagtttttagcggtattgatgataaagacattgtggcttggtcagcgatgcttgcaggatatgctcagaccggagagacagaggcagctataaagatgtttggtgagctaacaaaaggagggataaaaccgaacgagttcacattctctagcatccttaacgtgtgtgcggctactaatgcgtctatgggacagggaaagcaattccacgggttcgctataaaatcaagactcgatagttctctgtgtgttagtagtgctcttctaaccatgtatgcaaagaaaggcaacatcgagagtgcggaagaagtctttaaaaggcatagagagaaagatctagtatcatggaattcgatgatctctgggtatgcacaacacgggcaagctatgaaggctctcgatgttttcaaggagatgaacaagagaaaggtgaaaatggatggtgtaacattcatcggagtatttgctgcttgtacacatgcggggttagtagaagaaggcgaaaaatatttcgatataatggtgagagactgcaagatagcacctacaaaggagcataatagttgtatggtggatctatacagccgagctgggcaacttgaaaaggctatgaaggtcatagaaaacatgccaaatccggctggttccaccatttggagaacaattcttgctgcatgtccgtgtgcacaagaaaacagagctagggagattagctgcagagaagatcactgcgacgaagccagaagattcagcgggttatgtattgctgtggaacatggatgccaagacaggtgattggcatgagggagccacagtgtggaagctgatgaatgataggatcgcgaagaacgaaactgg

SEQ ID NO: 12915 - DNA, 584 bp, Arabidopsis thaliana landsberg
atattcagaactcaagtcacagtcaaactatcacatttgctatcgtttgtttttagttctgatacaaacgaattcctaaaagaaaacaaagagacaaataaagaactagctcacttgggatgagaccggtcactgctcaaatgggactcgcacaaacagtcgaccatgcaggctcacaaccgctgacgtgtgcagcggatcgattcttgcgggaaagttcacaacctaccataaccaaaatcggaaaacaattgacaactatccttcaattagcaactagggctctgtttggagtgttagaatctaacctttttgaagggtgtgatccccaaggattgtcgttgctcaggttggcctgctataactagccgccctgcagggtctgactgaacacggacctgaaagaagaaatcaacttatattgaggaactagattctgtgtgcaatcacccgcaaaattactatgaaattcattacaacggacaacagtgtgtgtatttagattcgaatccagtatatgttccatctatgtcgtaggaatcagtacactccagtgacacacactgataaagagcttagagatg

SEQ ID NO: 12916 - DNA, 803 bp, Arabidopsis thaliana landsberg
gttccattatccgcatattgactaaactctacactctcacttgcaacgttagggtatggaccaggcacagtttcccaactctcattctctacatcgaacacttcaacccaatcattatatcgtttcttgcaacctccgattacgtaaatctttccatcaatcactcccgcggctgcgccaccgcgatccctttgcatactagggagctcacgatacgtatggaatctacagtcgatgacaatcatagtagatacaggttgattcaagccgatgaatccaccgagtacatacatcttgtaaccgattgtgacaacagcagatccaggaagcattgaaggaagtgaagtgatttgtttgaactgtaatgagatccgatggagaatgtaccagcgtgggagatcaaaaggtgggaatccgattgaggtataaagaaccggttcggtgaagcctaggcgcgagcgtgtttggaagagttccggtgaagagattaggtcacgataagctttggagatgagagatagcttcgggtagtgatatctccggacgagtgcgacgatgattacgatgagttcttctggaagttctttaggaatcggaggaatattctcttcttcttcttgaggtttcttgtttgcagcgccgccattagagccctcgtcggaagtttcagagattacagccatcgccgtgtgacgtcagcagcgaattaacgtaaagcgagagcctaatccgagttttgaataaaagaaacaataatatgataactgagagtattaaatcagtttttatacaataatgtgttt

SEQ ID NO: 12917 - DNA, 548 bp, Arabidopsis thaliana landsberg
tttccattcatctcccaatttcatacgaatctggtggtacccactacgcaaatcaactttagaaaagacgatggcaccactcaattcatcaagcatatcatctaaacgtggaatagggtgtcgataccgtatcgtgatattattaatagccctacaatcaacacacatacgccatgttccatcttttttaggcactaaaataaccggaacagcacacggactaagagactcacgcacgtaacctttgtcgagtagttcttgcacttgtcgctgaatttcttttgtttcctctggatttgtcctatatggcgcacgattcggcaaagatgcaccaggaataagatcaatttggtgctcaatccctcgtataggtggcacccctctggtatctcacttggaaatacatcagaatactcctgcaaaatgttagtaataacaggaggcaaagaatgctgcatatcttgaattgaaatcaaagcatccttgcataccaaggcgtaggcaacagtagtggaagcaaataattcattaacatcagtttttgttgc

SEQ ID NO: 12918 - DNA, 564 bp, Arabidopsis thaliana landsberg
cttgttaacaagggatgatgtgtcttcaatatatggtccaactttgaccatgcgaagcatccggtggaaagaatggcgaccccatgggtatgtgagaaagaagtcaacatcttttaccatctcaacaacttcagccgatgccttaacaaggtgtgtacgagagagcaagataccatcaactatgacaataagagcgagccgaaatttgcgcagctcgccatatcaggctcacactttaaccatctaactagttccttcatagtaacaaaaccaggtttcccaccaattagagtataccaataaggggcagagccttcagcatgagttgttgcagaagcaagttcgatctcagaagttaacgccgagcagtccaaaccagtgacttcatgaaattctgtaagtgaaaacctcaagggctgaccaccaaaaacaaaccacagctcatcactgttagtggtatgcagctgcctacatagcatctgatggaaaaaaagccctgatatggaacactgacggacatgcagagagaaaagagaaccgagaggtgatgacaacatagtatcc

SEQ ID NO: 12919 - DNA, 1122 bp, Arabidopsis thaliana landsberg
ccctgaagttttcgttcactacagcgaatttagaccaaattttacaacatgacaaatatacacatccgactcttgaaaaacatataaatatacaattaaaatatttatataaaaaaaggattttttatttggagttaaacagtagaaacagtactcgagttgccaattgcatcttctcaaaccacacttgttatatagttgcatatttaacccattttcagctatgtttggatttttatactatctattatatatttgagaatgaaaatactattaaataatgttggaataccgttatacagctaagcaaatgtaaagacaagcattaatagtagtctatcacgattctaaatatagtactatttagttgtcaaaaatatatattattatttaaaataaattaattcaatatgagataattagtagggtttaaaaggatcatgactttttcttttaattcatatgttacatgtaattctaatattttcttattttctatttatatgcatgatattatgttttgtagcagtttataatatcttgtagtattttttttaaaatattattttgtaacctttgaatctttatttgtcatttttctgttatcaattttattttgcttaattaatcccaacttgtacatgttgtcattatttctgatattaataggttgtttcctgttttaagttctctcatcatgcatggttaattttaccaaaatcaatcgaattatatattttcattatgtagtgaaaagaatcataatataactaaacttttatactagatatcaaatgtttcaaataaaaaaacgatgaaaaaaagatgaagcaaataagttgaagaagaaacatgtttttttagttaggttaaatccggttattgttgtatttggttttaaaaaaatttaaatttttttggtttcttactggatttatatagttttctattaggtttagtttgtcaagcggttaaacaaattttttgtggagaaacatatttaaactttgaatttatagagatgtttttggggccatctaacatgtggtcatagtataagctctatatattgggatgtgatactttccatatgaaactagggtgccctgcatccttataact

SEQ ID NO: 12920 - DNA, 745 bp, Arabidopsis thaliana landsberg
cgttcctatgtgcacttgggaatggtggactcgggagacttgcctcgtgttttttggattccatggcaactttgaattatccggcttggggttatggacttagatacaagtatggcttgttcaaacagagaattacaaaagatggacaggaggaagctgcagaagattggcttgaggtcttattctcttattcttttctcatacagcgtttgctattgaacagtatttcctaatttgtactctcttgtagcaatgctgagcagtggacatgtttattggcttacctgtttctttcagctaagcaatccttgggaaatagtcagaaatgatgtctcatatcctattaagttctatgggaaagtggtttttggatcagatggtaagaaacggtggattggtggagaagacattgttgctgttgcttatgatgttcctatacctggttataaaactaagacaactatcaatctgcggctctggtcaacaaaagctccttccgaagattttgatttatcttcatataactctgggaagcatactgaggcagcagaagctctattcaacgctgaaaaggtttgtatcttcattaagtttcattttaaagttgctttcacaaatttgtttttttgaccatgatctatttacaagaaccttttagtaattggaatagtgcatatatctttaaaattgagtgagaaccagcagaaatgaatttgttatcacagaaagattagtcttgcgtaac

SEQ ID NO: 12921 - DNA, 627 bp, Arabidopsis thaliana landsberg
atccaccactgatggcaagaaaatggttgatgttctcgtcgagcagaacatcgtccctggcatcaaagtcgacaaggtacaactgtagtaaacctagctaggtttatgcatttcggtttagctccggtatattcttatcgacttggaataattagtctgttttggtttagcaaaatgtcggtttggtctattcttagatttgaccggtttacaaacagattttggtttagtttttttttatatttgttcgattccaatgaatataaacagggtttggtgccacttgttgggtcttacgacgagtcatggtgccaaggacttgacggtttagcctctcgaaccgctgcttactaccaacaaggcgctcgtttcgccaaatggtaagttaatatatgctcggattgcagaatctttatcatatattatgtcaaatggtgtctttttttaattgacctccatgtatgtatgattaggcgtactgttgtgagcattccaaatggaccctctgctttggctgttaaagaagcagcttggggacttgctcgctacgcagctatttctcaggtactatctatttctaactgcaccgctgtttctgagtttcaatactggcttgaatatactcat

SEQ ID NO: 12922 - DNA, 1007 bp, Arabidopsis thaliana landsberg
agaatgctaatttctttatcagcatttctcacaagaatgatgttgttactttgtaacggtttcggacacgtggacgacagatagtggtggaaaaagtgattatgtcacgtctttgataccaaaaaacgtaaagtatagaattactttaatcataatctttcccgacaaagaaatagctctaagcacgacctttttctcccttgaagtcgccgtctagaccaaaacaaacaaacaaaaaaacaatcccgacggttacacgtaccggagagttgtatttaaattgaatccggtttttattttcctcgcatccaaaaacatttacttatctggatttttttttgttatcttctgttttcgtttcaaattggaaagagaaaaacttccgttacatacatgcaatgtcggtgagtattcattcatatccaattcttcgttctcgcctcgaatttgtagaatttcgatcacctgttgcgaaaatatatgttgaaattaaaccatgaagatcttagctttcttcattttcgtgttgctaattctttcatgtaaataatctcaaattaatcttatttctataaaatttcgatgaaacatgcatgtgaaggtatatatatatgaataggttcatcatcaatgataatgggagttcactatcatgagtaccgttgccatgactgggtagattgtgctatatggtgcaaacaatgggttcctcaaccaaaatgtattaaccgtgtttgcgattgtaagccaaaatctcttccgaccaacgaggaggttcctcaatcagcttattcttccaattcgaattactaaaatatgattatgattctatgtatctatgagatattctcgagttaaacttcaatatgaaaaggtattataatgacgtccatcaataaagttatatatagttcttatgtgaataagccaacgaatgatggaacaatgatgaccgtgggatgattttttttccttctttttgatatgtagttgggaactcgcgagaa

SEQ ID NO: 12923 - DNA, 575 bp, Arabidopsis thaliana landsberg
gtaaccacgatgtgcagtaatcagtataattaattttctcgcaagttaccaacgacttagcaaaaagaaaataagaacaaattcaccacaacgtcatcgctgtttctatcattcattagcatactcacataagaactataactttattgatgaactagataatatatctcatggatacatagagtcataatcatattttagttcttcgaactggaagaagccgatttgggaatctcgtcgttggtcggaagagattttggcttacaatcgcaaacacggttaatacattttggttgaggaacccattgtttgcaccatatagcacaatctacccagtcatggcaacggttctcatgatagctaactcccattatcattgatgatgagcctattcaaatatcatatatatgtaacatctatcaaatatatatacgtgcacatgcatgtttaaattgaaacttgttataaaaaaatattgatttgagattacttacatgatagaatgagcaatacagcgatgaagaaagctgaggtcttcatttttcttttctttttctccttggtttgggaaacgt

SEQ ID NO: 12924 - DNA, 1233 bp, Arabidopsis thaliana landsberg
ttgctcttgcagagattttagggagcggtacaaaattaagagggtggcaatgttaagatgcatttctgagatttctctctaagtaagtacactgcaatagttagagtaagaggtatatactcaaatcattaggagtagccacgataagcatataatacgacgatatcatggacaatttttgatttagaaacgatgaagacataaatattacagactcaaacaacatcactgtcgtcgaaaacaacataaaaacacgggttcattctcttaccctttactacatcacggaacacaaaactgtttttttttgcttacgaaattttaaagcataaccctctcttagaattttcaactctcttatctttatgagaaaggttagttatctgtgacgtgtggtggtacgtacgaagatgttaaagcttttgattcaggttgaaagaagttgctcgttaacttcattttctttatttcctattttgagtatatgaatattcttttcgccatattgcagaactcactggatgcacacaatcttcaaaatgacattttctcaatattttaacatgggtttcaatatatagaaagagaaagaaaacatacggccatggatcatccccgtcaagcatctcagctccttcattgtctgtaaaaactatttcccattgattgcgagttagtcactcgtctttgagatcaaagagttcttccagtttttgtatcagctgattgtatccatgcatagcagttaaatccacaactctacttatggctacaccttgcatatgaacctgttagaacataccacatcaaaatcatgtgaaagctttacgaaattttcttatcaaatatatatttgatatctaaaaatactaagttacctaatatgtatgtttcttatcaaaatttcttaaaatatatttttttcggcgaatgcttgcttgaatgcactagtttcacattttaaaaaaaaaagtcatatgttacagatataatgattttatgcttaccttaatacgacttctagtaaaattgaattccgtgctttggacctctttcggtgatctcagaggttgagtttggtcaaactttttatcttgagagagttttgaaatttctgattttttgcatgattcaattggacagatggaatctttgctctttgatactttggtcagatcaactccaaacaagaggcaactagtgggtgcttcagttgttatatcttctttcctt

SEQ ID NO: 12925 - DNA, 1072 bp, Arabidopsis thaliana landsberg
acccttcgcatcctggatacactggcttatacgcttttaagagattcatggatgtgtacgagttcatgagcagtggggtcctcttcaaaacggtgagaaaggatgaggaaatgaagaagctgaagccggtgattattcatatgaattaccattcagataaactcgaaagaatgcaagctgcagtggagttctacgttaatggcaagcaagatgcgcttgataggttccgtgatggttcatagaggagtatatgcttgttaagcaagatatcgaaagaaccaaacttcttcttcttctgatgtttaggttattaaaccgcttttttgttttgtcaaacttggaagttggttgaggaaaattggaaccatttcttttcgtttcgatcgaaaaattaaacaacttctctctttctctgtcagtatgttatgggcttgatcacagaagacgaaagtgttcactaataagatgatgtttgttatttaagtttgaatactatagccgaatctagaaatacttggcgggagatggaattgattggggcgaacaagcacattatatttttaagggtttccttcgacttctcttttatattttagggctaaacgaaagctctgattccttaaggccgtcagccaccgccgaagaggagcttcgttggtctcttaagaaagaaaagaaggggagaatatggcttatcaagaagcaatgaagcccaatcccacgaaggctggtttggaagaagtgatggcatctctgacatcagttcgatacttgtaaaaagtgtgaagctatccaaatccattacaaaactgtttcattacggcgatttttggagatagcttttctcgttttttgcatgttgatctgactgatctcagatatctcatcggaaccgtagtaaatacatcatcatctacttgcaagaagtgcatttatcctgtttgtatgaatccatgtctttcccctacttgtgatggtgtctagctcaacttaattactctttagcaaaaataaaaaacagtcttatcgatcctgcttaattaaatattgaatggaagtttggtgtgtggta

SEQ ID NO: 12926 - DNA, 637 bp, Arabidopsis thaliana landsberg
ttagtattaaaccacataatacctgagaaatgtgctctgctgcagcaacccttggcttaacaacttcacaatttgctatgaccaaagtattgggcacacttccatcagtctggtgacacaaccaagaaaaatacaaataatacgatgagaagtatataaagaagatgagacaacaagatacaagagaaagctaaaaacttacttgctctgagaggtacagacgctggcgattcttgtaggttgcttgctcaagctgcggaccccatctataaaaaaatcaaacaacaatttaccaaatggaaactcttagcacaacaactaaagacttcatcagatataaacactcagagaaactgaaaattcctcttagtcattagtaaccaacaaggtaatcaatagtaagaattcatgaatagaacatcagatatatcaaggtatgaagacagagccacatccaaaaccctaactagaacaatcgcaacaatctcacttaaacccagaaatcgagaaaatgtatgtgtcggattttactaaattcattccaaacatgagaatgttcaaagctaagaaacgattacgaaacgaaaccctagaaggagaggaaaggagaaaggggaagacctgcaagagagtgaag

SEQ ID NO: 12927 - DNA, 606 bp, Arabidopsis thaliana landsberg
  unsure (1)..(606): unsure at all n locations
tactaggtgtgatacctccttcggcccaccccttttgctaataagcccctgcgcttaccagaaactagcccgccatccacactcggcgtaaagtnnnnnnnnnnnnnnnnnnnnnnnnnnnnnnnnnnnnnnnnnntctctggtatttgcatcagcagtccacaaatcccagaaattcataaaataagtgttaaaaatacatagaaacttgtttattccataactcattcattttaactctgttttagtccattcaaattgcgttggtttcatgaaaattttttctaagcagtactaacattatttgtagcatatcaagtacttttatatttatttaacctatggttaagtacactaactcttctaatccaaggacgacacatctataattataattttactataatatgatttctaaataaattataatctagattaaagtttacttaatcatttggagtatattttctcatacaatgtatattaaccaatttataatgtagtttaaatgttcaaatcacatttatcttccataaatcatatcccttaaccataactccaattttagtggttcttgaaccacgatctcgtagcaggcgtagatta

SEQ ID NO: 12928 - DNA, 573 bp, Arabidopsis thaliana landsberg
ggcgaatacaatgatgcaaaagttctgggactcagctcttgcgttagaaccacctgaggattacgaaacacactttgatatgtcagcaatgctgataaattcagaagggaagcagtcgtgtccatcacaaggacttgtgagctcgtttgctttcaaattcgaagatcgtaaagggagagtacagcggttaaactcaactggtgagagttttgaagagctgatgagtgttgtgatgcaaagatgtgaagcggattcaggccttcagataatgtaccaagatgatgaaggtgataaagttttgattagtagggacagtgatcttgttgctgctgtaacttttgctaggtctttggggcaaaaggttttgcgactacatcttgattttaccgagacaattgctcctcttgagacgattgcagatttgtccgagggaaatggcggttgtgtttggtggcagactggcgtcttggctggtgctattgtcctaacgagcataggtttatttgtttacttaaaacgttccaagaaatgatatgttgaatgggaacttaattgtattacactgttactttg

SEQ ID NO: 12929 - DNA, 650 bp, Arabidopsis thaliana landsberg
gggatgaagaggtttgaggaacttgcagtcaaacgccgagcaaagaaaaagaaagctaaagctgaagcggaagtaaaggatcgcttgcaacacttgagaatctgatcaataaatcttttcgatttaatgaattaaataagctcttgtattgtttgtatcaataacaatttagtgtggcaataaaattgatgggttttattttgaatctgtagttttccttccttcctcttacctcttccgattgattgacaagggttgtaattctactcgatgataacctgttgagtatgcttggcattaatgttatactatttgtgctgtcgtgttctcatagatgatggtccattttccgaaagagaaaaccataaggttatactatttgtgattttgagggcaggtaatgatggtgtgctactacttatgcatatttcagacctttatcctatcttgtgtattggtgtttgctcatattcctcctaatgaaggagattttgctatatgtttggtagagagtgtcttgtgctataatatgcaaatggtgaaactgtcgtcatatcccttaacttacgtttcttccactgatcaacctgtgctcgcaggaacttgaggattttcttgaataggacatagttaagagttttatgattttg

SEQ ID NO: 12930 - DNA, 843 bp, Arabidopsis thaliana landsberg
ctgatcgtgtaacggaaccgtaaactggattgtctacttctaatcctaagtgtgcaaggctggttcttgctgcgatgattagctcatagaactagatattggtctaatatgtgttgttgttattcacaggtttaccgattgatgacgcatcgaggaagaagatggatttgacagcagaggagttgaaggaagagaaggacctcgcttactcatgcctctcttaaacccgtcttttctcagctggtttaatcagtgagagctttgtttcgaataaagaagttttgttataaaatgaacttttaataacctcatgagcttgaggtttagttttcctaatgttcccatgatgtgtcggtactgatttgctgaccatatataaacaatcattttgataattgacctcttttggtttcagttttggtttttctttcgtaacgggagagtggagagtggagacacaacaactcgaattttttggtagagttttcaagatatgggccaaagctttgttgggtattcttttggcccatatgaaaaacaaaaatacaaaagatttcgcagttgtgaaataaacagcttaagaatagtattataaaataaaatctcgcaataatatactccatggtttttatgcgatttagaacaatgggataatactaaattaataatttgaattaattttacgtaataattttacgtaacatttattttttaatttactattattatttaattatgctatttttactatttaccagttcataaaaatataaaaccttattagcctatcaaaaaaagaaacgtaaaaccctatttcatagatttttatctaaaactaaaacc

SEQ ID NO: 12931 - DNA, 755 bp, Arabidopsis thaliana landsberg
attcccaaagacctttcaatcaaaagtccacaacagtaactgaaatcgatttctttttacaaaatctgaaaccttgacgttgatgatttcttgaagcgtgaccttgtctttctcgaaaccatccgccacatcgtcttcatctggtgtcggaggccgattcaccgaatgtttcctgatcagaaaaaagcgagaaatcgaaagatgaaattgaagagtaacgattcacaagaagggaataagattgtctaatacatacatgtgtttgaatcgatagattcgtttcaagaacacgaatcaattgtgatggatgaacttttttccagagtcttcttcagcaaacccagaactgtatcgcacgacgaaggagaaagcacacaacgagtcgagatcattaaatttcaatattataaactacgtgccgtttgttaaaatttgccgaaacaaacaggctgttttgtttaagtccactggatagaaactacgtgccgttttaaatggactttacaagtagggaaaaaaccttaaaaaaatccccatcgattttctattttgccgtttaatacccaattatttttggttggaaaaaaatacacaaagtagttaaagtgtgtgatttaatactcaaaaaataagatattattattgtcatactcacgatttcataacaaaagttaaatttcaattatacccgtattgctgaattaactattaatttgtaaatgacatgacaatcatttttattttttcaataaaaa

SEQ ID NO: 12932 - DNA, 756 bp, Arabidopsis thaliana landsberg
caagccgctggttatgctgctgcaggagctgttcaggtttaagacctcttttctgttcaatgatttaaagatttataaatatacatatccttactttgattttgatgagtttcaggcacttccacttgtgagcacattttgggggatactgctgtttggagaatacaaaagatcatcaagaaaaacatatacacttcttatcagtatgctatttatgttcatagctgcagtcgcggttctgatggcctcatcgggacatcgaaaatgactaaaaatgcattccacagaaacatctacagactaaaagcttcacaactttggtttataaacttgtaagatacggtactcttgtatgaaggtaaagtgagcaacatgttcaaatatatcattggttaaattttaatcgatgggttttgatgttatatcgtcagtataaatatatacgtctcgcattaattagggtttccgtggttcttaaccctaaatccaaacattaggtcaactagagtgtgaggcacgtaagcgcagacatggagacgccgaacgatttggtgaaagaagagaagagacaaggagcttctgaaaatcaagattggtccaagctttgtcctgatcttttgcgaccgatcctggaaagcttgagctctattgattttcatcgagcaaaaaccgtttgttcacattggtattccgtttggaaaacatgcgtgagtcagtctctgcgtccatggcaggtcacataccttaacgttgttt

SEQ ID NO: 12933 - DNA, 365 bp, Arabidopsis thaliana landsberg
tttcactctaattacctttaaatagaggattatctctactcttttattcactctcaaatatcacaaaatcattataattttgttacttccaacatttaccgttaataattttccgcaaaattctccatttctctcagttcgtgttgaggtatgtatctctatgcatgtttatggtcaaggtgtgaattttgctttgtttaaattgtttgactaatgtgtccggtgtggataaaaaatttctctaattttgttcttgtttattttatttactatttgctatgttggtgtcggaattgagattataaatatattggaattttctattgagattttctactaatcaaattggaaattttgagtaagag

SEQ ID NO: 12934 - DNA, 580 bp, Arabidopsis thaliana landsberg
  unsure (1)..(580): unsure at all n locations
gaaattgcgaaaacggctcggcaagaagctctcattcacctgctgctcctttggcatgatgttgaatgacatggcacttgcaaagaactagaacctaagtcgcggctgtttcatgtccctgatctctcccaaatgtgcaaaaagccccacaaatgcacccgacagagaagaaaatatagcataccaaatttggatatccatgaggtagatcaacaccactagtaaccagagcacaaacaccgcaaaacgattgctttggccaaagaactcatgccaagtgtactggattccattcatcttgtatatatcttttgtgggttttacaagtggactgatttggagaaaatagctgaaggcaaacttcaaggcgagcaaaagcacccaaaagatggagtacttgacattgtcaaatgtgccctcacgtagtcctcggccaacaaagttgcggctctagaaccaccaggtcagggcataacagatcttccaatttgtcttctccaatgtgtttcgcaccaagacacaatgaagagcacgatggcaaggacgntcagggatacaaatgctgcagctgcatagagga

SEQ ID NO: 12935 - DNA, 1009 bp, Arabidopsis thaliana landsberg
tgtcttaggtttttattagaaacaaacaaaaatatattgttcaaaattaagatagtaatatcacacgttattttatcaaaaatatttttgtaaaattttaaaataattgcattcaattcaagcacaaaacactttgttcatattcgaaattatttaatcaattttcaccgtattttcgctttgaaagtcagaaaatcttcgtaaccttcctctctcattcttttatgttcttgacacgagtttgtctttttccaaagttttttcattgatatatatattttttaaaaaaatcagaaaagaatcatggaagtaaacttgtagagccatcatacgactaaattgagattttctgaaatgagatataaaagatcactgtctagctgcacttgaaagagatagagataatagaaatgtttgtcttgcttggactattgtagaaatagatttggagttttcatttggaaaaaatattgatttcctctcgataatcctcaaaacaaactcgtattggacatactaacagatgataaccaatgttatatgttctcttaatgactaacaacgatatgtctattttagcttagtcaacggattctcgtgtttcaaatggtagtcaacgtttttatgttttgaataaccttgatgttcaaaatggtcacaatttgaaagttgactagcagaatcgtaaatgagtgttagagattgcattaacaactgataacatcatgtctattttgatctggtcaacgaatttttatattttaaaaattactcaatgttaattcacgatttaaaagaccacatataaaattaatgaataaattacaactttttaaaaattaagaaaattaaatgacaaagccaatacttttggcttttaactaacacagaatatctataattaaaaaaaaaaaatctacattttactagcgtgtatagataaaacaagtaatggccaagcgttacgttggcataagaatgattcattgaatattaaaaattataaata

SEQ ID NO: 12936 - DNA, 1002 bp, Arabidopsis thaliana landsberg
ctcgaggatcttcaagaacgcttgccctgacgcctatagctacgcttatgacgacgaaacgagcaccttcacttgtaccggagctaactacgaaatcactttctgcccttaaaaatcgaagcttcgaggtagatatacagtctggtttaattatctctcacgtttcttttgcttattatgtacggaaagataaataaggaaagctgatgactatgaatcatcgtcttccacttttaagcttttttagtgagtattagtcagttgttacactcagctgatttgtttacaaagaaataaaacaaaatgattgatctacggatacttatctattgcattccatgctgtgtaagtgagagatcatgtatctttctgttcgaaacggaattttgaacgttctttaccaaagaaaaagtctatagatacatttttcatcaactcacttaaaagaaaacttaacagctattaatacctgataaaaccatggccgcatatatagattaaaaccgtgtggacgatgtaaactatgatttaagaaacaaatagaattctgattagttaacattgagcgagccattaatgaaatggccctaagataatgaaaagttcaaggaaattaatcgtcacgaccgtttacaaataataaaaaccatttactactccgacacacagttaagtaaatttatgaaacttgattctatgtttaaggtactcttctcaccttttaaatttcaaagtctcccctctgtactatttctgaacccattcgtggaatggtgtacacgaattttagacgacatgtttgtttttgttttagagattaaaacaaaaacgtattttagagattagacgacatgaaacgtatttttgtaaagaaaaaaggaatgctaaaagaaactaccagggaataaaaataatgaaaatagaaagtccaaaacaaaataataaaggaaaatacaagacacaattgatggaatcatgagattggaagaccatcacacgatt

SEQ ID NO: 12937 - DNA, 857 bp, Arabidopsis thaliana landsberg
atgttggccatctggtggggaagacactatcttcaccagatctaaacagtctgttagaaaaactgcttcttaattgtcatcggtaatcatacactttatcgcccagagaagagcttgcacttctgaatgtagtagagatagacttcttctgggattgccagttcccattgtggcgtctctccatttaatgatgtacaatatcatcatgttccactgaacttctctttctttccatgattcatccatatagcatcgatttcttgaacaattgatatcgtttgagatattcctcactcgattccaagtttctaaatttgaaaaccatgatttttgttataaaactcgttttgagctaactgccacgattgtgccattctccataaaatgcttttcacattcaacctatgatgcatctatttggcatcccctattattgaatatatatatatatagatggtgatcgagaacatactttaacgggcttttcaataccattttttggtagcgtccaccaagtaaaactcaagagagtaataattgatgtaaactaatttctatattttttagaacatttaatgaaaagtccctcatgggctgattaaacccttcaagtatcaatctatgcaatttaaacccttgcactaaatttttttggtaaggaaacccttgcactaaatcattagtgaaaaagcctttgttcaactaaagacccattacaaaaataagcctttgtttgtattattgtcgaaatacttccattgaatcaatacttacctttggttttttaaagcttgcgttatatggtttacaataaaagagagatgtgttgtttaaaaacttactaaatgatgaaattc

SEQ ID NO: 12938 - DNA, 482 bp, Arabidopsis thaliana landsberg
gttggatcccttctttgattgttggagccaatctggaacctttgaggtgggtgccgaggaccctgtcattggtgccttcttcttcttctctgcctggtgggctaagatgcagtcctcctgtgaaatggctaggttgaccagttcattgtagctatcgacacaaacagtgttaaggcgctcacagagcttggtgttgagccctctccggaagtggtccctcttcttctcatcagagtctgcatgataacccgcatattggcacaggtcattgaaagcctcggcgtattgcagtaccgtgcgagtcccttgagtcagtgccaagaactcattaagctcgcgatccaatattcctgcgggaatgtgatgtctcttgaaagtagtcttgaattcctcacacgtcactatgtggtcggcgggtagcatgcgaggatatggcccaccatgtccttgcagtccacggagcttctgtgcggcgaacgagt

SEQ ID NO: 12939 - DNA, 511 bp, Arabidopsis thaliana landsberg
taacaacatagctctctttgtataagaatcaaaccaacccagattaaaaacacattcggttcaaatcggaggattatataacttagttttgtgacagaccttttagtaaaatagttcacattttttgtattttcgtgcataaaatttgattcttcatagcttttcacatatgagctacaatcattctttgagaaattagctaaaatttatgctatattttgagttaatgcagtaagacaagcacaatatatttgaaattacagatatgctatattgttttgtgtaaaaaaaaaaacattctatattgtttcggaccaaattaaatgcaaccacttttattgccctagctgaaatcttcctggtcaggtgccacggaatatcagccgcaacaggtaaggctggagcgatagtgggacgtttcgggttcctatatgcgagctgcaagagatgaccaagacgtactaaggataccacagggcattggagtcaagaactactggtcatgcttggt

SEQ ID NO: 12940 - DNA, 671 bp, Arabidopsis thaliana landsberg
cgctttagagcatgaactctacctgcaaaaaaactaagagtcagattttctaaactaaatctcaagattcatgattccaaaattccaataacttacagtgcaacagccacgtttgagacaaactccaagaggtggaagaaggatcgcgattaagatctcgcagaaaacttccatgttgctcgccattttttcagagatgtgagtgaagaagattcttgaatgtgatctgaattagtggagaagaagagaacactgaaagtagtcggtagcacagagatccaattaaaagagcaatccacggctttttatttttggcgctaccaagtcaactacgagatctgcaccgtttatttgtttggtatataaatcgtacggcttcagcttacatgccgacatctcgtaaaattaccttaccttgcccccactctttagatattttcatctcaagaacacgcaaggtatggtgcaacacaacacacctgatcattgtgggatattattactctgactcgcccccttatcgtacggttaatggatcacgtgactaagttggcctagaaggcctgtcttctattgtttccgggaccggactttgattagcccaatttttctgttgcttgcttagatggcaagctatctcagtacatttacttaacccatttccctcaatg

SEQ ID NO: 12941 - DNA, 1070 bp, Arabidopsis thaliana landsberg
ttttcgagagactcagactaaaacagactccaatctacccatatgaacaccaacaggatgtattttgatatacacagtcctaccaaagtaatcaagacctatgtgaccgcgcttagactcgtaatcaagaccaagcattctactacaacaagacaagaaatgcctcgcgtaatcaaacgtatggaaaccaatgagatcacaattcaacaaacctctcaaaatctcgtcacgaacaggcaatgtgcggtaaatctctgaagaaggaaacggactatgaaggaagaaaccgagtttgatcctattaaaacgtttcctcaagaaagtaggaagaaccataagatgataatcttgaatccaaacgtaatcatcctcagggttgataacttccataactctatctgaaaatatcttgttggctgatacataagcttgccatagacgtcgatcaaaacgatcaccatgatcaggaaacattggaagcatgtaatgaaagagtggccataactgatgtttacagaaaccaagatagaacatttcttgcaactcttgagacaaaaacgttgcaacgccagttaaattcctctaaaagcttctgtgaaacttcttcttgttcgttagtttcgatgtttacgttaagtgatccaacgtagagaaactctgtttctgaagagaacccatctctaagttgtaactggagagagtcttcgtcccagttaaaacaccatttaccagtttctgcatctcttttagattggagtggtaacatgttagctacaatgatcttcctctcacgtgaaccaccggaggtagaagttacttcggaggttgtatcaccgtctacgtcggtgatgattcccggaacagtcatgacgcgtggaagagatcgtggagtttgaggaaaatctaaaaggtcccaagatgataagtctagaaaattagcacaagatcttgacaccatggagaaacagagctaacagcttctgtcttatttccaacaccttcaaaatggcaataacaacaaaacaaaaatatcaattaccttaaataaacaaactttcttgtgtcatata

SEQ ID NO: 12942 - DNA, 786 bp, Arabidopsis thaliana landsberg
gagcagatcttctacagatccaagaggcatgtattcatagacaacgagtctttgatcgccttcagcacaataaccgaacatatgcactaggtttcggtggtgcaagagcgagagcattatgacttccacaagaaactctttgtctccttgaataccagactgatcaagcattttaacagctatgttcttgaattaagaccaacaacaaagcacaatgacaaacagttagagatttcacaacgacaagattattgatttgattagtccaaatgttaataatagattacctgtccagtgcttagccttcctttatacacagttccaaatccacctcttccgatcaaagattcattcctgaagctgttagtcgcgatggcgagttctctgtatgagaaaatctgacatctgtatctagaagaatcttgcactacggtttgtgaacttgacgaatctacttcttttgctgttccagctggttgggctacagaggaacaaaacaacacaatgagagactatatcacatatgttattggatcacaagtagattaaaaagacatttatcagccaaatacacaaatctttgaactataaaacacaaaccctaagccgggatttgtacgatccgtataaactaatcacaagacaaatactatatgtatcattaataaataagctatttaaaagaaaagggagattttatcatgatttactactaatgactggtattaaagatgactaatctcaagattaatctataaataataataaaaagatcagagggaagtg

SEQ ID NO: 12943 - DNA, 655 bp, Arabidopsis thaliana landsberg
aagactccacagtccccaaaaggaaatactggtatctaaccagaacaatgcaccaaagcatcttacactatatgctcgctaaattagtaaaagttcattgcagttagataaaatacagaacatcatctaagcaagcaaagtggccctttctatccactaagtccatgtagtattgaacaatgatatggacagtttttcaatataaaaaatcgtgaagtaacagccacaacagaacttacattgatagaacgggaattcctgaattcataatccatgccattcatgacaaaagaaaaataaaatgtgtgagttgcggcgaacgcgaaagctaaaactctcttcactaaaacaatagccgatgacttaacctttccccattatatcgtcaccagtttcaaatttcactaaaaaaggcttgtctgtttaattttttggataggaaggaagcaacacaaacaatatcacgggaatggatcagaagaccaagataaacgcatacccattagattaaacaatctgaatgctgcaagttgaaatgtgacctttggaagtgatacaaacgaacatgatacagctcccacccaaggttgtggtcggtattaatcttagtttgacccaaagctcaccatcaatgtcaaaatctcggacaccaact

SEQ ID NO: 12944 - DNA, 741 bp, Arabidopsis thaliana landsberg
atacttttattcttaacatattggtctaaaaaacaaaagtttctagacaccatgattctattttcggagatcgaacaacatgtaaccctagccaagaagaccttcacactcttataaactatttactcacacattatttttataatgcaatgtactttaaatccaaacaagtagacacaattacaatcgtagtcaaacttcatcttccggattcgagaaaacgagaaggatgaaaattgatcagatttagtctagcaaaatcttcgtatgcttcttccatgagatcatcatcatcccattcatcacggaaagtttctggttgattaccaagtctctggtaaccgcgagttacttcttgatctctccaatgttcaacatgtgggaatccacactggtctgcgatccaatcgaggtactcacactaaaagacacaaaatttattattgaaactatattctttgtcaagttgatatatattaccatagcatattcgtaactaaaaaatgtcgtacctgagatttacccaacttatgtgtatatcttttgggaatacctaacgcttcttgtgtttcatacgacaacttaagatcgtccatcatttcatctaccgaaggaagtgtaactcgtccagacaagactgcagcaacccatttgctttggacttcaaacatatagaattgtagaccctggttttaacaatatcaaaccaagaaatttgtgagttttctaaaaatcaagaga

SEQ ID NO: 12945 - DNA, 1196 bp, Arabidopsis thaliana landsberg
gaagtaagtttaaattttgaccaaagtataggatacaccaatgtctccattgagaggatgaaaaggaatattctacaagatgacaacccagaaagaaattggtcttaaaaaacttggtggaaacctacactgcaattttcagcaatgtgacagaaacctgtcgcaataaacttaaaagaatgaccaatggtacaagaggcaagcaaaaacaagatacaaagctaagaaaaggtgcgagaggagaatatcagacagcactagaaagaaagctgaaacaagggtgttattctacttcacctaataatagcgaaaacaagaacgtccagaacaaagtcgcagaatcataaagtctctcctacgttaaatactacatagagttcaacaatactaagataaaagtgcttcttcagacagagagctaagcctagactctctgtaagagcacatgagtaaatatctcttattgcatacttgtccaaaacgaaaaagaaaagcaagttattctaggtgagatagaaaagaactagttaatctccattccatctccaccagcttggctgcaaaaaggactcacagcagcaaaagacctctcaaaaggagaagaatgaaacttagcatcacgtcgacgacgcttaacacaactttcagaaggttgttgttgactctcatcatcaagcttcctcctcactcctttaaccgcctgttcctcaaccaaagaaagcgggaaaatccgaccactagctcgacacaaagagttatgattatcatacaaaatcctttggttgcagttcttgtcacaaacatgagtcaacccagttagtttgcaacggtacatattcccacaaacattctcattctcgcatttccaatcacatttgtgattgggtccttcgtgacccaatatagcagataagtaaataacattagcagagccaacaaccacatgagattttccaaatacctccattgtttcaaagttactcaaagcttcaaactttcttcactcactgcataacccaaggaaacccgaattaaaaaaacgaaattgatccactattagagataatttttcctaatcaggcataaatttcaattcaaacagatttaatcgcagctgataaatcgcattatgagatccaacaagaagaagtaataaaattcacagagattaaattaaacagacctgatcagaagca

SEQ ID NO: 12946 - DNA, 705 bp, Arabidopsis thaliana landsberg
agacttgcttaaattcttgggttttttaccaattagtattccgatgttcggaattatataaagtgattctttctttcttcttgacagaacgtgaaattgtttttacagtattccaatatttgaggttaatgtttgtataaaaatggtataactaacaaatatcggattggaaagagtttcaaacgcttctgataacggcggcctgaatttgaagatcttcgattagagccttggtggtcttgacggtggccctacggatgtaccaagaaagtggtggcaggttaagataagaagaaggctgaaaatactggtccaatgtcactctcgagccaatcagtccttttccaccggtacattgtctatattcttctcgattctttgggagcctcggcttgcaaaagcgcatgttatctacgtagcatggctctatttgccacttaccatagaacgttttcatgaacatcacgttctttttaggaatcatatatagtgtctgtccacagtaagcaacataaacaaaattaaaaaaaaaattatacttgatatgcgcataaatatctttagaaacttttatttttgtggtatatatagagaaaaattcttacgctgaaatctttccggctctcattgaaagttagatgtaccgggatagatccagaccaccaaaggaaccctccagggagcagctttttccaccctcacgtg

SEQ ID NO: 12947 - DNA, 1046 bp, Arabidopsis thaliana landsberg
ttatctgtaaatagacaataaacacataaatggagaatttgctattgttcttaataagtagcccaagattttttttacaaaggcagctccttagaaggttgggaatttggcggctatgacaagaaggtttttgagtccgactgtgtagtgagttttgtaaatgactgaaatgttgtgggtcgagatccgacttttgcaaaattttataaatttgtaactttaataagcaaaaatacatcgttttaagctatgtcatcaaacacgtatcagctcacttagcaaaaataacggttgaataacacaacgactctgaattatgctctaaatataaagtttggatatgaattcaaatttttttctggtttaggtatgatttttttttgtagttttaatcttttatctatcaatttcgtgtgcatggtattaagcttattggagtatgaaaaataagaaaataaacacaaaactctcttattaatttttcttgaaatttaatcataaaaaaaatgtaaataactcatggaaaaactctctccattggaggtgatcttagtacgtaagaagcaaatagctaaacatccacgaagcagacaagaacattcgggtttctttcaatgtcttgcgtgaacattgtcgtcaagccgtccaaatcacaataaaaataatgaatcttgttattaattactgagcatcgaatcaaatctcaacgttatgaatagatcattaacctaaaaatccaccaacccgtgacgcctctctgaaacaacattcacacgcccgtgagttttaagaaccatgcacacgtggcgatccaacatcttcccaattttattttatgtcatatacaatctctaattctctatgttatatagagtttttcgtaaactataatatacgtccatgacatttgagctatcatagatctagtaaatttataaactatacgcaacaactttctacttttattcacaacgtttggtggctctggaaataaaagccatttgatcggcattcgctgattatcttggtatatgatccattggttc

SEQ ID NO: 12948 - DNA, 969 bp, Arabidopsis thaliana landsberg
agggactattgtgatatgggaaactatttgagtggcagcccattcccgtgacataccaaccgcacatttttatgtttttccatcctcgcttctttggtcggatgacccatgcaacattatgtattcgtcgttcaagataatatattgtaatttacatatacaacatactttaagtttattttttcatttttgttggttttatactataagttttgttagatgatgtaatagtttatatatgcgtcgttggtattcttaacacgaaaattggtggtgacatctaacaatgggacgtacgaataggatgtgtattttttattttagtttaagggtagattcatatagtgtttaagacaaagaagatcagtacttccatgatccgtcgaattgacactacattcttgactcggagcattgttctactcttcaatctacatgacatgaatctctcatttggttttacatcagacaaagcttcacactttagtaatgagatgttctcaagtttccaaaaaaaaaaaaacatatcatttcaaaaattcaagataaaccaatgattttaaaaaataatacccacccgatgattttgaatttatgatgatagtgtttttggcttttgattgcctccaaaagaaatcggattttggtaaaccagggctagaaaaatgaaccaaattagaaaaattggttcggttcaattttaccatggtttcggtttgtttggttagaaccgaagactttttagattctcagtgtaatttcactttcagcttcacacatccactcatcatcattgatcgagatctctccggcgacagaaacacagcgagcgactgacgaaattaaacacttcgccgtcacagacactctctctctatatataatctccggcgatggagagtttcgctcttcactctcacaccacaaccgccacttccaccgtactctcccatcatcatcatcgccatc

SEQ ID NO: 12949 - DNA, 911 bp, Arabidopsis thaliana landsberg
gccatgatgggcatctgtgagatgaaaagctgctgctcatggcttcttttgatctcgttgctttgctcactatctaatgaaagtcaagcgattagtcctgacggtacgtcaatatgaatcaactattactattcatagcgtcctggaccttttattgagctttaatcctttattgcttgtttccattcttcaggcgaggctcttctgagcttcagaaatgcagttactagatcagatagtttcatccatcagtggagaccggaagatccagatccatgtaactggaacggagtgacatgtgatgcaaaaacgaaaagagttataaccttgtaagttttcaaacttgtcaaggtttactggttttctcttcagtatttgtgctccctaatactcttgtttcgcaggaatcttacttatcacaaaataatgggacctttaccttctgatattggaaagttggaccatttaaggcttttgtatgtgctctctagccttattcatttttattgcttaagagtgtacttcgattctgagcatctgtgtgtcattgcagaatgcttcacaacaatgctttatatggagcaatacctacagcattgggaaattgcacagcattggaggaaatgtaagcgcttttccaggattttatactgcttccacatggtttctgagagaccaattccagttgcttatggtcatcaaaattgtccaactggttttgcagtcacttgcagagtaactacttcactggaccaatcccagctgaattgggagacctgcctggccttcaaaagctgtatgtttttttctcttccctatacgtacttgcaaatgcatccttcttttagtgtatgcaatatctatttttttttttttttcatttacttctatcaccatctaggatcatggta

SEQ ID NO: 12950 - DNA, 559 bp, Arabidopsis thaliana landsberg
ccttaaaaatcgacaaggtccaaacgatacgtattctacaacatcgacagacagaaaccaaacttagccgtcggtggtagccaacgacggagacattgagtttcgtgactcatcaaaatcctcaccgaccggagattgctcaactctaatctcctcaaccatcttaacaacttccagcatcgtcggcctcttctccggctgaggcacaacgcaagctaaaccgatatgaagcattgccaccatctcctcctctatgttcttatacctcaaaagctccggatcaaaaacctctgccgtccattcctccttcaccaccgacctcacccacttcggcaaatcaaccaccgcttcctcttcctcctcaaccgccaccgaagccgctgatctagttctcgacggagacgggaaaatcgagggagctttccctgttagaacctcgagaagcacacaccgaagctgtacacgtcagctttctgagagagacgtttgatctctgactgttccggcgcacggtatcctcctaaccgagcgatcgatgaaccgggtttagccaagtgat

SEQ ID NO: 12951 - DNA, 889 bp, Arabidopsis thaliana landsberg
ctctaggaaaagtttagaggttgtcggttcgagtgatgtttgagacaaaactaatattacatgatataattttgggcttctgggaattacggtttcggcctaaaaccttctgaatttcaataaaaaaaaaacagcgtaaacaaaacgaaacaatcattgtcaatttgtcatgtacacattttcagtgtaaactggttggtaaaccttaggaaagcgaatgtgaactacaaatatagtattcttcatacatattcttatagtagagaatttaggatcgtgcgtggctctaacgataacgttttcatttcaactacacattattataaaaataaacaaaaagagaataattatttattcttgttatcgatgacagattagtttgtatgattcatatgaatatggtaagcacgtctaatggacttaattatatttcacgtttcattcatttgtgtgttactgctctcctactcattcacatctatcactaagattgatcaaattatttgtttttaaggaattaagcccaccaattctggtatgaaatcatcattattaacttattaattcaccattgctgattggtacttttctcataataatagctatcaaatccaatatataaaagatgaaaggtatttataaattttattattttggtatttatttatttatcaagagaaataaaattaattaactaagagataatgatgtgttatcctggtaaaactgtattatcttagtatttatttttctatgaagagattaaaattatttaatcaagagatattgatgcgtcatcgctaaagagacttccttcttttttttttatataggtttccatacttactattaaatttcttatatttttattctggtaaaaatatatata

SEQ ID NO: 12952 - DNA, 979 bp, Arabidopsis thaliana landsberg
tcgaaggactcatcacgttatgagctacacatcttctgccaaaaaaaatgttgtctggcatattttcatgtgccattcatttaggatgatcacaaacttatttgggttctacatggatctataaactcatttcaaattattctagagtaacccgcggacgtgaaaacgtagagatcgaatgttaggttttcacatgacgcctaaacgacagtttcgaccgcctaagattatatatgctttgttttaatatttttttccaaattttaattactcaaatttaaatttgttaaattttgtcttcatatatatagtttaatgttcaaatgttgtttgatatgaattaatgtacgttttatctaatttttgttttgtaaatttaagatttttattttttaatttatgttttaaataacttttacatataataacatatttataatattttatactataagcgctttaaccgcctaaaactgtttagacccgttgaagcgtttctatgcgctaggcattgggttaccgtccaattaacgcctaacgtttttcttgaacattaatctctaccttactatgagtgatgctatcaattaatcagcttttgagaggtattgacctcgttcatgttaacttttggttgaggtccgcaaaacaataactggtgaacgaggttgatacaaactttggtaagtcccatttgattcaaacctatatgcccaacacttgttattcctacgcaaatctcatcgaaattcacgcaaattttgaggtcagtgtttcctgtaataatctgtatcagtattagcaagcgctcattctcaaacagcgtaaattgtgagtgcataacctaagcaaactcacaaaacacaattgcaaacgcagtcacatgtatacaaaaacgcataaccaggtgaatggccaactattaataacagagaaaacctgtcttccaagcccaaggcataaaccgggaaatgcactc

SEQ ID NO: 12953 - DNA, 868 bp, Arabidopsis thaliana landsberg
aacaccaagtccacgaatcatcaacacaaaaaatgataacaaaaaaaatttaatttcctcttgtctaaagaaacggtcagagctgggaggagatccaggtgtgaaatcaagagaatcagaatgatgaagcggcgacggaggttgctgcagctgcaggtgctggtggtggtgatcggagtttgcgtttgcagggaggatctcaacgacatctatatgccaaagtacccattcttgagtggccgatctatgaggaatatcatgagtaacagagtttctccagggaggtaaaccaccgttaccacgaaggaagttaccataacgagtcttgagcttaaccaaagcagaatctctaatcggttcccaagctaaagacgagtcaagacgactaggtttagtctgtagaactttttttccggtggctccaagaagaaacggtttgttagacgctgttaagtatttgccataagcgcttttgagacggatgagatttgttgagcctgggattatctcaacggtccatttggctgcacctgctgagccgttacgttcttgagttacagattcttcgtcttcatcggcgactaggtacttgtcgtgatggctccgtagacgaacggctttggccttttgaaaaatctccattgttagagaaagagatggtgcgaatgtttagaaaggtaacttaatgaatacagagagctggacttgagctgggtctttgggaccttgtctattttacagaaaagggtattttattattttaaaattattattactcatttttcatatctttctttttttgaggttgggaaaagtttttgacttttttggcaattttactctttttggggaggtacctttttttttt

SEQ ID NO: 12954 - DNA, 493 bp, Arabidopsis thaliana landsberg
ttcctaccgataattccgtttttcacttaccggattaagcctgtgacaatgccaaatccattcacaatcaagaggagggaccaaagacccttcactaaccgatgatgactcagagtatttaacaagcaaaggaagccaacaagcattgtacctgaacatcaccaaaatcatacaatcacttagaaatattcactgatctaaaagcaaacacagaatctacttatattattaacctgtagatggctttttcaagcgcaggaccatcgtagagccatcgattcctatcaacagtttcaaggaacaaaaggtgttgtttcgctgcagctaataagtcaacgcttatttctatcttctgagcttcaagccactccacttcatgatccttctccttatccatatcacctttcaaaacgatcaaaaaatgcaaacaactaagtaaatcaatacgtgattaccagattttgacctaaaatgatccttatctaatcaattg

SEQ ID NO: 12955 - DNA, 1140 bp, Arabidopsis thaliana landsberg
tttattcagaacgagattgacaatcactgtttatgtgacgatcactcaaatataattaggtttcatggtttggagcaagaccaaagttttgcttacatttgtctagagccttggaaatgcagtttagatgatctaataaaattatctgtcagaagaacaaagagggatactcaagcggtagctccagtggatgatttggaaaaagttatgaaaagaatcaaattctggaaagaaaaggggaagccattacctctaactccaatgctaaaactaatgaggttaatttggactttgagtttaatttatgcatgtttcataatatttaattatgttgtttttgctttaatgtatggatatactttttaatttacagggatgtagtttgtgggcttgcccacttgcacaagttgaaaataattcaccggaacttgaacccacaaaatgtgctaataatagtgaaagatatgactttgactgccaagatatccgatatgagcttaagcaagcatctcggtgggaaaaagtcatcatataaacaccttgcaacatgtaagttccgtgttgttgtgtttgtttgatcctcatttggattgatagaacaacgtaatggcctaggttggtgaagaaaattcaagctgaattcatgtgcctaaatgaatgcgtaaaatttgcaggttctggtagttcaggatggcaagcaccggagcagcttaacaaagataagaaaaaaaaggaggattttccagctgacatgtttaactttggctgtctcctgcattacgccgtaatgggaacacatccttttggaagtcctagtgagcgtgatactaacatcaagaccaacaataaaaccaacctctcgctcgtaacgaaccttgattgcataaacctaattaagcagttgcttaactactaaccttaattacggtaacctcatcctcctcttgcctactaatttacactccgtttaacaaaaacattttctgatttgagcttgctttttttctttggtagtcctagtgcaactcaggtgcttattcatcctttgttttgggactccgaaaagaggctttttttccttcgggaggctagtgatcgaattgagcctgatattacaatgtggggcgatctgaataaaac

SEQ ID NO: 12956 - DNA, 776 bp, Arabidopsis thaliana landsberg
atcttttataatattatttatattagtttttaaagtgtagatataccatcgaattgacggcaaaacacaaatatttcagaagaagaagatctaaatcttcccacataaacatcagcacgggcatgtttgttaaaaaatagtttttcaaaattttcaagtagttagaatttaaataaaaaagtaattagaaaattttgtaatttgtagcgtgaagagaattttaaatggacttctaaccgagaaataatattttttgatttgtacgatcaagcaattgccatgggaaattaccgtatcaaagatcctacacctcttggtagagaatttatccttgacaaatttaacaagaagtttaatcttaatataaattatcaattcttcaaagaaaaacttgatcaactaaaaagaaagtacaaaaagtacaaggagcttatgaaaaagtccactggcatttcggttgatactactacatctgtgatatcagcatctaactcatggtggcaaaagcgtgaagtaagtatttaatgtctctcataacccaaatataatttaaaaatgatttataggctaaagtttttattatcttattaacaggtatgtaaaattatcaaatcatttaaacgaaacccgccagagatttgggatgtgatgcaacgatgtttcatattatatgaagtccactcacagcctcaattctctgtgaaccaaagaagaaaacagttgatgaaagatgggtctggacaattgatgaaaggtcatgttatacttttgaaaac

SEQ ID NO: 12957 - DNA, 988 bp, Arabidopsis thaliana landsberg
gagaccacttatgcaaagctgccacgtatggtccatttatccataaatctgctaatgacattatcttattatgaaaaaagatctttactcacaattagcagcaacaaatctttaaaaggcctccactgattaacacgtaccgagaaattcaccatttttttcctaacaaagcaaagtgaacatattcaaataaaaacaactttataatataaacaacaaatatcgttcaggaaaatcaaatgaaatgtggtaggtgaaggatttgacggaactacccttcaagacacgtcaagactttctttcttttacaacattccactatataaacacttccttctccaccatcatctctcagcttgcaagttctctctgaaccatagaactccaagcttgaactgtactctactcgtcgttgatatcttactcttttgattcctcttaccagaaaaaataaataaacagcaattttttcatttttcgactcaaatcatgcaaaccatttcgcctgcgttctcgtgcgatctcaaatccgtaattcaaccgaatctaacggctaagaaagcgcgttactctcacgtaaatggaaagcgcgtgtctgttcgttgcagttacaggtctgagtcgtttagcttccctaacggtgttggctcaagccgagccgattggcaaagctcatgcgccatcttagccagtaaagtagtttcggctgagaattcaagctccgtcgccgtcgttaacggacacagtaacggctccgttgatttaagccttgttccgtcaaagtcgcagcacaacggaaagcctggattgattcagccgttaacgataacagatctatctcccgcgccgtctcatggatctactcttcgtgtcgcgtatcaaggagttccgggagcgtactccgaagcggccgccggaaaagcttacccaaactccgaagctattccttgtgatcaattcgatgttgcgtttcaagcgggggagcttt

SEQ ID NO: 12958 - DNA, 1087 bp, Arabidopsis thaliana landsberg
tttgtcctgtttaatctgttttcaataagttgcaggattgtgtattaaagaagtcaatcttaagtttgttcgattattaatctctaataagcccatttgcaacgatcattccagtctactaagtcttagattatacaataacctgactcttaatcttttacggtccatattttcgggtacaaaagaggtctcagtatattgcctttttcttgatgacggctttagagcatgtcctgttccttaatcttgaaaagtttatacatatgcgagttctatcaccaccttttgttttgccatgaattgaagagttttggtgattcacattttgcaatcttgattttgcccatagtgttaagtatctaacactcttccactccttattacagcattcccggacgctatgaaaccttctggaaggaagtagactacgcaaagaacctatggaagaacagatccggtctgaaggtagaagatgcaggaatcgctgcattgtttggtctcgaatgcttagcatggtattgcgcgggtgaaatcgccggcagaggattcaccttcacaggctattacccatgaaggagagtaacaataacttgaagattgtgtaatcccctccgtttttagttttcatgattctctcttgaatcaattttttttccagtttatccctgaaacggaggctttgaagctgagaaaaatccattttgctataactctttgataaaggttgctctcaataagaacaaaatttcccaggaaattgctttcactataatgtttttgtccttgtttaatatcaatatcagcaatgatacaaaatttgaaaccatattatcatttgcaatctaataaatatcgtttctaaaagattatgtagatcttcatgatactctgttcttaacatccataatttttattttttgataaagaacggccatataatttggtggttgattggtaatcatgaaacgagaaagaggagggacgagaaagcaggaggaccaagaatgggaccttccattccaaagagacacaattataatttttggggtcagaatttgaaagaacaaaacaacatacttctactgga

SEQ ID NO: 12959 - DNA, 775 bp, Arabidopsis thaliana landsberg
tgcaacttctatgccttccacccataccaaaacttgtggatgtttctaaaacattttatatcctcctttcatgggtcaattctcggcccattaaattatcttattgggctttacttgtatccaaacatattaacgaaaaaatctgtgtaatgtgtgaactgtcaagcatcaatgatcaatgttatcattcatgacttcatttgtgtatttaatatgactctatgcattcatatgcccaattaactcacaagcatcaatgatcaatgtatcattcatatgtgtatgtaaaatgcctgatgcattcatatgctcaatttctctaataatacctttagttgttgtagataagatcttcgacaaaatgtgtaacttgaagttcttagaagtggttatgtattagtttgccttggtgtttggtgccatgtcattcaggtttgctcgtatcaagctagctgggtcgggttgagattcgggttaacgggttgacccaattacccattggtcgctttttctgatttcttctcttctcacagtgctctcacctaacgcagattcttcttctctaccatattcgttgaaaccagagaagatggtggagtgtgtcgccgaagatcgctccgtcgatgttgtcatcggactttgcaaatcttgcggcggaggctaagcggatgatcgatttaggcgccaattggcttcacatggacattatggtaacaacctttattgcttcttcttcttcttcttctccgaatctgatttttttttattttactca

SEQ ID NO: 12960 - DNA, 687 bp, Arabidopsis thaliana landsberg
cttcttccttgatatcttcaatctcctcggctttagtctcataattctctaatcaccgatctgttcttcatagtgtaatgtgtgttgggattgttgatttcaggaggtaaattggtgtatcaaaccacaaagaagagagctagtggccccaaatgtcctgttactggcaagcgtattcaaggagtaagtcttctgatttcgatttggcttcgtgtgatttggtttacatgattcttgtatctagagtcttgatttgaggtctagatagagttaagagtttgaattttttaggaatttgatggctatgtataaccaaatcaatcagattgagtgttttagaatgttttgagtattgatcagtctcatttttaatgggcatgtcttcttatttcaagaaaccatgttacttagttaatagtattgtgcttattgacggtcttgtgctgattagataaatcccacatcagtacataacataaatcataagctaaattgtcggtgccactttgtctttcaagttgttccttgtattacataaggatttgctatccacctttggcataaattttcagttttttcccaactatatatgtttgattatgcaatggcatattccttttgcattatgtgaataactttgtttgtttattcagatccctcacttgaggccctctgagtacaagaggt

SEQ ID NO: 12961 - DNA, 578 bp, Arabidopsis thaliana landsberg
acaaacgtttaactaaattaaataaaatatgcaaaaattgaggataaatatatctacattaagataattttaatacgaatctaaagcaacttgaatggatcgaatcgagtttaaaacacaaaagttatgaatgttttaaaccatactgtaattcgcacggactaaatttacgagactgccatcgtcttcttcctttcatcttcttcctctcatccatggaagagagaggagggaaagtggagggggctgcgcagggggagggaggagctcgacctccgccaaggggccggccacgccgcacagggcacgcgcgctcgtgggcgggggccgcgcctgggagggagggagcgcgggccgagagcacgggagccgccaccggctaccgccgccgccggggagggggaaaggggtgccatgagaggggaaatggagaggggaggagcgccaccgtcgaagaaggtggggagagagtgagggaggcctgcacggacgggaaaacgaagaaatgaagaaaccctagcacaacaatggaggtttctcacggggaagaagacctcgccggagcgaggagaaatctt

SEQ ID NO: 12962 - DNA, 1330 bp, Arabidopsis thaliana landsberg
tcatccgaacatacatctaataagtgttcatcatgatgcaatgcaggcatccattttcaatcacatctgcaccacaagatgattacctaagtgttcacattagagttcttggggattggacacgagctctcaaaggagtcttctctgaggttattactataatgtctctatttaaccgatctgtgttgaatttaaagagtttgatatgaatgtttttgcttaatgtgttgtttcaggtgtgtaagccaccaccggcaggagttagtggtctgcttagagccgacatgttgcatggtgcaaataatcccgagtaagtaaaaatcctaaccactctatcttgaaaaatgtaatccatgcgtcgttatctttcatctacacgtaaatgactaaatcatgctaagtggttctagaaggtttttgagaggatgcatcatgactcgtgaatcgtgatatccacttaggaaaagcattgttgagtatataagggtaacaaattcaaacaatgtacctaattcattataataaagcggtgtgggagaccacaactaaaacaaactatgtacctaaccaaaatatcactattctatttaggtgattgagacgcattatttggttatatcatgcaagcacgatgttttttagcttctcctgtgaccgcgtaaatctttgggttgcaatatcttatttctcaaccttttccttttaaaacctttgcaaggtgatcggataattaattaggctaggtcaacattctacgtttttaaaaaatattttgcatcacgtcaattcatattttattgtcgatttactttataaagttcctttttctaaataaaaataaaataaagagatgctgactttttaaatggtcttcgtagtttcctatcttatagcttgggttatatgggcacatcacatgtagatataatatagatccagctcatctaggtgtacgaatatacttgcaagtgttcacatgccaaattaatatgtttcgttaggcatatgatttttcaattcatttacttctacttaatcttggttttgattgttcacatgccaaaataatttgttttggataagcatatgattattctattcatttatccaatttgaaactgtttttggctttataggttttatctttgggtgccattaatagtgttaactatctagctagcaatacaaaatgtaatcattacttatagtttgtacgtacctaatatcttatttggagtcgcaagagatacttaattaacatggcaataactagaaagatggtatgtgtatatacgtaattaagaaatagtcttacattatttgatccaac

SEQ ID NO: 12963 - DNA, 714 bp, Arabidopsis thaliana landsberg
aaaaaaagtatcagatcaaagcccattgggccagagtagttcagtttgagagcccactttgtaccttagagtcagagagctgtgtgacggacgggagaagcgtaaaagcgcataaactgataaacattaaagaatcggacgatgtccggcgagaacaacgctataagctaaacacagaaagtctctgcttctgtaactgacagctcaacaaaactttgtatttctttgcatgcaacagtgtgcgtttgattcttctgatctgttctctgttgttttatttgtgacggtcgtagtctgttgttccagatcaagaccatgccaccgtcgaattcgccggtaaaaatattaatattttctaatattttcggtttcttagatggattgatagttaaacatgcaggaaagaaacgatttcatttagaattgagtatgttgttgatttagctaagacgacaagaatttgtttgaatttctttaactgactgaccactttatatttctgcagtctttacgttacttgtttcattgtttgtcgatttgatcagctaggggcgataaatttttaagccaagctgttgaagaggcatatattggagttgagtgtggtgatggttatccgtttgggctgttattgttcataagaacgatattgtagtgagctgccacaacatggttttcaaatacaaagatccaacggcacatgcagaagtcaaa

SEQ ID NO: 12964 - DNA, 638 bp, Arabidopsis thaliana landsberg
gactgtttgccatagcggcgcgaaccgttcacatgtgcgcaaaatttgttagggttccagatttattgcaagatttgttagctaaacctgtgagattaactcgagaaccgacttgtaacgggtacaaaccttctcctttatatagatgaagatctacgaccgattgaaccccacacaatcgatccaatcaaatctacttatcatttttatcttatgtgttaggagtagctctaatttagcctccttctacctcgaatctttcacctctaccttgactagagacgtcttaggtggtctgccggtgccaagacataccctatgatctctccttccccgacaggtccctcccgagaggcgagatttatatctattacgaagaagacaatactctacaccatcgtagaccgtccgagccttaggcgctggccgttcggatatacagaagaagaagcgctcatacgtctaggtcgtagaccgtctatgtatctagatagagcacgccagacagttggttctaatatttgacgttcagatcagccaagatacagattggttgaggacatcggagttcactgccaaagtgccatctgccatgtgtgggtaggtcgtttctggagagatgttcaggaacagttatc

SEQ ID NO: 12965 - DNA, 777 bp, Arabidopsis thaliana landsberg
taatgagtatttttcatgctcgcgttaatggtttctagtgaacgtatctcttagatagaagcttttgattttgcttcctagctctatgctatgatttctaccttttctagatagttgagatttaatactgtatcaattgacaaaaagattctgttttatgctatataatgatttttttttaaatgtgttttatggtttctaatgaaattctctatctccacttaacatatttgttttgtcatttgcttggaataagaacacggctcccgcaccaaaccccggagcagtcgatgcacaagcggtggctttgaaggttgtaggcgacaaagccgccttctatggatgcggtttctatggaaatcaagacacactcttggatcaagaaggacgtcatttcttcaaaggatgcttcattgaaggatcaatcgacttcatattcggtaacgggagatccctttacgaggtaatacaaaaatacaacaatgtcgtaatgtttcacatatacacttttacatgtaagttaacaattcaaaaccaattttgtttttgtaggattgcacacttcattccatagcaaaggaaaatacaatcgggtgtattacagcaaatggaaaggacacattgaaagaccgaacaggatttgtgttcgtgaattgcaagatcacgggaagtgcaagagtttggcttggacgtgcatggagaccttatgcaagagttatcttctctaagacatacatgtctagagttgtttctcttgatgggcccaatgatatgggg

SEQ ID NO: 12966 - DNA, 680 bp, Arabidopsis thaliana landsberg
ggagcaatcagtcctacaattttgagacaaattattatccgtcttcaaactcataagtcgagctgctaaggaatttttgaaagaccttctttacatccatcgtaaataggttgttttgcagcatccaaaatatcataaaacttttttgcctcgaaattaggatcttcttctctcatctgatcaaactctgattctgtactaccaaatgcatctgaaaccatttccacataaggatccactggttctatgtgagactcaaacctaacagtatcttcttcagaattgttgtttattaacatactagaatcttccccatgagaagtccaaacccaatagttaagcataaaacctttgttgaacaaatgtgttgacacgatatgttcttcttgttgtcttcctccatttccacacttaatatacggacaaaaaagtttttattctccaaaaataaaggctgactttttgcaaacttcaaaaaattgtccaatccttcataaaaagcttgtgatactcgattggttgtaggatcgattctttcatacatccaatgcctttcagcatatatattcctatttgaagacatgataacctgaaaatatagttgagaaaataaaataaaatttctggatggaagacgtaattcaatatgacaaaacaaatcaattcatgttactactccg

SEQ ID NO: 12967 - DNA, 778 bp, Arabidopsis thaliana landsberg
tttccgggcttaccctttaagtgttcgatgaaattcctctgttgggttttgggaactgtgagaatcgttctgtgggagtggggttggtgggtgatatagaaaaatgtgtaaaatggagaagtttctttaccacaggaaactatgggagatgaatgttaagcttttaggagagagcaaagttgagaaactcaagaactcttttgtttcgaggcctcgtatgagcttatggatgattcgtgctgttactgtattgttgctttggagctgttttgttcatttgatggctttgggagagatgtggggaccaagattgtttaaaggttggccttcttgtttcaatcaccatcaactgtccactgccgcagagatgacgtctcttcctaccaaaattgctcttccacctaaaagtaagttcttttgagaacattgattgatgaaatttgtggttgaatcggataatgtaccttacttggtcttggagatgaatctggaaactaagctctttgttttttcttctcaggggtatatgtgaacaatggttatcttatggtttcctgcaatggaggactcaatcaaatgcgagcagctgtaagatgataactaaaccattggaaataacatctctttacaaggtttcatcttctagtgatagatttgcttactttgtttttcgtctactttctacagatatgtgatatggtaaccgttgcaagaaacatgaatgttacacttattgtgccggagcttgacaagacctctttttggaacgatccaaggt

SEQ ID NO: 12968 - DNA, 655 bp, Arabidopsis thaliana landsberg
ccctgctacgtttcaaggtcttatgattgctatattcaagccttttctgagaaagtatgtcttgttttttttcgatgatgtgcttatttatagttcatcgatggaagagcatgtacaacatcttcagcaagtttttgaggtcatgagatctaataaactgtttgccaagcttagtaaatgtgcatttgctgtttctaaggtggagtacttgggacattttattagtggaaagggaattgagacagatcctacaaagattaaggcagtcttggaatggccaaaaccaacaacactcaaacagttaagagtatttgtgggctagctggttattacaggagatttgtaagaagctttggggtcattgcagctcatttgcatatgttgacaaagatcaattcttttgagtggtcagaggaagcacatgaagcatttgatggtttgaagaacgcattgtgccaagcacctgttttagctttgccactttttgataaacagtttgttgttgaaaccgacgcttgtggccaagggattggtgcagttttgatacaagcagggcatccattggcctacattagttggcagttaaagggaaaacagttacacttgtccatatatgagaaggagttattggtggtcatatttgcaattgtgaatt

SEQ ID NO: 12969 - DNA, 994 bp, Arabidopsis thaliana landsberg
cccgaaaccccccctagcgaaccctagcaagaagggagccccggccactatgatcaatctctttgaagattacaaagggagaagatgaaaccatgttgcgaagcctgttgtctctctcttcgccatatggagaagatagttctttgtacaatgaggcatttgagatctaagctttgtgatctggcggaggaggatagccacgcaatgaggccagaccaatcagcaaaaattagatatggctgtcctagtcttgactgaaccatgctccaaatattggataccttaagagtatagaaacttatcatcttagatccttaactttttcttaaactaacatttaaacaaaactaattgtaattttaaggtaaaagttattgaaccgttcaatatatatatatatatatatatatagttgatgagggccgctctacatagaggggctattttatattttatatatatgatcttcatttacagctaaaaacatccattaattgagttccatccatctttttttttctttctgatcttcatttattgaaatttaaccttggaataaatatagaatacaaaataaattttattaactgtaaacttttattgataaagatcttcgtcatacatccaacttttaagagtaggatttttgtcatgcatccaacttttaatacaaatatcattatctccataaacatcattcggtgtataaatacacaatttcccctcttacaattccttacgttttcgaatactgcaacataaacgttttcagaagaacaaataaaagactcttcggaaacaagaacttattcatatcaaagcatggcttattgtatatttttttctttcttgtgattgttcatgtttcttccatacttttcaaagttgttggactatattctctcctatatttattacgtggaactgattaatgaatcagcgtatgttaaactttttacagctcgtagaaatgtagggggtattaatgtaagac

SEQ ID NO: 12970 - DNA, 454 bp, Arabidopsis thaliana landsberg
taccgccgctaatcccgctctgtctcctaagccactactccctgacggctttgcttctccgtcggtttctctcggcttctccaggaaagttggcggcggcagagcagtggtcgttgcagcggctacggtggacacaaacaacatgccgatgaccggagtcgtgttccagcctttcgaagaggtgaagaaagccgatctggccattccaatcacatctcatgcctctctcgctcgccagaggtttgccgacgctagcgaggcagtcattaatgagcaaatcaagtaagcttctcttttcttttctgtctaattaaagaaacgaaaatgtttaaagattagatctaacggaggaggttgctttctatttacagtgtggaatacaacgtctcctatgtgtaccattcaatgtacgcatactttgacagagtccacgttgctatgaagggactagcca

SEQ ID NO: 12971 - DNA, 1044 bp, Arabidopsis thaliana landsberg
ctcaccactcacacacaaaaaaataaaaaaaatagacaatagtcaatgtttgatagtctgaaatcgatagaaaagttttcaaaccaaatcaatctgcaatatggactatagacatctctacaataataacgtgacaacataacgtaactatgagtctgtgacatgtcaaatacacagtatacactcaaggacatgtatacatataacacatggagcatagcatagctcatcatttagctttcttctaattacactactggtgattttcactcagagtcagggaaccagccaatgtggcttcaaaaactcctttgtaaagattcaagttcataaataaaattcagtttgcagaaaagaaaaaaaaaaaacagatggatcataattaattaatttccacataaaaagaagtttctaccatataatcatattactcataaaaatatattaatgtatcttaaactaattacagacttatttatttttctgataaatataaacataatcaaatagatagagttggattttaagttaaatatcctttgtattgtgtattaatcagaagaaatattatttttaataaacacaaaatcatatctaggagatgagtatatatctcttccagcatatgtactttaatcttagtagttatcaatcattgcaaaaaatatatgttaaaacatatcctaataaaaaaataatatattactatatgaaatttaaacacgttattttcttgtatttaaattatactaaattgatccttacagtatttctctgaatttttttatccttacaaatgttaccaaaaaatattaatttgtaagaagataattacaaacaaaagaaatgcaatgataaacaaaaaaaacaaaaggttaaaaagcgcaaacaaaaaaaatagaaattaattgtgaggataaatattatataattttatcttggaggatatgtaatttttatttttttttattttgataagcatgatatatataatggagatgatggtaatgtttatgtttgaggaagttaagagctacatagaag

SEQ ID NO: 12972 - DNA, 897 bp, Arabidopsis thaliana landsberg
ctattgactcatgtaataatgttatgatgcagttgtttcggtcaaactttctttaatataagtgaggttacatggattcaatgtcggatgtttgggttatactttgtaagtttaaagttttatcgaaacaattacttttctgaattttagtttggatcgaatttaactaattcgactattccaaatgtcaatatatgttaaggtctcactcattgtttattacttccttgaaaagctccttttataaactcgaaagggcaaaaacgaagaagaaaaaaaagaaaacataacacacacaaagaagggataaagaacctgtaaatttagtgttcataaggacatgctcacatggtgtgggttatgtcacttagaccctacaccttctcctctcaccttctttgctcccaacctttacttttatcaatttatgtccctctctctcttagataccgaatctttactactattttccgcaatttgttcttgagcctcttttttctcctagtcatagtcaagtgtctctaaacgatggacccgatttatccaccaacgctaacgtttaatctatctcactgtcatttgtgactatcacatagctacagtacgaccattttcgtaaacttatcataaaagatcggtctcaaatccgatacaaatgttatgttgaacatctacgggacataaaaaaccattgttattgctatatattcttttaagggatacttataaaaaaggtgtggcgtataaaatacgtgtggcaccattatgaattgcccagagagtctttatctatagagaggtacgacataacacataagtgaacgaaatatctacatttctaacggaaaataatatacacacatctcaagcaggggaccttatgtgtgcggcataatg

SEQ ID NO: 12973 - DNA, 533 bp, Arabidopsis thaliana landsberg
aacaagaatgatcatcatcatcatcaacataataatgatccaatcggtatggccatggaccagtacacacagctccatatcttcaatcctttctcttcttctcatttccctcctctctcttcttccctcacaaccaccactcttctctccggagatcaagaagacgacgaagacgaagaagaacctctagaggaactcggtgctatgaaggaaatgatgtacaagatcgcagccatgcaatcggttgacatcgacccagcaaccgtcaagaaacccaaacgccgtaacgtgaggatctccgacgaccctcagagtgtggcggctagacatcgccgtgagagaatcagtgagaggatcagaattcttcagagactcgtgccaggtggcactaaaatggatacggcttcaatgctcgatgaagctatacgctatgtcaagttcttgaaacggcagatccggctactcaataataataccggatatactcctccgccgccgcaagatcaagcttctcaggcggtgacgacgtcatg

SEQ ID NO: 12974 - DNA, 586 bp, Arabidopsis thaliana landsberg
agtaagctccagattcttgacttgttccttcagttgttgtacctgagaaccatcagaaactgatttcttcctctccaaggaagccttctcaagctttgactttaaccagtctagcttgaagcctacttccgttaacttagtcaactcgctgtaagcattgcttagctcagtctcagacaaacttagaggaggctttctcagtgtcttgatgaggcagaggagagtattcatatgtgctttcttcaccagtttgttctttggtaagaaatgtactgcagtgtctggatgcttcacgaagatccaactcactgatttaacctgcatgcacaagaaaaaaatgtaataatgttaactagatgtaacatctaattctcagttgatttttcttcatgaaacaacttcagctactttaatgtagacttcaatggttaggtttgttgttctccagaaaccctttttcttgaagcttgctaagaggcaacgtcttagagaaacaccagtttgagaccttcgggcagaacaagttgcatgctttctgtagaaagatatacacagaggggatctttaatcaaaattttctattcct

SEQ ID NO: 12975 - DNA, 624 bp, Arabidopsis thaliana landsberg
ccgctctccttgaagaaagattgagtatgggactcaattttcttctttctgcagaggtacacaaatgatctgctacttagatttccgctggttcctgtattgattctcctttaaaactctggtttcgttttgttcgatccagctggatcataagaagaaggactacaagtttggtttcggattaacagttggttaaaagaccgaataaaaaccggcacacaataagcctggcgcacagagcagattgcagcagtagtggtttcagctgcgaggatttcggttaaaatttattctatttcagtttaggctttttggtgaagttgggaagataaacggtaacgatgttgtgttgttatttgaggtttaggatttgtttccaagaaccattttataaaagaagaagaagcaaatgaggtttttgttttacttccttgctctaagatctcgtgaacttccgagagaggtgtatcatttcatttctttgccataaaaaaaaacgaattctttttttcttcctcgttcgttgtctgatttgttgaaaatattttattcgaatataaaatcacctgagatttgttgcttttgacgtggaaatataagatgggccgagatagacgtcgcagt

SEQ ID NO: 12976 - DNA, 1116 bp, Arabidopsis thaliana landsberg
tctatgattagtgtgtctgcaacaacaaaattagtaacttcgcagctaaattccacaaacaacccagtatgaattctagaaactgtgaaacaacaaccatgattcatacttcaaaagaaaatcatgttcgagatcaatttcagatgaagagattcttagatctgccttaaacaaggttttagatctgacatgtgagggagccttacactaccacgtaccagagtatcgacaaatttgggaacattatcaataaaacgcttaaattaagagataccaaagcaaaaatctcgaccaaatgaaaaaaacaggcaccacacatgtaaacatcaaaattcaaaaccaagcccaaatgttcctacacacaatgactgcttccgagtattcatacgaacacagatacggatcgaatcgaaaagcaccggatgctgcttaacttagaactaaacctagatccagcaacatttcgattacactatatactatatatatagagagagatgtgtgcgtacttggagagtacgagtagcgaattcgacaccaatggtggatttggattctaagcagaactcgttgcgagtgaatctagagaggagattagacttgccgacaccggagtctccgatcaaaaccactttaaacaagtagtcgtattcttcgtccggtcttctcgccattgttacacttttctcgaggagtgctttagatttgggattttgaaatagaaaaggagaagatgacagaaataaataaataatttaatttctctttccccttggatcttctctattcaaccttctcggcttgttattgcccaacgacgaagaccttttcttgtcaagttgggcttactaaaaaagcctacatatatgtaattcatttatacatgctaataaaagggaaagtaattagagcttaaccggaaaataaacaaaaatcagaaataaaaccaaacaaaaccgagccaaaccagaggaatacactcaatacagattttaaaaaccctacttcttcatcatcatcccttcaacactcctttatagacttttatccgcctcaactttttgcttcttctctctcgatttgctctcacggaagattcttcagaatatctggtaa

SEQ ID NO: 12977 - DNA, 1682 bp, Arabidopsis thaliana landsberg
gcaccaagcacttttgcttgaggtttcagactgttgttgttgttgacatgtttgttgtttttattacattcaagtgcttttttattattgttgacatgtctctttctcacttttatactttttgacaaaaaaaaaaacattctctgagttttgattgatgttttgtttttgttattatgtttgggtcgttaagattattttgtcaaacttaattcttgagagtttatttatttgaccaaatgtgaagttcatgacttttattgttgtaccaaccaaagaaaatctgtaccgtctcaagatctcctcttaaatcttttggttggatcatatcttaactgttttggttagaagttagaacaaccaaataataaaaatattctatagaaagtctcatattgaaatcactcttttataatatatacactgttatatatatttttggatatgtaaaggtttagaagtgagtcaagtgacatgtatggttcatatgaagactcaagaacatcagttaccattagcataatttaaagaattttctctgtagtaacagagtatggactctaacaccacaacattttcgagataagagtctttagttaaatctttaacaagaggatattagatgacaatttatgggtgtcaaacttgaaaagtttggaccatttcttaatatatggtgctatgagtcgactatgacgtgtgtgtaagcctagaaatatttttgtaattttactatccaaatccgttcaatctcggtttcgttctttttttttgtctcaaagtaaaatgcttgcagttttgaattgttttacgggattaaaagttttttttcgtttaaaaaaattattcttttaactatagtaggtttctcgccatgcatgttgcggagaaattcatttttaacattaattaaatttataaaagggtaaataaaatttgaatcaaaacttaatattcaacatataattatgttcagtcgagaagatttgaaaatatgacaaagaatcaatacaatacaacacaaaattaagcaaaccgttagtgatcaaagattttcaaacttcactcacattacaaaagagaaaaaagagaaggaaaaaaaaaaaaaatcgtaactgaaatatataaaagaaacctcggggaaattaagagacatcaaagacatcacataattaatggactaatgtctttgacgcttcacaacaaccaccaccatggtttggctggaggaggtggatacacttttccatatttagaaggtggtggtggtggagatttcctgtaatagtaggcttgataagtttgaggaggaggaaaagcaaccggaggaggatagatcggagtaggaggaggaagatcagccggtggagaatagtacggagtaggaggaggaggaagatcagctggaggaggagaatagaccggagtaggaggaggaggaagatcagccggagaagaatataccggagatggaagaggagaatgttgtggttggtagttattgtaagtgtagaggagcttacggttgttattggcttcaccaagtgtgattagtgttaccaagagaaaaactagagttaaggaaataccttgggacaccatttttagtagttgtgttctttgttcaatgataatgttaaaatccttgacataactatgttttataatgtaattgatccatt

SEQ ID NO: 12978 - DNA, 820 bp, Arabidopsis thaliana landsberg
gcaggatcttgccggaaccggaagtggatctcttcatgaagtccattgcagctggaaatgtcaagagcagtctcatcacagactatactctcagagtaatgatttcactttaacctatagtgcgattttgtcgaaaacataagatagatgcatacattgataaccaaaaataaaattattcagagataattagtcttttcatctacaaaatctactcacgcaattggtggaccctacatttacctactcccaacttttcacctaatagtcatattctttccaattctcactgaacaaccccaatagttccgaaattaaacactttagtcaatttagtttggcaatttggggtgatattgaattgttttttcttcagatattagggcttgacatatgcaaagatacggtggtcgaagatgagatgattcgaggaatctcgggaggtcaaaagaaaagagtcacaacaggtttaactttctctgttcatcaaccactcctaatcatgctaactccgtgagccgcaagtcacacgatgacaactttttttttcttaaaacaaaaataggagagatgatagtaggaccaacaaagacattgttcatggatgagatatcgacaggtctagacagttcaacaacgtaccaaatagtgaaatgccttcaagagattgttcggttcacggacgcaacggttctcatgtccttattacaaccagctcctgaaacgttcgaacttttcgatgacatcattctattgtctgaaggacagatcgtgtaccaaggtccacgtgatcatgttcttaccttctttaaacttcggt

SEQ ID NO: 12979 - DNA, 1314 bp, Arabidopsis thaliana landsberg
gggacgttttgtaattccataaataaatgtaacatcatgacgtaattacaagagattatacctcatcttctatatcttgccaagcttgatccatcaaagttgtgaaagggtgtttgagactcgaatcaggatcaccgatttggttcacggagccagaaggtcgaccacccatcagcataaacaacactcctgctaccacaatctcctctttgcgacatttcaagaactcgactaagtccttgtctgcttgctccgcgtatgcctccacgacttctttttctgctccttcaatccacacccctcccttgttccatgacttcgatcctttctccatcactttttcaggtacctatcatatccaatacaaagaaatgaaacatttaaaaaacaaaaaacgtaaattgaaacatttctgtacccataagatatatatacattaaaacaataatcagttatataaattaagttggttcggtcatggaacaaaaatgtttttgaagaatatcataattgaactttataaattttttgacatattgttcattaacattagaagaaacgataatttaactttttgtttagttttactagtctagtaatcttcaaatcattttttggccgatacaaattaaattatatagtcaaatgttcatcaccttcaagtttataaagtaaacttcattcaaaagatattgaattaattaatggatgatacatttatacctgagagagccattgtaaagcagacatagtcacaacgacatggagctctcctttcggaaacagacgcttatagaacgagccgggaacgccagccgcgaagtactttcggctcgaaccgttcactttctcatccaacgaccgaaacaacgtgttgaaatcgttggaagacaagtcagagaagaagacctcgaactccatctccggctcggttccaccgtcaatcacggctagcttcttccctaacacctcaaccaccgtttccaccgtggaaaacgtgttgtctccgattgcgcaacctaaatcggctattttcaggtgagaggagcaaccttcggtgagctttatggagttgatggctgtcgtcagcattggtttgctcaaggctaaagctgccgctggaccgtaacagtttttgacgtagctcgcgtcatcctcgccaccttgcatggaaagcacgtgctcgaagcttcgtgacgactccatatatagttgtaaatgtgtaagaaaaggtgtgaacgttatactaagaataagtaaattaaagaaggattggtttggttttagaccttgatggcttcacgaggatcaaat

SEQ ID NO: 12980 - DNA, 664 bp, Arabidopsis thaliana landsberg
atttagttaactgtcctttgactttagtttttctttcatgatgttttcttgtaaaaatattatatgtactaacaagttggctccaagagaaatgatataaacgaattccggaaatgaaatggaattggagatggtaaagagctcatttagacttccagcagacaggttacaagatacaggactaacaacttacggctgcagcaaaaccacgaaaatatgtgaagatacaggactaacaacttacggctgtttcactcagtatatactgagatatgttaatattgcttaaaggggtcgtgtatctacaaaatatttagtagcattgatgatattagcaaaggttaacacgcgacataaagcaacccgattttgcacacaaaaaagagaaaagataaacaaccggcctctataaaatctgacgtacaagtatcccttgaattcgaatccctgtcatggtcgattaggactaaagaaaactttgttcatatttgtctgcaatgtacttgctacttagatcatctaaagtgtggtcctaaaatacaactagcctaaatatactaacagcagaacagcaagctgagttccgtagcaagaaacaaggccaaagagagggttttcctcaataatttagtatattgcaaaaatgcccatgagagggaaggaa

SEQ ID NO: 12981 - DNA, 493 bp, Arabidopsis thaliana landsberg
taacacatgcttaatggcttgaaatgatgattgtttggtatggaaacgagcaatggtaaatgacaatcttctatatacaatcgtcaacatgacctgtaatatagaccgagacctgtgtctttgtgaaatgatttttgtgaccattctttacatttttctggtttttttctctgcctacgatcgctgtgacatttgaaataagcacagagaacagaatgtcaaagatgtattgccttctgagcgaaacttaacttctacagtatcttgtgcactacaactgtgacaaagaattcagcgagaacatagcacccatcgaaagaaaatacaaagctgacgttatatccaatggttgaggcagtgttccgttaacgcgtgcggtgaagctagatggaaacgtacatcgtgtatcatgtactgacgtataagcaggggctgaacgctctgacggaggcgcggactttggtagttgtgcgaggtagagcgtatggcagct

SEQ ID NO: 12982 - DNA, 314 bp, Arabidopsis thaliana landsberg
  unsure (1)..(314): unsure at all n locations
tatcactcctgagtacagcatccactcgactgggatcttaaactggcggctcaagaacgcatgcatgacgcacgtactcatgactagctcctcatcctctgcatcgacactatgatcatggaaatcttagacttttaccatcttggggaatctaaaataagtcattcaaatcgcgagtcgttttacttgtctcgtaagctggagacttttctctcaggcncacagtgtagtgactgttaggcttctcagagtaccaagaaagttgttttcggcgtctctttagctcatggtattgaactgtagagtcttgcagg

SEQ ID NO: 12983 - DNA, 709 bp, Arabidopsis thaliana landsberg
tgattgcatgtgattctagacataaaccagagtaagctttatgaaccgatccattttttggtttagtggttttcaaccttagaccggattggtctgtagataactccatttttatcttcgatttattgtccacaacctccacgacttttctcatcttatttgcaacaccatctagacaataatttataccatacctgcattcgaaagataaaacaaataatacatattagttgatccaacattaataattaaaaaaattatgtagcacaaaccggttcaagataggtccggtttgtttaaaacttttaccctgtcttaagctcattgatgttgtctttaataggtcggagttggcgaaaatcgaagggtgttcctttaacggcgaggaatttcccggttggagtgagattatcgtcgagatgagtataaccggaaccgagaatttgaatttcttcagagaagatatcttcattgttatgaccaccaagattccaataagaacgatgaaccaaattcaacggagtagttttctctttagcctttgcttgcatcaccattttcaatctgttttctcctaccagcttatatgtcacagtgacttcaagtttccctattgaataacatgaataccttctctatcttaaaatttatgcatatgtaatagaaaaaagaagatatacagataaagtttttaaggataaaaaacgaa

SEQ ID NO: 12984 - DNA, 829 bp, Arabidopsis thaliana landsberg
  unsure (1)..(829): unsure at all n locations
gagtctccttactcatctagagttaaagtgttggcaagcggtaacacaacagaaagaagattcaggtctggatttagtgttcacttcttcctctataatgagacccaaatttttttgcttggatcaaccaacaaacatgttatgtatgtgcagtgtatggataggagggagtatattggcatcactaggctcatttcaacagatgtggttctccaagtctgagtaagtctctgttctgattttccattaatcagactcgcaaagaaactatagtttgttttctctcctgacactcggatttggggtcttggtgtaaatggcaggtatgaggaacatggagcttcctacattcagagaaaatgcccttaaagcaggcagtttcagattatgtggagtctgacaagacgaaacttggaaactaatgtgttattttcattgtgcatcgttgttccttgaagattattagtattccgcctgaaccttttagaatgagtgtcattaacaagcattatagtgctatttttaaaacataaaaacatgtggaagaagtttcgttgctttattagattttcgcacaatcaagaccgtccacgttttgttactacgaaccaagataatccacaaaattaacaagaaaataacaaatccgaaactacaaaaagcagcttcataagttttctttttcttttttaaaaaagaagaaaaaatcagctttatcgtgcctctcaaaaagctaatgacttcgaagttccaaaattccggtcttcgaacatattntatagaatagcanaatgttttgaaccacangattattaataatataaataat

SEQ ID NO: 12985 - DNA, 932 bp, Arabidopsis thaliana landsberg
tgttgcgtcagtaattgatgttaaccacaccatctcataactgcaggtcatggatcgatatgttgatcctttggtatctcatcttaagacaatgctcaactatcggaaattccgtaaggggaccaaatcagaagtagatgatcttcttaggatcgagaagggcgaaaatccttcaagaatagtttactgttttgggatttcacacgaacatccaggcacttttattctgtcttacataaggagcacaaacccacatcatgagtatataggtttatatcccaagggatttaagttcaggaaaaggatgtttgaggacattgatcggcttgtggcatacttccagaggcatattgatgacccattgcaagaatcggcgccatcaatcaggtctattgctgccaaggtaccgatgagaagcccagcagaccatggatcatctggaggaagtggttggggtagttctcagagtgaaggaggctggaaaggtaactcggatcgttcaggctcaggtaatgcattttaaatttgtttttttaacttgcatagaaaagcttgtgtggtcattgttctacttctcggggttatgttttaatttaacttctggtaatctggattttagatgccgagaagtatttatatattaacattatttatgttatctccttgactatacttctggacgtccgctcttaagtaactgtgcaactgtattgtagggagaggcggtgagtacagaaatggtggtggacgtgatggacatccaagtggagcgcctaggccatatggtggccgtggacgtggtcgaggcagaggacggagggatgatatgaatagtgatagacaagatggtaacggagattggggtaataatgatactggaactgcagatggaggttggggaaatagtggtggcgggggttggggaagcgagt

SEQ ID NO: 12986 - DNA, 782 bp, Arabidopsis thaliana landsberg
  unsure (1)..(782): unsure at all n locations
ttctttgcgaaaattataggaagactttcttcaaaattttcgataacttgagacgacaagctgctgctgtgaagattcagaagaatgctcggagattacattctagaaaatcatacaaaaacctccatgtagcggcgcttgttgtacaaacaggtttaagagcaatggctgctcataaacagtttagattcaggaagcaaacaaaggctgctacaactattcaggtttatatatctgtgggaatatacattggtcagcttatctaattttgggagttttcttactaacgcattaacatattataaattgcaggctcagttccgttgtcacagagcaactttgtacttcaagaagcttaagaaaggagtgatcctgtctcagacacgatggagaggcaaacttgcaaggagagaacttcgacagctcaaaatggtacgtgggtgcactttgtacgttcactgtgtaattgccacttttagggacttttgaagatgaaatagagagttctttatttttctttcatgttttgcctattgataagctggttgccatgtatgtgatcttctggtaaactattatcctaagcatactcatcaacactttttgttatcttcaggcttcaagggaaacaggcgcactgaaagaggcaaaggatatattcgaaaagaaagtcgaagaactcacataccgtgcacagttggagaaacgctcaagggtatttgatacagaaaaatgattttgattgataaatataatttgtnttcggtaggatgatattgaag

SEQ ID NO: 12987 - DNA, 826 bp, Arabidopsis thaliana landsberg
  unsure (1)..(826): unsure at all n locations
tattctaaataaaaaataaaaaataaatgaatcatctcccagttttcatcatgttatttctttcgatgtatttttatttgaatgaagcagcatttttttgcgacgaaagcattttagcatttcaaaatgaactaaaacctggaagtattctcaaagtcaattgtacatctaaaagcgacaaaacggaaattcgagatgtggcgttcatgaaaattacggaatggagatttaacgaaaatccgtttgatagaacaatatggaagtgtctcttaagacaaggtcctaacatgcaaaatcatcatatcttatggagagcatacagaggagggtctacttgacgatgtggtcagatacgtagatggattgctaaaattgatggaatttacttagaaggtaatttggtaccacgaaagcgcatgtttgattggtttaaagtctaatttgttttttggtaaaagtattgtcatcacatacagatatacatgaacaaacataagtcatgttacatcataaccatcctactttgatgtttcgatcattaaaatccggcgttaaccagtattgaccgatgttgaccaaattttatttctttttataaacaaataaaaacaataattattacataattttcaaaaaaaaactaataacaaaatatacaacanataatantacaaaattaattaaaaaatataattttttatttattttatagatgggttgacatatacgtgtaataaaatatttgatcttttttgacatcatttgctcattntaagctattattttaaatcaacatttaatatactatatattagtttctttttta

SEQ ID NO: 12988 - DNA, 540 bp, Arabidopsis thaliana landsberg
ggaagaagtgagagctaagtgaagtcgtcattgaagtgaaatcgacgttagatgacttttctaatgtatattttggactggaatcacatcactttgaaatttctcacatatacattatgttcaaaatcacatgaataatgagggtgatattgaccccaacatgtgttacacaccaagcttatattggtgagtcaagatcctaccacaaatgtccaactgatattgacccctacatgtgttacacaccaaactgctgcaccatcagctaacgaaataggaatcttccttggttaagatctttgtgacgggaggaaataaaagttttgaaaataacgccaaaaaaataggctgaattattatttatgaaatcacaattaaaatgttatttacataagaaacaaaactggacacgaaaccaagctagcaaaggtttttacacgttgatggaagatagtaaaactatccacaattttccatatcatttgaggaaatattgcggttaaaacctaaaataaattgaccacgtgaaaatttgggggt

SEQ ID NO: 12989 - DNA, 548 bp, Arabidopsis thaliana landsberg
taaaaaataaagatttaacattgataacgtaggagtactgcaattcaataacataaaacaaaatttaaataacatggtgatgtaattttgttatgacgatacaatcacatcaatcgccatcttcattcttcatctaattcaaaactttaactctcggtcgatccataccccattttatcccaatcaatactaatcaccttgaattcattcttctccttgtaagccttgcttacctgctcctccactttctggaactcttcctccacgttaaatccatcctccatcctcttcattttctttaggagattaagttccgtttctttctcacgcagtttgagatccaagaagtgtgcttcctccgtctcccttataaatgttgcatctgatgagagagatgatgcctttgaatttttctccgtttcaagcagcctgatgttggaaccgtcatccacacacggcctcttgttggaacctgatgcatccatgatctcggaagagatttgttgctcagagattagagaaagggacaagagaaaagagaagaatcg

SEQ ID NO: 12990 - DNA, 972 bp, Arabidopsis thaliana landsberg
  unsure (1)..(972): unsure at all n locations
cacttgctaagacattcaaacccaacattacaatattcgctatgaaaatcggtgagaaacatttacacactttcgtcactgtttttctgttgtcggtggcgtacattctttgagccctccttctttaaggtgttcagtttgagtttcatgctaaccgagtttctatgtttaaagttcagattttgttgttaaggtagcataataaattagttgttgtttcacagaaaaaaataataaattagttgtttagcatactaaaagaaaaagaaaaaaactggaaaaatattccagagaaaaagctaccataattctttcatggtcgttacgtaacggatttgaatcaacaaacagtataagtatggagtattttaaactaattaaatgagatatttttcttccaagcagaaaaattatgaattaaatgttcaaataaaagatagataagatatttttagaaattaaatgttcaaataaaagatagataagatatttttgaaaattaaatgttcaaataaaatatagataagatatttttggaaattaaatgttcaaataaaagatagataagatattttttggaatcatggaattacacactctcacataatcacacactaataatttattcgatttagaaatcatattaattaaactataatttaataatagttagttaatcacatgttttctctaatattttattagattacgaatcaaattaaaaaatcttattatataaactatagttttcaaagttagcaactcacctgattgtgacacgtgtcaaatctattgatctaagattttgccacatgttcaaaaaacttttcctttttaataattaaaaaaaagtaaaaatataattataagaaaactatatatctaaacagatttaaattgtaaaaataaactattaggaaaaccataagagttttggccatgtaggaaacgaaaatntttgttttacaatta

SEQ ID NO: 12991 - DNA, 491 bp, Arabidopsis thaliana landsberg
ccaaggtaatagaaaatatcacctaagctcaagtggtgcactcaaatcatttggcctctaacctcttcttctcttttgcaattttgcagcaaaacgaacatcttcggtatcaactagccatgttctttcgcgatgagcttctgtcatggtttggaagaagacctctcggagtgcctattcctcctgttgcaggaattgctactttgagttcacccgagctgaagcacaaagttaactctaacgtggacgatgtcattggacgaatcagaggaatagcaccacagtatttctctgaagaggtagaatcattttttacatctccacgagtttttgatgcttactaacattctcataaaactcggagacggtcctgtccattctctgaactaataaatctgatattttcgtgttattcatttcaggatgcagaactcggtggagccgccacagtctgtacaaagaggtgtgagtgaattggtggaggcagcttt

SEQ ID NO: 12992 - DNA, 589 bp, Arabidopsis thaliana landsberg
gaactaaagatagcaatgaactcaccgctgacattttcctggagccatttcgagttcttggggctgatatggctaatccaccacgagtactgccttgaatcatgacggaccaaagtcgccattggtgccggatagcaacagagactactctagccgataaatgatattttacttcctcagcgcttagaactgtgcagagatgcaatatcttatcctcaaaatcataacttgaaaaagatcaataaagtatggtatcaacagcaatgatggagaggacacaaggacaccatggctatgactatgacacgagttagtacgtaccagcggctaagtcttgaactggcccgaagatactactagtagataactagcccacactgcaccaaacaggagccaagaaaaagatagcacttccctcagtaactgtatgacgagaaaaaaaaaagttgtgcatgcacagtaagcgctactgaagtgatagtgcacgcttccttcgtgtgacgtaaacaagcaatcagaattctgtaaactgactgataacaaggtagcaatatacggggacaatcaatcagggtttgtttcatatata

SEQ ID NO: 12993 - DNA, 967 bp, Arabidopsis thaliana landsberg
acatgagaattgcttcttctctctaaagacttagtcaacgtaatttcctcttcttgatgacaaaattagcctcaaaatataatttttttatctaatcttgaccaacaaactctactctataatctacatcaaaaaatggttcagctttatgagacattaaactaattggttgactcaataagactcaagttttttcatacccgagccagtaaatccggagatagacaacagagtctaaaccagcatgatcaatcagctcacgctcaggcatcttaagagcttcaggcatccaatgcaagaacttgaggtatgatctcaactccaaattcacaaaccgccccgcgaatccgccgccacttgcagggctgcttcttaaccccctgaggtaccatttggagaagtaaactctgtcgttgaatggctgaagccttaaaaacgcaaagattatgaagaaaatgaatgcagtgaggatgtttatccctgctgatacaccaatgtctttaagtgttgccatgctttgttacttttgctactccaaatgctcacagttttaacctgaaaggagtcataaagatagaaactttaagattcaaatctgattacatatcaaggaaacacatcaaaatcgaacctttagagactggatccaacataaaatccccccaaattggaagaactgaaacagaacaaatctttgagaacaaacccagaaaaaggagatctaatcgtttcttttctcggtttgcttgaaacccaaataaaaatctaagctttacacaaatgtactccacaaaagagaatgaaattcagagattcaatgaaataaattataaaataagggaaagagagaaaccctagagatggggagtgagaaaagtcagtgactggattgcctcgagattcatatgaggagaagctaaagcagtgatgaatgaagtaacacgcaagccacgcgagaaacacacaa

SEQ ID NO: 12994 - DNA, 556 bp, Arabidopsis thaliana landsberg
  unsure (1)..(556): unsure at all n locations
agttaaatgggtggccaaatggagtgaagattgtttgccatttatccatatcaaaagtatttcctagtccagagattcttgaagttgaagaaataaaaatggttatagattgatggttgattcatgaaattctattctttttttgtaataatttctgatttaatgtttagcataaaagattttatattaatatttggtttataaaaaaaaaaattatttattcaaaatatttttaatttttaatttttaatgtttagattgcgaattccctatatcaatttacttacatgatatttatgtccttatatatcatttctcgaaatttcaagttataaaataaactgtccatcacaacacatccacattaccaacaaagataaacctattaaattcaatagtttccctaaatagtatatgctatattgtaaaatccgcacgtaaatttactcatcacttaaatctaaatcctatatactaaaaactatactcaacaccctaaacactaaacattaaatcgaaaaaccataaaccatattcttaatacgtngttagatag

SEQ ID NO: 12995 - DNA, 844 bp, Arabidopsis thaliana landsberg
agttgagtgttgtgtgagtgtgaggttttttccgtttctgatgctgattagttggcatacagatcagggtccgcatgtactaccaaaaaatatccgcttgtactatggtcagctttcgaatatttatggtggtgtacgattttaccaaatatccttgagaataaaatccacttggcgaatattagtcaacgattatttgactttagaagtagtcaaggttctacagaattagcagtaaataactttgttccttcactcattttatcattggtttcttatagatttttcaaattctataaactttttgaatgatttatcgaaaattttgggtctacaacaactatggcgagaaatgcataaacgatcccataagttaagttgttagaaatattctaacttctaatattctcaaagagactaggttctgaaccatctatttttagaatttttagtcaatttttgtgtggctcttaaccatatttataaccaaaagtttagaacccatcatggctttttatttttgaactagtccaatggtaaaacttctagtaatacgttgttcaaagaaagtgaactgaatagagttagtaacatgtatctctggcttatcaactcgcataaatagaatcaaagtaaacacagtccttatatggacatgttgtaagtgatgagaatcaaccagcaaagttcagaagttcatttggagccaaaacagaacataatccagaagataaccaaattgaaatcttgtttaaattcttcgtatatgtgctggattgtgagaatgaaacatggtagggtaaaaccaatacaaaaatttgctgatgttagttaactcaatggc

SEQ ID NO: 12996 - DNA, 920 bp, Arabidopsis thaliana landsberg
atgtttgtattctactatggaaactcagggctttgaagcatacgtgggattccagttgcttaggacagtgttgatgggggtagtcgctgaatggcaggtataagtctctcttccggcagcacttgcgcagtatctcctctggtttattcatgcaccaatctgacaaaaaacataacataatgatgtatacaatagtagaatagatataattgatactgaaaactcaatgtcttgttggttttgtttctcatttccaaacaagtaacatatcttaaatatgcatcaagtatcatacggtttatcacaatggttttctaatgataacgtgaatgctggggcaggtattggtttgtggcattcttctggttgtgatggccattggaaacttcataaacacagtagagacactaatggtgaagtcgagattcaaggcgaagatgaagagaagtaaaagcagagcagaactttgattaaacttcctaacttatatgactacacctttatagtttccaactgtggatctttctccccattatttgcttcagtcgataaattttgtttcttggggcaaaagtaacctaagtctgaaaaaaaaaaaaacagggagtgccctttgtttgtgtaaatggaagttgggatttgatagttgattgattaaactgtgttttgtaaacttttcaactaacacttgttcggtttccaatgatcagattttcataaaatggtgttgaaattagatttttatctttgtcttagtgcttggaacttgacactactagtttgaaaaagggtaccttcctagtcaaggttcccaatcaacaactaaacaactaaaggattcgtttttttttttttgagttttaccaaaaatttccgggcctataactgtagtctagtctcctcagccttaaaaacttttg

SEQ ID NO: 12997 - DNA, 1176 bp, Arabidopsis thaliana landsberg
ttcttcctgccattaatttcatccgcgtaagtaacaaagcctaaaaaaataaacatagtaaacaaacatgaggtaaggaaaatcaaaacatgctactagcaatgatgttacattccaataattcaatggggacctcttgaatacaagaattataccaaaatcttaaagagattttattggtttgtgtatcttattttatttctcttatggatatacgtaattttatataggtttctaagaacttactaggatacaaactaagatttgtgttttcttttgtaactacgaaacaatagaaatttctatattttatttttaatccttaattgaataacaattgatactattgaggattttaaatccttaataattttgttatttcactatcaccaaaaattcaaagtcgatggtcgaataactcaaaagatttatcaatttttcgaatcactaaaaattaaataatcaaatagaataaacacttttaatcacatgccttggagtaaaagtaagtaaaggagtcttgaagaatggtacctcattaagcctatagtttttgggtttatccggaaacattgcttcgaaaacccttgatttgtcttccaaatattcatcaaacaaggcctgcaaagatcggcaagagattcgatattaaaacattcatgtgtgtacacatatacagaccctattatagaatgagaaagagacctgaggagactcgtggagagcgatatcggttgatattttagaggaatacttggcggattttacaggtgacaagtgacacttcactctccaccgttttgatctaacctgcccacaacttccgatcatccccgggcatgaatacaccgcagagcttaccgccatttcaccaagattggatctttgatctttcccacatatctttatctctcaatctatctatactaaaagattgcgtcttggtttctctctatacgttaagacttttgtggaagattgagaaagagacagtgaataaaaccgtcacggtagagatttggaatattggcttatttggtcttttacgtccacgtggcgtaattacaagacgttacatgttatcaaagtcttgaaatctatatttgcttactcagtcttttacgcattcggtcgtggatgaaaccgacacgacatcattcaaagttgaaaggaact

SEQ ID NO: 12998 - DNA, 378 bp, Arabidopsis thaliana landsberg
ccaatggagaattgtgagacttgatgatctataataagttcattaaagttgaaaaaagaaacaagacagggacgttacttgatttgatcatgagaaccatttaaggccatatttgaaattgcccatacagcttctttcttcatgtagaaagtcagtatcttgagcaagattgaccaagattggaatcaaatttgcatcaataactgactgtaatcaccaggggaaaaagaaaaacaaattagtgatagcaaaagacaaaaatggtaaattttcattggggataatagcaacaaaagtttctcacctgaatttgttctttagtccctgcagggatggttgaaatcacccagcaagcacacttctttattttgttcttgt

SEQ ID NO: 12999 - DNA, 1170 bp, Arabidopsis thaliana landsberg
aagtgttaaatcaaaagacggtttgaaatcacgaaaggatttagaagacatagggattagaaaacacttatatgcagagacacgtggaaagagaacttacctgcctcctgccgcttattggctatcaaagttagagaagaagttgttctgcaataggttagcaaaatttaggggtcctgacgaatattgtgctaatatctcaaactgtgtatcagttgagcctcttggaattggtgggttaaaatcacatgatcatcacgtccttatgcagaatctactttcagttgctttgagaggcttgttgcttagaggacctcgagttgctgtcactcgtttatgcttttacttcaatagattatgtcagcgtgtgattgatccagagaaaatactagccttagagtctgaagttgtggatacaatgtgtcaactagaacggttctttcctccttccatgtttgacataatgtttcacctgcccatacatctagggagggaagcacgaatgggtgggccagtacattttcgctcgatgtacccatttgagaggtacttctacttctaactctctaattatgtgatatgttgttagttagctttattgaaatcttcagactctaaggctagtattttctcttatgatgtaggtacatgaaaacattgaaatcttatgttaagaactatgcaagaccagaagcgtgtattgcagagggctatttggctagagaatgtgttgcattttgcacagagttcctacgcaactcgttaccatgtgaagaatcagttaatcgcaatgaagatattgagacaaatgagaatgtgcttggaggtcgtccattatataagggtacaaatgttacactaatagagaaagaaagagagatagcacatcgatatgttctaatgaacatggctgtgactgaaccttatattgagtaagagcactgaatctcttgtatatatctttattcatcgagtatgatctttacattaagttttgtcttttttcagtatgcatttggaagaattacaagaatttgatggtagttgtgcaagaaacgaaactctattgttcaagttacacaaccgaaagatttgcagagtggattaaaaataaaggatgagttcatcacttacaaatatgatattggttctctgtaatgaagtattgag

SEQ ID NO: 13000 - DNA, 427 bp, Arabidopsis thaliana landsberg
tggtgaaggcgacgggcgtgcgcggtgtgcgggtgcggtgccggtgtgtccgtgtgtgtgcggtagtccggcgggtgcgggcgtgcgactgtgccgcagaccgcagtaccagtacgccagtacgaccgtgtgccactagggtttgcctggtgggctgggcgagccgtgtaaacagtggccagtgggcgtgtgcgagtggcggacttgggcagttgggctgtaggaatttcgggtatgggttgttcgggtaccggttggcgctacccgagttacccagaattattttgggtttcacaagttagtacccgaaattaccaaacaaatttcgggtacccggtattacgggttcgggtatttcaggttcgggtaacgggtaacgggtaacgggttttttgccagtggtggaccgcgggtacggttcgcgcac

SEQ ID NO: 13001 - DNA, 642 bp, Arabidopsis thaliana landsberg
tattgtatttacgtaaatatatctataaattaatatttattaacttatacgtattaacttatacgtattaacttatacgtattaaattagtattgtgatattaatttatcctataaattaatatcactataaattaataaaattgcatggtcccaacattattaatttatagagtttctactgtagtacaatagtaattcctttcgactatgaaccggcgctcttcaccatacgatttggggtcactttcctaataaaactataaatgttttattttagaaatcttttattcatagtatgtatgactagaagttacaaatataaattaatgctatttttttataaaatagacagttttgcatttacttactcttttttttggacaaaaacatacttgattccattaaaccataacaagtatattgtttaaacaaacatcaacctcaaggttgggaacaaggataaatataagcactcttacaagcggaagataaaagaaatttaaacgataattcgacagaagatccaaacatcagagaaaagaacttgattgtagcttaccacaagcgagagattggtgagtcgaagacaattccaggaagatttaaatacattgatgattggtcacgttccaataaatgc

SEQ ID NO: 13002 - DNA, 664 bp, Arabidopsis thaliana landsberg
atattacattaacaatatgacactcaaagtttgaaacattacaattgcgttaattaagtctaacaaaaaaacattttctctgaccattgaaatgcttttcagcttttacactcttcaactttcatgaaagagattaacgcaaaaaacaataccaatatgcagaagttacttacatgctacataaggtttgcatttctcgaatttctccaaaggatgacaatgaaaaaaccaccattagataaaccttgattaacacagtgcaaaataaaaaattattggttagaaaaagatttatgtcattttgacaaaaacaaacacaaagtcaaatatgagaaatttaaatctcagtcagtcatttcgtcgaacacattgagttcaatctagaagcggtgagccataactggtaaagacattaaaagaagcaataagattagacaataagctctaaacattcaatcggaatagaagtaagcatatacaatcatttttcaacagaacaatcagatctacaagtctaaaactcttatttagcttacagacctaagaaacaaatggaaatagatcgaataaacaagaattacactgatttagaaggaataaaataagacagcgtcacagatctaagagaatagagttataccaatgagaatcagaccaagagata

SEQ ID NO: 13003 - DNA, 1253 bp, Arabidopsis thaliana landsberg
  unsure (1)..(1253): unsure at all n locations
gaaaaaaatacttatgaaaatattcttcctttccttattccaaataaaaaaaattgtgagtcatccaccaaccaacatcaattatttcccaaaaagttatctatagataaaatttccacaaaaaaaaaagaagtaaaacaaataatagaaaaacatatatatattctaacatttgggaagatcagcgggtggaggaagcaatgactggtcagggccgtgaccattgtcaacgacgaatgccatctttaatccccaagttgtatgtaactccaagtgacaatgcatgaaccataccccttcatatgtgtaaccaaataaacaaattaattacccccaaaatcaatactttagcaagttggaccgaataataaacactaaaaaacaattcgtaaattgaaaaagccaaaaactaaattataacaactttttttatgcattaaagaaaagaagaaaaaattcctaataaaaaaaaatttctaggcattatgttaaattgtatttaattacctggattgtcggcgatgaatcttatggcagtccaaccaccggctggaactccaacggtgtttctctctaccggatccaccaagttaaacgctttcggatctttttccgggttaaaattccccaaacctcnatctacttcgaagaagttaaacccgtgaagatgaaacggatggttatcggacaagatcattgctgtattctgcagaacaatttgcaccgtcgcgttgtatggaagcctgtaaagctttgtccctttcatcgtcgcagcattaacgccgagctttactggtgcggtatagtcatacggattggaaggtttcgccgggaagtcgtcggtaaatacgccggaaatgttaaagaaatgagcctggagtaaagcggttttaggcatggtaaacgttacgttgtttattccggccactaagcgaacaccgttgttgcaactctggcaagggtttgcaccaagacctaccgtgaagaacaaggaatgttccacggttgttggaaccctagctggatactcgagggagtttaagctcctgagtgatctagtgaatttggttgcaacccatgttgcgttttgaggtggaagtgatgcgaaaacgttttttttggaggtggaaacggtggaagtgtgaccgatatagtggaggggtggcaggggctggtgacgttgtcgatggggatgtgaagcgtcccttaaatgttgagggaggccaccctgtttaatttggacccacccgttt

SEQ ID NO: 13004 - DNA, 675 bp, Arabidopsis thaliana landsberg
caccaatctttgctgctcctaaaagtcagaacattttgttatttactttgagcatagtaaaacatatcaaaaaagataaccacaagataaaatttatacaacaaaattatagccgagaaataattaatgaacctcttactatactcagctgaggttgcttctcaatcatacttttaacctggacaaaagtaatgcaaagtaaatgaatttcacatccgttgaaaatcatgaaactaaatataaaaaagaaacaagttaccttaaacatgaaaatgcttggctctcccatattcacaagacttttaatttttcactgacgtctttaagtgttgttagtcctaatataatttagcgaataatgttatacggatattaaacaatagaaaacacagtcgttataatctttggccaacattaaactactttaccaaacaaaagcttaccttcttcaatccaactccttaatagatacatcagcaggctcacactaatttatattcctgcaatacacatgaataatgaacaatgtctacatcaaacggacaaaaccacacaacttaatttgagaaaacaggcaataaaacactaacattctctaatcttgaggcagaatcggtgggagctatcctctgaaaatagaagattataactacacccctgaatacttggtatata

SEQ ID NO: 13005 - DNA, 451 bp, Arabidopsis thaliana landsberg
  unsure (1)..(451): unsure at all n locations
ggaaatgccaaaggagactatcagcaagtctgacgaaggtgggctggttaggttgaaatacaccttcagatatgaaggtaagtatgttgagctaggtgatgaatgactgatatgtagctaagctacaagtgnnnnnnnnnnnnnnnnnnnnnnnnnnnnnnnnnnnnnnnnnnnnnctatggccttcggaggacggaagaagaagaggctgaatagagnnnnnnnnnnnnnnnnnnnnnnnnnnnnnnnnnnnnnnnnnnnnnnnnnnnnnnnnnnnnnnncagagtgcatcttctgggaaggatgctgcatcatctgctcccagcgtgcccgcgctgaactggaatagaggtgaatgtcgtactcaacgaccgcgatatattgaatcgatctgtagtggtctgaatttggcgacgagacctgatgggctattaacgccgtagatcctgcg

SEQ ID NO: 13006 - DNA, 686 bp, Arabidopsis thaliana landsberg
ttctaaagaatattagaaatctccactatttcaactcaaagaatgtcaaactatttactcgtcgatactatatataaatactatgtcatatattattatatatcgaacgtaacagttggtttaattttttaaatatgtataaatgtaacatatgaaaagtatattaaaaagctatgtaccttaatggttggtttgatttcatcagcggtaagcaaaggctggccagcttcgtccttgatagagatgaaaatgtctagaaaatcttcgatctgagttctcttaccttctctccacatcttaatcctctcatcaattataggatcgtgatatttatccataattgcactggattctctcataatcttttcatgtccgtttagatccaatcccgtaagcatcggtagataatccgatatacaaaacgcaaacgtaaaccctaacccctcgaacatagcatccatatgctcgatatcttccaaagtcggtccaccatcggcttcggttttctccgagaacgtcctcgtcccgaacataagcctcttgattgcatttccacaataatgcctcgtaacaaaacggagatcgactggttcagagttcttaaccatgttgtagagccaagcggtcaagtgatcggtttcctcagctctattgtcgtgtagccaacggtgtctcgctggacaaac

SEQ ID NO: 13007 - DNA, 905 bp, Arabidopsis thaliana landsberg
  unsure (1)..(905): unsure at all n locations
aaacatacttgtatatgatgattgatggatatattaaatttgtactaaactctgctttgagtgtgtatatgttcatctttgtctgatgtttcttgatatattttctggttgtgtgttttgcagatcttgatgtacagacaatgttggaggaagcaaaaagcaggtggctacggccaaacgagatccatgcaatcctgtataacccgaaatacttcactannnnnnnnnnnnnnnnnnnnnnnnnnnntagtaatcattatgttctacacctaacaatagccactcggtgttttatgatgtttcttcaagtttccatgtaatcctatgtttccgttattttgaaggtggcagaattatattattcgaccgtaagatgttgaggaacttcagaaaggatggtcataactggaaaaagaaaaaggatggaaggacagtcaaagaggctcatgaacacctgaaagtgagttctttttgtaggttttatctttaaaggttacatcatgagttttgttttttttggtcagctaatttatgtcctctgaatgatgtaaggttggtaacgaggaaaggattcatgtatactatgcgcatggtgaagataacactacctttgttcgaagatgttattggttactggataagtatgtagtaagcaaagatcactgacttgtctactttatgttctttgaaaacttgactagaggcctctttcttctatgtttcttctgagggttatgtaagtaaaccatctcttcttttatgtcagggctcgagagaacatcgtccttgtacattaccgtgatacacaggaggtttgttttcctttctacatgttctcaattcttacttgtgtttctgatgttagaaagttatgaatggatcagggtgattgatttctttgcttt

SEQ ID NO: 13008 - DNA, 451 bp, Arabidopsis thaliana landsberg
  unsure (1)..(451): unsure at all n locations
aattgctcaaagacaagttcttgagagaagtccaagagacagtgcatctgggaatcaaatgaacagatccagagtcgacaaagagttgcttcacagatgaattggtgtagaagaaatcaggaaacttgnnnnnnnnnnnnnnnnnnnnnnnnnnnnnnnnnnnnnnnnnnnnnnnnnnnngtgggagattgcgaattcgatgcagccagtaacagaagcaatcctgttgagtaaggttgtatgaagatgaaagcttgtgattttgggagcggagaagagagatagagttttatcgatcgaattaggatcggctctacggcaatcaattgagagagaaggtgtctcggaccgaacatatctccatccgtttggacaagagagaggttctgatcgcgggtttggtcggagcagaggacaggatatggtggagaactcggcaggtagagagctg

SEQ ID NO: 13009 - DNA, 497 bp, Arabidopsis thaliana landsberg
tgacttggatgaatcttttatccagactcttgttctgtcaaatgttgaatatgtttgtatttggtaggtggtacgattgtgttgtttgatcgtaagatgttgaggaactttagaaaggatggtcataactggaaaaagaaaaaggatggaaagacaattaaggaagctcatgaacatctaaaagtgagttttcttaatgtctctgagttcatatgcgcttttctctcttctcctctgcagctaatatatttgttatttgtgatctctgtgtattgttcttccatcaggttggtaatgaggaaaggattcatgtttattatgcccacggtgaggatacccctacatttgtgcgaaggtgttactggttattggataagtatgtgtcaacaaacgattattggtttatcctttgaggaaatagtttattagatgccttctttcctttgctttgtttctgaaggttatgaaaataaatcacctcttcttataatggcagg

SEQ ID NO: 13010 - DNA, 625 bp, Arabidopsis thaliana landsberg
cgtattgaggatctcctcttttttttctttaataatcagttctcaaagggaaatgtgctatatgtcatttctaactaagttttggtgattactgactaatacaacctcgaaagctaattggttttctaggtgcacacttgcaggttcattcgagccaaattgagattagaaatccaatactcaactcaaacgaggccagaaaagaaaaaacctagaaaaggtgagctatgttcgattcatgagtttgaataagttgtaactacccttagaaacattttcaaggactttagattaggttattgatgtcatatattgcaaaagtgctttttggtgcctattttgagttgaaacaaagaatctgaattggagaagagctaaaggtatgaatctgtgacttagacaagttggacatactctaaatatgtttgtctaagtcaaaggaaagcttccaagcaaagtcaattcgaatgggagaagaattggggaaacttgaaatttttcaacagtatcggtccggtggtgcacagaccgtctgccatagagtcctagaatcttcatcgactggtcattggatctaggccgatgccgagactctactattgcgaagaactgccttagtttttta

SEQ ID NO: 13011 - DNA, 551 bp, Arabidopsis thaliana landsberg
tagtcttattcaagtttttcatataatatactccttatcatgatttcgattaatatacttgagttttctctaggctactatttcgggtgccaaatctatgaaaggaactccctattggatggctccagaagttattcttcaaaccgggcatagcttgtaagcattacttcaaacatgtttgtaattgctaggttacatgctttgtcgccaatctaatattaccttggttattctatgcagttctgctgatatttggagtgtaggatgcacagtgattgaaatggtgactggaaaagctccttggagccagcaatataaagaggtacttaattttgtatgccttgttatctatgaataattctgtttcttgaacttctgtggatatatattcttttcagattgctgctattttccacattggaacgacgaaatcgcatcctccaatccctgacaatatctcctctgacgcaaatgattttttgctcaagtgtctgcagcagtacgttactttaaactcataaattaatattaacttatgtcacttcttttgc

SEQ ID NO: 13012 - DNA, 1052 bp, Arabidopsis thaliana landsberg
cacacatagccatcagtgttatatactgtatataagctgtcgctattaaacatagaaacaggaaccttaaagatacaactatatactatcttgacatcaaatacgtgtactaaaaccttttcataaaagatgcattgacatgacatatcaatgatggtagttcgacgggtagaaatcatcaaggcaaatccgcatttgaattgaatgctcactagattatctacaaggagacaaaccaattagctcactagtttagttcaattcttgtctggctaatcctatctacatatacaagactataatatagcaaaattagaaagaatatagctagaaacgggtaaatatatactacttaccaaaaactaaatgtgcctgaataggtctattatagttaatagttattcagtgtaaattatctatgtacataccccatcgggaattaaatgcaagaaacatagaggagaccgtacttcgaagttgcaaatttaacactaagttgaagaatctagaaatagaaagccaaaatcttcctttacttcaactctacaatttctatcttttctctgtacttagccatccagagtcataaccaccactatattaaaatgaagacttatgatttcatgaacgtcaactctttctctcctaaggaaagacccattcgcctctttggcttcgagtttggagcttctcatgaagaatctgagtccaaagacaattacaacgagaacaatgaaagcatcaaagacgataacaaagaaaaaagattcaagtgccactattgtttccggaacttccctacttcacaagccctaggcggccatcaaaacgctcacaagagagaacgtcaacaaactaaacgcttcaacctccattcaaacgcagccgctttcttccaccgccaacaaaaccacattgctgcttctaggctctacgaggatcgctatagccttgaagctgctcaaatcaacgacgcgagattagggttatgtcgtatgtataactcatctgcgagttttaatcgtgaccgttcatcttattataatagatat

SEQ ID NO: 13013 - DNA, 618 bp, Arabidopsis thaliana landsberg
taatacaaatttgccccattagtttccatattcatgtgactttacccaagactataccttaattcaacatttatgtttcctatcagaagcaatggaaagaagcatggaaacaccttgtgtccaaagatcatattccctttggcttttgcactcgaattcaatcactcttttctccaccgtcttcagcccgaaatacctcaaattctcttccaccctcgagcatttcccggccaggccacgccggtaatcccttgaccaatcccaccaccacatctatagagatcaatacatcaaaaattcagcgacttagtaatagaccaaaaacttaagactaatgtgaacagaaaaggaaaatgtgtaatggaattaccattagacaaatccgttactttattcttttatggtgttttgttgaaagacaagaaaaaaagaaacaaagagactagctagtactattattctaaacagattaattaatcttttcatgaaagtttggatctgtctttactttacgatccaatagtctcttaaacttcaaaaactattcctaagttggtacctttttgaccttttgatctattggattccaattaaaaaccaaagcaagagtaagagaga

SEQ ID NO: 13014 - DNA, 915 bp, Arabidopsis thaliana landsberg
ttttagatagaattgatttgcatttgttgattcttgagattttaatcttagttgatgttgtctcataggttattattagtcttctctatcgttgcggcgttcataagttggagaaagtggtaaagactgcttaagtatgtctgtttctatgagagatttagatccagctttccaaggagctggacagaaagcgtatcctttaactttgattctctcatattgtttaagactcctatagtaaagctgctatgtttgaaatatctacatgatgttctccttgactataagttagtggtattgagatatggcgtatagagaatttcatccctaccccaattccaaaatcttctattgggaagtttttcaccggagattcttacatagtattgaaggtaaataaggcctagtcacaagttcttttttgtttccttattgccattttactcgggctttctgctgatcgatcttttgtgaccagacaacggcgttaaaaactggtgcattgcgccatgatatccattactggcttggtaaagatacctctcaggtaagaccctgttattatttcctttctttttttactttcgtagaatgacggagaagtttgagagaaactgatgatttttctcaaaaacaactaggatgaagccggtactgctgcagttaagacagttgaattagatgctgctctaggaggtcgtgcagtgcagtatcgggaagttcaaggccacgagactgagaaattcttgtcttattttaagccatgtatcattcctcaagaaggtggagtagcatcaggattcaagcatgtcgtagctgaagaacatattacccgcttgttcgtctgcagaggaaaacatgttgtccatgtcaaagaggcaagtcacatttcacttctttggttctttcatctca

SEQ ID NO: 13015 - DNA, 748 bp, Arabidopsis thaliana landsberg
gatttacattatttgtatccataaatctaactaaacctactacttattcctcctctttgattaacatacatgtaatttaaagaaaccagccaaattcgttatatatagttgagctgtaaagggcataaagtaaaatcaaaatcatacatatttaactacacttttaggcaattgataaagcacattattttatatctataataagtttataaccaaaaataatagtaaaactcgatgtcgatagtttaacgacttacgggtgtactaagtaaacatccaaaaaaaaaagtttttatttcatcaaatgatcgattgaaaaaaaaaaaaaaatagattctagattaaaaacttttttgttagaaaaaaaattcctaatgaattaccaattactattgggttatcttcttattggattctctttatttatttttcttgtaccaaaaaagaaatatgtcaaacttgataccaaaaaaggaagaaattcttattaaaatatgtaatgtatgtaatataggaatataagtttaggcataggtatatgcattaatgagagacacctggttagagctatttgacgaacgcggaaagcaagaaacgaagaaagaacagttgaaactttccaaattccaccgtctcttatatattcttaataccaaaaactaaaactcaaaaggaaaaaagaaaaagaagaagaggagctaaaaaaacgacgtcgtagacaggagattcttgccatggccacacatag

SEQ ID NO: 13016 - DNA, 572 bp, Arabidopsis thaliana landsberg
cataaataattaccacactaaatgcatttgtatttaaatactcaagactaaatatttttatacgcaagatactataagtgttatggatattagggcaaaatttcggttatccggataaaattcagatatttaggtaaaatgttcaggtattttggtgaatgtttggctaatcatgtaaaaaattcggtatttgggtataaaatacctgaatccgaaggatacctaatctttttggtatttaacgattctgaaattctatatctgaaccgacccgaacccgattatacccaaactaaaactagaatccgatccgcatacatgaatgcccaaccctactttagatattttaatttaatgaataaccttctgtatcaaaagggaattacatccgatgcacaaaagaactaacaattttgtactatcattaacaccacccatttgcaattgcgaaagacgatcacatattgtagctttaaaatgcaatcttaatcacattttcatgaaaagttttccttaacgtatttgggtgggcatgatttaacagctcaatttggcaggtcaacgaatcaacc

SEQ ID NO: 13017 - DNA, 555 bp, Arabidopsis thaliana landsberg
taatttattatatttatgcattataatttcgtttcattgtaacaaacattaaaaagaccacatggagaaaggaaaaaaaagagagttttgtatataatcttgcaaggtctcctaaagaacacaaaaaaaatgtgttcgaaccaagcagagaaagaaaactcaaatgattatgttagaacgagagcctgaaagattctttccaccgatgtgtgtggctagaccgggttctcaagctcttagtgcaactttatgaaccattgtttctttgtgaatttggtgacaactcttttcaacaagatccaaaagcttctccaagtttgttgcccacgagttgaggatttcgttgctgtctttaacaatctggaagcagattattcctgatggtctgtcgatttttgctatcaaggctttggacacaaccatttcagatagatgcttctctgcttcctgaaatataatgaaacggtaagaagagatttaaacatgtactggtacacttaagagtattttgaaactatatttacctcagtggttaggcataaaagttctgcaagt

SEQ ID NO: 13018 - DNA, 993 bp, Arabidopsis thaliana landsberg
ttaactttaaggatattttcataaggaaaacaacattacatctacacatttctttatttcatatcatcattagataatgtgaaaccatattatagacagtaaaacttttacttgagaaacaatacttgctttttaactaacagaaactattagaaatacaaaattttcgaatgattacaccgcttattatttgatataaatatttcacaaatgtgaatagtgatgtaaatatttcataatattatggttcactttttattttgggttttgtcgtttaggcatagtgaagaataaagaagaaacaaacaagagagaaagctccaaaattctcgggcagacaatatattcttaatatccataatttcatccaatgtgaatagtgatgatgatgatctgtcttttcttttgtacaaaacgcagagaaacacctttacacggtcaatcaaattcagcaactaagcgctttgtatttaaccggaatcggttggtaaaccccggtcgcggcatccaaaatctcccacaccgtcaaatctctacaaaacactcctttcaccacattcgtattgttattactgttcacagcaaccgcgaccgctctaatcggcgtttcgatgatattactccgatgagattcagtcgctactgcggcggcgatggcttttcgttgcttctccacggctgcgatgttactcgtgacgactgagtagcctttctggatcaatctgtatagtaatagagttgacattcttgctcggtccttaaccgagtctaattcttcctcatcatcggttaactcaaaccggtcaataaatgacattgatctctccggtttatgctttaaattgagtaacaagtaagctcgatccagctctgatctcgagcaatcgcgtctgattcccatcagagcatagtaatccacgtttccgatttctccgtttgcgattttctgcttcaattgctggattttcgtagttaagacgcataatttccccg

SEQ ID NO: 13019 - DNA, 934 bp, Arabidopsis thaliana landsberg
aagaaaatatcaaaagagacacaggtgcaacatagatgtgtttatggcatttcaaaaagaaaaaaggcattgaaaagatacaacagacttgagaatcaatcatgtccgtgtgatatttggcacaaaccatcgagcatcacatgattgaatgaacgaactaatatttcgatatggtctttcaaccttttgtgtgttgagattgaagacacaaatatccttttcactgctaacataaccatattgaaattgaacaccactaaaatatattgaatttctattaactccttcaatggcgttggcaagcacggtgatgccttgatccaggagtattgcttcatctcccaaagaagtaagtttctcccacttgttatttgatgaattcatttggtagatgcaaaaggaccaaacatcagaatcacaccttattatgctatcaactctgagggtttctccggtcattgtgactacaagatgtgtattcttgatatgaaacacattaccaagctctggacgaacgcggcgtactccattagccaacacatcatagttaacttgcgtttcaaagatttgtcgcggaatatctccaaaaaattccaacactttgacatcactagttgtactatacaagtaaatcttatgatctttgtataccatgtcaacaatgcctaccatatcaaaactacagtaagtagcatgtttcaaccaattatctcctttcctataataaactagatattggtattggcggtattggattgaccatataaccacgtaatgtttggttttatcgtctatccataataaagggaagtcaatattgatgtgtctttcaggatattcaacatcatattcgtcatcaatttttaaatagaacaaatcatcgacgtttcgttcaatctttatcctaccaaattgtgactccacagatggaagg

SEQ ID NO: 13020 - DNA, 585 bp, Arabidopsis thaliana landsberg
tgaaatacaacagtttagggaaagtgcattcaacaacatcaacgaatgcaaaaataatgtatataccataggggtgtaataacgatccttgaaccttcatagttatatatttgtaaattaagtgaagccttgaactcacgaatttggaatctgcgtattagaaggttcatgatttatgattcgaggaataggagtgcacttaaggggatgagccaaatccaagaaaaatcttaatccggaaccttcttgcatgttgactttatctccttcgatttcccagtcaaagcattgcaccatcactccaattgtggtttctactaaggtataaccaagatataatccaggacatcctctccttccagcgccaaatgggaggaactttagtgttttctcctttttctcctcctcttgccctaatcttgaggcatctagaaacctttccggcttaaactcattaggatctcccaaatatcaggatctctcatcacagcataagcattaacgacaagtgatgtccctcatgtatatagaccctccaatgttcaatcttgcgtaaatctcttggcaagacgctccacggggtgt

SEQ ID NO: 13021 - DNA, 435 bp, Arabidopsis thaliana landsberg
catccccagcctcggcagcacaaggtgggaaaactggcgcacggactcggtgattgccagcgccgaggtcaacgaccgcctcgtcctaccgagcgatgggccggtgctcgatcgcaagctctggaggaccaagccgtccttggcgccagagttcctgtctgtattggacaggatcaagggcttggctacgatcggcatgacgtcgatgcacatggtcggcgacctcctgaagcgctggattgcgccgttgcagatgagaccacgcctgtgctgctggttcacggcccgaacgacatcggcaggatccagcgaggcccgggcgacgacctgtcctgggacgagctggcagtcctggtgagagggatactggggaaactttcgtactgagtcctgattctcgccagaacatcccatgctctgaacgacaatgctgag

SEQ ID NO: 13022 - DNA, 1416 bp, Arabidopsis thaliana landsberg
tgcatatttcaaatatttcttttattggtttattttaaaaatttttacataaaaattggaaagattattttaagagttctacgttttttttacatatgttattctttaaaagttaacatttttttcatatctattgttattttttctttttaaatgtatcttaatacaataatttataaattttaaatgttagttgatgcaatggctactccttactggttgttttaaatctcatgaaaataagcaaatatccatgagtaaaaattaaactaaccttaaataaaagacaaacatacaacaacttattgcaatttgaaggaaaatatataataaatactaactacacaaaatccaaaaataaaaacaaatcaaactggaatattaacgacgtaagagagacaatgagaacgaaaggaaaaacaatttcatttaataaaaataacatgtcatactacaaaatataggagtaacatgtgattgttatgcatgtgacgatggtgcttgttgatggttacggaggtgatgatagaaaaagttattttaagggaaacatatcttattatataattaataggatgtttttcgtttctcaaaattagtaattaatattaacataaatagttatcaatcatagattttatcatgtgtcgtgatttaaaaggatttagtcaactttgatcgatcatctttatatttttaaagaataagagggagtgtgcttccatcctgaccaggatagaattatcagtgttcgtgaatgcgcccgatctcaggtaataaaatctctaatgttccttccttgttactcatctagcatcaatataagtgtaaagagtttttgttttggaaattgaagtaatgttagcttatgaatatagctcttttaagtgaaatggtggttttataaaaaaaattgcaggggtttccggatagctataagtttccagaaaatataaaagacaaacataggcaggttgggaatgcaggccctccaccattagcgtttgctcttggtcggatgcttaaagaagccctacaccttaggaacatggaaatggatatttaatccaaatgaatgatagattatatattgtcacttcatttgattttagaagtaaaaccctcttcttgaaactcaaagtcgttggtttaggatgatactatagaaggatctagaatattctctagtatatttgttaataattactatagtttgtacgtacttaaggaaactagattaattaggttaccattctattctctatataaacatatgtaattgtatctcttatgagagtaaatataacttcttctaattcctaaactctcatcacattatcattgtatcagagctataatgatctaacgatcgactttgttcctgaatctaaggcaagaacttcttttttttttttt

SEQ ID NO: 13023 - DNA, 900 bp, Arabidopsis thaliana landsberg
ggattgttagatttaacgacacgataatgaattatagatatctttctaaaaaagcccagttttggctagttctccaagttagaaaagagataattaaactttaaggaaaacaaaacatgttttttttttgttaatcagcaacatttattaattattaataacaacatgtttctcagttaatttatttggttttttatggcaaaaaaaaaacatagtaaatcagcagaattaatacaaatacaatctaacaatattgtaaatgtaataaaagaaacctcaagattcactaccgtcatttaaaaaaaaaaatctaaaaccaacgaaaaaaaaacaaagagctagcaaagaagacccacgacgtcaggtgatatctaatcttccaagcagccacgtctagtagtttttgtatgacagtagcatcgtaagtcttatacgtgccgctttctcattggtctgtctcgcttgatagacccaacctcggagaaattataaatctgagcccgtatactgtgaaattacattaatgaccctttaaattctcgaaaatatcagaataatcaatatatcgaagccgagaaagagtaagaatgagcgattgtatttctccctaagagtcactttgcctttgtctttgatttttctctgtatcgtcggtctctcttttgcgtttctcgatcccaccgtctaatccttctccggccaatgactatgatgactccgcctcccgttgatgtaatctccgattcttcatcctctctgccttttgtcaattccatgtgtatccattcgtgtattggcgcttgaatctgcttctgattgttagattagttgatcgtttcgggttttttttcttttggatttgatttgaattttaagcggttgaatcatcttgcagatgca

SEQ ID NO: 13024 - DNA, 1177 bp, Arabidopsis thaliana landsberg
  unsure (1)..(1177): unsure at all n locations
aaactggacaggcttttcttgttccaaaaattgtcaccgtatggcctgagattgagaatgatgcatataagaaaatgaacagaaaaagggtttctgcgaatgtagccttttttaccttggatttttcaaatggagcaacatgaagatgatggatatgactatggaagaggaaccaacgacaagataggtgatacccaggaaatcatttcttcctcctaaccaatttgatgtggagagaataagcttcttctgcccactaaagctataagtgttgtaattgttcatcaaatttacttcaacaacttttcctggttccaagtcctcttcgattcttccatataatttccggaagcttagtaaagcagctgctcgcatccacactataaagtcctcttggtcacttagctacaaagtaaacagcattgcctaagctaaaatatatgattaaattttttttattgtaaagtggttgagaatgcatactggaatttttggatccaactttgctccaccaatcaaagttccgttctggaaattgataggatacacattctttccaaacttgtgctcgcggtcactcttccacgcaatgttattccggctcacattcagttttgttctttcacgagaaaacgtaaatgtatcattgaacatactccaagcaattaacccacaaggaacaattgggagaccattagatgactcctcgggttcacaagaacttgtgtggctatactccagtccatgtaatagttgctgatcacttctactctttacatacctgcaaaagaatcatcagctaccaaatggctgactttctcatcactagatttgaaaagtaaatcaataaggcatctagctattttaccggcgatggttttgatagtagttatcaagctggtagtagataaaaatgggagctttcatatacttttgtacctgatattgaaaagtataaaacctcaccaataggtaacaatgaagagaatcttaattcactgattgagaatcaatggagcagaaaggaattaccttcaagtagcgcgtacaattctttgggatagatgaatcagttatatacaacagtttgttggttctatattcttcangaatgcactcaacatcataccggtctataatttcaatagcctgccattaaaggatttaagagtttgct

SEQ ID NO: 13025 - DNA, 1022 bp, Arabidopsis thaliana landsberg
aagattctttttactttaattgtgagagttgaaaaagaaaatgtacctgcatgtgtagctaactaagctttcaccgctatccattcaattactttgtcacatattaaagtcaaagactcagagtgcttgttatatatattgggatacgaagaacactgaaggtcgagatgacaaaatcagtatatagcaagattctagaagaatattgataaatattaatattagagtttaggaataattataataaaactctcataaaaataatgtcacaatttacattctcttataataacacctttatattttctattatcatcaaatttattatcatatcagagtcttgatccaaatttttatggattaagggttttgttatctttttccgtaaagaaaaaaaaaaaagagacgtgttctgtcttggtcacgtttgtttatgactagtaaattactcatttcgtggagaagaataaataaacttaactacatgaggatttctggattcacaaaaaaaaaaaaggaagaaaaagaaaaagaaaaagaagacgttcatgttatcaaatacaaacaatgatatgagcaagagatacttcgggcaaggaagctaattacgatgcacatgataatgttatttgtgaaaagggctttatgccatgaagttgaggcttaggttcttctatcactcactacaaggaagataaagccgcgaagatgactactaaagtgatgagtccgatgggtacgatgttgatcccaggatgacgaactttttaccatgactattacataagttttttcataaacaagaagtttgaagaacaaccaatacttgtgatttgaaaccagtggagatacataactacaaaagatatattttatgtggttttttattaactacggatatggtggtgaccattttgaccccaccaccggatataaacgtcgattgaaattttacgatcggatataaatatcgttggcttaacgactgcgtcgaatgagattggccagggatattgggatat

SEQ ID NO: 13026 - DNA, 777 bp, Arabidopsis thaliana landsberg
tttgaaaataggatccagctgaatggtcgagtccaacaactgaaatttcaatctgagtagaagcctccccgtcatgaacatcattgtcctcagtgattgagttggagacatgtcaagtaggcagctctcgatcatgacaaatagtgatagcgtgagcggtgttgtattctttcggttttggtatggacttccctggaagtcctattactttgggagcagaggtcgacgcagtttgtccttccatgtatctgaccttagaggtaagtgcctcaagttttatgttcagatcgttgaaagtgcaataaaccttgttgtggatttctgccatctttttggcgagatccattgctcctactacttgtcccttgagaatctgttgtaacatgttcttcaagtctgtatctggaattggtgaaggttgttggttttgctgctgtgtgaacccaggtggtggaagttgctgctgataggtgccctgatactgctgcttaggaacataccgctgaccttggttgtatggaacaaaaggcttgggttgattctgctgctgtgaagggtagacttggtcttgtgggtttgcaacattagtacttctgtaagacagattgggatggttctgcttgaagttgttgaaacctttgttgtaacctccttggttttgcacatagctgacttcttctgactacagagtctccccatcctgaacttggaacgtctcatcatcacccagaaaatgaacgtgcttctgttgcacaaggagtagcttgtccagtttgt

SEQ ID NO: 13027 - DNA, 906 bp, Arabidopsis thaliana landsberg
tgaaaaagttcaagccttataatatgttttgtatgcagagatacataccattagatgtgaatagatcaaacgtagtgcaaaccgcgtgggctatgatggctctgattcacgctggacaggttcaaacattttcaatcttacatttgcatttttgtcaagtacaacgtaacaaagtgtcttgaaacctatcatttaatttcttctggttcatatataaaaatatatatgtatgcaatgtatacaacaggctaagagagatcttatacctctacatagtgctgcaaaatttattatcacgtcgcaactggaaaacggagattttcctcaacaggtaattttaaattcagacatgcatcttctttgataaaaacattgatcaatatgttaatgttagaacctttggtgattgcaaaagagcaattaatttgctcttgctttagcaaaagatgtgtttatatattatgagcttattctccgtttatttttgtgtgtaggaactattaggagcgtctatgagtacatgcatgctacactattctacatacaaagacatcttcccaccatgggcacttgcagagtaccggaaagctgcgttcatacatcacgcagatctatagctcttgctttataaattgagtttaaatacacacaaatgtattgccttgtaggctggtggtctaccatcttgccaggctctcaattcgatccctatctttctcaatagactattccaaaatgaaaacaaaatgttgtaatattgtattagatatttgaatggcgttttagataatattggttcaacggtggaccgaacatgtactatctcccaatatttatctagtctttatattccaccatctttctttgtgattcaaggtaaaaaaaaagaaacattgagtgtttgta

SEQ ID NO: 13028 - DNA, 887 bp, Arabidopsis thaliana landsberg
atcgctatatacgcaaagtcaccccaaagtactgaacttgggatcattttaatgtctgtcactgcaagaagtgttaaaccaacaagaactgattgcaaaagattgctcactctttgctcgtttactctaaccggtaaattagcctctatatgaacatcgggatcgaattttccttttgtatcgcctccttcgtctggtctcatcacaacttctttcaactcttttaaatctgttgctacagaattatcctgcaaaaaatttaaggttcttttttttctttaatttcaaacaatttctttctataaatataggagaaggcattattactaacctgaggtggggatgtctccatctctataaacactgattgcattctcccatatatttctgatttgcttgctttcattttcatacactcctttgctttcttcaccattttcttgcgtataagctgcaaaaaatatatcatcatctctgtttcaactctccttcttcttctcatatatatatatgtatttgttcttacttgacgattgagaaccgcaagactctttgtgtgcattggagcctgaggaagaacaccatttgaaggtggaagtccaagtagtccacatatcaaagtctatagatcaccaccataacaacaagatttaattggtatttatgccatgaaataagtatctttgaaataagttttaagaacatttaagaactaacaataattccaagcaagaagatgtcatagtgataagcagaaggattctttagattaaactctttctgttgtgccatttgtgaagctacactatggtcccagaagtaaacgtcctgctatcatcacaccaaatataaacgaagctaagatatacattatcggtaccttcccc

SEQ ID NO: 13029 - DNA, 820 bp, Arabidopsis thaliana landsberg
gtttgattatactttatgcatatttgcctattaatcacttaataatgtgggttatggtttatatgctttagtgctttaccaataaaaatttatgggaaatttcttacctaaaggcatactcacttccatttttagtcggtaatttcaaccaaatttcgatacttgatactaaatttatgaaaagaaaagcaattttctattcgttgtaacttggaagtcatttctttttcttttttttgttcatactcaacttttgatttgtttttttcttttgaggagacttcttctccgtcctttttcctcggccactatttgaatttgaacccatttagcatgttattgaatattgtagagcgcgttatacagtatattatagtagttcgaaaacaaattatctaattgagttaagttgcctaccaacaacgtggcaggatgtaattggcagagttcttttatttgttgactattttatttgatgatacttccaagttccaagtcttattttgtctgatgggcttaatatagttgtatctcacaatcacctacgttacatatacatatgctcgttaaaaaggaaaacaatgggccgatgatgttcatttaaggccattaagatatttttaaaaggaattgcctctttcaatactcgcttggccattagattaagaccaaacggtagtgtgagatgtagcaaatacaaaaacaaaaatcacgtcaaaaaaaaaagaagtatcaaaatctattaaaagacatagtcccccaaaaatcatccatcactttaagcagacaaaatccaacaaaaagtattttatcaaacatt

SEQ ID NO: 13030 - DNA, 581 bp, Arabidopsis thaliana landsberg
tcaaattttcaaaacccaaaacttttacctctagttgattcaacaacacattccttcgagacaaggcatcagcgaccacattgtccttacctttcttatatttcacaatgtatggaaatgtttcgataaactcaacccatttggcatggtgacggttcagtttggcttgccatttcaaatacttcaaagcttcatgatcgggatgaataacaaactcttttggccataagtagtgctgccatgtttcaagcgctcggaccaaagcatacaattctttgtcatacacagaataatttaattgagcacctcccaatttttcactaaaatatgctataggttttccttgttgcattaaaactcctcctatcccaatcccactagcatcacattctacttcaaaagttttagtgaaatcaggaagaataagtacaggtgcttcagtcaaacgtttcttcaattcttgaaaagcatcttcttgtgagttccccatttaaatcaacacctttctttgcaattcatttaaagaagaacgacggtactgaaactcgcacaaatcttctataaaaccagcaagccatgaa

SEQ ID NO: 13031 - DNA, 594 bp, Arabidopsis thaliana landsberg
gactcagttcttgttagacctcggatacaaagaaaactctgaggaaatggagagagttctcaagaatttccgtggcaaaggatctgaactccgagagagatttaatgtcctcgtgagtttgggtcttactgagaaagatgtcaaagatatggtgaaagcatgtcctagtatcctcacccaggcatgtgatatcttagaatcaaaggtgaactaccttgtaaaggaattaggttatccgctttcgacattggtgactttcccaacatgtcttaagtacactcttcagcggatgaagcttcgattttcaatgttctcttggcttcaagatcgaggaaaagcagacccaaagcttcaagttagtactatacttgtgtgctcggacaagttctttgccactagatttgtaaaccgtcaccccgatgggcctaagcatttggaagacctgaagaaactacttgtgtgttagtagagatcaagaatgcatcaggatatatatagtattgaccacaacaatgcaaatgagcctcaaacacaaaggaaagattcgattttgtatctgatgaagactttttttgaagcagtagctgcagtttt

SEQ ID NO: 13032 - DNA, 621 bp, Arabidopsis thaliana landsberg
agcctcgtaagttagggttttaccaagaaagatgtcaaagatatggtgaaagcatgtcctactatgctctcccagacctgtgatatcctagaatcaaaggtgaactaccttataaaggaattagggtatccgctttcgactttggtggatttcccttcatgtttaaagttcactcttcagcggatgaagctcagatttgcaatgttctcttggcttcaagccagaggaaaagtagacagcaagatcaaagttagcacaatgctcgcttgctcggacaaaatattcgtgagtttttttgtaaaccgtcatcctgatgggtctaagcatttagaggatctgaagaagctgcatctttcagttgaaacaaactaattcctaactctgttttgtagcactagaccttaatcatcttgtatcgaaacctttgtaggtgtagtactattctcttctaatgatattcatctttatatgaacaaatgaatatttatgtatttttttactttaaaattattttattcacttttttttttttagtcaactagtttcgtcttcttcacattgaaacatacttcttgctttgtctagacaaatcttctgcatatctttcatatgtctgcgtaa

SEQ ID NO: 13033 - DNA, 606 bp, Arabidopsis thaliana landsberg
agtgcagcatacctgaaacaacgacagtatctgagattgtgtggtcgaataaatcttcaggtaaaatcaatgcacagttccaatagaaagttgtattcttgcaaaactttcatggaagagagtagaatttttcatgttgtgtgacaacagtctcttaccattgagggacaaaaggagccatccatatgacatcaccagcctgaactggatacctaatttaaagacaagaagatcacataaaagttataatcatttcttctattctgtggaatatagctgtgtttgcagttttcttttggaacatgcttctgttcactttacatgaccgatgtagaaaactattgttcttggttgtgcatgtggtgtgttgctggaaagttatcaattatattcacaatttcgtttattaaatacagtgttgcgtaccagttatcacccaagcgataaatgccttgcccctccagaagcaacaaaccatgctggttataatgaacttcctgctcacattgcaaaatcattgagaagacgaaatggaaaaggaacagttaaaaaatctgcttatggtgtcaagtcaaactgttatgtaccttaacattcagaaaactc

SEQ ID NO: 13034 - DNA, 562 bp, Arabidopsis thaliana landsberg
atgatttttcttccaacagaatcagttctagtttttcagatttagatatttaaagcttaaatcttatcaactttgggtttttgctgcttggcttttgtatcttgatcaaacttagcttcagatcagtagtttttttccatggtagcggcagtcttcaaccagtctcttggataatcttcttcctttatccaagagattatcaatgtgaaaagtcgtctttaggttttggatgtgtctcaccaccttagtagttcctcacatgagcaatataaagaggatcgcatgacactttcatctgattctaatttgtggtaaaagagattcttgtattacaactctgttgtgtgtttttttagtctcaaattcgttttaattgggttgtgggattcttgcacttcacctctttatgttttgggaaggattgatgagggctggcccaacactatgactatctaaagcatttttttttttgccatcgagtagtaaataatggctaaatgttactaccacgacttgaagttgtgacatgacgaattataaaattgagagcaaccgttgcacg

SEQ ID NO: 13035 - DNA, 550 bp, Arabidopsis thaliana landsberg
  unsure (1)..(550): unsure at all n locations
cacatatttaaacaataaataagcaaaggttgggtcagatttaaccagctgacagctaccttgaacatgttagttttccacgtatctatttctagtcgtcgtggtttgaaggtacgtggtcgtcttggctcttgggcattgcaggaatgtctgctggaatgatccagactgttcggtgatgtctcgaactatnnnnnnnnnnnnnnnnnnnnnnnnnnnnnnnnnnnnnnnnnnnnnnnnnnnnnnncacctgcctgcgcctgtgccccagcgttggaggtagtgatggtgaccttcaaagtctcacctccatcgggagtcctttccgcaaccactttcctgcaagagtttttattatttgcatcggcctctcatgcatcaccgatgaggacctccttgccttttcccttatcggccgcgctaggcgaatgtgggacttttttgccattgaagttgatcatatttattgggaagggctccgtgtccacctgcatttcctgaaatttcaacggccctcgttaatggctgattggatttgcggttgaataca

SEQ ID NO: 13036 - DNA, 841 bp, Arabidopsis thaliana landsberg
ataagacacgtcgttagtcaactgtcagaccaattttacagttttagtcaacgtttacatttttattaagtgctaaggacgacgtcgttttgtctttaaaaaaaagacaaaaatcaattcaagaaaagacaccattaggattcaaacccgagatctcgtaaacattacatcaattacttaaccaccatgctgaagtacaattacataatttaatacacagaaaaatatataacatacaccaatagttaaagatttgaccattgaatagaacggagcccgtcagattgttacgtactgggaattggaattggaattggaattgttgcgttggcttgggatcgagatttacgcttctcaagcttgaagatcgagacgtatttaccatcactatcgattctcaagttctagatctacggtttctctgccaaaatggaaaaattgtttgtgtttttcatgttaaattctttagtttagttggttaaatagcatgtttttctttgagagtttagtatagttcgaatccaagctttgtagttcggatatgagtaaattttattttatttcgtctgtctgtagaggatatatatatctctctgtgttgattaagcaataaaaacttcagcttgatggttgagtacagcgttaaatgtttgcgagttcactggttcgattctttccattgttgcacttggagttatttttttatagaaaacagaaaacgacgtcgtttttagaattaaataaaaaatgtacccgttgacttagttctattaaattggtccgccaaacaaaaacaataaaagttaacgatttaataggaaagtcaactagggtttagcct

SEQ ID NO: 13037 - DNA, 590 bp, Arabidopsis thaliana landsberg
cagctaaaaatcatcggacagtctggtgtgtctgacagccaacggtacgtggtgccacgtcgatggagtcaatggtcagatgggtcaccggaaagtccggtccccccacgaacaatctggtacccaccagagaaggaaagcagccaatcagcgattttgtggtcattacacaggagctgtctggtgtgcaccggacagttcggtgcacctatggacaaaggaaggctaggagcttccaaatgaagctccaatgactcctaggccccttggcgtataaaaggagcccccaggtaccatggagctatacaccaagcattctaagagcactctacaattccaaaactccacgatcacgccttctagtgtttgaaagagatttgagcgcgtttctgagctgtcactctgtctttgtgttcttgcacgctcttctttgcttttgtgcgtgttgttgctgcgttgtgctcttgtgtgcgtgttcttactcccccttactccaattttgattgtgataatcttgtgtaaggcatgagagactccaacttgtggagattcgcacaaatgggattcgagatataggaagaccgtggtct

SEQ ID NO: 13038 - DNA, 621 bp, Arabidopsis thaliana landsberg
tttgtttttcagctattgatgatgctgattgaatgcctgtgtcttcatttcttaaattgattttctgttttttttttgcttgttaattttgtagctagaaagggattgttgtgcctgtgttctactgaagtgtctctcgtcaaataatttataagcactgtctttgcatagtgcttagtaggtgctagttatggggaatgcgtgttgtgttgctgctcgagacaaaatggtggtgcctaattcatcagctggtgagaatttgcagaggagcaatatcaggcattctccgtcttggagtttccggtgggataatagagggcgtgtagctggtgaagaaacttctctcagttggttatctgatggtattagtcggaacgatggctctgagatcaaatttgaatctgctttcgtatcatctgaagggtcccctttggacagttttcggacacagacattgcaaaaatctcctgcctcaggtatattatttcagcttgttaggaaatagttaacattaaaaatcgttttcttcactggctcagcttttttagtggaacttgtaaacttgagggaagcacatgttacttggtgttactcacttgggactttagattttttttttac

SEQ ID NO: 13039 - DNA, 407 bp, Arabidopsis thaliana landsberg
cataaaaactcaatgatctgcttcttattgatggggataaattgccttttgtaagacttgtctatgatgtccgattgggcaagctgtgtgattaacactgtaagacttgtttaacagtaagagatctatatattgctggctgggcagcgtgatagaaattcaattatctgcttaataactcaatggtctgcatattgatggggataaattcaatgatctgctcatatggagacatcatgaaaactgcaaattgatggagaattatatatattttgctggagctgggcagcatgttaacattcaatattctgctttagagatatgatctcaatatttctgcaaattgatggagaataaatgttccttaacagagcttgtgtttaatggaattctgagttttgaaatcc

SEQ ID NO: 13040 - DNA, 902 bp, Arabidopsis thaliana landsberg
gaaactctcttaagtagtaaaaattcttaagtttgcttaaataaaatccagaagctaagtacttacaaaacttcaattctaaaattagaatgtgacaaggcattgttgggcaaagtcaggaactagctagcaccaaaagaaagggggccaaatctttagcgcctatattattgcaaaatctctagtacgatttaaccagagatatattatactattcactacagaagttctagatactcaacaaatctatgtgtagctagagaaagattttggaaatagacatgtgtaaatattttgaaataatttgatgaaagaatatcttactgggagctagagtattcgtgtaatcttccgctctgagaaaagacaatggcggctacttgagcatcgcatagaaccgaaagctcatgagccttcttaaatagaccgcttcttcgcttcgagaacgtgacttgtctgctcgtcacgttctcaatcttcttgatctcgatcttccctctcaccattgttcctgcgatattcattccaagattcatcagattgaaaccctaactaaatccggaaggaaattttcactcagacaaaatcaagaaatgatttcttgaaaatcgagaaggagatttcaaagccagaagtcaaagatgataacttgaataatgtaagaaactcagaagatccaaaaccagatttgtctagattcacttcaaaagctacatagaacatacttttttccagacgacaatcaaccgacaaagttaatagttttagagaggggtataatttgcacatcttaactatcaagaaaaaatatatttgcacaaagaaagaaaaggaacaaaaacttaataatggtggaaaaagaaaccctagaactaaaattccggaaagaggcatgagctaga

SEQ ID NO: 13041 - DNA, 736 bp, Arabidopsis thaliana landsberg
ctctccgttaaaacaaccttgaatacgtagtcaacttcttcttcagccttcttcttcttcgctcgcagtcggcgatcgaacgacgtcgattttctcgctgtttttacactctccggtggactgagagattaaactaatcgtagggttaaaatgtaatcctctacggtagagagtactagagtgtatggtagtcaaagtcgtcatacgtggatttgattaatgattgctacacgtgtatcgcattgataggttctcttgctcggatcactaatacataaacttggatacaacccaaagcttgacctatttttgttgaacacctttttgtttttatatttttcatcctctgaaacaagtccatagactcttgtattaatatatcctgatgatatttggttttacatttgcatcttgtatcattgtaaacaattcataagccttcccacaaaagcatgcttggcatttgacaattggcaattcataaatgatgcattataagcataaatatcaacttggatattcaacttggcccgtgtattatgctacctctacaaatttggtgaggtaggttaaaatgaggccggtttgagttaccggtatattagacgagcattaacatgattacacacttgaggatattattgacgaatgaagaaactacaatggtttagttaatgcaaaattgaggatataaatcgtctattgaaatagagaagaattgtttaggctaaataat

SEQ ID NO: 13042 - DNA, 746 bp, Arabidopsis thaliana landsberg
tctatttaatgataataatccaaagctaacaatatttaatttttcgttttaacttattctcatgtctatagggtactcaatccacatatatagaaaccacaatatcccatctttcatcttacacaaatccctcaaaaccaaaacacattacaaacaaaaaaaacaagttagatattatatcatcatggatgtcgtttgtacggaacatcaaatgaggaagccaacggtggagattcctccgagaaagcttcttttatcttccaagagttttccttctgattcttcttcccctcgctcgccgcgtaaacataactggaacaaaagcaacaagattacatctgaacatgaagaagacaacgaagacaacaacagagagaataaagagtactgttatgattctgactctgatgatccttacgcaagtgatcatttccggatgttcgaattcaagatccgtcgttgcactcgtagccgaagccacgattggactgattgtccttttgctcatcccggtgagaaagctcgccgtcgtgacccctcgtcgctttcaatactccggtgaggtttgtcccgagtttcgtcgtggtggtgattgtagccgtggagatgattgtgagtttgctcatggagtcttcgagtgttggctccatcctattcgttaccgtactgaagcttgtaaagacggtaaacactgtaaaaggaaagtctgtttctctgctcattcgccacgtcagcttagggttctt

SEQ ID NO: 13043 - DNA, 1011 bp, Arabidopsis thaliana landsberg
  unsure (1)..(1011): unsure at all n locations
tctttacgttcttactccaccggttagtgaggatgctttagatttgttgtcaaagatgttcacttttgaccccaagtctagaatatcgattcagcaggctctaaaacacaggtacctaaaaatctcccctatggataatgcataagaacaggttatttagttttgttctcaaaccttgatttctttttaaaggtacttcacatctgcaccttcacctactgaccctttaaagctcccaagaccagtttccaagcaagatgctaagtcatctgatagtaaacttgaagccattaaagtgctgtcaccagcacataagtttagaagagtgatgcctgaccgaggaaagtctggtaatggtttcaaggaccagagtgttgatgtcatgagacaagctagccatgatggacaagcaccaatgtctttagatttcaccatcttagctgagcggccaccaaaccgaccaaccatcaccaggtaaaaacaattggttttattacagtcagttcttggtcagcttaaaaaatgaaaacttttgatgaattcttgatttttggatttgcagtgcagatagatctcatctgaagaggaaacttgatctcgagttcctataggatatcgcgtaacaggcttctttttgacgtcgttcttcaggttcctatagcctataggatctctcttactggttggttccgttcagtaattcctgaaatttttcatttcacaactagtaatgacgaaaagtttgaatcattctttctgtctaaaataaagaatataaagcacaaatgatttatctaatcatcatgtacacccttcatagaaaaatctctgtttttggcctatgtttagaagagagctctgatcccaaactcattcttcgttcatttccaatttaaagtccagaatttttagtatcgaacacgttggtgtattacatatatgaatttttgatctcattacactaatgctcgatgagaatgnaaacacatccaaggaatatcggatagctat

SEQ ID NO: 13044 - DNA, 764 bp, Arabidopsis thaliana landsberg
aagagaataaagaaagatcattgggatggagttatatcgaattggacggtcaactgaacaaattttcagctggtgattattctcataagctaacacaggagattggtttgaagcttgatgagatcatatcgcttgccattcagaaaggatacaatccaggagctgattggtcaattcatgacattgaagaagaagagaaggaaaatgttacgggaatccatagtgagaaactggctcttacacttgggtttctaagaactgctcctgggaccacgataaggatcattaagaaccttagaatctgcggagattgtcattctttaatgaaatatgttagtaagatcagccaaagagatattctactgagagatgcaagacagtttcatcatttcaaagatggaagatgttcatgtggtgattattggtgatatagttgatcccttcaggttagtcaacaacaatgactcaaaccaaaaaggaaaaatgcgatgttctgtaacatcccagcctgagctgcttgaagtttttgtttattcatggcgctttccggtacaaatcttgtcatgttcttgtacacaagagtagggattaggacaagctcatgatttttgagaccaggccacacaccacagctattatcaggccgaagtgattcgggttaccccacaagcctagaagtgaaagagaaagggcctcaagggggttacttgggtttttgagatggaaaattccaatttttttttaaagaaaaattgagaagtttc

SEQ ID NO: 13045 - DNA, 2903 bp, Arabidopsis thaliana landsberg
  unsure (1)..(2903): unsure at all n locations
cataacacaagcattccttgctcaacctctttctgcttcgttatgtcttccaaactattctctaccatatctggtgtgagaggaatgcaagaagacacggtgagtaccctctcaattagctcaataaatcaaactaatcgacaaaactgtctagaaccgatcgacaaaacttttctctcatcttcttcgccgaacatcttctttcactgtcaattttgcttgcctctccggtgtccggttgtgaccggtgccgtgagagggctctagatctctttgtctgttcccgtacgtgcacttgaagagatcgaaggatttgattcagctctgcggctcgcggcgagtgttgaaggtttgttgtgcgtgtcggccggttttcggtggtcggaatcttctggtctctgcctctattgcttgtagacggtgatggatctaggcagtagctagtttccttccctagcgatgtgcttaagcggcggagcaaatctcggtttgtagatcattttcagatctccttctccccggtgtctccggcggtggttttcggtgatgctttgttgtcacctatctagagctgtcaaatggtccgtccagggaccattaggcgtgtccgtacggacagttttttttatgggccaagttggacggtctataatggacaatggtctgaaaaatgtccatgcccaataaagaccatgtccatatggcaagcccatggtcagcccattttattattgttagtattgataaatcaaaaatcataattttaaagaaaaattgagaaattgcatttttccgcaaaaattgtaaaaatcggagacttgcctttctccgacaaaacggtaaaattgtgtttttcttacccaatacaataaaatcacgattttggcggaaaatttatggaattgctttttcccgccaaaacggtaaaatcgtaaaactatttttttcaccgatacaaaaaaataacgatttaaagggaaaattacgtttttccgcccaaatcgtaaaatctgaaagttgtgtttccgccaaaactgtaaaattgtgttctcgccaatattataaaatcacaattttggctggaaaattgcgttttcccgccaaaaccgtaaaatcggagaattgtgttttccgtcaaaaccgtaaaattgtgttcacgttaatataataaaatcaagattttggtggaaaatttgcggaattacgtttttctgtcaaaatcgtaaaatcggagaattgtatttttcccgtcaaaaccgtaaaatctaaaaattgcgtattcaaaaaaatagtggaatactatctttccttcaaaaccgtaaataatttaataaaaataatttattaaaatttaaaattttcatagaagtagaaacttataaatgtaaaatatgtaattttataattatttagttgtaattgtaattaaaattataaaaaatataaataaatgaagacatgtttattgactcaattcatgctcatgggcagcccattgtccatatggtcaagcccttattattcgcggacaaaactggtcatatgcctaattaaaacatttgttttttggtccagaatatagcccgtccatatgcatttggactgggcaagcccatgggccgcctgtccaattgacagttctaaccccaaagatgagagattcatgaatttttcacatctcttggaaattagggtagcttcggtacgggatatcttgattatccaaaacaaatagaaaactatttctctcatcaaattgagtttttttctctataattgagtttgtcatcaaattgagttttgcaaggctagctccgttttaacatatatatatatatatataatattacatcaatctaatagccaatctttaaacctcgagttggtacctcagtaacacatcccaaaaactgactcagcaaccgaacataacatacactgctcctcagtttttgccccgagatgaggaatcccacaattcccatgcatctgtctgttcattgtcttcatccatctttttcatttctttaatccaaaatagacacccaatgcctttaagtgtctcctacttcaaaccactctcatgaatcatttcataacacaacccataaaactcaacctccccccatgtgccttcacatgcattccaatgaaacaccactcaactaaactaatttcctaagcctattaatttccatttataagcattgttgttaacttaaaaaatttaaacaaccacttttgacttcacattcacaaagctatggatctttgcaaaagtagagcaacaaccaccattactctctcatgtctcatcttctttgtttcttcattctacacaatctccaccgctaaatctgtcacgaatccgctctatcaactccttctgttcatcggcttcttcctcgctgcagccttgtcgcttgttttactggtggcagcagcacgagccaccatggttgcgtggataacggtcctcgtcttactggccttttcgggtacacgtcgccgtgttttagcgcggagggggaagacgatcacggcggacgtggcgatgagcttgttcagggttctgattagagaagcaaatcctcgtggttagtctcatgaagattgtttgttgttagagagtatttacatatcacttgtgtatataacaaaaatatatgtatttttgtgaatgatttttccccttttgtgtatttatttattcgaattttaattttaatatatacataatgtatgtgcgctttaaatgtttattcaatacttctatagttacaattttctatagaattaatctttagatgttaaaaaaatgttgtaatctttctaatacgaaaaatatttattgagttatctcatatcataatcggngattctgatcgcaatttgatataaaa

SEQ ID NO: 13046 - DNA, 717 bp, Arabidopsis thaliana landsberg
aagctccctgagacgtctacaaacaaaatttgcccaaaaagaaacacaattcatcacaaatacgtccacaatcttatcaactaagcccaaatttgggtatagccacatcatcaaacttaaaacgcattcagcaatttgctaaattgaaacacttttcataaaaataaaaaagctaaaaagttacctgaacactaaagggcaataatccttccacctgaaatccactgactgatgcggcggtgttgtcttagtcccttctggtggaaaccttgtccaaaatttctcctttggatcgaaatcagtctgtttaagatcacgaacaatcgaagcatgtttgccaacagaatacctaattcaatcacacacaaccttcattagaaacaacagagaaagccatcacacaccaaacaaaaacaccaatccaccaaatttgagatatttacctgattcctaattgcaaattcagcatcaaatcatatttcttatgccctttagaaatagtctgtccaggtttcttagcctcaccattaaaccaacaaggattcttcttaaactgcctaaacccatcacgatcaacagagatcctatctctataaatcatggaagcttcaacattatcaataatatcacaagtgatatctccagcttcaccatcagattcccaaatacagattcttggaaaaactttcttaccttccaaacttccagcttcactat

SEQ ID NO: 13047 - DNA, 605 bp, Arabidopsis thaliana landsberg
tccgcccagcaggacggtctatcgatggagtagtacattatctagcctgggttgatttgtacaagtgtgcggttgtgagtttcaacattaggtctgaagaggttactaccttcctattacctcggaaaatctgggatgtgcctgtgcctgcactgatgatgaaggcggatcttatagagtatgatggaaaattagcaattttcagtcatagctaccttaaagacgagggtttggtagaattatgggtattgaaagacgctgctgggaagaagaaatggtccaatatgatcctggttttgcagccttgccaaaggcatttagtccatggcattgatttgatcgtaaaaggtacaactcaagacggcaaggttatactgtcacccttggagatgcgttctcagttctacattctgtgttatgatgtgcaaaacaatgatttgagaaaggttgaaatcacaggagtaccacgcctttggttgcataaagaatgcaattttgacttgaagtttatggatgagagtgagagcttcatctacttggaaatctgacccatacttttgacttttgtttgtgtaccaaataagaaatcagttaaattttttttt

SEQ ID NO: 13048 - DNA, 1223 bp, Arabidopsis thaliana landsberg
gaaacatattgattatgacatcattgggaaaaagattaccaagaaagaaatgcgagataaactaatgatgactccaagaattggtcagtttgaagacttttctgtttatttttacatatagtttgttatttagttgcattatggtgatgcaatttatggggcttaggggcaagattcatgatgaatataatgacgaggaagtggagctgactgaagaggagagaaagaccattcgtagaatgatggaacatgctaacttttatccatatgtggtacgttatgtggtttaagtctagccgtttttctactaatatgtcacttaaaatgtgaccttttgattgattctcttggtgccagctttatgttgattggttcaaatgggacgatgcaatacatccactctcaagtgcagaacccaatccaaggttcatcctttcaaaatgggaggctaaaatgattattagttacgttagagcaatcaggaaggggtagttgatcaagcctgaagaagaacccctcttatggggtgattgagattggcttgttttggtctattgtataaatattattttatacaattgcaatacatttttagagcaggatacatatatataatattcttccacaatgagccaatgaatgcaactatatctgtacatgacaatctctgcatgcttccggaaaaaatttgaagtaagaagcttcatttggctgtccttttaacaagagagattccacttggatcaccaccccattcctcaaatataactagaaggttcccaaacggttttagccatgaacgaggtacatggtacctaaaacattaataaatcaatcatgtgaattagattttagaccaaataagaagaagagaaggatattgtttcttttttctcaccatctttgagaaggttcaccacagtgactgagacatttcttctcgttgtaaattccagcatagttgcaacgtccacagttcccacgagccgtgtaggcaggccagtggcgtccaatgttatgtccatttacccaaacttgacctttccccattgtgttcatgtccaaagccagtggttcgttgcctctcggtgtatcaaaagaagactacaaatagagacaacaagaatccgatatgaatctatatcttatattatgttcataatttcaataacatccatagttataattcatcacaaaaaccagattaagaatgttagctacat

SEQ ID NO: 13049 - DNA, 1480 bp, Arabidopsis thaliana landsberg
cctgaatctagagtttgttttgttgaaagtgaggaaacgtccccagcactatcgacgccgccaccagagtgaggctgagatttgtcgtcatcgtcttcaatatcttcggatggtttaggatcgtggatttcgtcttcgataactgtttccgttccataaggatccatgacgggaaaatcgaaaccctaaaaccttcggagaacgacgaagaagaagatgatgaagaagaagcggcagccgcctaaaagccctaaaacccttggagaagagaaaggagcgacacttattgtacttcgcgtagcacttgatcttaacttgtgtctttgtcttagaaataagtacggttaattttatataatgggttaattttgagccgttgaattgtttccagtaattttaaggacaaaaatggaaaactactctcaagataaggaaaaaaaaaaaaaaaaaaaggaacattttgccttgagataaaagaaagacctagacaaaaccaagaaaaacaaagaagattgatttttgtagaaaattcactagtggattacaaattttctagaagacgagatttctggtcaaaagctagaagagcacaagtatctgtgagaaaccgtgatcttcacaaccatccacttgaattgtcgtgaaatccacttttgttctaaattagccgtctagttcaagtggatggttgtgaagtatagatctctttttcgaggaagattagcgcacttttcatgaaggaagaaatcacagcctatgtagcagcaaaagtatacggagtatcaacaacaagaagccgagaaaaaaactcaaagaaagaactaagcagctttgtaattgaacattgaaagtgatgaaagctatgaaagtgattcacaagaggcagtacttctgctaaatatcacttttttcccatattctcttcttgatgattcctaaagttgttggtgtatttagaagttaaaaattatgtttatgttctactctcataggtaaggtccatttggtaaagcttcccggattgatgaatctaggcgcatagcatcgattaaatctgatagtatgtagttgtcaagctttgacagtaggtctgaattgaacacatttggagaaactggaagcagagactgagagacatttggcaataccacgaaaaagatggagagaaaattagtggatcttgaggaaaaatccaagcatctagagaactaaaagaggataaaagaaaatgttaatgaagatttaacacaggagatcacaaggctgatggatgagattgatatcttgagacttgaattggaagagacgagaaaatcaagtatggaaactgaggcatcttttccagaggagttgcaacgaatcaaagatgaaaaagaatcagtcattcccattttaaaacaataactagaaacaacaatagtacaatgtgagtatgtgacaagctaaagcattaattcttgatccaatcaaagaacaagaa

SEQ ID NO: 13050 - DNA, 632 bp, Arabidopsis thaliana landsberg
tcaaaaataatgtttgtattgcagatttagtactttaagataggggagagagcatatacatacttgagtgacttgaaatgcagttctatcgaatccaggtacaccgatttcacgaaataccattacttctggagcttcatgggataagtcacatatgtagatgacgccaggtgtaaggaagcttgtgaacctaaagaaaaacgtggtgtctttacgccgagcaaaaactccacataccgagccaatatctacaggtaatccatgaagcaaggaaccggatttcaagtccctaatctgcaggatgtgttttacatcactcatgtagctaacaaccagttggtctccattaactgcagaagctgttgagagaacatccttttcatgttcagcgataacatcagtccaactgctcggttccttcaagtcaacccgaactactttgtactttggggcatctttgttggttaagaaagtaaacaatgtctcgtcgtttgcgatagcaatgaattgtgcgtcaaaagtgtcaataagcttaacaaatggaagtaaagtgttgctttctctaaaaccttctagacctttaggaagtaatgagagatcacaatgataaacctttgttacagggtcacaac

SEQ ID NO: 13051 - DNA, 808 bp, Arabidopsis thaliana landsberg
aaagaaaatctttccaacaggctctttgtccaaaacatcaacaaatctctcgtcgcttcaaccacagcatctctctcttttccggtcttccccacaactttcatcgccgtcacataaatctgaaactccccaacaaaccggttttaaaaacccggttcaaaaacccaaaccagttatcgaaattgaaaattcatacctgttcatcgacgaatttagaccagaatcgagccatagttctctcatacggatcttgaggaagaatcggattgtctctccaagtctcatcaatatactcaagaatcacaagtgattcagaaatcggtttaccattatgaacaagaaccggaatcatcttattaaccggattcaattgaagcaacaaagagctcttgtttgtgatatcttgctccaggaactcatacgaaacacctttaagcgtaagagcaatctcaatcctccgactaaaaggactcgcccacattcccaaaagcttcacttcctctgaatttgatctctccgccattatttttcgttagcttcttcttctttatggactaaggttaataggttatgatttatttataagaaagaatggtgacgtcaccagtgacgaacaagttacaataaatgctttagtaagaaagcactttgtcccacatcggaagatagagattgaagttgagttgtttaaatgaagaaaggtttggtcaaataagttaaggggtgtgggaacctaggagatgagtcagcttattgattgctaaaccctgaaccctctcatgttaactatgggaagtaattactgggg

SEQ ID NO: 13052 - DNA, 662 bp, Arabidopsis thaliana landsberg
atctgattgggaaattgacaggaaacttcgtgttacgagatttatcagagtaccggctataagtaacaaggtggcagatatccctcctgatgattattcatggcgaaaatatggtcagaagcccatcaagggctctccttatcccaggtatacacttcttgatcattttttgttatgttaagaagtgataaagattgatgtcacatgcaaagaaccatccttttaacattaaggcttttgagttttgatgagaaaaaagagtctaaaaatggctaagagatgacacaagtaagatgagtctttttaaggaagtgttgtattggatttttgtgtgcagaggatattacaaatgtagtagcatgagaggttgtccagcgaggaagcatgttgagagatgtttggaagatccggcaatgcttattgttacttatgaagcagagcataaccacccgaaattgccatctcaagctataacaacttaactctcgattatcttttgcggtccagcataaaccttctcatgtatgctgctctctattgtgcgcgataatcggctttggggttgctgcaatgttgtgatatatggatcggggcaagtgcttttgttggggtggaattgcttgcgagagtttgctgcaattgttggattttgagctatatat

SEQ ID NO: 13053 - DNA, 515 bp, Arabidopsis thaliana landsberg
  unsure (1)..(515): unsure at all n locations
atcaagtttcagcttttcttgttcgaaattttctgattgggaaagaagcttcgaattcaattctactattttgggttcggcatccgctaataagccttcggttgttcgaagctcgaagtctttcttttcgatgtcagctgattgctcttttatcttgttttctaagttctcaattataatttcgtgccttttatcctctaagtcctgttgcatttttaaggccttgctcaaaagcatactctgtggacaaataaccttcgttagaaaatatttatgtttttaaaaatagtaaaggttagacacaagatatttaccttaaaattggaatagaacaagctgccgacaatgtgttgtcgtcggtagcggctgatgcctgcgtcgagcttcgggaagccgatactctttgatagannnnnnnnnnnnnnnnnnnnnnnnnnnnnnnnnntgccacctaaaccttcgtcatcaatgccaccgaagagaagtgccctcgaccggtacgtaccgagctcgaa

SEQ ID NO: 13054 - DNA, 825 bp, Arabidopsis thaliana landsberg
tctcttctttctcctttccttagcttttgatccttattaggtaaaatcaagaatcatcttctgtatatttttttcttcttcatttgtttcctccaccaacctcaatcgctaaatgtttaatattccgattgtttccaacctccctgattgattatttcaattttctgtttcttataacaaaaattgtgggtttgattcttattcagatgatcttgaatctctttattactcgtcaagatttctctgtttgatcaaatgtctaaatgtgtctctagttcttgtttttatcgattgattgttttccaaggaaactctcttgtaaaactgaaaccttttgtttatttgcatctcttgatgaaattagattggattctactgtataatctatggattttaaccggtatttatgtgtgtttatgtgacaacagaaatcttaaatccagactttaaccatgacggatacaatgtctgctcatatggatcgacataataagcttggtaaggaggaatctttctgcaatggaggagactctttttgtagcaaagattctgaaatctaagttttttttttgttttgcagattatgacggctcagaggatgaaaagaaaacaaagctttgttccctcaagaagaaagcaatcaatgcctccaacaaattcaaacactccttcaccaagagaactcgaaggaacagccgagtcatgtctgtctctattgttgacgatattgatcttgaagagcttcaagctgttgacgctttccgtcaagctcttatcctagacgagcttttgccttccaaacactgatgatcatcacatgctgct

SEQ ID NO: 13055 - DNA, 1238 bp, Arabidopsis thaliana landsberg
acacattcatatacaaaatagagaacatgaagctctgaatccatgtgaagttaaattagcatatccaaagaagattgaaatgcgtgacgtcgtaagtttaagctacatttttgtaaactaagagtaaacttgcagaaaaatattacttatattttcttagaaagccctacatattatttatcaaccgctaatgtgaactatggacacaaacgcaacataccgacatgcatacgcaagagcatgatattgcaacagttaaaacaaaagcctttatgaaaaaagtaaaccttatcttcaacgcgtaaataagataagataaagatgatctttgagtcagttaataaatttatttcttctttttgaatttctgtcgcagattttttttgttctttattattttgataaaacaaataattttttacggtagtgtgctataaaacaatcgttaattgaagtagagagatactgactagtaagaatttgatggaacatgaattcttaaataatatatatatatatatctttaagtttataagacaattttcgaaactactttatctttctaattttctttatatgtaatataaatatttgaataaatgatacaaaataattattttattttaacatcaaacgaactttgatttatttgaagagtgatcctcgtggaagatttgtacaaaaaaactaggaagaaataaatggtgtataaaattcacattgtttggtattaagttctttgccaatcaatcagccgtttcgttgttgttccttgaaacccatgtgaaggtagaatttgtgaacttttcagccaggttatagactttaaaattcttcatttctctattgataatatgtggtatttacttgttatctccttcaaaagtgacattccaaatcctcgtatccaagtgtgttgcagttccgcctcaatgatgatattacaggctttgcctctactttgtgttgctacaacaaataatcctctatcatcttgtataatctagccagctttttcatttttccctaggagactacaatcataattacattttaaaaaactacttgatgtggtttacgccattgttggtattcttgtgtatataaaatgattttttttttcttagtacatgtacatacaaacttcattttttcacaaaaaaaaacaaatttagtgtattgaggctttttaaaattcgaaaatgagtgatgatgtagaacatttctatatttagaga

SEQ ID NO: 13056 - DNA, 867 bp, Arabidopsis thaliana landsberg
tatatctaaagagagtcagagattagggacttagtggttgagcctttacatccatcttcttgatgcttttccaggggctggatagagttacacaggcgatgtgaccatgcctccgttccaagtgaagatgctgcatgttcatggttatggaggaaatgcggaagaggtggaacgcttacataaatttattggggagtcggaatgcggtgaagtggtgctaggctgcggaagctgtggtggataataccatgtattgcaaaccaaaagggttctatagtctatagttgaggcttcctggattttcggtttcatccaaatgcaagatctcatgtagtttaccaaattattctgtgtaacaattcatgtacatgtcgcattgctcttgcagttgcaagggcctctttaatttcaaggagctatttttctgtatcttttggcagtctctcccttagatgatacacgagtaaccttacctacctcgtcaaactccacctggcataagattaacatttctgtatttgatgagtacatcgtccctacaatgcaatttcacacttctttccactcttgcagactttacacaatatgtggtccattagctaggattttcagtgtcatccaagtgcaacatcttagacgatgaaaggtggtgattaacaggctgatttgattcttcactttctgatttgagatcttaactagagttttaggattcttccaatctgtagtatatatagcttactagtgttcaccagcagaaagatcttcaggagaatgccgatttaattagagcgtaaaaagcaaagacccttcactttatgtgcactaacctatggctatgcatcatccgaacgaaaccaatgtcac

SEQ ID NO: 13057 - DNA, 536 bp, Arabidopsis thaliana landsberg
gatcagcggtaccagttcgactaagtcatctggtgctgaagacattgctaggtggtggagatgatgccctcgctcgaagtggttccacgggggtttttgatgtgatcgttgacggacgcagtattgttggactgcgagtttcccgaagcgtcgcgtcctgtgtataaaaaggggtggcgcggcgcgggtcaggcactctttctgcgcgccgcaaaaccctagcctccttttgaaactgttcgcctactcatctgccctccttgccgctgctcatcagagatctggcccgcgtcaagcagaccgctcgccgccaccgacggtacgtagccatgtcgtcttcttcctcgtctgctgcaaacatgtcgtcggtcgacgcatcgtccgaggatacattgagcaacgtggcggcagaggagttacatcagggtgatacagtggagttcggcgtttcgcggatttcctcggtccgcgtttaggatatgcagcagctggggtatgttggtagcggagttgggcatgtccagggggtactgagc

SEQ ID NO: 13058 - DNA, 652 bp, Arabidopsis thaliana landsberg
tacaaaagataaggttacatttaaaatgtacttttcaaataatatagtatgatatagttctgagtctgtccaagattatttttatgcacacactagtataaaaatatggtaaaaatggactagatatgcatcatgttaactttatttgttttcgaaaaagtaatgagaaaactgaccgggagagatctcatataagaagataacgagtaccacattcccacatataattccaaatgtagacaattgtctagtcacacaaccaaatctacttttggtagattttatgtctcatccaaaattttgatgcaaatgtctttcaaaacatgtttttttctttcttttcttcttcagctctcaattttattttatttttgtcgtcagctctctatttatttaagtaccgtctctagaaattaggagaattaaatgttttcacaaaataaaaaatatgttagtatctgaaaagtttctaaaaaatatgttctctaagaaaaaacataattcacaacataccacataagtacccaccctgtcttaagaaagatttctctcgacacacgatgtctttttggggagattcattacatgtttctattttattaacgttataaattttgagaatattcggttgctgtactttgccttattcatt

SEQ ID NO: 13059 - DNA, 869 bp, Arabidopsis thaliana landsberg
ggtgggattgcgttgggtttcacggtggctttgaaagcttttaaagctgacacgtcggatggtgacgtcagagagtcggcagaggagaagaggaagaggaggaggaggagaagaagaagaaggcaagtcattgtttgaagtgtttgtgtgaatgaatgatgtcaagactttaaaagtgtgttaaatctttatataaaggcaaagtacgtggtggaggtcggctttgccttttggtcgcctctctccatacgtacaaggttcaatgcttagcttaagccaaaatcaaatgtttgtacaatcattaggaactaatagtctaaaatggctactaaatttgcttttttgttaacatcttgtgacttttgttatcaagtagttttatcttgtttaaaagagtaagttattggggttagagtgactatgtggtggatgtcgcttagccttttggttgcctctctccttacgtacaaggtccaatgcttaagccaaaatcaaatgtttgtacaatcattaggaactaatagtctaaaatgactactaaatttgagttttggttaacatgaaagcaaacaacctaattgatagttgatactaacgtgttattggcctaatggtaaatctcccaggtggagatgctgggttcaaggtacgttgggagagatcttttctccaaaggagattaatttaagtcccgcctctggaactgttcttttggattaaatcattatagcatttgctttaatcataatatgattcatgatcattattcctttaccattacttcataattcataatatttggtaactaataataaaagttggataagcccgaaagacttggactaggggatcctctagagtcgacgtgc

SEQ ID NO: 13060 - DNA, 841 bp, Arabidopsis thaliana landsberg
agctttaatagagtttcacaggctcaatctggataactcctgtatgaactcttagttcatgagttctagtttcccacttttttcttatgatgtgattgactgaatatccaagaaaatatctagaagttcatgtttctgatatatttcggtgttatacttttgggtggcaccaggtccagtaatatctaagttcataaatacacttcgagagctctcctcttataaggagtttcttcgctcacaggtaactctcatcatatcttgtgagtggaagctatatttttgtctggtcgctaaaaaatttttagggcatacaagtcttgtttattcgtattattctttatacacatgtttggtagagaaatctaagatataatgagtttgataaccaatttgaatatttgcttgaaagctgtttcccttcactgcatcatttgtataaatgttgtctttttgtaggtggagcatgtattacttgagagactgacaaactttatgactgttgatctacaagaagcaaaggtaacctttattaccctgcaaattttgattgttttctactttcttgtactgtgaagtctaaaatgtgatcgtccaatatcatagactccagattgatcaataaacaaaaaaataggttgttgttttctgaatccacttgttgacaagttctattaaaccccttgccattagttaggtcggatttaaaaacgatttgtcccttttttatttatatatattccttttcttgagtaaatcgttttagaagaaaagtacattttttcctgcactgatctattaatatgttatcaaaatctaaaattatttaccaatatcaact

SEQ ID NO: 13061 - DNA, 605 bp, Arabidopsis thaliana landsberg
  unsure (1)..(605): unsure at all n locations
tactaagaatggacctaaattacattcacaccccagagttaccagaaaccctaattggaaccctaaaaaactctaaatccaaaccccaggggcctaagtgtaaaattagtgcacttttggactaaagtgcaaaaaccatgataataaagtgtcctaattcataatgattcacaaatatgtgaatttgcaagctaaaccctgaattttggacctattnnnnnnnnnnnnnnnnnnnnnnnnnnnnnnnnnnnnctgaaattcagtggtatgggctcaactttggagctttgtaactttcaaattctaaggattttgccctagatcaccacaacaattttgtagctctatgaaaggagaataactttgcttaagggagtaagcactgttgttatgaagaatttaaagataagtgagcctgaannnnnnnnnnnnnnnnnnnnnnnnnnnnnnnnnnngactaacagtgcaactgcagtgactttgggcatgaatcaaacatgatcgagcaagaatttgcttaggattgctataacaatattgtagctggatcttagagctataactttgctacagggtgatgatcatgttactacataaattgagag

SEQ ID NO: 13062 - DNA, 661 bp, Arabidopsis thaliana landsberg
aagaaaaataaaatcagaaggttatatataaaaaagacatttatgataaatatgtttaagcattcacaaagattctgctaaataaatgttcttctacttgaagccaggaattgaggttgatgagtaaaaatattgaacttactttaagtttttctcttatattctctcggacaatagaaaactcaagatcgtctttgggactacagtagtatttgcaaataatatcagtacacatatctggaagtttctaaacatgcatcttgtaagtgtacaaagcacaaaacaaacagttgacctggttagtaagtcgcgctcaatctccatttcacgaacctttgaatcacctctaggccttgttgcagccaaagcctcactgcagacacctagatgttttctgtggaagagtctctcaggctgctccattaagatgtatgtcaacattatcatagcagctaaaaaacagagtttggcaacaacttatctaccacgtaagaagaataagtaacctaccgtgttccctatgaatgctggtgcaccgggtggttgaagacagaattggtacgcgttttgtccttcacactgtcatattaataattagactcagatttcaacacttcaaaattgatataaccggaagaaagtgattagtctaacaaatgag

SEQ ID NO: 13063 - DNA, 913 bp, Arabidopsis thaliana landsberg
ttttaggtaaatgaccaatcacgttacaacatatcagtatcaaatccacataagacatccatgtgacacattgcatatgcaaagagaaaacgagacaccaaaattttgtacaaacaataatcagtcaatccgaggctactatatttaaaaattcaaaatttttttgtgatttaatgatatttcaaaagtttaagttttttcgtcctaaatttgaaaattgacacatttttgatatttttacctttgatacatccgtagaaaaaatatttacctactaaatattttcttatatgtagcttataagtataattatgtgaataacactaactaaaatagatattagtttatttaagtttgaaaaaaaatgtgacagttagcttctcataacttgagttttgtggaaactttactttattatattaaatatcatcatatcacataatatgatagtaacaaactaattagtaatgtaccatcaacttttctagtagtaagtactaatttgaggaatcttgcactctgatgatatcaggaatatgatcataaacttcagagcatcaactcctagaagaaaccaagtgaggtggtccaaatcaacaaacctgaacacacaagaaccttgaataagactttccaaataaaagtagaaaagaaaaacaaagaattagaaattcaaaaaccatactcttattttctgggactaggatttttttatacccgaacaatctacaaagtgtattttcataccaaaacaaatttgaaggatgaattcatacccaaactccaaaaacatttgaattttatagctaaactttacatttagtgcttaattcaaaatcgtaaataacgagtattagtcaactgttacaagtgctgagtcaaatgacatgtattttgatgtttatactttcaa

SEQ ID NO: 13064 - DNA, 688 bp, Arabidopsis thaliana landsberg
tactagagagtaaagacaagttctttaaatctcagggaagaaggaattggtgtttaagattgctctgtgttaatgatggcttcaaaaactccagaaggatcacttaccaattccagtcaaagtatgtcaatcaacactttagcagatcaagtatcttcgagtttgtctttcgctgatccaagtagtgatggcaaaaccggtaatagtaagatcaacgagcaaggtgagagtggaaagagtagcacttgtagaccaagtacaagcagtgatataagcgatgagagcacttgtagcagctttagtagcagtatcaacaaacctcacaaggctaatgatgtgagatgggaagctattcaagctgttagaactaaacatggtggtttgggtttgaatcattttaggctcttgaagaggttaggatgtggagatattggaactgttcatcttgctgagttgaatggaactaggtgttattttgcgatgaaggttatggataaaactgctttggctagccggaaaaagcttcttagggctcaaactgaaagagagatattgcagtgtcttgatcacccgtttcttccgactttgtatagtcattttgagacagagaagttctcttgtttgggatggaagcttttgtcctgggtggtgatttgcatacactaaggcagagacaacccgggaaacg

SEQ ID NO: 13065 - DNA, 933 bp, Arabidopsis thaliana landsberg
gactaaaccaaaaactatgtcaacagattgactaaaccagaaactttgtcgaaaaacgcaaccttgtctctcgtttactaaaaacgggaagagaaagataataaaagaaagatcgatgaggttgaccaaacgatcaacaccttcttaattcaccaccattaaaaatgtttgcttctccagagaccactcaacatagttgatgattaattagattactagtaaaataattgcaaccccaaaagaaaagaaaagttctgtctttgatcttttcttttaatctcaaaaactggacccctcttaattagatctctaatttgttttctttcttctccaaaatttgacaaagaaaagaattgatcttttgagagggttccagttttttttctctttcgtcttctccattcttgtttgtagaaaaaaacccattttttatttggatttttcatttgattttcccgggaaagttgtaatttttatttttttgagggagattgaaaaagttcgataaaaatgtggggagccgccgcagaaccagcagattcttattacctgattcgtcctgagtgcactgatgtccccaataccaaattcaagatcaaagtttgttcctttccctgatactttcatctttgttattgacttttattggattttggtcagcattggattcgttatcaatgagattggcgtttgcgattctctctgagctttcagattcttttactgggtttatgttcaaaatgtgttcttttggtgttgcttagattcttcattctaaaattttcagctaatttttagcattatttatattattatcggcgtgatgtctctttggatttggaacttttaccattggtagatatgaacaaataagcgatgagagcatttactagttatgatttaggctatgacatgtttatgtcttatgatgct

SEQ ID NO: 13066 - DNA, 960 bp, Arabidopsis thaliana landsberg
gatcaatcgatgttaggatgaaccaaaaagatagaatcgaatcctagcaatcagtaaaagagctaatacaagtgttctgatgaaaaatattcagcagcaaaaacaagaatgatatgatcatatgcactcatgtacagaacacaatgtgtcattttgttacactgaccaagtctaggcagcatggtggcaatagtctccggattcacagaaattggagactcgaagatttgttgtcccctgaatgaatacataaagggggaagaaactacagatcttcttgggctcaacaatgaaatgcacaccgaaagtgtgtggacaaggctagatttggactgaggatcttcgaaagcatgaccaaatatccttgcaacaaaactgcaaacaaaaaggtcactgaatcatcatacaatttaaacacgttttagcatatttaagacaataagacatcctacaaaccttgaactagaaagtttggtagccaacggtgacggtgcattttgagcgatagtgcacagtgtttcagcagcatttgcatgaacttcaagagagttctgatccaagccaaaaataaaaacaaaactttcagaatattcatatctgaactattcaaaattagaaaatgtaagtcttattgtttgaccgaaataataaccacacatgcagagaagcctctcaacactacatttacgaatttggtagtagggaatcaaaaaccgcatcacgaataaaacagagatggcaaatgcaggagagtctctccaactattctctactagtctcttgtcttataaaggtaaaacaatgtgctttttcgacatgaagaaccaacagatcccagttaatagtaaaacaaatataacgagaagaacagaagtggctcaaaaaaactcattctgcctatatttcaatcatttgaagaatagacgctttaacaaattacttactgatgggctaagctta

SEQ ID NO: 13067 - DNA, 780 bp, Arabidopsis thaliana landsberg
tctcagccgtttatctaccatcttaagactcttcatcttccttagacgccatatccatcatcaccataaccggtgcggttttagccatccttttaaccggattctttcttgtagcgaaattcttttcagacagcgtaaaccgtgtcaaccaaggaacatatcaatccgataacgaagacaacgacacggtaatggaggaagagtttcaagatagggaacaagtggatcacccaatatggttaataagaacaacaggtctacaacaatcgatcattaactcgattacaatctgtaattacaagagaggagatggtttaatcgagagaacagattgtccagtttgtttaaacgagtttgaagaagatgagagtcttaggttattgcctaaatgtaaccacgcttttcacatctcttgtattgatacttggcttagttctcacaccaattgtcctctgtgtcgtgctggtattgcgatgattagtgtcaccactccacggtattctggtccggttgaagtaactcccggaggatcaggttcacatttggagaacgatggagttgatgaagaagatcatggagagattgaaaacagagttgattctgattttaaagagagtgatgattcagacataagaattgagatttatagatttgattcagacggtgatggatctgaaacagagacaaaagagagagttagggttttgaaggagagaatgaatacaaatggaggagattcagtaaactctctctcgcatacgaaaacccatgtaaaagtgt

SEQ ID NO: 13068 - DNA, 1166 bp, Arabidopsis thaliana landsberg
tagagaatgttaataacacaaaaacttacgatggtagctttaactagtcaacacgtgaaataaatgctttttggaaatttgccgggggaaaaaatgatgacttctcaagattatttccgctcgggttttaatgagactctgacatgaaattgaattcagatgattataaaacggttcatatattcatatagtagatgatgatataaactcatcgaagcatcgtagaaaatagagaacttcaatttgttttttgtttacctattacagatactattcgctgaaagagaaacataagaggggtgttatgatttgacaaaaacacccttaatcattggtcaagactcaaagagtgttgcagataaggtacagatcagaaacccacctctagaaatcgagcaatagatctctctcaacttcacagacaaaatccaaccgagttggtgggtctcactaactctttaactagttgtctgacaattcgccacgtgtcggtcatcctgatcagtttcagtactattgcccccaccgaatcattatctccccctcgctcactcgcttgcttaccgtaataatctctctgcttccctcctctagctcttgtccctttctgtctgaacctggcaagaagaaccttagcctctctttcttctttctctctctctgtgttctctgttctgtttcaactttactccctcagtttctgtacaatttccctatctagaagagagataaaaccgagaaggttttggagatagaatcttttgttcttcttttgtccctgcttgctcgatttttgttacgtgtgaagcaataaaaaaacggatatagctaaatcttccatccattcagaggcttctaaatctggtaattacttttatagcttcccccttagtaaaagtttactatatatagaattagttgctttattaaatcatttcctcctagattgttggagagggttgtttggtttaataattctctaaacattaaactgttgggattttcgaataaacttttcctagttggattgctttacatcattcctttttccctcaaaatctttctgggaaatcaattaatactaaaataatggaattcaaatatcaatttctttaatttcactttcacagaaaaaagccgattatactcccttttatttttggggg

SEQ ID NO: 13069 - DNA, 782 bp, Arabidopsis thaliana landsberg
cgtccatgtttcagctgaaatgcgtcggtgttatcttgagaatgcggacacaataaccgtccgtgcgttgtgcacccagacaacataccataggctggaaaatcacttttagtctgcattatcaccgcttgcatgttgaaattttggtgggctgaaacatcgaacgcgtctacaccatgttcccataacatttgtaactcataaatcaatggctatagaaacacatcaagtgctttcttgggatgatctggaccaggaacaagaatggttaggaaaagaaactctcgtttcatacacaaagatggcggaaaattataaggtgtcacaataactagccacaatgaatactcccttccatgctttccaaaaggattaaaaccatctgtagacaaacccaaataaacgttcattggctcatacgcaaagttaggatacactgattgaaaatgtttccatgcttctacatttgatgggcgcgctattacactgtctgatgtatattcagcatgccatctcattgatcctgttgtacgctctgattgatacaacctcttcaacctctctgctaaaggcaaataccacatccgtttatatggtatgggaactcttccactagtgtcctgataccgaggtttacgataaaaacgacatgaagtgcggccttcgtcttctctccaataaatcaaacaattatcactgcacacgtctatcacctgatatggcaatccaagtccagctataagtttctgcacctcatagtatgaagctggtgaaagattatg

SEQ ID NO: 13070 - DNA, 771 bp, Arabidopsis thaliana landsberg
atgtatagttgtttggcttagacggtgtagtgttggttaagattatcaatgtcaagacccttgagctttactactgactcaacgtggcctttgagagtgtgcacttctcttagcctgcatgcaccacaacacaacacaacacaactcttatcaatcttgtagaaaaatgtttacctataaatctttcagagtgatcaattttacatacctagcaacttctgcacgtttcttagcctgttcagcgatctcagacagctcggtgtaggttgccgtgtcttcgaacattgactccggcggtttaagtccatggagcgtacgttgagctagagcccattgagcctccctttctcccctaccgtagtctttcttggtcgtgaatgcagtcttaaatcacaacaagggaaaataaataatgtcaatatatatatttttgtggttttaagaatcaagattttaattcacacataccctattttcaatcatgttgttccaagctttgccactaagggtatagcgagtgataaacttgaggatatcaagaggaatgtatgtgacgatactgtagatccagatgactccacaccatccccatccacaacctttgattctcgcaaattcccaatgcgcataagtagctattaaggttgcaatctgtacgttattgtgcatgggaaagaaaaaaactttagtagagacatatatatatctgcaatttctatgtgagtatacaaatgacgtaccaattgggcaacaagaaagcaataagaagaa

SEQ ID NO: 13071 - DNA, 1064 bp, Arabidopsis thaliana landsberg
tgttgcatgaaactgtatggaagtgtttactatagaactgaattttgtaagcaattgaggatttacttatcttgtgagcccctttttctttaccagtggagaggagaatagttgctaagaaccgaatgaaatattctttggtcgggtttgttgtctatttagctgactctcctgtgtctaaatgatctacaacatggcaaacgtcaaccactgcaacttaaaatttgattgctacaatcattctctctttctgctgaactatgaaatcatttcgttgctacacttcttttccagcttgatgtacggagcagaggatccctctatcgcagcgatggttctagacagcccattctctgatttggttgatttgatgatggagcttgtagatacgtataagttccgactaccgaagtttactgtaagtaaaagtaaatttgtagtgtctgtttcttgtgggatttgttcttcatactacaaggtttccacattgaatctattatacgactttaagctctttcaatctctttcagataaaatttgcaatacaatatatgcggagagctgttcagaagaaagccaattttaacataacggatctcaacaccattaaggtcgtttcctctgttagtttttacttttagtctagttgattacttagatgattaactaatctattcactggaaggcaacatcatcattgttattggtgatcatttacttatgtacccttattatttggcatacatgattgttcttaatgcgtaattgtataaaagtcaaatggtagtagagatttagttgcgtttttatattaagtgatgaatcgttacttcgttcttttattcaatttataatgttcattctgcaggtagcgaaactatgttttgttcctgttttatatggacatgctgtatttgacgacttttattcagacttatacttacagtgtttatatgaagcattacatagtaagtttgccatattatactatgtttcctatagctattattaattttttgaagaacccttgaccatgttgcctttaaactttttggatatgattt

SEQ ID NO: 13072 - DNA, 1051 bp, Arabidopsis thaliana landsberg
gctttctctgcttttgcggtatatccctcagttacattgtcttaatagtaatgatatgttatttcttttagcaattagtcaattagattcctgaattgagtattcttgagtctcaggacaattgaaatgcatattattaagtctatagtttgtttgtgtcatttgtttctgtgttttgactgtcttgtgtttttggattgttaggtatttgatgggcataatggaaaagcggcagcggtttatacaagggagaatctgttgaaccatgttattagtgctcttcctagtgggcttagccgtgacgagtggcttcacgctttacctcgtgcattagtttctggatttgtgaagactgataaggagtttcagagcagaggtatgtgaattacaaatcatttactagctcttttgatggatctttacttgtggctgaagaatgaatgaatgatatatggtttattcctctcttgatgccaggggaaacttctggaacaacagcaacgtttgtgatagtagatggatggactgtgaccgttgcatgtgttggcgactcgcgctgcatcttggatactaagggtggttcagtttctaaccttactgttgatcacaggcttgaagataatacagaagagtatgtaactaaaatgaaatttttgtctttgggatcttaaagcacaatgtaaagcttaacccttttatcatgattcaggagggaacgcgttactgcgagtggtggagaagttggcaggctaagcattgttggaggcgttgaggtgtgttgtgttctgttttgttaaactgatgtgtttccaatttagaagctcactattgaaattctgcagattggtccactacggtgttggcctggaggtctctgcctttcaaggtctattggggatatggatgttggggagttcattgttccagttccctttgtaaagcaagtgaaggtacatatctatattcagcgttttgttatagatatgttttatccttaacaagcaaactcttacacttggtatataaatatacaaaaagctatccaaccttg

SEQ ID NO: 13073 - DNA, 238 bp, Arabidopsis thaliana landsberg
ccgagagaagcattgcagcgtacatgatcaacatggaaccaacgacattctcatgcagtgcatcagtcaggaggatggccgcgagttgctcatggagagcgatggaagcaactgcagacgttaatcctcatcccacacactagtcaataaggcgttcgggcatgggtgttactagtggaccgccttccaagatgcgactgagttggtaaagtcctgccaagcatgctagttccatgtg

SEQ ID NO: 13074 - DNA, 1006 bp, Arabidopsis thaliana landsberg
tagtggtggtgattggggttgtggagtgtagaagatttgagaaggagacgttagcagttggtggtggtggtgaacttgccggtggctttggtggtggaaaaggttttgggggagaaattggtgccgggggaggttttggtggtggtgcaggaggaggtgccggtggtggtttaggagaaggcgccggtgtaggagaaggtattggtggtggtgcaggaggaggtgccggtggtggtttaggagaaggtgctggtggaggactcggaggaggtcatggtgcaggtattggtggtggtgctggaggaggtgctggtggaggactaggagaaggccacggtgggggtattggtggtggtgccggagcaggttctggtggaggacttggagcaggtattggtggtggtgccggtggtggtgccggaggaggtggaggacttggaggaggtcatggtggaggtattggtggtggtgctggaggaggtgctggtggaggactgggaggaggccacggtgggggtattggtggtggtgccggagaggttctggtggaggacttggaggaggtattggtggtggcgcaggaggaggtgccggtggaggtatgcatgaccaaaatctaactgtaaccatataaaatggtttataactataacctttaaccacaaaaaaaaattagttacgtttaaaaaatatatactaccgtaaatgtatcaaaaccgtacagttaagtagttaaccgtatagttaaaatcttaaaaatataatcgtatatgtgcagttactagatctaaattcagtccactaatctttttccataaatcaaatcataaatagtttatataattattatttttattcttataattgtatttcaatgttcacaatatcttttctttagtgttgtttttgtttgaaacatgtattgttaataactcaatcactataattataaccattaatttaattatttattggtttatttaagaaaactatatagggtacgagc

SEQ ID NO: 13075 - DNA, 878 bp, Arabidopsis thaliana landsberg
tgactatccatctgaggtgtaaagaaggcatcccgacagtcagcggaatcaaagaggttgctgcgtttaccactcaagcgacaacataccttgatatcaattacgtataactcggaggacatagattcagcatcaagcacgacgcaagccctaaatcccaataattgttgagagagagagctctgatgtaatgacaaagggatggccaaagagcttccagtagcttggtaagtgaaatacaaaggcacttgtcctcctggaaatatgagatacttcaaaactgattgttgttgaacaagagcttcttcttctgtagttgctatgcagattgaaaagtcgagcatctcaagatgtttcagtttggagatgtttggagatatacatttgagctttttgcattccctcatacgtaaacgtttaagcctggagaatttctggatccaccaaggaacttcttcaatcgctgttcgattcagatagagctctgaaatgttacttgagatatcaggaaaactcttcaaccgtgagcatctaccaagatcaaggcgatagagagatttgaggttgatgtcggttggaagaagctccagcttttcacatcctttcatacccaagtcccacagtttattcagattcttgatagaggaaggaagctccactaaactcgagcaatcgttgagataaagtgtttcaagattggtggccaacgagagatctgggatttctttcagtttttttgatccccacaactgcatctccctgaggcatgtaagcggctgaaaaaaacaaaacaaataaataatcagtggctcagttttcatatacacttgagaggtatcaataaccaattgcattataatcctatttctcctcatctt

SEQ ID NO: 13076 - DNA, 524 bp, Arabidopsis thaliana landsberg
gtaactttttttgctgctttgctcgtgttcggagattgtctttttgatgccggaaacaacaactacatcaatggccgtacggtcgaaccactttcaagtttcccaccggaagattatccgatggacgtttgattcccgacttcatcggtaacataacaaaactactcggctttgttatttttatttcctaggaatgtttaacatttttttattcactgacttggaagccgaaaaggcatggttgccgttgatcccgccaaatctacaaccagacaacggtaacaatcaatttacctatggagtaagctttgcttctgctggcgccggagctttagccgaatcctttcttggaatggtaaatatcatcagttttttactactgttccatttcactagaaatgttgctttaatattcttcatgcgcaaccttaacagtttctgtgttatgtacttacaaagactattaactcttggaattttggttcatttcatacatgatgttaatgaatcttcattttgacttt

SEQ ID NO: 13077 - DNA, 553 bp, Arabidopsis thaliana landsberg
agaagacatcattgatcctaatcttaaaggaatgtttaattttgagtgtttgaagaaatttgcggatacggcggagaagtgtttatctgatagtggcttagatcgaccaacgatgggagatgtcttgtggaatcttgaatttgcacttcagttacaagaaactgctgatggatcacgtcaccgaacgccgagcaatggtggtggttctgtggatttaggtggaggaggaggaggtgtgacggtgaacatcagcgccggagaaagtgacttgggtgatgacttgtcatctgaagaaaacagtggaatattttctcagattgtaaaccctaaaggacgataaggtaatttcgtaactgagcaaagagtttactttcttttgtttgtttttttatgtgaagtaaaggaaatggtgatttggtgtattgttttgctttgagttgtgtaatatgataggcaaagaaaataaaaaaaaaaggaatatggagacaagtagaacttcttttgctttgtttattaatttgcctgaggctttattaataaatcaaaagtcaaa

SEQ ID NO: 13078 - DNA, 624 bp, Arabidopsis thaliana landsberg
  unsure (1)..(624): unsure at all n locations
atttcaaaccctaggtcaaaactttgttttgagtttttctccacctttttcctattaaacttggaaatctctacacatggaagttgcttggtttggaaaaccctatgactttaatattttgacttttggcaaaatattgctagatcacaaatttcacctttgggatcaaaactggagtttttttaaaatgggttttctactccctatccatcaccacacttagagtttacttggtcctagtgaatgcattctaagtgtattacaacacacaaatgccaatgcatatgatgtcatgccgagttttagnnnnnnnnnnnnnnnnnnnnnntacaggcgcagtcgacgaggagcctaccggtcctgggattcggggagggaggcaggccggacctgcgggtggtcgagccgggcgaccgtccggggccccaaactgttacccccattcaattatatatttaagtatagtacttggtgatttaatcagcctaaacaaacaatgtttgctttgttagttgataggtccaaatcgtaaccaagttacgattacgtcacattctactaaattaagcgcacttttcgtgtctatgattcactgcattgtgcatccatattaaatgaaaatgt

SEQ ID NO: 13079 - DNA, 896 bp, Arabidopsis thaliana landsberg
ctgggacgttgattcaaaactcccgttgtaggtaaaccggagagaaagcttctaagctcaactccgtcgtgaaaagcactccggtgtagatataaaacgcatgaggattgcttcctccgactaaaaccctaccgtcacgtagaagaatagccgcggagtgatacattctcgggattgtagtcggccttagcgattcaaacctagagccaaccggattctcgggatggtataggtccggtgctaaaaccggtgtacgaccaagctcccatgcagcagtaccaaaagatccaccgttgattagcaaaacatctccgtttggcaaaggaatcatatctcccataactctagcatgtggcatcttctcaaccgcccattcaggtttggcatcgttaatcttgatccttgcacacgtgtcaagcgctttcacgaaagttttctttctagcgaggttgtatgatccttttggtgcacctccacacactagaacctccgtctcgacattatccgcttcaagattctttaacggtaataacacggctgagccagtgctcggatagtttctcggatcaccaccgggaatcgccggaaaagttttcaccaccgtgttcttaacatagtcgagtaatatcgctctgttattagcgaacataaatagattcccatcggtattcataaacacaaaaggataaagattattctcttgtccttgatcatgagtctcggccaaaaacggtaacgcgactacgttagggtttgtcgttttgggaaagaactcgtagttgaattgtccttgacatcccatgacgatttgtttacagtcgggaagaatatggttggaagcgtaccatcttctcttttttaaaccgttgttcatttcgaccccaatcacattgatg

SEQ ID NO: 13080 - DNA, 589 bp, Arabidopsis thaliana landsberg
caggaaagcaaagagaaagtctacaaactgcacaaagctctctatggattacgtcaagcaccccgggcttttaacactaagctaaatgaaattctcaaagagttgaagttcgaaaaatgtcacaaagaaccctcattatacagaaaacaagaaggcgagaacattcttgttgtagccgtatatgtggatgaccttcttgtcacaggctctaacttagacatcattctcaactttaaaaagggaatggctggaaagttcgagatgagtgacttaggtaaactcacatattatcttggtatagaggttctacaaagtaaagatgggattacgctgaaacaagaaagatatgcaaagaagatcttagaggaagctggaatgagtaagtgtaacgcagtcaatacaccaatgatagttagtttggagctgtctaaagcacaagatgagaagaggattgatgagactgattacagaagaaatattggttgtcttcgttacttactccacacccgtccggatctctcttacagtgttggcatactgagtagatacttgcaggaaccgagagaatcactgggagctgcactcaagc

SEQ ID NO: 13081 - DNA, 393 bp, Arabidopsis thaliana landsberg
tattgggataattctccacatattttttcaaataattaagtttaataagtaaattaattctaaaaaaatgtaattgataacaatatttgtgtacctgagagtagtaaagtccttgttgtcagaaatatctgtcatgggaacatgaaaagcttctgaccaagaaagctgccggatagaagtggctgacggcgttccccaccggtaactcccggcggaaaatttctccgacttacttttcttgtcaaaaggctctctaaagaccctaatttgctcttgtctcatcttctccaacacatccattgatattccatggtttatcacttgaaaaaatccccactccctcgaagctctcgcaatcgcttccttacatttctctctctcctcctcggctcc

SEQ ID NO: 13082 - DNA, 724 bp, Arabidopsis thaliana landsberg
ctctactttttctggagctttgtggcatcgtagattaggtcatccttctactagtgttttgctttctttacctgagtgtcatcaatcttcgaaagatctaggcatgattgacagttgtgatacttgttctcgtgctaaacaaacacgtgaggttttttcaattagcattaataaaactttggaatgttttgatttagttcattgcgatgtatggggtccttgtagaacaccatccacgactagtgcagtttattttctaactctagttgatgactactcacgctcgatttggacatatcttatgactgctaaatcagaagttccttcattgatacgaaatatttgtgccatggctgaccgtcaattctgtaaaccggttcgctccatccgtagtgacaatggcaccgaatttatgtgtcatacatcgtattttcaggaacatggtattttgcatgaaacctcatgtgttgacactccacaacaaaacgcacgtgttgaacgaaaacatcgtcacatactgaatgtggctcgtacatgtctttttcaaagaaaccttcccgtaaaattctggggagaaagcattctcacagctacgcatctcatcaataggacaccgtcatctgtattaaaaggcaaaacaccgtatgaggttctgtttggcaaacaaccctcttatgatatgctttgcacatttgggtgtctctgctatgctcacatacgcccc

SEQ ID NO: 13083 - DNA, 509 bp, Arabidopsis thaliana landsberg
tagccatttcctgttaatacaatagatatcgcatgcaaaaagatcttagttggacccaaaatggccgataaaggcaagagcaaagacatcatcattggcaatcttcgcatgtcaaatgtatcacaaaaggagattgctcgaaaggctccggacgataaggctaaaaagtctggaggcaccgaggggcaggcacaattaatgagccaagcacgatagcatgaccagagcatcacagactgtctgacacctacgtgcggacggtccggtgctcagacatatggtccggctaactcagccgaatagtctgcctatggccaaaggcgtcaacctccacataaagctttaaaagggaaacagacgcaagggcgaacgacatatagtcggctggtcaaagctgaccctgcttttgatcagtggctctccaagaatactagcaagaagaccgttctacgtgatcggtcaacgaaaaaaacccggtcacctgcttaaaccaaaccgggtaaccaaaa

SEQ ID NO: 13084 - DNA, 1008 bp, Arabidopsis thaliana landsberg
ttcatggatgtggtggttgaagtagcagagctttctggtcatcttccattaggtctccgtgtgttaggttctcatatgcgcggaaagagcaaggatcggtggaaacttgaactaggaaggctcacaactagtcttgacgaaaaggtggagaaaatattaaaaatcagctatgatgacttacatattagggataaagctttgttccttcacattgcatgtatgttcaatggtgagaacattgatcttgtgaagcaaatgcttgtcaatagtgacttagatgtgagtcttgggctccaactcttgcttgataaatctctcattcaaataaatgatgatagagaaatagtcatgcatagtttgttactaaaaatgggaaaagaagtcgtttgtcagcattcaagcgagcctggaaaacgtcagttcttgttcaatacaaaggagacttgtaacatactttcaaataatacagtacgtatgttaacaaactttgatcatgattcatgagcttggcttgatgaacttgtttgacgttcatttcacacattttttttttcattggtaacaatatttacagggttcagaagcagtacttggcatatcattagatacatctgagatccaaaaagatgtcttcatgagtgagagagtttttgaagacatgcgcaatctaaagttcctaagattctacaacaagaaaattgatgaaaacccaagtttgaaactccacctacctcgagggctaaactacttgcctgctgtaagattattacattgggattcatatcccatgaagtataaaccttctcaatttcgtccagaatgccttgtggaactccgcatgatgcatagcaaagtggtgaagctttgggaaggaacccaggttagctcttattctcgctataggttattcatattgatagaaaccttaggtctgtctatagtactactgtacatagcttaaaaaattagagaaattcatttaaaaaagagagagagagagatctaaaa

SEQ ID NO: 13085 - DNA, 730 bp, Arabidopsis thaliana landsberg
cctctctgtaaagaacttttttcttattattgtttttctttttggacaatagaattttattttttataatttaaaaaagggttgttgcgttgggcctaaacaaagtgatgttgaagggaagcttaaaatgagtaatttgggtaacaaaaatcggaaattttattagattctgggcctcagttttaaataatgaattcaaatttgttgtgtttttcaacttttgactcatgaatttggctccgatagtcgcaacatatttcatgtgtttcactaaatttcattatttattaatatctatagaaaggtatttgggcccaaaaaaagttatgggccgaaaatgagtaaaatatatattaaatattcgcatatgtttttgtaaacttttttcttacaaacctctccgaaattagtctcacactctcacgcagtcttcatataaatattctgtcaatgtctttaataacagaaaaaaaaaattgttactgttattgtaagtttatctctcagcaggtgacgctattctacaaaatgatttgaacattttcatttttatatatcttgaaaagaaaatttataacaagttttataaacgttaatcttaattgatttttaaaaaaaaactatacacaaagtttgaaatctgaattcaattcaacagttcgtaagatcttatttcagagattgctttctttgttttttttatatttgtattgtgaatgtgtagaatttt

SEQ ID NO: 13086 - DNA, 940 bp, Arabidopsis thaliana landsberg
gtgaaaaataattaataaactgatgggtggttggtaattaggtggaacttcttttaagagttcaccatataaatttagtgaatcttgttggatattgtgatgaaggaaggcatttaggtctcatctacgagtatatgcccaatggagacctaaaacaacatttgtcaggtaaaataacattatctatgaagtgattagagtaattatgaattttgcttttccttggaacaaaaatcatattgtaattatcctatactgcaatgccttaaaacgatgtttatgttggattaatacagggaaatggagtggctctgtcttgagctggaaaactagactaataataactgtggatgccgcacaaggtacattttaaactattcttaatcatacattaatcttttcctcatgaatgagcactataacaatggagcaagcaaattttaagctttttatgtgtattaggtcaacacccgcacaatgtgcgggttttttcatccataatttgttaattgcaacaatttaaatcgattgaattaatttaattaaataatattttctgggtttttaataaagccatttgatgtatttctctagttctagagtaaatcattcattctgttttttaatttttatttattttgctacattgtttaacacttatttacaattacttatcttaaaaacaaacaaacaaacaaaaaattgttaatgtttaaaatatttttaaataaagaaaaaagtaatgttgatttagtatcttatagcttctttaagataaacaataaattcaagtgatattcattatcactaatgctattatttatatattaataaattaaaattccattgattatatgtttatgctgtacaatttaatacagttcaattaaattaggtaatttatatgtgcttgaaatacctttgtaaataattgaattga

SEQ ID NO: 13087 - DNA, 698 bp, Arabidopsis thaliana landsberg
  unsure (1)..(698): unsure at all n locations
ttggttttggttggcaatttagatcatcaagtaaaattttattccaattcagcatctaattcgattattcggtattattctagctttgatttgtagtaatttgttgattttggctaaggtttgagatttttcgaatgcatgcttggtgtagttctaataatgtagctttagacatttagatgtatatgttgacccacctcccaaacgaacccgcaggttgatgaatttaaaggagatgatgtaatttgcctgtcaaagaatgctactactctgttcactttgcacgcctctcaagttcatatcgatctgccaactatcacagagaaggataaggaggtcagagttgcttctaatctacaaatctcaatgattcactttgctccatgtataatacatatttttagtcagtgtttcaccagattgtttcggtttggttatcctctacgttataagcaagcacatggggcgttcaaaataaaatcgattttctctnnnnnnnnnnnnnnnnnnnnnnnnngccaggtctgtatttttatgctgcccttcagatattgttatttctttgtgtatgcaatattaattctgacctttgataagcttctacaataaccaatttttgtttcataacacagacccatgaaatccatctaaaagattggtgacctctctctgacatcaacgaaatccatctctgaaat

SEQ ID NO: 13088 - DNA, 733 bp, Arabidopsis thaliana landsberg
ccacaacatgatccatagtttcttcattcatataaaccttaaaagttatctcatctttacaaggaacaaccgaggtaaaggccctatagatcaaatcatgtctactcttcagctccatagtagctaacaatccatggcaatacctacgaccactcgcgtagaatttgaacacatttaaggcttcttttaacaacaatggcgaatcctctaattcactaactccaagcatactaaaattcttctggaatattgtatccttagaagcaaatttcgccgcccaagctaatgcgagactctcgttctcacgtttaccaacgaagtagttgattgcgagtgcgattaagaaacagacgcaagcgatctccaccgcgtacgacttcttcttcttcgtttgatcattagtgtctccttgagcttccgatgaagtcttgagatctggcgtctttggatcagcatgagttccgttttctgtaatcaatggagattcaagtgtctctatctcaactggtagtccttcgaactcgtcttcgtcccagtactcaaatggtgtagacgagggagttttcgaatcggattgatgctcgagatctgattcagtgatgagatcggagttacattcggcggaagaaggttccggctccggatcgggatcggagagtgatgagtgagactgagtgagaagaggcggagggagtgagtggtgaagaaggtgagaggaatcgtcggtaacatc

SEQ ID NO: 13089 - DNA, 920 bp, Arabidopsis thaliana landsberg
taagttaggataatataacaacaataatactttcattttctatagttagataatacacagagatagacagggacactaacctgagcttaatcacttatttgatcataaacaaaatccattgatcttcgggaaccaaggctggtggagccacaagtgattcttcgagggtatttttttctgtgactcctccaaagacgctgctttaaatctttacatttgttccctaaagtagatatcacatattttttcctcctaattaggtctcaaaccagaattttctatattcaaacaaaaaactattggtttaaagaaaagtacaataaaaaccatccttgtttatatgacagaatgtaatatacaatacttgaatcatttgccatgccatctctttcatatagcgaggaacttttctccaatccgtgtaatttataggcaagacattaagatcatagctgaaggatcctaaccatgaactcaacaaaccacctaaatctttgataggttgtcctttcctattgaaatcaactatgacacgacgattttgaatgctccacacttgctctcttgagacattttcttctgtaatattcccatctaaatctaaaaaccagaatcatgttaactataagaacatctcatatatacaagtagtgtcttacaaatatatcattatacaaacctctaacatgaactttcaacttcccagttgctaattctgtcctaaaacgtatgttcctcgtcttttggtccattttgccgtcaaactcctaaagccttcttgactccaaaaatacttgaatatcatttctttggccttggaatcacaccaaacacttcctaaaccataagaaaacaatagcaaatatgagcgaaaatagcatgttatcaaaacccctaacttaaattttgtcttagccatg

SEQ ID NO: 13090 - DNA, 621 bp, Arabidopsis thaliana landsberg
ataattctagaaactattgatagttctcagcacacttacccatggtgaccatgcaacactttgacaagtcgcctgcattacaagcacataaaaaaaattcttacctctacaaaaatatgtatcatgattaaaacaaccaaaaatatatatgtttacgttgaagaattccataagaagccccgttgataacaccttacgttctccaatggtagaacttaaagtcggcaatataaataactgagaatgataatttagcagcacgtatcaatgatcaatatttattcctaattttaaacgataattttacataaattttacaatatttacctgggagatggagccaatgatggtaaccaacaagaatagctcagcaaagtcatttttgttgaacccaaaacgagctttcagaaaatactgcgttattacaaacatttattttggtttatttaatagtttttttttgagtaaaataaagaatgtaaaagtgtggacatgaaaaaaaccatgagagcagacccccttccactttccgagaaggtagcaaagaatgtaacaaccaatgcttgaatgagtatagtgctgtgttataaaaaaccattttcgatcattttcgaggttatg

SEQ ID NO: 13091 - DNA, 1300 bp, Arabidopsis thaliana landsberg
  unsure (1)..(1300): unsure at all n locations
tacttatagccaaatattctgaaatcctaatactcaaaacgacgaagtattaggacggattaataactgtactcgacccaagtggtcgagtgggaggtcgagtgaatagctggagtcttcttttcttccttgtgctcgagtgtctggttgagtgcgggatgaagaagactctgaagcttgccatcgagtctgtagtcgagtggttgtgatggagatacttgacttcaagctagagtagcgagatcaagtagtggtctggcgatgaaggtgaagacactcgacctcggggtcgagtgatgtgatcgagtgatggtcaggtgatgagatgaagacactcgacatcggggtcgagtgatgtggtgaagtagtgatgtcctctaaccgaccaggggggtcgagtgtgatatgtctataatttgcatgttttcagtgtccattcatcatcgttttgagtccaatttcgtattattcatcattgttttatatctttctcatcattcttgcatactttgcatgattaggatagctttgtttacatattgcatttctgagttgttttcaggtgatttggagctgtttgcgagcaaattggaagaaacgagctagaaccagaagatatactcgaccaccaggtcgtgtgcatccatcgccatactcgaccccctggtcgagtgactttggagccattcttcacagctactcgacccccaggtcgagtatcctcagctcaggccactcgatgacgccactcgaccccttggtcgagtatcacttcgccacaccacctgaccacactcggccgttcactctaccacgttactcgaccccctggtcgagtatcatcactcaccaacaccatcacttgaccggacacgcgatcacatcttcatagtctactcaaatccgcactcaaccagacaagctgagcacaaggaagagaagaggagaagaagaagtgtttgggagcggcctggacctccatcggatcacgaagcccatctcggtccattatcactctatgggccgggcgattaggttaccggcccgtctactatcattttattttgttttgtatannnnnnnnnnnnnnnnnnnnnnncggagacatctaatcgacattgagtttttgcttcagttttattttctgttttactctggctacgtggcttttgcttctgcaacctgtaattcgagatttttccaagttattcagattccgcatttgatttcatctgtcatgttgtttctatactctttatctatttacttatgcaatatacttgtttacctgcgtttatgt

SEQ ID NO: 13092 - DNA, 666 bp, Arabidopsis thaliana landsberg
ggtcgtgatctaatgtatgttagcagagcctattttaagagatgcaccaactaagatacatattgtcttgaacactaagtattcgtctttgaaagatatggtcagcttgataaagaataggtacattgataaatatataatatttgcatggtttcatatacataataatatttttatatagtccttagttactgatcaatatgggtttttataacacagcaccatactcgtccaaacattggttgttactttctttgctaccttcgcacaaagtggaatgcaatctgctttcttggttaatttcatctccacatcttaccattcttaatttttacttaaaaatatagtattaaaaagtgtaatgatttttattttatttaaataacgcagtattttctaaaagctcgttttgggttcaacaaaaatgactttgctgagctcatactgttggttaccatcattggctccatctctcaggtaaacattgaaaaagaatatgtagttttcgatgctatcggaataaattatgttcactaatacgtgctgaaatatattttctcagctctttatattgccgaaattggtttctgccataggagaacgtagggttttatcaacagggcttcttatggattctgtaaacgtaatattttctaacctttttta

SEQ ID NO: 13093 - DNA, 767 bp, Arabidopsis thaliana landsberg
acaagggtaacccagcacataaatttagaaccaacttatttcaccagagacatagtttccaagccaagaaaacagaccttctttctatagtctttcttaagcaatgcggcatcaatctttttaaacagagggagccccaatgcttcatagtgattcaaactatcaagaattcgtttcatctcatccgctgaatctgtttctattttgactaccttaacagtagaaatctccttcatgttactgacaacagttgacgatgatgctggcttagtggacgacttatcttcatgaacctttttctctgcttcttcagcaggaacagaagaatactcaaactctcctggaaactcttcgtctattacagtttcaggtttcgttggctcctccacttgtgttttttcactaacagtatcacaccattgaagaagacaaataaataaatcgttggacaagaatgcaagattcatcgagagaataactccaggccatccaagtctgactttgacacagtacattgcatacattgtcgccataagaaccaccacccgtgcgtgattcaaagagaacaaataacctgattcaaacaacaatagacattaacactagatgaaaacttcattagctttaactacaatgggaaagagacaaaaagagcaataagatataactatgacatcataaatcgttctggaaaagaaaatggacacttgcctccaactataaataatgttccagtgatccaaaaattagcgtacatccacaatatc

SEQ ID NO: 13094 - DNA, 569 bp, Arabidopsis thaliana landsberg
  unsure (1)..(569): unsure at all n locations
cacacaaaaaaaaggttatggttatctacctaattaagcccccaaataactgaataaactattttagtaaaaagaagtacgtaaaaaagtattatattccatgtcttcatcaaacctttatggaaataaaaataaaaattcagagccgtaaaatacagtaattagtaaatgttttgcgtatacatctatgataggcctgacgatgtgacagtacatgcatctccattgtcaaccgtacgattaaaactacaaagatcgacggtgattataactagaaacaaaaatgtaccctataacaagaaaaagaaaccgcttctctttctaacactcgctcaaaaatttagagaaaggaagaagaagacagatcaatggctccgacgatcaaaagaatcggaagtttccgtactcaccaaaaacactttgtcgattttttcggagacgacttgatcgtcaccgttacgccgactgcttccgttatccgcgctggattcgtagcgtcngtcctacaaccgtaatcactcggtacatcctctcgtcgttggaatcggtgttcagtggagactggatag

SEQ ID NO: 13095 - DNA, 930 bp, Arabidopsis thaliana landsberg
aacaacaacaacaatcaaattccaaaaacagagcatactaatagtataaaggaaatactgtataactcggaatgttttgtgtcgtttaccgaaagtagattgagagttgatactgatctcgtgatggaccgacccgtatttgacccgaacccgaatgccacgtggcacgcttgagctatgatccgtccttttctgtacaaccattcctccaggtcggagctccatttcaccgtcgccggaagttgttgttccgatactcattttcatcattttctttattaagagagatagagagaaaaaaacagaggaatgatgagatgaagttgatttctgaaaaagatcaagaagaagaagaagaaaaaagaaacgtctgagcaaagagaagtaaatacactttgttttgtaataaattaatgtttctgtttctggacagaactcgtggaagaagaagaaagataagaatcatataaagcagattattgttttataaaattttatacaatgagaaaaaaaagttaaagaaaagagtgacagctagtgtgattgttgttatgtatcattatcagtccatcacagatacatatatttaatataaatgttgtatcccccacatatttatttctatttctgatcaataatgacgatatattaatgtcggtgttacatttatatttatttgtcatcgatcttctgtattttataagtcgcgttctacgtttctaagcacaggtaagctaatgaaataactgaaacagaaacttgtgttacacgtcacgcctttaactccgacaaactctgcaactttaaaatctctctttcttgcagatccacattgtctagaattatcgtcggtgttgtgtgtcttcttgccaagttttgaatgatccatggaccgtaccgaccacacacgaactttctttgatcatttct

SEQ ID NO: 13096 - DNA, 827 bp, Arabidopsis thaliana landsberg
aacctttttcctatggaatatttatcacacgcaagcctgtgagttgtgactctgtaatcacttccttgttctggtaatttcagtggttaaggctctccttttttctgatgttgtcagcaaaagttagtttttcttcttctttaatgggttaattacacctaaatctctggttattaaacaatccagaaagaaaaaaagtttattccttcctctatgtatatagtttcacatgcaagcatcacttgtttgttctgacaaattgcagagttttgagttctgtttttttttttttctaatgttttgtctttaagaaagttctgtttttttttctgcaggaaagttatcaaaagttttgagagctttggatagtgaagctcaaagaactaaacaatgggcttcagagtttgtgttattgtcgtcttcttgggttgtcttcttctagtccctgagaaaacaatggctcaagaaatgaaacgtgcatcgatcgttatccaaggagctcgacgagtttgtgagaccgatgagaactttgtctgtgcgacattggactggtggcctcatgacaagtgcaactatgaccaatgtccttggggttactcttcagttatcaatatggtaatagcaaaatagtaaaggattcacctttcagtctcttcataataacaatgtccgcagttgcgataattttctgatctttccaatgttttacaggatttaacgccgtcccccttcttactaaagctattaaaggtttgcactggcatccaaaaatgttcatgccattgctttgtgtgtcttgaatctgaaatttttaaggatttggattt

SEQ ID NO: 13097 - DNA, 599 bp, Arabidopsis thaliana landsberg
agaacaacaaaggaaagtgattcaatcattcgtttctttgtttgctataaagaaaaagatctcatgaatcatataagatttcatttgttatgaaagtacttcccaacatagtttaccataaagttaaaaccctattgaaatatattatctatatttctgttttaccctttttcatatacttgtgcaatgcccacacacatattagtcatttatgtcaaaagaaataacttcataaagtgtgatcgatcgtgtcaaatatcacatgagttaatatatatagcattactcctttcacatacattaccaaaccatctctttctctttctctctctcgtgagtttttgctctatataagtatctccctgttagagttccgacgaagcaaacgaatttcacatggagaggcaaattataaacaagagaaagcgagtcttttctctccaaccaaacaagaaccctaaggcagttttcgcaagaagatacgtgagtcacttggttccagctcttaaaaagatcaacatgaacaaatcctcttcaaaaaccaacaaacaaagtttagaacaaaccgtgaaacatgaagtagacatggctttcgcatt

SEQ ID NO: 13098 - DNA, 650 bp, Arabidopsis thaliana landsberg
cctggtttatcatactatcaattactagtagtacgtgttgtcttcagaatatatatcatggcatcctctggactgggaaatggaataggcacttcgagatctgccaaaggtttaaagagctcttctagttctgtcgattggttgaccagagatttggctgagacgaggataagggacaaggtagagaccgatgatgagagagtaagtcttgcattgcttcttctttttttcatctttattcaactgttttttagcttcacttctttttcctgagcttatatatgttatggagtaggttacagtgtctgaggttttcgttacgttgcaggatagtgaaccagatattattgatggggctggtgctgaacctggtcatgtgattagaaccacactccgtggtcgaaatggtcaatcaagacaggttggatggttatggataattgtatgtgttagttggtaatgtagtttatctaactgtttctcatatagatttttttttggattcgcagacagtcagttacatatcagaacatgttgttggtactggttcctttggcatggttttccaagtgagctaatttaacataagacccatgatgttcgttctattgatttggctccattcccctgcacatttatgtttccttttg

SEQ ID NO: 13099 - DNA, 616 bp, Arabidopsis thaliana landsberg
tgtccttccttgccacaaacccaacacaccttcttttcccttgactttgatctgctttgactcttgtttctttcactactcttgtctcgtttctcagatcttcctctgtcttgaacaaacagagcgtcagagctgttcttgagcatttttccactggctccaagctctaataccttagatctgattgctcctgtgatctcatcaagagcaagagtggttttgccgtacttcaaagtatctttgagctgatcaaactgcttaggtaatgacataagcagaacaatggcttggtcttcgtccggtacagaaactttaacattctccagatcagaaatcaacttaaagaaatcattcacgttctcttcaatagtcatgctatcagacatcttatacccataaagcctttgctttaaataaatcctatttggtaaagatttagccatgaacagcttgtctaacactctgatcatacctgcagcagtcttctcctttatgaccttccttagaacgtgatttcctagactcagtatgactgtagatctagcttttcctctcttctcctttaggactttgtcttctgtttttgttagcaaagaatcagtttcagctgttgact

SEQ ID NO: 13100 - DNA, 1217 bp, Arabidopsis thaliana landsberg
  unsure (1)..(1217): unsure at all n locations
aatttaattaattaaattagtatttgactttttaatccttaaagagataaatttttttactttttaaaattttatttctaatggcatacctatgtaattacttacaaaaattaaggttacatttaaaatgtacttcccaaataatatagtaggattagtgacggaaaaaaaaacaaaattaaaactgacattttgctaaattgcattttgatattatcaattttataaaataattcatctgtagttgtacacttgtacttgatatatttattccatcaaaataatggaaaaataactttaaaataatggtttaataatgtagttgttaaacggatcccacatcggttaagaatcaaaaggctaagcaaaggagtcccacatcgcttgcgaataagaatggtacgcaaaattttcttttataaataaaggtgtccctacgataaaacgaggatttgtgaatcagactaacgatgtctttgattgaaaactcatgtctagaaccagaatccaaaacagcaacattaatctgcggtcacttcttcgtccgttacggaatctgctgtaactgcagatcgacggtagacagagactacggccgagcattcgattatctcgtccatgggttacaattaagccataaagccgttgcggttacaaagagccttactacacaactcgcttgccttaacgagagaaagcttcatctagtccttgacttggaccacacgcttctccattctattatgatttcacggctttccgaaggagagaagtatctattgggagagtcagattttagggaagatctttggacacttgacagagagatgctgataaaacttcgaccttttgttcacgagtttctgaaagaagccaacgagattttctccatgtatgtctacacgatggggaatcgtgactacgctcaggctgtgctgaaatggattgatccgaagaaagtatactttggggatagagtcattaccagagacgagagtggtttttcgaagacgcttgatcttgtgttggctgatgagtgtggagttgtgattgtggatgacactcgtcatgtttggcctgatcatgagaggaatctgctacagatanccaagtacagttacttcagagattatagtcatgataaggagtcaaaatcttacgcagaggagaagagagacgagagtaggaaccagggatcattggcgaatgttttgaaa

SEQ ID NO: 13101 - DNA, 526 bp, Arabidopsis thaliana landsberg
gctaccaacaccagccaccgcactcatcatccttctttggatcccctttggaataattctagccatgattcggatattcgttgggttcttacttccattatgggccataccttacgtctcacggatattcaacactcgattcatcgtaaaaggaaagcctccggcacaagcaaccaccggaaacccaggcgtactattcgtatgcactcatagaactctaatggatccggtcgtattatcctatgtgctcggacgtagcattccagctgttacctactctatttctcgtttatccgagatcctatctccgattccaacctttaggttaactagaattcgagatgtagatgcggagatgatcaagaaagaactgtctaatggggacttagtggtatatcccgagggaaccacttgtcgcgagccgatcttgctgagatttagcgcgcttttcgcagatttaaccgacaatattgtgcccgtggcaatgaactacagagttggattctttcatgcgactaccgctaga

SEQ ID NO: 13102 - DNA, 1058 bp, Arabidopsis thaliana landsberg
ttaaacaagatcagtttcagttcatcagagaaacaattatgtgtttgctaaaatgacacgatgtatgcgggctctgagttcttgaattcttgaacactctaaacccaaaaaggttcctcaaatattgaactcaaaatgaaaaaaaaaagtgagaatcggcctcttgtttcatttatgttggaaggcaactatgtcattgcaattactctctaggttgtaagtatgaatctcgttctaccttcttagaaatggttgttaaattatgttgctacatgttctactataagggtcatgttactgtacgtataaaaaccatatgtttgtgttacaacatgttctattatggatctttttttactaaaccaaagtacaattttttgttgtgtgttttactcagttatatcttttactctttcatcagcttacaaacttcaaaccaaaaagcattcaaaaaaaataaataaacaaatgagaccaacaaggcaacacataattagccatcatacaaattcaggctaaatttatgaaaataacaatccacatcgttgcttttaaaaattagaggtacccaccattgtaattctagcatgtgtatggttgtctaagcccaccacacatgttttcatacggtataagaagtgtcaactatctcaacaccagaattgaaccaataatatgctcatcagtgttaagcaacaatcccacaatccttcatcagaaacaaagccttcatatctatgagactggtttagaaacaaggatagatatgaaggttttgcctttatagctgatgaggaatcgtggattgtggattaactatgatgagcctagtactggtccaatcctggagttgagataggtgatactttcttctaccgtatggaaatctgtatggtgggcatacatggccagacataagcgagagaaagagagcccaatttcaggagttttctcaagaaggtgaaagctctatagagagagacagagagagatgatattttctggtgatgtgttttataaaggtgcacactgcgcgtatatatatatatatatatata

SEQ ID NO: 13103 - DNA, 616 bp, Arabidopsis thaliana landsberg
taatatgataacaagaccagagtaaagaacatcgtataccctgattctgtatttgtagactgcatatttcagaaagacctgcaacacccaccccgattataaggatccacaaaaagctccagctgagttttgtggttccaactttgcctgaacctacacattcaccagattcaaaagcagaaagtctgattaatgactccaaattaagtatggggctaggaggaaggaagatctatttcttttacctatgcaagtgtcgtgctcacgcatgtaaagcaaaccgttgctgcagctgcattcataacttccccaagtgtttttacatttacactctgggcactggcacaccgttttttctttgcactcgtccacatctaacacattcaatcaaaagaatatgattatgaatttgaatttgacgtttaacaatgatctcacttctttgattgagtacaataaaaaattccactgataattgtatctgcactaaatattctagaccgacatgcatgcatataaacaataggctaatagcatgttactagtgatgcctactaaataaatcgacatagagctctttatatatgaaagtagaccacatgcatatattttgtaa

SEQ ID NO: 13104 - DNA, 614 bp, Arabidopsis thaliana landsberg
gactaaaaaaagctactacaaaaggaactacgaatataagagataatacgataagaaacacaaaactgcttagcgaagcaactagtaaagacctgaagaggtaacaccgattccgaactgtaaagctcggacatttgcgaaattgcctcagctccaaagaattcgaatcctcatcgtcgttgccacgagcaaacctttccaaaggcccgtccacaaaatctccaagaaaaaaccgcctccagcttctccgtggactacgcaaaaacggaatatcaagttactttggttactttatgttagtaatatcaaattaaatgctaatttgagttatctgtgataagatatacgacgaatcaatttacttatcgtcaattaagtttgaaatgaaagtttgtgaacgaaatagtttatgctactttaatattatgtcaaaattttgagttccggctctaacatcttcatgtagggttttgttttttacacctcaaacatactcaataacatgttggtaatagaaaactagacctctagactacaaaaatgtttataatgcaagagaatgaccatatatatctattttgaaaacaaagtgttttgactttggtgaacaagaa

SEQ ID NO: 13105 - DNA, 1304 bp, Arabidopsis thaliana landsberg
  unsure (1)..(1304): unsure at all n locations
ggactgataattccagacacaagaactcagtcttttgagttaagctgatggagtctggctctgactgttgatcaatccgtactgtacaagaacaagaatataatgacaaatcaattcacaagcttaaatctttggtactaagttcaaaatcaaacgaccaagaaacttagttttttttaccttctctctgattcgggacctccagttgtcaatattgcttgatccagaagatgtctggtttgcctgtggaccaagaagattgtctcgtgctctactcatcggattctcaaaatcatcttcatcatcaagctctgattgccgaggtgaaaccatagctctcaaaaccaaagccagtagcaatgacagtaactgaaacacatactcacatatgaatactgagtgaatcatgaatgaactcaaaggcaccaaaatcagttagttagttacctggatggctaccacaacaattccgacccatttgcaaatatcgatgttttcttcgatgaaagctcgaagactattgagttctccagttggatcataaggaagatcctacagaaacaaaagtccagaccgttaaacagaacacacaagacacaagcttcaactgtaaaaaaaaaaacacctcaccttctcccagtgacggtcaatcactatgaatcccactagagctgcttcgataatgattaaaagagttttgagaattgaatactaagacctatcaaggattaaacatcacaactgaatagtattaacagaaacatataggtgcagtctatatataaaaggatacgaaacacaagcaacatccattgatagcttcagctgcaatgaaaccaatgatagtgacaatgcagaccaaaatcccaatcgccatgaaacatgagataaacctacattgaatttggaaccaaaccaaatcaattgattggaacattccttcaaacatcaaacagtgtcttagcttaacgctttgtcctttttaaacaagattagtcaaactaggcatagatttgaatcgaaaaccataaaaatggaaaaaatttcaatacnnnnnnnnnnnnnnnnnnaaagaacggagattgaaacccgaatctccaccaccagacccgagaacgatacccgatacgaaatcgatcggattcttcaaagaatcagaaacactgcatgatctcaattattgaattagagaacgaataatatgaatccggtgatgaagctgccggatgctgagacggaggagggtcaacgcgaacgtgatgattgctttgatcgagcatccaaatcgagtngattttgattga

SEQ ID NO: 13106 - DNA, 538 bp, Arabidopsis thaliana landsberg
tgtactcataaagtaccttgtttctcaattatcgtatagtagggggtacaagcgggtgagagagggatgagctcccaagtctcttatgcatgggtggacctaaagactacgggactgtagtcctgtctaagccttggacatcgtggtggctcatgcctgggctctgacctccgggtcttctggtcttgtcaagcgtgtgtcttctgtcttctgccttccatttggcccctcattgttgcagtcgacatcctccttttataggccagggaggggatcggccatcggtaacttcctcgagaaggagctattatgcccgggtaaaactaagcattttacctaggtgatgttgcgttggtcgtatgcgtcttggttgcccggtcatatatgatcgtgcttatttatgatgggtggcgtgggggtgaagagtctttggtgccatcattgtcgtcctagcgttgtatcgacccctagctaccatagcctgggtctcagcatagctcgtcgtgttgcggagtctgtatgcagtcagcactgaggc

SEQ ID NO: 13107 - DNA, 1964 bp, Arabidopsis thaliana landsberg
  unsure (1)..(1964): unsure at all n locations
acatcctgttccagctttattatgttttcatctttcacgtttatttttcgtttagtctaatgtgtttggtttttggtaatctctactaattcgaatccgagtctaatcacacgtaattaagaccccttgtaattattcacatgttagtaaatcctattttaccagtttctgatacaactccttctcttacatagtagccaaaagataataaaaaattggatagttctatctgtatacaattacgttgaatagagatttgtatcataaaatatattaataattggcgcaatcaagctttactttgattcaaatcaacaaaaatacctttaatcattacatatactaatgactatacaaaaaataattctaaaaaataactacaattactcaaaatggattataactacttttcctgttaaaacatcatctccatatggataagagtttatggatagttaaacgggatagcacagatttgcgggttagcaagatatgctaattatagactattttaacacaataaataaacatatatacttatatttggtacatcaagaactaggtttacagaaacggaaaaacatttatgggaatatcttacaataagaaatgaaatattttacaaaaacatggaaactagttacagatcatacattaattaacaacttaaattcaaaaataaaatttctcattgtattagatcaacttgtcctgttatgacccaatctaaaaaaacaactacacgtactcaaaatggattagaactactttacctgtttaaaaaacatctccatatggatatggctntatggataagcaaacggtattgcagaggattgcgatacaatcaggatataaaatcagcaaaaactaattataagaactgaaatattntacaaanaacagagcaactagttntacaataagaaatgaaatattttataaaaacatggaaactagttatagatcatacatttattaacaacttaaattcaaaaataaaatttctcattgtattagatcaacttgtcctattatgacccaatctaaaaaaaacaactacacgtactcaaaatggattagaactactttacctgtttaaaaaacatctccatatggatatggctttatggataagcaaacggtattgcagaggattgcgatacaatcaggatataaaatcagcaataactaattataagaactgaaatattttacaaaaaacatagcaactagttttacaataagaactgaaatattttacaaaaacatggcaactagttatagatcatacatttattaacaacttaaattcaaaaatacaatttctcattggattagatcaacttgtcctgttttgccccaatctaaaaaaaaaaaactacaagtactcaaaatggattagactactttacctgttaaaaaaacatctccatatggatacgtctttatggataagtaaacggtattgcagaggtttgcgataccatcaggatatgtttcagcaataactaattataagatctgaaatattttacaaaaaacatagcaactagttttacaaaaagaactgaaatattttacaaaaacatagcaactagttaaagatcacacatataataacatctaaaattcgaaaacacaatttctcaaattggattagaacaacttgtcctgttatgacccaatcctttgcagcgtgagcacctgttctgctgcgtccttcctgtcttaggtttctacgtttaccatgttaaccaacatgttgcattagtttggttagtttttcaaaagcttagacaatgtacgagatttacaaaatatttatctaaccttatattcccctgttgatggtattcttgctaccttaggcctccctgatggtctccgagtatatggtggaagcatggaacggtgtgggagctcttcgggtatgtcttcttctttgccatttgcttcaggga

SEQ ID NO: 13108 - DNA, 722 bp, Arabidopsis thaliana landsberg
aacctcgaccggagttttttcctccgggaacaaaacaccgtcaatcccttgaaccgaaatccgtccatcggtataattatcaggatcgaacaaataagccgaaccatcaccatgaccgaacttaaccgaaccatctgcctcctgagcctctactttatgaggaaaccggagtgaatcgtaccggattttcccaaaccggcgtacagaattgtacatactctcttcggtttggtattccggtatgatgtgataatacataatttgctctggagctcccggttcgctcaattggtccgtggtcaatttagccatagcttcgtcgtttggtgctaaaacggttaaaacgtaaccttccgacacgagccgacccatctcggtggctaaagaagtgagattaacgagaatatctgccatttcattgtagccaccgtaatgaagaagcgtgtggataaaatctttaacttgagcctctccgttgaaatggtggcgtggcccacccggtcctggtgccggagccggagctagtgacggaccaggtgacattgcgtcgtaaaccggaagaaccggtggagctccggcgggaattggtgctggctttttcttgagacggtgagttcttggatcaacctccggtgctccttccggtaatacggcagcgattgaacggagactacgaaagggggatgaactcttctttgaacagaacgtggggattaaaagaa

SEQ ID NO: 13109 - DNA, 421 bp, Arabidopsis thaliana landsberg
  unsure (1)..(421): unsure at all n locations
tagatgatccttcataatgagtcggacacagactgatgtgatgacgcgattgaagaaaaacctgcaggaacagctggagctgagacatatacctctgctacactactttactggaacggaactaaactaagatgagaaagacagttactcataagtttcggatgaaagagcgccagattgtaagtantgcagttcgaatccacgggaacacacaaggagtagacggtgacganaccgaattcgaagatctaacaaagtactggagaatcgtaggaggattgctatacatatgtgcatgacgangtcacgtgatgtaccgaacttcttcgctactccggtacatgtccttaggcagtattccacagtatgaagaaggtacacgagtgttgacatcngtcaacggaacgttaaatcttggagt

SEQ ID NO: 13110 - DNA, 1812 bp, Arabidopsis thaliana landsberg
ctcaaaaattccacggcggacccatcaatgcccacctgaattcttcaaccgggtcaaatcccaaccattttttaaaggcccaacggccatggttcgtgggtccatatttagatggatcaatattgcttctcggcaataaatctaattccatgactataggtaaaaaatcaaattaaatctaatccaaattatttttaaaaaaaactcttaataatctacaccaatttatttccagataaatactattttttaactctaaaactaagatcatgacaacctttttttttcccaaataactctaaaatttttaattagcacatctacatcttaattcttaacagattctatagtattattgttactaattagaaattacaatgattattttcgacaaatgtaaaccttattgatatataacataatgcaataattcacaataaaacactaagaatattgttcatcaccggtccaagtcaccttaactttgggaccagttggaccatcttgaccccgcatttctaaaggaattttgttgatgagttttcgcaaacctttccgtaaaaagatgggcaaaatctttgcgacagagttgagaaatatgtcaatcctgtaatggactcgaggtccccatttcctaaaataattcagccacggtggctcaaccacgccaggtcccgcaatcacttcatatccaatacctgcgtcaaagcatttgtcgcttcttgccatgtcgttccttattccacttttgccgccaccttgcaacacgactccaggtttggagaacattgcatgcccatgaagagacgaatatactactggtttgtttccaccttgcatgaactctagatcgcatgcatccactaaagttcctccactgtgttcagaaaagtaaacacgccataactcaccattgaagttgctgatgcgtaatgtaacgtgttcccagtctccaacatgctcgccaatatttcctagcgacaggctcttgataaacaaaaattttaaatgtgcatttccgttatagggaaagaatagccatactacaatatctgtgaaagtagctccaaacattggtttgatgtgtagatacaccttagtgctctctaaatctcccctcttaaccttttctctagcctttttatcgactagataatctaaccaaaacaagtcatcattgcaacctccttgtggaaggtttgaaccatttggatgtatcgggaccgggatggattcgtttcctttcttgtgtagcaaggcaccgttagcgaaaacccaattgacagaggaaggaaggaaatcttcttttgggtgtaaatatatccaaggagaatacgttttaaacaaaactctagtttgattttcgcttggcatgcttgacaagtcaaattttgtattttttaagcagaataaaggagggggatgaggaagaaagtttagttgtttgcagctgaatgtccctgtgaacacacctgtcgcctctactcctctcgtggccggtctcaaactagaaatagtcatatcttttatcctccatacccatgtatcggcttcactctgttctgtgagatcagatcgaacacagcttatagaattttgtcccaaagagggcttcataggagaagtagtgacatatagaccaaccgcatgatatccattaggacataggggctgccaaaaatatgcaggcccctcttgtttgataagcaatgttgtagtgtttccaacttcagtgtagtcgactggtggtcttaaattacttcccgatacgtcttttgcaacaagaatccaaccaaaaagctgtcggttgtt

SEQ ID NO: 13111 - DNA, 783 bp, Arabidopsis thaliana landsberg
agttacttcgtcctacatacataatgagttagatgacaaaaactagtataaagaacaattggttctcgatcataatctaagattgattcgtgattcttttaatcaaatttgattctcaaacactattatttttataattttaaaattgcgtatttgaaaagaaaaaattctttaatagaaattaaaaaaagtaatataagataatatttaataacaaacactcaaatttaattttcaccaaaatatatcaaataaacccacgcgtagtgtaacaccccactcccacattatagggcctaattgttttggaaataatgataaagccattaaagcctaattgaacccaagaataaaatgttaagggttgttgtgtttttatgttgtgagcatatatatacatatgtatatatctccttcttggaggagccgtcaaagtgaagcctgaactgaaaccctaaaagcagcaacaataacataacaaaagctttgtcggtcattggtgacgagtttgtgagccatcgttgtagagttggtgagatgacatgttgtttgacgttatggtgatcgatcatctgtaaatgagaagatgagttgggcacagccacaagagaggagcataccatatcgtaatgatgggaaaagagcgagagtgagaaagaaagaggacgtatgaggaagaagaagatcactgagatggaggccgaggagtcttcagggaggagatgagatcatcacagtcaagtgctaggagagcacaagtaggattatgggtgtgagtaaagc

SEQ ID NO: 13112 - DNA, 1010 bp, Arabidopsis thaliana landsberg
agtcgatagtactttttaacaatgattttgaaaactaaaactttatgttattggagtattatcatggattggagtttttgtcaatgaattaacatggagatgtggattaggttaggttcatcgagatatgtatttaaagttgaaacatgtgttttattattattcttttcatttatttatttttttctttctgtcggtcagtattgaaacatgtgtttagtttcatttgtcctctcaggcctcagcatgtctagtctaggagtattctttatgtttcaaaatataagaggttttagttaaatatgcagattaagaaatatccatttttaaaaaaattcaaccattcataaaaatatcatataatataaataattataaaatattaaattaatctatagttatgttacacaatttacataaatcacgctgtcatgagtagtctttttcatgtatcatctattgacaaaataacaatttatctagttgttcttttgaaaactagctattactacatatattatacattttttttctcataagtggtttaacgctgacaaaaaaaatctattgtaagatggtaaccactgaaagccatcttaggttcaatacttaaataaatgatatgatattaaaaatattgatcatggaccgatgtttatcgatttgagccaatgcaatcaatacgaagagagacttttattccttattctttagaaatgtatatctcattttatgactaattaaataataactgatgatcagtatgtggttctatacatttaaaaatcttctaattcagtttttttttttttttggtatcgatgttaagtatttataccgttttcaagtttgagacagaatacagagtaaacaatcgcagcagaatagagaatataacagaggatttggagaaagactacgactaaaggaactacgaatgcaagagataacacgatatgaaacacacagcgaagcatctagtataggcttgaagaggaaacaccgtttct

SEQ ID NO: 13113 - DNA, 781 bp, Arabidopsis thaliana landsberg
aaattggtgcctttgttgtcaaactaggaaaggaagtgtctaattcggtgatgctgattgtatttgaggaatgcattttctggtcttgtgaaagactgtttcaagtttacttatcgtggatattgttcttttctcttttgattagtgtacaggagtactcaaacttggtggggaaattggctgtgtgcttagtgaaggcccgtggctattagttggcatgccaaatcttgtcaaggcaagtattcagtatgattcctcttaaagagtacttttctttgactgtcacaatagatatcaaggaacccctttcattcttagatgcttatggggttatgtctcattgttgttgatacaggcgtggaatattgaaaccaatgctgaccagagtctaagtggacctgttggccaagtctattctcttgttgtgggtactgatctgctctttgctggaacacaggtaaatttccaagttttcttttcttgctgagatctctgcgaaatagtcggcttttggttaaataagtgacaagttctttacattctgtgcaggatggctctattttggcatggagatataatgctgccactaactgttttgaaccagcagcgtcactgacgggccatacacttgcagttgttaccttatatgttggggcaaacagactttattcaggttccatggacaaaactataaaagtaagtactagtattatctatcatacttgaattgaaaactctcactatttttttctttctttgagctaatctttttggtttacta

SEQ ID NO: 13114 - DNA, 884 bp, Arabidopsis thaliana landsberg
tgcggtttctttcgagattttaaccgaaaggtaaagagttatggaccttcacacgtgaaaccgtctccttggataccttcaggacatttgcagccagtagacacagagtcctaatttttcataaataacaaagagatgattgaaatgaaacaagaaacgttgaaaaggaggaatcggtttataataagagaaacactaaactgagcaagcagagaaagttaagccatttcttgtgtcagaccagcaacctccattgttcatagtacacctcgcaggcccataagctgcaaagctcaatcacaaaccagagactattcaagaaaccggtctcaacatttgagagctatgttgtgtgaaatgtgtgaacaacttacgtgtacatgaagtgtacccgtctcctttatattgaacaccttttacaaccggacactcgcagagtcttcctctgaatgtgtcctgatcaaacaaaaaagattcaagtattataggactagaaaatatctctctagattttcacattttctctagttttcaaaacaattccaaacaaattgatactgatattcaatatagtggtgagatatgatgtggtaagctcggttttacgacatacttgacaagcagtgatgttgcttttgtatcctgccagcaaccaccattgttttcaaggcactcatttgtctctagacctgtgtttaagcaaatggcaggctccgatgttacattaaaaccagcgcatatcgcctttaaaaccgcggatctctccaatctcccttcacaattgcaaccaataacaacagaaacttcagcattttcataaagagagagtgaaactgaaaaaatatcaaggaccaaacctcgatattgagcgttattgatgacta

SEQ ID NO: 13115 - DNA, 1049 bp, Arabidopsis thaliana landsberg
ctccacaccttcattctcattcaacgacccaaagtccttaacccactctggcttattctcagcttcctcccaaagcaatctcgagttcaacacaaacccagaccactctagtttttgaggcaaaaccgcagcaacatcatctatataaactgcactcttccccgcatatggcaatgtattgaaaatatgccaaccaatcaactgatcagttgagttacaagcaggaccctgtacaggtaacgaagagctctcctcttcttcctctttctccatctctttcctcttttccatcgacaaaaccatctcttccgcatttcctgaatgagccaatatcccaacagaaacagtaccaaaccacttcacattctgaatctcatcaaacaactccatactatgcatattactatcatccgcaaacatcacaatcccatcaagcttctcttccctcacaactctaaacacacaacaaaacaagaacatcactttcagctctagatgcatattattcaaaacaaaacagatcaaagcatataaaagcaaagaaattgacttgcctcaaagcttgaagtctcataaagacttctaatttactacgatcttcccaagtattaggcattctctgatcaatcccaacatgaatggtcctaagtcctgattttgcaataatcaaaccggtctcattagtagcaccaccagcttcaacaacgatccaaaccagatcataaggaacaagcatcaaagaatgcatcacaccagtcaaatgcaaagcttgaaaagtcctcacataagtcggtgtcacagctataaccatcttactacttttcatcccaaagatcatcttttgctctttttgaactctcccaatgatctgatgagctttcattacctcaacgggattcggatgcggccaaggacggatccggatcccgtgtcttccaacaacaacacgagagcttttcgtcgccgtcgccaccaccgtcgttccgttagctccgggatcgagagtacggccgattgtgtgaacatcgaggtgtttcacaggtaagtca

SEQ ID NO: 13116 - DNA, 613 bp, Arabidopsis thaliana landsberg
aaatttgtttgaattcataaactacaacttttgaaatttaatcgacatgtttaagtcataaacaagtgctcgggggaatggaaaagaggttgtgaagggacacaagatgtttcttaacaatcaaacaatgatgcaaacggttgaattaagcaccatcctggaacatgcatgaaacttacagatatggctattccacttccgtgacacactaatcactttattcagtaacaacataattgtcataacttcggttcaaaattcattagataattaatgtgtattaataacaattccagttagttcactaaacatcctaatcctaattagttcactaaacatcctaatccttgtaaccccatgaccgttcctaccagtgggccccacgtcctctttcggacctgtggatccatcctgtccgacggtcggtccgctacttctgggaggttttaaagacttgtttaacgatcttacaaatactcacatgatctttcttcaggttttgttctcactttccggaatatcacccatcctgatattatttcatcccaagcacgtttaattgtggagttttctcagaacgtttaaccaaaaaaataagcacactttggtggca

SEQ ID NO: 13117 - DNA, 866 bp, Arabidopsis thaliana landsberg
caccacaatcattattgtaattttttttcttcatttaacttttgaacagtcactttaaaatttcgttaaaattactttaataattacttaaaatatgtctgcttatatatttttaataagtttgatatatatgaaaatgaataacaaaataatatatatataccttcataaatatttttgggcatctatatgtgagatataaataataagtattaagataaacattttttgtgttaaaacactacatattttatcacaaatttatattttaataatgactaatatatataataatttggataaatatatatgtataagtaaatgaatagtgccctagactaaatatttctctagatccgccactgtttgtagaggtaagaaacaaagttatgacaatcaatcttacttaataaaagtaattggtggcatatgcatgtaaaaagttagaaacagttttcttagcatggaaaaaatgtatcaaataacagatagacttattaaaataagagtatcattggtaggctacatgtttaactaagttaaaattttaaaacccaactcttttataaataagtactaataaggtataacttaagttgcattatactcaggctaagacaactttttagcatttttgtcaactactcaactaaatgtatgttgacagaccaaaaaagagtgtttaaaataataagaaattgattaatgaagatttgtatattacttgacaacccaacaaaccttgtcgtggattgagatgagacagcagagaaacgcccatctcttgtttcaatgcagcagccaagcgacgtaccataattcctatctacatttttttctgtacattgttttttttttgtgtgggt

SEQ ID NO: 13118 - DNA, 861 bp, Arabidopsis thaliana landsberg
tgatgatgtttgatggtgagaaagaaagttttttcatcgataagggggtcaatattaggtataaaaaaattgtttgttgctttaagagaaaataaaaaatggttcctcctattcaagggagcgacatgttatgatgataagcagagaactgtggagcatgctttctgctgttaagccagttttgtttgcttttttgatacaaacatgtttcaaaaaaacttcaaagaaatagaaaacagagagaatcatgcttccacatgatttgttttttttcttaaaatcatttaaaatttaaaaaacaccataaagaatgaaggtcagaaataaagagaacaattgactgttttatggtatttaattatgtaataaatgaaaagaggtaaaaataaaagaaaagagaaaaaggaactgaccaagactgaacatagccatgcctagacctgcatctgagagtatggagatagactttgctataagagctggcatttcaatgttccacctgcacagaccacatcaatttaattccaataaagagatctttctcaaatcttttgttacttcaatctatcagaaaaaactttcaaacatatacgcattcaaggctgaccctttatgcataaagaaagtggttaaaatagtagaccaaaaccaaagaaaagtgaaaataagacaagtttgaaacagtacttgaaggaaatgagggaccaggtgatgccgaataaactggagtaagagttgggattacgaataagtttcctccaaaccataatgagaataagtcttgtcatcacacttgttggtggcatcaccttagaataaatcgttgtgttgcttatgttgttcccaccgtccgttgccaat

SEQ ID NO: 13119 - DNA, 830 bp, Arabidopsis thaliana landsberg
ttatttgaggttactaataattattttatttattaattatttattttgaatttcattttagataatagcttttattttagtaaatatttacaaaaaatatcattaatttatatctatgtatccaaacaccaaacacaattaaattgtaagaaacaatagttgtctcggggtagcatattttttaaataatttattaagagttttacctaaaaaaacttttctaaaatggatcatatgctaaacactaacagaatcaacaacgacaaaactaaacacacccaaatgtacacaaactcattagaaactatgttagtctcattttgtatgagtctctttttaagtatgaagacaattggaggaggggttttttcgatagctcctttgattttatgtcatagtataagcccacatacttcctagatcaattgcctccacctaagctctatttgctctccctaactggttcttcaaaatctcgatgtttgcttattggttgtgaagctgatttttattcatgcctatcgcataattttttttttccaattttagttttcaaatttactacacatttatgatatacttcaacattttaccaataaccttttgataaggtttttgtttgagtttcaaggtcaattataataacttaggttatttcatttggttggaatcttattggttaaacataaatttagacactaaaatctcttttgaccaaatttctaatatgttcatgcatgtttgtctctaaatatagttaacacttcagcaaacattatttgctaaataaagaaaaaggtttccacacacagaaaaaaaaactattacat

SEQ ID NO: 13120 - DNA, 1334 bp, Arabidopsis thaliana landsberg
  unsure (1)..(1334): unsure at all n locations
cacttgtctcatcgacggtctcttgccctgatcaggatgtgacaaagcaatccaagctgcaaaactctttcagcttcatcaatgactcgtgttatnnnnnnnnnnnnnnnnntctttggatcaagcccatttagaatctcacctctttccatcaatccccaaacccaatccatcaacggtttcttaccttcttcaataggtcttctcccacacattacttcaagaaccaatatcccgtaagcaaaaacatcggtatgtgtcgatgcacgccccgtcttaaccacttcaggagccaaatagccagctgtaccaaccaccctcgtggtcctaaccggttgctcgtgtccatgaacccgagctaacccaaaatcactaagcctcggtatcatatctcggtcaagtaaaacattactagctttaatatctctatgtaaaaccttagactcccatccttcatgcaaatacaatattcctgaagctacacctttcaaaatctgaatcctctcttcgcaactaagcgtagttttcttctcatcgttttcgaatatccatcggtctaaacttccattctccatgtaatcataaaccaacatgaaactaccaacctccttcttgcaccaacctcttaaagaaactaaattccggtgctttaaccgcccaagactcgatatctccgccacaaactccctcatcccgtcgctactctcctgcgaaatccgcttaaccgcaacttccacaactcctccttgtaacaaacctttatacactttcccattcccaccaattccaatcacattcttctcatcaaaccccttagtccccgattcaatctcctcatacggaatccgatgaggccaatactccatctcccaatcctgcatcaacgctctcttcctcgccttctctagtctctttctcaccacagcaaacaaaaccaaaccaaccaaagcaacaaccaagaaacagatcaacaccaacacaaaaacaaaccatttcgctttaagaatcgagtccttaggtaaaacaaacgaaggtaaaccagtagtgatcaaactatcactcaacgagaaattcgaattactaaaactccaagctaagatcttatgactctgaaccaatctccctgtagcagcagtgaatccaacaaacatctcttcttccacaacaccagagagattcaaagacgtactaagcaaaggaatcttaggtcgaatcttaccaacaacttgcatagtaacattaactacaaaatctctataatcaatccaaacttgatagtttcttccatcgttaagcttcaatggcttaaacactactccatcatcagaccaata

SEQ ID NO: 13121 - DNA, 944 bp, Arabidopsis thaliana landsberg
agcccacgctgcttgcaacacgctaactccgacttcagctgttgaatgcgtggaccattcgtcacagagaagcgtttcttcaaggtgtcccacaaatcttttgcaacgtcacgatgtgagatgcttgagcgaagggacggatcaatggacatcttgatccaggagacgagcaaagcttgaatcgtccaccagtcgtcaagatctgcagagccctcttctggtcgagcaatcgagccgtcaagaaatccgaatttcttgcgagaacagagtgccgtcttgattccgcaagcccattcatcgtaattggatcccttgagtaagggatgagagatgacagcacctgggttatcggcggcagtaaggtcgtaaggagagattgttcttcgtgtctccatcaggttcgagatcggggtcgtcgtttcagcagtgtcggagggagtggaggtagccatcggtttccaaaagaaatcaaagagaaagaagaatagaatcgggaaaaaaaattgtcaaggctctgataccatgaacaattagagagaccaatgatagtagaagtttctgatgccttattcacaaagacgattacaagaatatatagctagaggagcgtatctagtttcctaaagagatacaattagaatcaattgagtttaaataccacaataattatatatttcattttgcaatacttttttatatagttgtacgtcatatgtttggtttctgcttgtattaaataggtttgcattatacttttatctatatatataaatgcattcgattcgcttctgtcagttatctgttttaattcgatctgaaaaattaggatttttgtaacttaaattgtggttgtttacatatttttcgtttactttgagtttctttgttttggattaactataaaattatcaaagtaaacagagcaagtttaattaggtatggta

SEQ ID NO: 13122 - DNA, 1421 bp, Arabidopsis thaliana landsberg
  unsure (1)..(1421): unsure at all n locations
aaaagatactcataaacatggcgaaagatatattaaaaatgcataaacaaaattataaatgatagtatttgttgaatccttcacaaaacaaatttcagttaaaaaatgtctaaaaattgcttaaatacaaattcgtttagacctggtcgacccaagataaaacggatcaaatcttggataatgatatcatgaaaaagtctctagtggtctcactgtattaaaaatgtctaaaaattgttgatctcactatattaaaaaatgtctaaaaattccttgaatataaatttgtttggaccggattattccaaaataaagtggatcatatcttagatgattacatcattaaaaagtctctaattgtatgttgatcctactgcactaagttaatatgacctctggcattgaaggaaaatttctggatgagcttttcttaagcatgaaaatgatatgtgtctactaaatcgatgataattcttaaacctctgttccgtttggcttgaaatcaccatcagtggaaagctaactaaatttctgaatctaaattcgaaagtaaggccttcatccgaattgatatttctgacactttggacttgttcatgatcatcatttctcttcttagcatctacatgtgtgtattccattattttaacttcacataactaaaaacacacacacaaagacactataggatttctaaaacacaagaaaaatcacgtggatactaaatgcaacaaaaaacaatgaaaacactaataaaatttaacaaaaagaatatttacaaccttgataaagtgctaaatatggagtaaatcaggtctcataatcatgcccatattttttgaacagatcagcaaaaataagaaaagcccaagcaaatcaaaaacaaaaatgactgtaaaccctcatcacttaataaaaatggtggatgaatagatcctttgtgtgatgtatcttcatataaaaaaaaaaaactgaaaatatatattttgatgataagaataattattttataacatgctaaataaaataaaaatcaatgtaaaactgtaaactactatttataagcttttcttataattcataccttatgtatatcatttcttttcaagtgagaatgaaaatggaaataaaacatagaaaaatatgccacatgtcataaagtttgtataaaatcgcttatgtagtttgaactaatttttgaattagaaacaattcataaaagtttataaaatttaatgttatttatttcctatatttatccttatgtctattgacgtcacaataatagagagcaccaaatttgattattaggtaaagttagaaaaaaaaacttatcatatgctcccttcctaatgtatcatatagagtttataaattctgaactatgaaacttcttatcttccacaagtantgatatgtgt

SEQ ID NO: 13123 - DNA, 774 bp, Arabidopsis thaliana landsberg
  unsure (1)..(774): unsure at all n locations
agaaatgtatagttagtatgattttaatgaattcaattctaggcatccttcgattatttgataatgatttcacatgggtttatatatatgtaagcattgtaactataaatgaaaacatggttaatttataaaaattattcaaaaaagttaactttgagaaaacaaagttaatgttttctgttttgattatttgggataatctcgaaaaaaatgaaaagaactgaatgtcgattctaaacgttttatttattcgctggtaaactgattccagtaactccatcaattccaatatgccctgtctcgtgaacagcttgaagctgttcacaaatgttaaaacaatagattacctatactattaaatatcacgatcataagaatttgttgattgtgtttaccttgtagaaatgtctcttacaatgcttagtcttataggttctgaaaaacttctttgaataccacgttcattgtttccgtctgagggtttctttctgagggtttccttctttgtccacaatcaggatcttcaatcctttctttgaagtgacccttgagatagcaacgtagagttgtccatgtgaaaagcatggtctaggaagatagatgccaacgttctgtaaagactgtccctgacgtttattaattgtcattgcaaacgcaacttttattagaagttttcttttatgcattttaaaagggagtttactatccgagggagatatcaatatcctgngaaggaggactttatctccaactctatcacctgtaatgatgaca

SEQ ID NO: 13124 - DNA, 658 bp, Arabidopsis thaliana landsberg
aggaatattcaaattctatttttaatgcttttgactcatcaaaattttcttaaaaacccaataatatttattcatgttaaatgttaagttaaatttttcaaccatgtactctcgaccaagaggggtaggatctttaagagtgtaattattcatgaaaattgcatgagatcaaacaactcaatcaaagttgtttcttcttcataagtctatacatgcttcgatatatatttctaaaaactacacttagtatgcaaatgttagaaaaagcatttaataaccgaatttacccttgttgtcttcttggtgggaacatttgtgttattttgcctcgaagaatttgtgtttgatcggcctctagacaacgtacctacatttaacaacagaatacaatataacatcaaactattaaaataatgtatcataagattatacatattattggttttttcattgttacggtatttattatataaatgtttaatattgatacataccatatataatttttacttcaattttctgttatatatcttaagatcaaaaatgtaaattttttttaatatatggatgtggagaaattttatttattttattttaaatataagtgtataataatttttatcgaatagaacacatatatatatatatatatatatat

SEQ ID NO: 13125 - DNA, 1083 bp, Arabidopsis thaliana landsberg
gacccgcaaacggaatattgctgctcctctggaccctttgctttttctgatgcagtggtccagatttaccatgataatgctggtgatctggtaggattggtgtctagaatttttatgtcatgctttgatctggagatgtgtttgcacttaacttatattacgcttgtttgcttggtttaggaacttgttgccaaaagtattgagtcatcagaccttaatttcacaagatatggtgacatcttctttgaggtgagtttacaactaaactttgtggacatgtccttggtgatcttttatttggacctttttcaggacctttttcttgcttatttctttcatgtttacattgatactgtactccgattcccttattcttagttaagcagaatttacttacagctgtgttgtttcaactgtcttgcaaagccttagaatcacttctttgtgtatttaatcacattgtgtatgcgtgggatacgacttcttttttctttgacaagaggggtttacgcttctagaattgtgcactgtcttctcctgtgatttctgatgtccacttgtatagaagaatacgtgttcaatctgttgaacctgtaatatctatttacctgtatattctgcagtgtaaatggttctgtagaaatattcctggatatttttcttcttcttgttattgtggttctgttttcttctattcaaggggtgtttgtgttataatttcttatgccttctactggttttgtttggtttgccctttttacttatgaattttgattgagagatcttgtgttttaaggttattttcataggaggacgcacacaacctggaacagtgaaatctgatgaaggagaacgacatacttactctgtaattgattgtgaacccaagcgtgaagccattttgccatctgttgtctacatacagaaaattctgcgtaggaagccttttctcataaagaaccttgaaaatgttactcggagattcctgcagtcactggagctttttgaggaaaatgaaaggaagaagcttgctattttcacagccacttggcctttttcccagaaggctcttcaggattaccc

SEQ ID NO: 13126 - DNA, 862 bp, Arabidopsis thaliana landsberg
agtgccctttggagttttggagtcttgcttgttccctttgttgcatgtgttgtgtccatatcatagaaagcgatgtgtgattcactaaatgataacactacaaacgtattattgtttagtttttagtctatataccatatctttatcattttaccatcagcatcaccgttattcttgaaaacgaagtttttaattgcatgcatccgtatgttgttgcttcacataatttcatcatcatcacatatacatatacacattgacatatatatagcaagagagagaatatgataaatagtatatgcttaaaagtaccttaagccaatcgggtacattactcttatacccagtcgctaatattatggagtcgaattcaatttctttcccattcagaaactttgccccgttcctcgttatttctttcacggcttgcgtcacctaatagttaatacccacaagacaaatcagttcaagtacaaacgcacgcatgcaaacttttcatatatctaaccttttagctaaaaaggtaatttactctagatggttagtattactttaagaagaagaaaaattatgaacttactttaatttgtcctgatcggattaaagaaatggcaccgacatcaagaacgggagttttaccggtgacgttctttagctcaattggtccggtcttaggtcgtcgaaggcctaaaaggtcggtattgccaacgtagaattagcaagaagtaggagaaatttgtccaccagctttagaggaaaccatttcagtagtgtcatggctattccaaatgttgatagaccaaaaaagtctcttggtaatacatgtacatgcgtcattaattagacccggttactacttata

SEQ ID NO: 13127 - DNA, 1263 bp, Arabidopsis thaliana landsberg
ctcgctcgacagccaacgaggtggggcctcgtgcttggccatgtctgccccgcctcctcctccatcggcggggaaggtgacgggacagacccagatgttgctcttccgctatgtggggaagatgtcgtcgattccgccgccggcgagcgggctgacggccgccattgtcgtcgtcgcgcggcggaagaaggagtatcatgtcgtagctaccgtcgagggacatgaactcaagactcccgaaacgaagggtcgtttcgggccagagaggttgctggagactacccatctggagcttgacgggaagctgttcatcaacacgcagcaggcccctacctggcgcgccaactgtcggcgtttcgaccccgggtgtccctggaccgacgagtaaattgtcgtcgcgtgtcccagcccagatgggtcggcgcaagacggagcacgaaggggggaaaagccagagggagacaggcgtaaaagggggaaacccgcggccttcgtgttgccctgcgcccaggtcgggtgcgcttgcagtagggggttacaagtgtccgcgtgggagagagagagggagagcgagacacttatgcgtgccgtcccgttcctcccgcgcggccaaccttctcgtacgagggccctggaccttccttttataggcgtaaggagagggtccaggtgtacaatgggagatgtagcagtgtgctaacgtgtctagaagagaggagctagtgccctaagtacatgccgtcgtggcagccggagaggttttggcaccctgttcatgtggtgtcgtggctgtcagaggagagctggagccttgcggaaggacagctgtcggggctgtcgagtccttgctgacgtcctcttgcttctgtaagggggctgagagccgtcgtcgtcacagggcatgcggggctgagagcacctagaggggggggtgaataggtgatcctgcgaaaacttaaacttatagccacaaaaacttgttaagggttagcacagtttatgccaagtggctagagaggagtcaaaacacaataaccacaagaatccaatcacagagatgacacagtggttatcccgtggttcggccaagtacaaaacttgcctactccacgttgtggcgtcccaacggacgagagttgcactcaactcctctcaagtgatccaatgatcaacttgaataccacggtgtttttctttcctttgatcttttcccgtttgcgaggaatctccacaacttgggggatcctctagagtcgacctgca

SEQ ID NO: 13128 - DNA, 2334 bp, Arabidopsis thaliana landsberg
cccatttatattctcacttcatagcatcgacaaataattatttctctatttcatttaattttattctaattccatattgagttgttctctgatatctttgtataaaattcctaactaaacaattgtttaaagaacaaaaataatcattttattaaacggggaaaataagtaagaataattaactcagccctccactattagattattgtattgatactactaatctgatcattccaaattcttttttcctctgtgcatgatctcatgaaatcaattccctctagattcgttcatttgtttactgaaaaattcactatataaaataaaacagtatattccaaaaaatgaacattgcgaaaaatgagcataattaatagggaattaatattgggtcctattaactctctccaatgatagaactatttaatttgttattcataactaaaatggcagccgaaaataataccaagagtcattttcaaaaccttttaaaaatcttattatttgtatttttaaaaaatcttagctcgtatagcttaaacattagattcaccatcatagcttctgtgttctttgcttattacctcacgttatatttatataaaaaaaaaaatcctatgtcctcggaaaatctgctgacttcttattgcaacagtggcacttcttttcctctatataaaaccctaagctactacttcacactttattctcatttctccatatctctctctctctctctttcgctctctcaatctcctctgtttttagttattagaggaattagaaaacagagaatatgacggtgcttgtggaggttagagaatacgacccaagtaaagacttagccactgtagaagatgttgaacggcggtgcgaagttggcccagccggaaaactttctctcttcaccgatctcttaggtgaccctatttgccgtgtccgacattcaccttcttacctcatgctggtaaattactcataacacctaaatcttaaaatatataaaaaaatacagttttctaaatttaagttgttaaccaaaatatattttatcactaattagtgagaaatctaatttcttttcataatgacgaagcaaatatacgaattattaacttacaaaaaaaagattgtgtttgtttatcaaaataaaaaatggtttgttttgttttgttttatagttaattaattaaaaaatgataagtgaaacgacattcaccttcttgcctcatgctggttacaactcaaaccgaagatattaaaaacccgtttctttatataaagagcaattacatgaactaactaacccaaaagctttattattattattattattattattattattattttattgttattattattgttaactattaaataaaaagaaggttttaacttaaaattggaatttgtaataggtggctgagattggtccgaaagagaagaaagagttagttggaatgattcggggatgtatcaaaaccgttacatgtggtatcaccaccaaaagacttgatttaactcataacaaatcccaaaacgatgtcgttattaccaaaccactttacactaaactcgcttacattttgggtctccgcgtttctcctacacaccggtacgttttaattaaatctcacgcatttaacgctaaaccaatcacgagtaattaacgcttaaactaatcacgtttttttttaattaattacttcaggagacaagggatagggtttaagctcgtgaaggctatggaagattggtttagtcaaaacggggctgaatattcctattttgcaactgaaaacgacaatcacgcttccgtcaatcttttcaccggaaaatgtggttacgccgagtttcgtacaccgtctattttggttacccggtttacgcacaccgggtcaacatttctcgtcgggttaccgtaattaagcttgaaccgtctgatgctgagttactataccggcttcggtttagcacaaccgagtttttccctcgcgacattgactctgttttgaataacaaactctcgttaggaacattcgtcgcggttccacgtggcagttgttacggatccgggtctaggtcatggcccggttcggctaagttcttggagtatcctccggactcgtgggcggtcttaagcgtgtgcaattgtaaagactcgtttagattacaagttcccggcgcgtcgagattgaggcgcgtggtttcaaaagccacgcgcatggttgataaaactctcccgtttttgaaaataccgtcgatcccggcggttatccgaccgttaaaaatgcattttatgtacggaatcggcggagaaggaccacgcgc

SEQ ID NO: 13129 - DNA, 972 bp, Arabidopsis thaliana landsberg
ggagcatcaatggaaatcctcagaacctacatcgcacaagaccgactatgatacttagggaaaccactgtggtgaacctgacacactagatactaaggtctttacgcagggcaaaggcgatagagaacaacacttcatactctggatcgaccccgctagtgatttccacacttactctatcctgtggaacccacaacgcactatgtaagcccaactttataaaaaataaaccacacttactcttttgaatctaatcttgtttgttttttctatctattcagattctccgtggatggaactcccataagagaattcaagaacatggaatcttaaggaactctgtttcctaagaaccagccaatgagaatgtactctagtctatggaacgctgaagaatgggccacaaggggtggtctcgtcaaaaccgactggtctaaagctcccttcactgcttcctaccagtggcttcaacgaagaagcttgcgtcgtgatcaacggctcagtcttcatgccctaacgtgtcaggacaagggagtactggttcgtggttgtctcaggagctagactcgacgggtcaagaacagatgagatgggtacagagtaactacatgatctacaattactgtacggacgctaaaaggttccctcaaggtcttccacgcgagtgcttagctgcgtaaagcttttaaacaaatgatccaatgccatgaaaagtaatactattctttgattcatcttataaagtatctgatgtttggttacatctgttttttatttattctatgtaagtatatttgtattcgaatattgatcaatcactttaccaaaataaaacatttgaacgtacgatcagaaaagtttaagtcatagacctcaacgaaaagtaaaaacgaaaaagttactgtacattattttctgagattcttattattgattcctaagcataattaagctataaattatatgctatta

SEQ ID NO: 13130 - DNA, 154 bp, Arabidopsis thaliana landsberg
tcgctaacacctagtgctcaggatcgtgtgattctattaagaacttgagtatttgagcacttggatatatctatactatgacgtgatatgttacttggactcccacacctccaaatcgccggttgtgtggtcattatagcggacttccggaact

SEQ ID NO: 13131 - DNA, 641 bp, Arabidopsis thaliana landsberg
gcgacaccgtcgaaacccgtggtgagaaaccccccattgtcctcactgtttatttttccgatgtgtgtgatgtccgatgaactaccgccaacaaaattgtgtgttttcgcagccagtggtcgacgtcgcgcttcacgctttgcccgttcgatgaaacgccgagccttgtggacagcccatgtgactagtctcgattcatccaggttgttcacttggtattttgtggattaatctatttaagctttggtcgatgttgtgcatgtgtgtgtatatgtgtaaaaattgtattggtatggattgaagtttgtggcaaaagaaaatggattagaaagagggctcagatgttttaagtttcgataagagtgtatttgatgtatggtttgcggtgaggataatttttaaaatgcaggttatgttgtgagagatgcatcgataagtgtttatgtgaaaagtgtaattgttttatgcatgtgatcagtggttgggatagtcgatgcgaatgaggagtatgactaatcctgttggagttacttgtgcggttgatgtcttgtgcgtaatatggggacacatatgtgcgtgtgtgccgtggtgtattatagtggtggtggcgtaagatatttgattgaggtgcgcgggtatat

SEQ ID NO: 13132 - DNA, 626 bp, Arabidopsis thaliana landsberg
acagcatagtgactctaacaggattaatcatactcctcattcgcctcgactatcccaatcatcgatcacatgcataaaacaatacacttttcacgtagacacctatcgatgcattccccaacacataatccgcattttaaaaatttatcctcacagcaaaccacacatcaaacacattattaccgaaacttaaaaacatctgagccctctttctaacttgttttctttcgccacaaacttcaatccataccaatacaatttttacacatatacacacatgcacaacatcgaccaaagctcaaatagattaatccacaaaataccaagtgaacaacctggacgaaacgagattagtcacatgggctgcccacaaggctcggcgtttcgtcgaacggacaaggcgcgaccggcagatcgacaggttgctgcgataacacaagagttcatgaatttggcatatcttcgaacaccacggacacaaaaacagtaaggatagcggagtgtctcactgggggtcggcgacgtcgcgagcggggctgccacggagcgtggcttgctgcgtattttgacaaacagctggtgggcacacggagaatagcgaggaagggggctcctatttggggagg

SEQ ID NO: 13133 - DNA, 868 bp, Arabidopsis thaliana landsberg
ccttttaacttttattgttaaaaaataaaattgggcataaaatcttctttctcacctaatttgccctaattatatgccagcttgcgtaggaaactatatattgtacgtagtcgattaagtgaagatatcaagggatgatacttatatacccttaccttagtagtctctcataaaacaaaacccaacccttcataatcggtagccacattccacatatctccgtggaaaccatgcacagaggattcaaaagtaagatttctctctatctcttgctcaaaatttgtttgtgtatgggcatgttccttttttttgttgacaggtgagagctagctagcgatccaaaaaaaatatatgtatctatattgcttggagtacaaggtggtagagagcatcttgattaggtttttttacttcaaaaactttcttttactacttaatttatatgtatggtaatccatatctccgtttctatatatagtgccaggggtcaaacgtgtgagagttcttaagatgttaagtcacatttgtttatggtcactggataatttcaccatcaaatttgttggtaatctcggaaaacatcacacaagaaccggagctcatcagggttcttcaagctttgcgattgaaggatcacaacgttctcttagcacagcctgatcataataatgtccaagcggcagctgtaactcacacgtctgtaagctcatcgatatggcgttcgagaagcctacttgatcgaggaatccttatcaaacaaagcggaaactcacaacatgatgagactcgtgctagtagcggatgctgacacgctgttgagaataagctcgccagatgcgtaagaagccacaggagcgtaagaagcgga

SEQ ID NO: 13134 - DNA, 744 bp, Arabidopsis thaliana landsberg
tggccgcttctttgagagagaagcaaagtgttcacgaggaccaccatccatgaacggcactaaatcctctagcaaattctcagggtcaaccattccggtccacattctcattctttgaccagtggttggatcaattacaagcaccacgggaatagattcgagcttgtagtatgtgcaaacctttcttccttccgtggtatcatcatagacctagtaacagaaaaggcaggattttaaccaattctgtaaagagaatttcagattaagcaagcggaagtttaagggggaagttctatatcaaacctgccagaagatgaagttggctttgatagtctgagaaacagcatcattcgcccaagtatctcgatttagctatgagaaagaaacacaaaaagttgggatgtgagtggatgtacagttccattttaccgatcagaactgaaacaaaacaccaaatggaagagaagataaaccgatccagttttcattcctaactaacccaaaccgaaacacacaaggacgcgataagaccgctgtttccaagaaaaggcctttaaatagaaggtataacttctgaaaaaacaaatctcaaccgaaacagaaattaaaacgacaaaaaattgacctaaaacctaaccaaaaatgagactgcgcacccctagatgtgactatcatcaaaggtagagttttaaaagacatccataaaaaaaagggaaataatagagagtaaccctatgagagctg

SEQ ID NO: 13135 - DNA, 3136 bp, Arabidopsis thaliana landsberg
  unsure (1)..(3136): unsure at all n locations
cattttttatgtaatttgcagattcatgctaggaaaggggagagaaacttgttgagcgggcttcaaaatcatttgctgactaaacaaaacaaggatatgtcaaacaccaatcttctttgtatcatttacattggctatgcatatattacggcaagttaaatcgtttgtatgtaagcaagcattagatatttttgtcaagggttaaattttgtttaactagaagttattgtttggtttggttcagtttggttaaaatgttcataactaataatattgccatagctctctataactgtgtgttagtttctccggcgacttgctcaggtttcagctaaaaaagggatggacaaaaaagctaaccgaaccaaatcaaaccgattataccataactaaaccggataaatcttaaaaaaaatattcagttatcgtactttaaaactcgaacaaacaaaatttgaattgaataaaactggattattacattaccaaaaaaaccccgcggcttggcgcaggttacgccctagtcaattctaaaacttaaccatcctatagaatacaaatcccacaaccattctatcccatctttaaaaattctaagtcactactcacacaacatgctcaaaaacataatcgccaataaaaaaagtagattgcataagtaaagagataaagagtagagaaacaaggtgatagacgaaatcaaatgcggaatttgaatagcttggaaaaatctcaaattacaagtttgtagagcaagcggcgcagtgatagagtaaactaggtaaaacataaatgaaaactgaagcaaaaactggatgtttcgggacacaacccttaaagacttatctatataaaaggaagtaaaacgataagagatgggccgagaatccaatcgatcggcccatagagtgatagtgggccaagcaaggccttgtgatcgagtgaaactccaggcagcttccaaatacttcttcttctcttcttctcttccttattttcagcttgtcatgttgagtgcagtttgagaagactctgaagctgcgatcgagtgcatggtcgagtggtgatgctgggttgtgactgccgatactcgacctcagggtcgagtgttgtgatcgagtggcaggtcgtgtgatgatcgagtggtgtgtgatataaccctctttttaccgttttaaaactatgttttagatgtaggattttaagtctttttgttatttctaaagtcttttatagttctttcaggtattctatggagagggacaacaatgaagatgaggagacattttgaagcaanagctgaagaaagcaagccaaaggacgaattcactttcagatcaagtcgagagtgtcgatcggcagccttttggtatcgaccgacaccagttgtggcccagaaaagtctatgacggtttagagttcgaagatatggaaatttgccccagcagactgttttattttcattaatagtcattgcacgttttaggtcatatatattttaaggtcaatgtttagacctaacaagcgttatctaagaagttcttttctagcaacaagttgttctttaagctattcatatccatgttttcagagtttcatcaaagatttcaataacagtgaagagatcttttctaactattttctctctattgatttcgtttatgccttcttattcatacatgttgaatgtgggatccatcacgtctaantaaattgcttgttaggtttagggtttctcattagggttatagacgatttagtagattgcccccttgctaggttatctgtaggattcttcatcttcagttgttcttattgctagttctagagtagctaattagaacttgattccagataatagatatacccaccataggtatttgttttcagaactattatttgatgagcctcgtttataggtgtgtaataagaatctgcatatatactaaggtgaacttatcgaacttgtttagcatgcatgtttaggaataagatttcacggcacgccactgggaatcttagctctaggcatagtgagtttcacggaacgccaccagttattctgatgttagagtttgagtttaagaacggttcgataacaacctagctatttctagatctactaatcatctatctcctgagaataccctaagcatgacgcttttattattttgttttcacaactcacaatctgctattgcttgcttttgtttctttttattttctttactatattacttaacttaattcgataatcaacagtctattgcgtgatccgagaactttgtgaattcgatccctaagtgctgccaatgacctctttatttgagagagtagtcttaagattaatttgacctacatcaaataattccttcaacatccaacatcaatatcaatgatttgccatcgaatcctgctaaaaaaaagagatagtgaactatcatccagatcaacgagacgaggtaagacacaaatatcttgatagaagttcatgtcaaccttatggtcatacgtttaagaaaacaatgatgagtaatgctctgaggcgatttgaccctgcttggtttgaaaaatatggttattggcttgagtatagcagatcaaaggagagctttttgtttatgttgctacttatttaacgatgacgtacgaaagcaaggtgggagtaatgtgtttgtgaaagaagggttttgtagatggaataattaagcatgagagattaggcacccatgtgggtaaacccaacagttctcataattatgctattgagaaatgtgttaatttgatgaatcaaggtcaatctattgtgcatgcgttgtttaagcaggatgatgtgatgaagaaagagtatcacattcctttaaatacttcgattgatgcttctagatatttgttgcgacaagggatagcttttcatggtcatgatgagtcagaagagtctgccaataaaggaaattatttcggaactcgtgaaatacacatgagaacataatgatgctttaggcaaagcttttttgaataatgttccaaaaaataacatggagaattcttccacagattaaaaagagatggtaaaatttttacttaagaagtagtgaaattttgttattgaaaaatttgaccttggctgttcttg

SEQ ID NO: 13136 - DNA, 895 bp, Arabidopsis thaliana landsberg
gctctctcttgtcgccgctattatgtcttttacttactcgttcattggcatcggcctcgcccttggcaaaatcataggtatagatattactttttctttgttgattttgattttgagtcaacttcacttattataaaatcatttctgagatgggggtagaccatcatataactttgtttttgtcttttttgaaatgaagagaatcgaaaaattgagggaagtataaggggaataccagcagaaaacagaggtgaaaaagtatggatagtgttccaagctcttgggaacattgccttttcatatcctttctcaatcatacttcttgagattcaggtaaataattttaccttcatgcataatgactccaagtaagattaattaacacattaattaaatagtactcttagagatcaagaaacctttttttacgcgtgttaaatgaaaattaaggacaggacacattgagatcaccaccggcagagaagcaaacgatgaagaaagcctcgacggttgcggtattcatccaaacattcttcttcttctgttgtggatgttttgggtacgcggcctttggagataccacccctggaaatctcttgaccggtttcggcttctatgagccattctggctagtcgatttcgccaacgcttgcattgttcttcatttagttggtggatatcaggtatcttagaaaccccttgcccatctaaccaacatactcgttgatttttatgttttcgttcacattttagaaaacaaactaccattctagtattttagacaaaatatttttggttactatgtgttattttaacgtttgcgtttacgattcacaaaaaaattgtttaaaataccaaaagagggtttaaggtgatatattacatgttctaaagc

SEQ ID NO: 13137 - DNA, 825 bp, Arabidopsis thaliana landsberg
gaaccgcatctctgaacaactactatattatccgcacttaaccttcccggaataaagctcgattggtctggccctatcaacttactcataaccggcttcaaccactccaccatagttttagtgatagtcttaaacaagacattacacaaactaatcggtctaaattgagtaatcttctccggtttaaccactttgggaataagaacaacaagtgcatcattcgtatgcagcggaagatcaccggaattaaagaagtccatagaaaacttaacaattgatgcaccaacgacttcccatcaatgttgatagaacacaggttaaaaaccatcggcgccaggagacttgtacttccccatgtttctaatcgccttctccacttctactccggagaaaggcttatctagatgaaagcaatcttcgcgggttagactgacataacctgcctgcggtaacttctcaaccactgcatccacatcatcaagggaatacaagcgtctgtaatactcgatcgccatttgttctaactcacgagtctctgtcacccatatatcctcattattcttaagcatctcaatgcggtttcttctccgacgaataacagtagaagtatggaagtagctggtattcctgcccctagcgctatccacttctctctagacttctggaaccaaatcaactcttcttgttccagaactacatcgaactcctttaaaagggaagcctctgattctaacaaagcatccgtgggagcactatccagctggtcttggatctttgttatctcactaattaactcatccttcctctttttcacatctccaaaca

SEQ ID NO: 13138 - DNA, 1364 bp, Arabidopsis thaliana landsberg
ctgtgataggatcctggaacaaattgtttcaattagacagacaggttctgtggctgcttatgttattgaatttgaggatttgtctgcacaggtgacggggttagacagaactcatttggagaagattttctataatggtttgaaacaggagatgaaagaggtgttgaagatgaaagaacttcaaggtttgccaaatcagaaagcggcggtgttacgaatggaatcaagttctttttgtcacatgattggagaacgttatgccaaaggagtggtgcataaaccatatgtgagtcgagctgtggctccggtggttcacaattgtcaagtggtgttacctggaccagcagctcaagaacgtcagttagtatctccgaggcaaggtcatacagctgaagagttggatgctatgaggagtaagggtatctgtttcaagtgtaagggtaagtattttagaggacatgcttgccctcttaaagagttacagattcttatcgtggtgaatgggttggagttagaggtgttggaagaagagtttgcgcagggagtggagattattgaagaagtggcacctgtgttgtgttgtttatctatgaattcttatctaggtagacactctccacagaccactaagatgcaggctactttggggaaaggttgtgtggttgttttgatcgattctagagcttcacatttttgttattccacggattgcagctgctcataagttgaagttgtcacaggatactggtatggaagtaatgctatgaactggggtgtctgttcatggttcaggcattggcagagaggtgaaatttgctttgggtggtgtggaatttcagagtgactttatggtgttggatttgggtggtgtggatgtgatattaggcatcgcttggttggaaactttgggtacttgtgaagttgacttgaagtcacggtatggcagtttatgtataaggggaaacaagttactttgcagggtgatccatcattacattatccagctttgtcccttaaaaaaatggatgtttctccctcccaattggtgcttccaaagaaggttcagttggaggctgatgcagggcagatggatccggctgtttcagcaaatctttcagcttttgagtctgtgtttgaggttcctgttggattacctccagtccgcggaatggagcattcgattactctgttgccaggggtgtaatctataacggtgagaccttatagatacccgcattcgacaaaggaagtgactggaaagatggtagctgatatgttagcatctggaattattcacacagtactagtcatttttcaagtctttgtcttgtgggtgagaagaagacatgtcttggagatctgtg

SEQ ID NO: 13139 - DNA, 1072 bp, Arabidopsis thaliana landsberg
gacatctagagagataatcatatagagaaagagagatctccagagaatattcattgtagggaaaaaaacagtctgtctttcataattgctctttctataaatcttctctcttgtgttcttacctttcttctaaaaccattctctctctctttaacacttcatcactttttacggaaaatttcttattttcaccacctgagccatctctattttcgtcaaaacttctcaacttttgtgccaaaacgtcatttcttctgagggaataaacacaaaagaacaattttcccggaaaatcatggagatttccactgctctaatgattctttcggccatcacggcgtatttcttatggctcacattcatatctcgttgtcttaaaggtccacgtgtttggcccatattgggtagtctccctggtcttatagagaactgcgagcgaatgcacgactggatctccgacaacctccgtgcttgctccggtacgtatcagacatgcatctgcgccattccgtttctagctaagaaacaaggtctcgtcactgtcacttgcgatccaagaaacctcgagcatattctcaagaatcgtttcgataattaccctaaaagtccaacgtggcaagccgttttccatgatcttctcggccaaggtatctttaactccgacggtgacacgtggctttttcagcgtaagaccgccgccttggagtttaccacaaggacactccgtcaagccatggctcgttgggttaatagagcgatcaaacttaggtttctgcctattcttgaaaatactcggctcggctctgagccgattgatcttcaagatttgcttcttcggcttacatttgataatatctgcggcttaactttcgggaaagacccgcggacttgtgcaccgggtctaccggtgaacacattcgcggtggctttcgatcgagccacggatgttcgctacaaaggtttatattgccggagatattatggaagttcaagagatggctccgactcggcttagaagtcagcttaacaagaagcttggtccaggtagataattatttgtctgagattatta

SEQ ID NO: 13140 - DNA, 998 bp, Arabidopsis thaliana landsberg
attataattgttgttgttattcgaattgatctcctccattgacgccgttgtgaagctacattgtcccgtttgcaattgccgttctgattccaactccgaacatattccgttctttttgaatacccgacacaatgcatacgagtcctgcagcaaaccatttatattttcaatcttagaatgtttaaatatacttgaataaatatcttctggtattcattcgagtatatgaaagtcataagtaaataaaagaacatgcatgcatgagtatgagtgataaaaaaaaaaaagaacatgaatatttgtcttatataatgaacaattaatgaataagatatagcttttcttgaagaaaaaaataattctatatagcttttgtcttcggcgcagtaaagatccaaagcgaaaccctaagcttttgtcagcttacagcaagaaacgaatatgtatcattaaatcagggtaatcttaaaaagtatatgaaaattcacacatatctttctattaacgtatatactataagaaatggagaaatctcaagttggttactttttttgttgttgttgtttagtagccatgcatctctacgtaattatcttttttgtttctatataagttacaatttgatcatattagtaactatatatttactaattactatcatttggtaaatagatatcgagtgatgaaagaacgatcagttacctggagcgaagagggatcgtcacaatccttatcatcgagacgatactcatgcataacccaatccgtacggatcccttgaggagctcttcctttataataaaccaaagtctttttcatcccaatcgctctgctttgacttgtcactctccgatctttgccggtcgatttcagtaccacctctcgttgctcggttcgtcctagacccgttcggatacttccggtcacgtggcccaaaaaaataccactccggatctctacttggtagaacgacttctctacagtgttatttatcgatc

SEQ ID NO: 13141 - DNA, 613 bp, Arabidopsis thaliana landsberg
gcaggtcgactctagaggatcccctgcttcatcggctatctcgcggccgcccttcatccaaacatcggaataaaatttcccacccatcagagtagcttcggctgaaggttcctttgtatcgtctatggagaaggtatcttctgcatgggctacaactttaacatgttcacagccagttttctccaaaactgctgcaacccctcgggcaccggcgaagacgcaaaaatccccacggtcagtaagtatttcttcaaaaacttcagcttctttgccgatccattcaacaagtcctttgggatcatctcgaataaatttttgctccgatgtgtatgcacccacctttgcaaaactgtctttcagtttctttgcgcaatccaaggatttctcataacatctctctttggattcacgaagctcatccacattcttttgcaatcttgaacttgtccattcgcttatttcttgctttgctttcgcaacttcaaaatcttcattcattttggcaagctttttctttaggccttcaacttcggctttatgagcttcggattgtgcattaaattttgcttcgctgctctttagcctatccaataaggaaagtagtattttatgt

SEQ ID NO: 13142 - DNA, 667 bp, Arabidopsis thaliana landsberg
  unsure (1)..(667): unsure at all n locations
caggtcgactctagaggatccccccctttatccagatatcggaatagaacttcccgcccatcaaaatagcttcggttgaaggttccttcgtatcgtctacggagagggtgtctttgtgcctgggctgcagacttaacatgttcacagccagtcttctccaaaactgctgcaacccctcgggcaccggcgaaggcacaaaaatctccatggtcactgagtatttcttcaaaagctttgaccccttcgccgatccattgaataactccttcgggatctcctcggataaatctttgctccgatgagtatgcacccacctttgcaaagctatctttaagtttcttcgcacaattcatggatactttgtagcatttttgtaacacccctagtgttactggcactaaaattttagcatgatttcatatgcattgacatttcattttgttgtcacacctagaatgcattcactaggtaaaatttcaaaacatgtgtgatgtggtgacttgaagtgtgcttaacctagggtagggtaaccaaccctgggattagggcatataagtaatagtaagccaaaatgagtaaaactcaaaagcattagaaatgttccaagatacaaatttggtgacntttgtggccaaaacactagtgtgcgaaaccctaaaagagccct

SEQ ID NO: 13143 - DNA, 535 bp, Arabidopsis thaliana landsberg
  unsure (1)..(535): unsure at all n locations
tgctcagctactactgtaagtgttggaggcattagcttcagaggtggtccactgcggttatgggcaagtgggtttgctgccgggtggtcaaagtcgaactctttctctggtaagaagagtttccaggctagaacagagacaggcttatcgtagaagtaagagtttgccagctttatttcggactgtgttgggttgtttccaatgaaaaaggggtacattagaacctgtgcaacaacnnnnnnnnnnnnnnnnnnnnnnnnnnnnnnnnnnnnnntccgagctacatagtctgctatgttcccaccacagctcaccccgagaagaacacatctgttttaacatcatatgaagcaacaggttgagacacagaagttgatgtgagattgcaatcaatggaagataagctatcttagttcatctaactagttgtccaaagaatcctgactttgtaccaagttactcctagatcaacataaaactattcttaagatcttatatgccgaaataagtttaaattccaggaagcaatctctgc

SEQ ID NO: 13144 - DNA, 652 bp, Arabidopsis thaliana landsberg
tgctcggctggacggctcggtgccctcggcgcggtagagagagacacgagggggaaggagagccagggaacggcgggcgcacgcagggacggttgcgcaggatcggtcgtccggcttcctggcagcggcgcgacgagccggacgattgggggcagggcgggcggctcggcggtggggaaggggagggaggtagagggccggcggctggaggaggggccggcggcgaagggagggaggaggccggcgcgctggctgtgtggaggccggcgcggcggctacagtggagggaaaacccctggcggctgtggctgctcggggagaggaaaaaactagacctagctgataccatgttagaataggaacccataccctaaacaggggttgggagtgatattaatagagtgagtaactgggccaggcccattacacaggggtataacggtcattacaaggggaataacacaaaccctagacgggtagtctaacaccccccgcagtcacaactctatcctgtacagatgttgagactggatcggaagtctaaaaagacactcgacggtaaccccttggtgaagatgtcggcgaactaaagcgtggtggggacgctgagaacgcggacgtcaccggcagcgacacgctcgcggacgaagtg

SEQ ID NO: 13145 - DNA, 926 bp, Arabidopsis thaliana landsberg
  unsure (1)..(926): unsure at all n locations
ctctcacccgcagctataaaaccaacccttttcctctactgtttcactattcgactgccttcttccgcatctgttttggtttctctctaatttctcgatctctccgcccaactatgtctnnnnnnnnnnnnnnnnnnnnnngtaagatctcgatctctacctctctgaagttctttattcgtgtttagattcgtgtattggattcgattcgatatccttagatttgattcttattagcgtgtttaatcgtctagaactagttgattcgtgaacttagcttgtttcgaaagctgaaatgaatctgttgatgattcctaggttaaaaactagcgtagatctgattattttctcatcggtttctatacggatctaatcagtattcacgatctggaactttttctgttgttgttctcttatagtgattgattgatttatgcgtttttccatttttaaaacttatgcagatgagttgatcgccaacgctgcctacatcggcacacctggaaaaggtattttggctgctgatgagtccactggtaccatcggaaagcgtcttgcgagcatcaacgtcgagaacgttgagaccaacagacgtaacctccgtgagcttctcttcaccgcccctggtgctcttccatgcctcagcggtgtcatccttttcgaagagactctgtaccaaaagagttccgatggtatgaacttgatcaatactaatacttaatgttttactctgtatgtggttttgtgttttgtatcttattaatgaagatgttttcgttgtccaggtaagcttttcgttgatatcttgaaggaaggaggagttcttccaggtatcaaggttgacaagggtaccgttgaactagctggaacagaaggtgagaccaccactcaaggtcttaacggtctcattcacaattcattnaaag

SEQ ID NO: 13146 - DNA, 549 bp, Arabidopsis thaliana landsberg
gatctaggccctgaaacttgctctatcagatgctttgatggtgatcaccatggtacagtgactgaataagatcacaggttcagcccccctcaacgtcggtgatctcgcgcctggattcacgctagcgtcgcgattcacgcccggtcgaacgcagatcattaagggtagaattaggtgtcttgtgtgctcttgatgcttctcgaccaggccaattgagctaaaacacataggatcaccgagaacgcctcagttcatctgtagttcgtgctatcaccatggacagagagattaggagctagagctttgcaattaattgagggattatgatcattaagggtagaattaggtgtcagtcgcaccggagcaccggtcattgcgttttctggccggtataggctcgccggagccgctgctccgccatccacagtcaatttgtgaaggaatagaaaagggagggaccttgatgcaaatgtcagtgacacagtagaatagtgcgcaggactcatcattagttattgtggcagaacacccgaattatccagcttaagt

SEQ ID NO: 13147 - DNA, 758 bp, Arabidopsis thaliana landsberg
gtttcaagaaaaaatatttgtgttatttggtaccgatcaaaagtatacatttctattgtttttttacgtcttattcatattatacttttgagtttgagtaagaaacaacatggaatgtttatttgtacaagaggatttagtactgaaatacagattcctagttaaccaaaagaaaaaaagagagtagataaactgattcctaccagtattattaacttatgaaacaaatgaaaatgatttagccaatattattaatttattaaaaatttattaaaaatattattttgtttattaagtttaaataaatatttatatatattattaatataatattttgttttgccattctgcatatccattcaacatattttaaacataattttattgtacagtttttcattctgcaaatttttattctacggatttttattatgtaacttatatcattatgatattatgatattatgcgatgtttatcaatgagagcataaaactggtgtctataaggccttcgttaatatgggccgtgtgcaaatacattcttaatcgaatcaaaagaggttcatctcgatgacacatgttattatagacttataccccccacctattattgtttagcttctatttctttttcttccatctacgaaactgaacaatgattagaagatgagaccgtcgacgagattgaggactatggtccagatcggttgtctgtcgatgtgcaactagaaccggttcttgcggcctggagaatcaag

SEQ ID NO: 13148 - DNA, 835 bp, Arabidopsis thaliana landsberg
cttttaatcgtcaaggggaaaaagttaattttccggttatttttaattaaaaaaagaaaaaaaactggcatgtcaaagtaaacaaactaatatagatgtactatagtgttgatatgagcgtttgacttttaaacacaacttgcactaatatagatttttactaatcgatttactttatttaattaacaagtagcattaatgtaattagagtctatagaggaacaactacattgatctattcttcacaaaaccaaagtgctattacgaaaaatattaactagcagtctagcattatctccatctccgctaactgcaacagccatgagtttgaggttagaaaaacatgagcattatgtagatctcgtcaaacaacgtgatggcttggaatgcgatgtttgcgatcgatcgtatggtgatggcttctattgctctgaatgtaaatttacagttcacaggaaatgcgcggttgtgtttttgttaaaagatatattcgaccatccttctcatgttggacattatcttaagctcctcacaaccggagctcccgaccacaccgaccgaaaatgccatctctgtggtaaaaataccaagcgcattctttaccattgctccatttgcaaactcaatttggatattgattgcatctttgattactttagtgatcagcaagcccatctgaatttttcttggcaccaccatcctctacactttattagttttcgtcttcacttgcagtgcgacgtttgttatatgttccgcagaaaaggttacttttgctttcagtgcaagttggtagttcataaggaatgcgtctcaaaaattgaatcagcagtga

SEQ ID NO: 13149 - DNA, 1218 bp, Arabidopsis thaliana landsberg
  unsure (1)..(1218): unsure at all n locations
tttacctgtttcaagtcatcatcataatcttcgatgttgaaattgatatccgcttctactccacggaatttaatagcagctctatcatatgctctattaaataaaacaaaattaaaattaatttttataaatttcttccggtatttttaaaaaaataaataaataacaactcaatatagagagagtcaaagagagaaaaataccgagctgctgcatgagcagtgtcaaatccacctattcagagattataataaattaaaattatgatgacatttttcaacaccaaaatacaaaaaaaaacatgaggaaaataaaattacctaagtaaacttgtttcccacannnnnnnnnnnnnnnnnnnacaaacaaaaaaaaacttaaatttataatctaaagtacgatcgattaacgaaattaaaaatatgagattattaccaaatatgagattcccatcttccggtacgccggtaaaacgtaacacctctatactgagaacttcttgatcttggtccacgccgactctttttcaacggctgtgccggctccactacggcagcggcaacgttggtagctttacccgcggacgatccggtggctagatccgactgacaaaacttaacaccaaaccagtgagcccgaggaaagccagaagcaacaccaccgccgttagaatccatctcagggaagaactgatgggtgacaagtgggttattgggtctgacccggttaagttcatcgtcatcggatccatcttcgataacaacagctgaagagctagaattagagaaagatccaacccgtttacttggtgaagaataacaaaactcttcagattcttcttctctttgtgtttggtgtggtgcgtcgtttagatcccacattttttttgtttttttttggtttcttgattttgatctttgaaggttcaaacttcaatcctctggtatgattctcctcaaggttagaagctaaataagagaaaccaaagagaaaagcttttggttggtagaaaataaaataaaaactttaatgaaaacaaaaaaaaaagagctaaagagagagagagaagaaaataaaataaaaatttgatagattgcttctacgaaagctttcatttttatcctttcctttatatttacttccaatgccctttctctctctctcttctcttgccactgatttttttgtaaaaatttaataaaataatattattctctc

SEQ ID NO: 13150 - DNA, 798 bp, Arabidopsis thaliana landsberg
gtcaccaaattgaactttcttgaaccagcagagaatgtaacctgttggttggaaaaagagcacccaacagaattttttatcttgtaaagttaaacttgagctagctccacaggtacaaaactagttttagacttaaccatggtaatatactcatgcatgccattcattattaacttcaaaaattgcaggtttttattacttaatatcatcatcagtatcacacacacacaaagaagcacaaaaatgagagaaacaatatctatgcagatcgtatccttacctcatcagacgaaaagacggtcttgaatgtctctgcttcctctgtttctttatcctctttcaggtccagacttggttgtgtgtcttcttttgtctcaacagcctcagattctatggtctcacactgttgtacgtctctctctaatacatgttcatgttcctctgtctcatttgagatatgatctacctcttccttaggttctagtgaagcttttgattcactaggacgttcttgaatctgcacagtgaaggataaatagtattaataaagtttcctgaaaaatgctttactagggaatgggatctttagctttaaagaattaagaaaaaacctcttctgtttttggggctatgtcctcttcctttgctctgtctacagtcacttcacgtgagatttgctctgtaccatctgagtttttgactgcttgcactggttctgcattctccttcaagctatcagattcatggactgaagtttcttcattataaacatctcaggctcttctattactatcttta

SEQ ID NO: 13151 - DNA, 1255 bp, Arabidopsis thaliana landsberg
tgttttgaagctgttcatgattagctctgtgagttcaagagtaatcaccatgtctcgcttgaagacgatccataacggacggtcttgtatcacagcgtgacggagtgttcctggtcgtggattaaccgcgtcgtggtcagatggatctgtgactacgtagtaacgaccatctcgtcctccgatagcgttacgaccgaatccgatcgcgcaattcgcgagacgctttcgtcggagatgccaattccgatcacatctccaacagtcgtctattgggtttccggtggcgcatgagaagaatcctaacctcctccgctctgtactgttctttattttcctgaaaataacaaaaagagaacagagttattaaattgttacaaattgacccgtgaagtttttattttcctgaaaataacaaaaagagaacagagttattaaactgttacaaattgacccgtgaagtttttgatttcacattaaagccctcttggagttcaaaaatcacgtggaggagaagaaggaaccatgtggtgtaataaatgtaaaccatttatacggaatcatatgatacggaccatacggaaacttttttatatcattctttttaattttattttaactttctatttttgtgatgttttaaataaatgttagaacgtaaagaatctgatatattttatggacaaaaatgtgtatacattaattacaaaattttgcgtcggtgggaaaaaaaaatagcgacgatagaggcgctttaaatggcgatcacggcgtgtctgtgtcacattcacatatagacacacaagttgtacaaaacttctggtctaaaaagaggtttaaatcaaaagagtatagaattaaacatttatgggaacattatgggtgcaatttaattatatttttggtgtttcctatgtaaattaaaagttaaggaatcacacaacgtttgactatctgaaacgttattattattatgaaagtgagatgtacataacgtatattaattgctaattaaaatatgttacatttttgcataaaaaccatatacttatataataacaaatgaggatagagagaggtcttacatatcgaccattgcagctacttcttctgggtttttaactgcgtgttcattccatgcaccgtcgtcgttaggtaacctgagaaaacataactagtatattaaaacgacgtcgtttcgaccgtataagcatcgtttcttttatcaaatctggacgacggagattgactaggaagc

SEQ ID NO: 13152 - DNA, 603 bp, Arabidopsis thaliana landsberg
  unsure (1)..(603): unsure at all n locations
gcgctggcgatcacccagtcaccgcgctagttctcccaccttgtgccgccaagggtggggatgtaggccatggctgaatccgacctcgtctggaagtagtaggcgccgaggtggtccttagccttcccagacttcaccagcatgaagaaatggcggaagatggaggtgctgggggccaccccacgaacatctcacagagttgggcgaagatggtcgcctggaggatggagtggggcatgaggtgctgaagctggaggccgagctcctccagcagcagcaggaagaaaggtgagatcggtagtgccaacccgcaggagaggtaggagacgaagagcacgaactccctggcagcgagatcaccgaggggagtggcgccggccggctccttccggcgaaccgcngcgctccatctgagcaggttgcgcaccaggttgagtgcccctcggactggaaacgctcgggatgaactagcgaggccatggagactatggcggtggaaagcaggagagcgtgaatgcaaaggggcgcgaagagctcggaggcgaaagggacatcaattgggagagaatcgaaacgtaactactgcacatggggtgaatcctt

SEQ ID NO: 13153 - DNA, 925 bp, Arabidopsis thaliana landsberg
ttacaaaaaaaaatactctaattctaaaacttggtttatgctattcatcagcacaaagttcctgtgattcataccaaaaccagcgaagtactatttctaatttcttgggatcaggcccaacaacatggaaattgcctaacagcccaaataatcagaagcccaaaagtaaaaaaaaacacaaagcgagcctatatttacactcagcgaccaatgtacatccaccacgttatatcgataatttttcatctaaattacaaaaataccacttcgttttcctcctccttcacttcctttggcggctctttttttgtcctctcttcctcttttcgtcggagctcgcgaagctctctctcctcagaaatcaaaaaccctaaaaaccctttttgtagcgatgatggtagaaccgaatcaactcgttcaacatctcgaaacttttgttgacactaatcgttcctcttctcaacaggtaccttttgatcaattttgagacttagaacaacagtttcattgattcaccaagtttaattttgttttcaggatgatagtcttaaagcaattgcttcttctttggagaatgattctttatctattacccaattggtaacaatttccactcacttgacaacttctgaatattcttccgtaggctttatttgtgttgttggcttatttctgtattgctaatgtttaggttagagagatggagatgtatttgacaacaaccgataacctcgttcgagcacgaggtatttcgattcactagcttagtttaatgagcttatcaatttgaacgcaattggacattggtgtgttcataactataggtattctcctgcttgcggagattctcgattgtttgaaagcaaagccgttgaacgatacaatagttcatacgctcgttggattcttttccgaactttagagc

SEQ ID NO: 13154 - DNA, 590 bp, Arabidopsis thaliana landsberg
  unsure (1)..(590): unsure at all n locations
caagaaccgtcaaaaataacctattgtcttcccctgttggtgaacagtacagtttttcatgactgcaatcttgtatcttagcacacgcctcacgccaacatctatctttcctttctatcgaaatcaagtaccaaaaagacccaaaaacctgtccatttttnnnnnnnnnnnnnnnnnnnnnntttgccctaacataacctaatcaagtggagcaaagaatcaaataaaataatcttttcttacgtggctagctaacatgtagaggaataggtttaaagcagcaccagcccaagcagtttcagttaccaaaccagaagttcttgttacttccttgaaaagcggatagattctcgctatcctcggaacatattggcaaaagattacccatttcagtagctcttttgctactagcgacgcgggtcgtctcatccttggaacaatagctagaacaactacctgtcattgcaaagcaaaatagtatttcatattcattagatatgcaaccaagatctttaaaagcagatttgagaaaacattgttacctgaggaatagggagaatcgaaagaagatcgattagatagtatgagcc

SEQ ID NO: 13155 - DNA, 759 bp, Arabidopsis thaliana landsberg
agcttgtccagagtaccagtggaaattagatttcttcttagattctgtacaaatctgacattcttcaataccctgatggatccaccatgagtattaactttcacagagccacttccctttgactcaactgtgtgatcatcaccaagcaagatcatagtagtctcattctccttaaactcagaaaaccaatccattctagatgtcatgtggtatgtacatccagaacctataacccacttgtcctttgcttcctgatcatacatactcaaagcttctgagtataccaatttttcagtaatcacacatgcttctccttgtccttcattctcaagctttctctttctagcatagcaatctttcttgacatgtccttctttcttgcagaaccagcaagttagacgactcttagagtttgacctgccacgtccctttccttgaccctgaatgttcttggttagaggtctgcctctttgagcagtgtagagagccgttgatgcaggtgctctaattgtttccttttgctcagacagttcacgttcaagtgactttgcagatgacaccacgtcttgaactaagagagtcttgctgctatactttagagtatgcttcaattgaatatagcttggaggcaacgagttaagaatcatgagtgcttgaacttcttcgcctacttgaatctgcaggctacctaattctgcaacaatcctcaggaattcatcagtgttttgatcaatactcaagctatcaaccatcttgaat

SEQ ID NO: 13156 - DNA, 785 bp, Arabidopsis thaliana landsberg
  unsure (1)..(785): unsure at all n locations
acatcttcatcttttcatgactaactcacttttggatccaaaaatgaaaatacaaaatggagatgaagaacagaggaacggttcttactagaatttcttaacactgtcacacattaaatctcaagccataaagcatacacataatacatctgaaaaacatcacttaaccacatgcattagaccacatgagttaacacttgagaatctgaacaaattcaaccaataattgtttttttcaatccaaagatagatcaaatcttctaggcgcgtctctctactctgtttttcttaagcgaaagaggaaacagaggaggcaaaggaagagaggatttagaaggagtgcaaataggaacatgaatcattggccttatcctcatactcgccgatctcgttctctctaatcctttcttacctctcttcccttctttctctttctcctctctcttcgctgcgtcctcaagtgaacttgatgatgacgtggacgacgacggagacaaagacgacactgtcctcgccgtcaccggcgaagaagacggattcctctgtttcttcaatctcaaaagctctttccaaagaacggtacacttgggaggacgaggagacggatcttcgtctataaaccaagtcactctgttatctctattgttaatctcctgatctttcttcttcacttccactttacgtttctctgcttcttcctcttcgttcgtcttcaaagtaatgtttttaagcttctctgagtgctttacttgccanaaaggaagcaacttaccttcggagaagag

SEQ ID NO: 13157 - DNA, 1091 bp, Arabidopsis thaliana landsberg
catatcgaaaggcacgtgaatgtataatatatagtttattacaataataataatacttctgcccataacgttgattcactttctcattgggtattgtttttgtcttctcttcttcactttgataacgcggttaaacctttattttgtgtaatgtctttgcatgccacaaatcagacagcacattggtaaatgagggtttgtcgattttaccaaggtaaaaagtatagaaagaacagtaggctaggcatgttcaatcagtttagcttaaatcaggtgggactaaaatgaaagcaaaattctaaatcgagttcgttcggttatgcagctgtcgacctttcaccaacaataaattcatcatgcaaatcatcaaaaaccacgatcggcttcgagaatgaagaagaaagcgatcaaaaatgtatttggagatcaaaaacatcacctaatagatcgaaagggctcgacggtggagccaataaagccagccgttgagaagacaaagggatttagaagtatatagttcatacacaaatcatgcctaccgcacgtacgttgggttaggttagcatcaaagctcttactgtttaattatatacatgatcaaatattacttcaagaaaatcgatggataattttgaatttaaaatactttgatgattattcagattgaaaattgtctcgtgcgtatgtcacttggtcgcttgtgttattggtagttccaaccaaatatttatgtatagcacaatcgatgtcttaagttttctatatgttttcgaagctcatcaaccatgaccccgtcaagcgactagtctattatactattgtagaggattattcgtcgataaaagttaaaaaaaacctagcctttttatgatgaaaagaaattgaaaagcacaatcatgtgactgcgttttgcgctacgggagaaatacggtgcggttcagatagtatatatagagattttgatattgttatatcactgttgcggcgcggttttggatgcagtatatatcaccattcatggctttagtttctcgatatttaaattatatttactaacgaaaaagaaaacatttatttaagaatatgagtca

SEQ ID NO: 13158 - DNA, 658 bp, Arabidopsis thaliana landsberg
aaagcaattgacaaatatgaatcaaaatatgactgaaacaagcccaattactaattgcccaaccaggaaggcccaacgcgtgtagtgacgaaagcaagctctctgttttgtaaataatctcgttcatttatgaataaggacagtccttggagaccaagcaaaaactattgcgtaaatattccatttctctggtttttttttgttttccttttacaaaacaagaaaatcttctttttttttctcctctcttctctaatttttttttgttaattcttatgagtcaagctcgagtcacactggtttaagacgcaatgttgtgcactctccaacaaagatgaacactgccgccgcaattaaagcagcgatttgcagaccgcaaagctattgttctctcctgaaaactgcgttttttcattctactcctgtcttagaacgcaaacgccgttcctcttcttcttcggacggtctcttcactacatgtgtgggttcatctagataatggatttctatcatttattaccaatctctagattttagagtgtgaatacatgttttgctttttttagggttttgactatttggcagaaatcaaatgctcagaagaagcagagaagcaagaaatttttgagggaacatcaagaagcagtgcgtcgtgctg

SEQ ID NO: 13159 - DNA, 804 bp, Arabidopsis thaliana landsberg
gatctacattcaaacggtttaaccggtggtttacccggtacacttccgaagagcttacaattcattgatttatccgataattcattaaccggttctctaccaaccggaatcggatcgttaaccgaactcacgaagctcaatctcgcgaagaatcgtttctccggcgaaatccctcgagagatatcttcctgtcggagtcttcagcttctcaacctcggcgacaatggcttcaccggagaaatccctaacgagttaggacggatcccgtctcttgcgatctctctaaatttcagctgcaaacacttcaccggagagatcccgtcgagattctctagcctcactaatctcggaaccctcgatgtctctcacaacatactcgccggaaacctaaacgtcttagctgatctacagaacctcgtctcactcaacatctccttcaacgaattctcaggcgagttaccaaatactctgtttttcaggaaacttccactctctgttcttgaatcaaacaaagggctatttatttcgacccgacccgagaatgggatccaaacccgacaccgttcggctgtcaaagtaaccatgtcgatcctcgtagcagcaagcgtcgttcttgttctcatggcggattacactctcgtcaaagctcaacgaatcaccggcaaacaagaggagttagattcttgggaagtgactctttatcagaaactcgatttctccatcgacgacatcgtcaagaacttaacttcagctaacgtgatcggaactggaagctcctgtgtagtttacagagtcacaatcccg

SEQ ID NO: 13160 - DNA, 675 bp, Arabidopsis thaliana landsberg
agattaaaaagatccaaactttgacaagccgaaagatattattgggcgtatatcaaaacaggggatttgggaatgtggaattttgaccttgtttccaagataacccatcaagcctctcccaacgcaagacactttgaggttgttgacactgtcccttagatcactcttgacccaaacggttaagaatatcccaaccatctgcttactggccactaaacagtacttagacttgtctcttcctttgtctctgtcgtctgccacaaaggaaccagtcctcgagacaggggaatagtgatcatgacaaggagaatctgctggctcgtcttcagaggagcaatacctaaagctctggtcgtagaagtcgtcaggtgtgtcgcccagcatgaaacggtcacagacgctgaatctgcggtcaaactgctgtggcagggatgatgcagacgcgtccatcctcatgctcctgctccgatggtagaataacgagttagcaccagcggctgagtcgccttcaaagtcagagtcgagctcggcgaccgggtggggaacaggagaaggagtctggcagcttccgccgggaagactgtttaaggttcttcggatgagagagacccatttcctggcgggtccattgtcctcggtgcttaaaacgttgccggcgtttaaaggaacgatctc

SEQ ID NO: 13161 - DNA, 557 bp, Arabidopsis thaliana landsberg
tgggctaaatattctacccgtgggtatgttattgggcaaaaatcttcacccaatggataaacgggtattagaacgttccaccttcacccatactcgttaacccgtgggtataaaatacccaatataaacttagcccaagcatgaacttagactttagtcatccatctttttactatttaataaccttttaggccattatgtcatagaaggcttaacgataatttaatgaccatataacggaacatgtaatttcacccaatgtgtgttgaatggatggttaaatgatgctagaaattttgtaatggtatttagatggatatacttgatatttgtataatataatattttgatagatatttaatttttgtgggtacgagtgacccgatgggtgatctatacccacgtgggtatgggtatgggggtaaattcatacccaccaatgtatatgggtgacccggtggggttatttttttgtcgtgaatatgggtatggggtagtaatacccggtgggtatttacccattgccatctctacttgtgggcagggcaagaggggtt

SEQ ID NO: 13162 - DNA, 414 bp, Arabidopsis thaliana landsberg
tagttactacacagagaatgtacacgcatacactaatttgaccattccttgcccgttacgaaaaatttgctattttagcctttttaacgtgggctaaatgctattatgtgaccctctgtctatgacttgtgggaccatctatgtctatgatttgtgggcctaggtctaaaatagagaagttcacaactgagagtgacaaaatagcaaattccccgccggttacttgtgtgctaagcctcacggcccgcgaactccttcacagcagctgacacggtggccgatctataattttactatagagtaagtctaagttaaatatatatataaattacattatagataaaagacagggcatgatgatagtttatactactttttagctaagaactctgagggacataatcaaatttctta

SEQ ID NO: 13163 - DNA, 593 bp, Arabidopsis thaliana landsberg
accgccatgcgaccttcttcgcctccgttatcgaggcaaagagctccgcgtaaaagagatgggtccacagatcccagtgagggtcaatccccaagaaaccctcacaaaccaccgcaaagatggccgcttgcgcgatggagttggggttgaagttatgcagctccaccccgtagtagtgcaggagcgcccacatgaagcggctcgctggcactccaaacccccgctcgtggaaggggataaagctgaccatgtaccccggtggtggagttgggtcggcctcgctcgggaccatccactccggctgtggcccaccggagaggggacggagcaaaccatcggcgacaagggcctccagatcccccacgacaacggtagaggaaggccacgggtcgcgcggcggaacgatggtcaccttgtcagccatcgccgaacgaaggtggtgaaggcggaggggatgaggtgtgcggtcatcttttccctggctattctcttaggttgcggaaaccaaagcagaaggcgagcgcaaatggcagggtaaagaaccaccactggtccctcttctgggtatataaaggcccgggcgagatctattc

SEQ ID NO: 13164 - DNA, 620 bp, Arabidopsis thaliana landsberg
tgcccgccccgacctcagctggagggtgcagccgccagcccgcaccgccatacggaccttcttcacatctgtcgacgcgcgcgaagaactccatagagaagagatgggtccacaagtcccagtgggggtcaatccctagaaacccctcgcaaaccgccacaaaaatagccacctacgcgatggagttggggttgaagttatgcagctctaccccgtagtagtgcgggacgtccgcatgaagcggctcgccggcatcccaaacccccgctcatggaagggggtgaaactgaccacgtaccccggaggcggagtcgggtcggcctctctcccgggggccatccactcaggctgcggcctgccggagagaggatggagcaaaccctcggtaacgagggcctgcaaatcctccgcagtgacggtggagaaaggccatgggtcgcacggtggaatgacgatcgccttatcagccatcgccgaacgggagcggtgggagcagaggggatgaggtgcgcggttttctcttttctgtctactcccttaggttgcgaaaacaaaggcagaaggcaggcgcaaatggcagggtaagaacaactgtcggccctcttcagggtatataaagg

SEQ ID NO: 13165 - DNA, 788 bp, Arabidopsis thaliana landsberg
caatactttattaaatgtgtactatcttttgcaacttatataaaaaaataggatattggcaagaaaaaaaaaaaactcacctagataaactgcacttgatgagtcagcattcatcatccattgcacatcaccatcatcaaaaataccaaattaaaaaaatatatgaaaaagatcaagaataaaatcaagaacagtcgaaggacaaagtctggtccgaagaaaaaggagtctccgagttcatcggaatccaatctaagaccaaaaagatctaacaaattcttgttagttgttaccaacatatacgtgttaagtgtagacaaaccttgacgtcctttcttggtctgtgtatcgttccagctgttcttatcccacaaatgcgcttcgtatctcccagtccatctatgcctattattattcaacaatcggaacaattaaattacctgataaagaacgatgtcgtttatggtattatgagaggagagagaccttgtgacgcctctgtaaggggagctgcgttgaagaggagcgtttcgaggcggcgacttacgtttgcgtttggatgttaaggcaatggacgcagactcagacgcagacgctgttttatcgctgatttcatcgtcaacgattgttttcttgctcctcccagagacttttgccattaccggtgaatgagaagaataaaagattgagagacaatcctgaaaatggaattatgaaaatgagagacagatagttggaaatggttgagtatatttatattaaatccgtcacatcttttttttcgttta

SEQ ID NO: 13166 - DNA, 996 bp, Arabidopsis thaliana landsberg
atctcaaaattcattacttagtaaaaagagaatcaaccatcgcagttgaactaaaacgcttagtcagagcaatgtcactctatcaagctctccacagaggttaaaacatcagaaacaaagtcagaagtgtaaagaagaagcatcgaagatggattaattatcgccggtaacaaaacctaattaatatcccttagaaaacttttgattcatcgaagatcacaaagaagaagttcggtttgataaatcaaagtatcgtcgccaccaaaaccctaagactacgactacgaagacgaaaagagttaacgctagacatcatcacactttatcgatcaaaaagcaaaaaagaggtaaccctaagtaacctgagaagatgaaatcgacggaggtaacgccggagacggagtagaacgccgagagttccgatttggtggtggtggaagttgcggagaggagagagctctgaggaaagtaaaaaaagatggaggagatactgtaaatttccgtactcgtgaaagcttgatttttagcccttctctcttcttaaggaggaagttaactttcttctaaatgggcctgtgtaggattaattgggcctgacttggtgcgatttgagtcggttaatgggtagcatttatttcatgctgtacattgttggacttgattagtcggttaatactaaatgggtttggcccaattactttgttttcagtctgagcccaagcatgggtttctttgtttgatccaagtagttctttttttgtttgctttttttgtgtcagggacatgctatgcgattgcgaccaaccaactaaatagtgttagccattggttcatcgacaatttatggtcaatatttttgaacgattagcaagtaaaaaattgtatcactgaaagttttcaacctagcccaagtatatgtggtttagtggtaggggaagctttgggaaggatgaaactcttaaacccgagttcgattctccttgaaagttggtaagt

SEQ ID NO: 13167 - DNA, 381 bp, Arabidopsis thaliana landsberg
ccggacagtccggtgaattatagccacgccaccctcaacttttcctgagagtggcctattcgccgggtgtgccagcctgagcaccggacagtaggctggtgcaagtttggctagccttagccgaacttctccatttgaatttctctcgatttgagaagttctctagcacttagtagaacatagttagtaccaaaaccaatttactaagttctagagtcatacatttatttctccaatattgtagagtttgcaatttgttcttacaactcccaatttgcttctctttgactgtgagctcatactcacaattgtatgttagatcaaagtgatgtgttagacaccaaaacacttagaaatggcctgaggttacatttccctttc

SEQ ID NO: 13168 - DNA, 842 bp, Arabidopsis thaliana landsberg
cattgtcttcctctattcatttggctcagaggatcgatggctctcctattgatactctatttcttattttcctttgtaatttttttttttttttgatcaaatggttttgttgcacatctaaacaaaatacataacgattaacgtaagaccacaatagtacgtatttacaatgctcaatcttgtcgtctttctatattagagaaatatcacgtttcaagctattgaaatgagtgtgaaggaattacgtgcactcaacacggaaggcttaggtggcgaggtgaagcatcagcctccatgcgcctagcatttaaatcgttttatattcttcgagataggccaaaccctaaatattgaacctgtttgtaaactcttttaagttttattcttttgacatatgtaaactcttcattttgtgcccaagtatttgtgttagttaaaatcacacaaaaaatagtattaaaaacccaatttaaaaactaattcatagccaagttttcacagtaatgtataatatttcaaaaggattacagtttttgtttttccggtttgcatttgtatttagcatttattttataaaaataaagcaacttataaattacaaatgcacataaaagacatgtaaaaacaaaattcacatttagtaaatgtgaatttgttactccatgtacatttagtaaatgtaagaacaaaattcacatttaaatacaaacacacataaatattttaacgtttaacataatgtctaattactccatgttattcgactaataccaacttgatcataaaatatgtattgactaatggatatattacaaaacttatggatcaaatttttaaactgg

SEQ ID NO: 13169 - DNA, 914 bp, Arabidopsis thaliana landsberg
tttgaaatatcaaggaatgaatgctcttgtgctgtctctacgtgcatcatgttcttgagggacttcctgcgtgttgctgttattaccctttccttgacctagccaagacattgtgagtcttgatgggaaaactttcttgcttgattcttgctttggtgccttcttcttctggtcattgactgcgtgcgagaagctcctgagttcgttaagccgctccatcttttctttcttctgcttcttcttatggaaggagaggaagaataaagccaccactttggtgaccttgttccctgaagcagtagaagaagaagaagaggctttcttgagttttaaatgccggttatggcgtcggggacagctcttggtgattctgatcaggagtttcctacatggtctgagaatcttgtggtttaaggtaactaacgactcagcccccctcatctcttggttgttttcctctgtttgtagaaaaaaagagagaatgtaagaagaagaaggagacagaagcaaaggtctgggataatgtatgtgtttatgtgattatgttggcttctcttttgtaaccatgtccattgtacattgcaggtgggtttcacgttttgttgtgttaaagagtcacttagtttgtggaacaccatgattctaaattagagaagagactttctcttctctcagctgactcagtcttctctacttagtattagattttgtagccattttctcaagaagccaagtctcaaaaagtcaacaccaaattcatatattaccgtatcttgccttgtaataagatgagattaggtttaaagatctcatgtagaagtaagcccattaacattttgtattgtacaaataaatcaatcatcttcttcttgaagatttttttttatttagtttgtttttagattatttagatg

SEQ ID NO: 13170 - DNA, 1200 bp, Arabidopsis thaliana landsberg
gagggttacactgccgagtaacttgaaaacagttacagactatggcatattccagcatattctattagtacatggaaaaggcagaacaagtcactcttttctaatcaagcattctccatagctccaacggaatacttgaagaaactcaatcatatctatctgacttttgacaagcataacacttctttagtctgaatacttttcatgttactacaacataatggatgcatcattattcattaccttccaacacagagttttggtggatgcctttatctgttgagtccgccatcgaccaacatcaagcaggagcctatttcctgaaatgagaactttagtttgttgggtcaaggactcaacggttactcaagaaagcttctttatacattgaaaaatgtttttaacattcactagtaaatgtcgcggaaaaaaacactcctaaaattgaaagacaaacaaggctgaaacttttacaaagaaccacataagtaatcttcagtcatcagaactgtagtcgctggactcaggcagagacgggaccgtggcacaacagaacgcatctttgtctttgagaaggagacagcttccatcaatgttccatttgaggtccgatatggagaagcccggaaggggattgcatacacagaaagcacccgagggagtccacatgtaaaggtgagagcttccagtgcacaggaggaggcgtgtgcaggttgggtcccacacagctgctcggatgggttccttctggaccaggatggctgcaacctcgaggaggcgcatgtcccatatccacagagcagtgggcatactgtcgtttcgtgtgcatatgtactggctgtccttgctcctagctagaaggcctgcgaatatttcaaaagagtttagctttggaagttaaaaacaagaaggaaatttcgaatatccgattgcagtttccaaggttgcatttggtcgcagaagagagagcttaccgactccttcttttgggttaggcttgtccgcagatggtttctggaaaggaaaagctaccggtaattccatgacttcatacctgacacttatatagccttctgaagcatctgcacatagaaccacagaagaaagcaagataaggttacaaacaagaagaatggtacggaagtttttgctatcagaaagttttggaacggttgctaccataattgcttggcataaagt

SEQ ID NO: 13171 - DNA, 804 bp, Arabidopsis thaliana landsberg
tgtccatcgtggcgtacccagggcaacgaattgcgtgggatgcttcgctcaacgttccttatcttggttggatggtctatgaaaagagacatgtcgttgaactggttaaaattctctaaataagatacaccatcaactcctatagcttgttgttttccaggaaaaactacatgcttcggtttgtcggtgcttttcttctcattgttagaaatgatctgttcagcatagaagacctgtgcagcatgattagcaaggatccatgggtcatctttgtaacctaccttacttagatcaagaactctgaccccatagttgtctaccgtgacatgtttgtcttcaacccattgacatcggaaaaccgagatctgaaatgtaccatagtctagttcccatatgtcctcaataaagccaaaatatgtaataatctcactagtttcatcatctatggcctcgcatcgaacaccactattttgtgacatgctctttttgtccttggacttggtacaaaatgtgaatctactaatgtcataggtttgccatgttgtgacctggcgtgatggtccagatgccaaccccttgatgatttgttcttctattgtttctccacgtggaatgtccttcaccattagccatgtgttgaaccgctgcttatgttgcttcattacccaatcagccgtatgcccaggattttgctcgtgaagctcattgatgtgttgttggataaatggctctattatcgctagctgatgtaggatgctgtgatgtgcgcaagtactgtattgtaatctggtgggatgaaagatt

SEQ ID NO: 13172 - DNA, 608 bp, Arabidopsis thaliana landsberg
  unsure (1)..(608): unsure at all n locations
aaattgaagcatgtagtttttcctggaaaataacaagctataggagttgatggtgtatctaatatggaggattttaaccaattcaacgacatgtctcttttcatagaccatccaatcaagataaggaacgttgagcgaacatcccacgtaaaaagttgccctgggtacgccacgatggacaaggcagaataatagctcactagattataaacttgtcttgtaattgtttattgttaggaccatgtctactacaagtttgagatcaatatatatatttcttcaatgtcctaatttattggcggttctcaacgaccaagttgcccattgtcgtaaaagatataaaagatacttatgtaataatgcacaatggaaatccattgtaaatattttatactggcagttctctaacaaaaccgccagtggaaaactaattataccggcggttctctaacaaaaccgccagtggaaaacaatctatactggcggttctctaagaaaactgccagtggaaaactatctatactgtcggttctctaagataatcgccagtacaaaatgagcctntataactagtggcgagcgggcgcaanaaaatttcaagcccctag

SEQ ID NO: 13173 - DNA, 470 bp, Arabidopsis thaliana landsberg
ttttgattctgttacttgtgaaaatgatgataagggtatttgtaattcttcctggttttcttagattttgttcatattagtgtcaaaattgcaatccgttatttgtggtggattcggatctacggcggttcgattccaacatgtttacacactgtgtgtggtttacttactcgtggtgggcttgcgagtttgctcaccacgggattagttaggcgcttcggcgaagttcggttgggatactcgggtgttagttgtgaagaaatgttgttaaactattatttgtgggtttaatgtgtgtgttggtgataggtctctatcaaggaggtgtgtggaagataagagttgagcttccagatgcttatccttataaatctccatctgttggtttcattactaaaatttatcatcctaatgttgatgaactgtaagtctttttaaattcaatccactagatgttttggatcaattta

SEQ ID NO: 13174 - DNA, 869 bp, Arabidopsis thaliana landsberg
atcccaaaactataatatttccaagcttttgcagttagaaagttacacaatttgcaaaaaaacaattaagtcaagcctagacaaaaattacagtattgattagtttctgactatcaaacaccataaactaataagccagattaattttataactcaaaaactgatagaacattttaaggtttatatttttaattttgttgttgaatttgtagaatcacagaataactaaacaccaatttaaataattccaaaattcgaaaagtcttgtaattgataaaactttgcagaatctgaatcacatatctatattacaaattataaacaacaattaaaaaagaatttcaagaaactaatattgttgttcccttttctaatacaagaactttaaaaaaaacatgtaaatgatcaaactaataatttgcaaaaccaaaaaaaaaaaagccttaacaaaaaaataataatctcaacctctatacaatggagaccgttgttgaaatatcatcttcgagactcgagattgccggaaaaccttgatcggactcggaaaattccagcctttacccttcccggtcgccggaaccggaaccggagaaaatccaaattctccggcgaccgcaacggatcttgatttcttcataatagccggtttagtatctcctctgtttcccataaaaattctccaaaacgacgacgttttcttactcctaccatgatccaaaccggaatcaataaccgaatccggtttaatcgggatcgccatagatttcgatctccgaaacgccggttcacattcaatcaaactcgcgactcggcccaccgatccaacgccggatatatccacactgatatactccggcgaagatagagaa

SEQ ID NO: 13175 - DNA, 672 bp, Arabidopsis thaliana landsberg
tgaagcaaaaaaaagtggcacgaggttcaagattagttggaagaactagattgatgggaaacaactttcattgttgtagatgagcaaaaatgtcacgatccaaggcatcttactcgtcagtttacacgcatattctcgtccttcatcaggaccttctctgagtatacgcaagcatatgtaattcagtgcggtgcagaacataaagctcttgccttcaacatgtaacccccatccaccatcatcgttctgcaaattaagggacaaaaacagaactcatgtgaggatcttctctggtcaagcttcttctttaaaatctgctgcaagaatacaaggtgacgatagatatatcgaagaatctcttcacgatgctcagcatcaaatatctcctcgagatgtcctatgaatctgtgatatacagaaaaaaaatacatgcaggaaaattctctccgtttcattgattcctcttcattatcccttcaatttcttataatttctcgcgcaatagaaacctaaatctctaattctaacccctaagagtattcgccgatagacgtaaagtaagaatcaaagggaaaccgaagagaaaccttccaattgaagaaaggaggagaaaaggtcaattgattcttcaaggcaattgacaatcgaaggcctgcaaattcgggaggaagg

SEQ ID NO: 13176 - DNA, 873 bp, Arabidopsis thaliana landsberg
aacgcaagacgggctccttttcttccggtttcaacagagagttcgatgttgagtgttatgttgttactctcgaaatatcgggtgagggttgtgccggttattaaaacaggagaaccggatatcaagaactacgttactcaatctgcagttgttcatggtcttgaaggttgcaaaggtagagattggtttgatcacatttccgctctcccgatttctgatctcggcctcccgtttatgtcacccaatgaggtaataaaataaactttaagaagtcatgacattaggctcgtaaaccgctgaaattgaacatgttggtttcaggttattagcattgagagtgaggaacttatccttgaagcatttaaaaggatgagagacaacaacattggtggtctccctgtagttgaagggttgaataagaagattgttggtaacattagcatgagagacattagatatttgcttttacaacctgaagtcttttccaatttcaggtttatttttactcacttgtttctcattacaacttctctggtaacaatgatgactgaatgatctctttgttgatgataaagacaactcacggtgaagagtttcgcgacaaagattgctacagcgggagaggaatacggtttagcgattcctgcaataacttgtaggcctgattcgactttagggagtgttataaacagtttggcttcgaggtcggtgcatcgggtttatgtagcggctggagatgagaatgagctttatggggttataacactgagggatgtgatctcttgtttcgtatcaaaacctccaaattactttgagaactgtctcggtttctcggttaaggaaaagcttaaccgatgatctcttgtttctcag

SEQ ID NO: 13177 - DNA, 472 bp, Arabidopsis thaliana landsberg
cgggttctctacatcttcttgcgcctctactgctgacgggagggaagggagcggatctggtgatccgtggtaacgtagttctcaacaaagttcattgccgatgcgagtgcttgccagacactgacagtcggccagtgcaaaggtcagtgtggtggtgactcttcacgttcagccatggcgatcgattagtgaggaagattgacagcgagcatgtagtttctaaaaactagagttttaaaaactaggttgcttagagcaactcaaacgacctggataaatagcttgtgctccgtaaaaaaggcaaatcctcgtgcaaacggattccaacagcatcgccttcgacctcgccattgcatctcgctcgacatcgcctctccgtcgctcggcatctttggcaagcgctcggaactcgccaaatcctgactgacgcgctctcccagcctcataagccctcccggtctggttcccataa

SEQ ID NO: 13178 - DNA, 1229 bp, Arabidopsis thaliana landsberg
gcccaacaataatagtctaatagttataggtaagaaattattattatagtcatatgtgagaggggtaaactggtagtacaagcacaaatggtaaatagaatataagataaggatacgttgaaggtcactacacaatttcaaaagtttagttaaattccgaaactatccgagtcttcccatgaaattgtccaatatatgaaatcatgaccggtacaaagtgagcaacttcacaacatatattgtcgacccatgaatttgtactataccatatatagatatatatacgcacaagtacataaatataagtaaataaatatatagacgtgtgtgtgttataactgttatatataaaaatcgatattaatttgtgtattgagtacgagagtgtacgtgcacactcgcctaatgttcaaggcaatcaaagttccatacatagggacgtaaaagatcattccaaaataccaaacattaaaatctaatgttaggtgagaaaaatatatggccatgtgaggtcgttgggtcgacaagcctttcacctccaatccttttccggtttttatacttttttatttcaggaatattaaataaaatttaaatcaaaatctatttttttttctttcaaaatctataaaccattatgattagagttaattgtctggatagctccaaaaaaataaaaaaaataagatccaatatttttataagtgtttacgaaatcaagcacttttgcttatttgaaatgacgcttctactcttacttcatcatctcgagaaccatccgtgagcattgtagcacagatatgcggtgctcaaagacgagagagaagcgacaacagccaacaacatctcgtcgtgagagcaacgtctctgtttcttccaaaactcatcttctactaattttcattatccaaaaaatagaaccattcattcacaaaatccacaaactttgttgcttgggttctttttatggatcaattatgaataaaacacttaaaagtcatgtcattgttgatataggcacaaaatcatgtgtctatgcaattaggtacttatttatttgttgtattgacgatttcacccttcgtattattagcaattaatattttttttttcgtctatgtcgtcttcttcttctacacaatctttcacagaattcaattaaggaaacaattaaattacccatctaaaattacacatcaacatgtttgtagattttattaaatctttga

SEQ ID NO: 13179 - DNA, 365 bp, Arabidopsis thaliana landsberg
ttaaaaataaaattaaaaaaaattggactgtagatttaaaaataaagctataacacgattagtacgtaatcaatactttaaaaaaaattaaggatataagttagacttatagcccaaccaatcatgcactgaataacatcaattcttatcatttctacacaaattattctaaagtatttgattgaatataatttcagttaaatttgatcattattctttatcatctaaaatatatatacttttaaaaagatgaaagcatatgcatcagcagagaaaaaaaaaagatgttcaatgcgaaaggaaatatttaattttcggaattaaatttaaaaaattaaacaaatttaaataaaccccattaaagc

SEQ ID NO: 13180 - DNA, 1041 bp, Arabidopsis thaliana landsberg
  unsure (1)..(1041): unsure at all n locations
gatagttggtcgcataaacaagcctcgtatgcaacctcttccaaaggctttggatcgtatcttgacttcggcaaccaagccaagcacgcggggaatcacaacaatgtcgattcttggcccgaagagctgaaatcggattggactcagctctcaatgtcaatccctatggctccatcttcccctgttcaagataaacttgcactctcgcctttaaggttatcgcgtgagtttgaccccgcgatccacatgggattaggcgtcaacaccgagtttcttgaccccgggaaaaagacgaataactggataccaatctcctggggtaataacaactccatgggaggtccactcggcgaggtactaaacagcacgaccaatagtcccaagtttggttcctctccaacaggcgtcttgcaaaagtcgacatttggttctctttctaacagcagctcgggaagcagcaccatcattggcgataacaacaataagaacggtgatgggaaagatccgcttggcccgaccacgctgatgaatacttctgctactgctccttctctgtgaaactgaaaaaaaaaaactaaggacaattgcgaaaacaaaaacactctgtttttctctgtttctggtttttcttacttgatgcattgttgtttctgttgctgttttctttctatataaagcaagaagaaactaaaggagagatgtgtgtttttttcttcataatctttgttctttgtttttcctcttatttgttctcaatcatcaaattcttgattttattgttcctcttatagccgttgagctaaatccctggttttaagaagtctatgtacacaatgttctaaaactgaaaaatatacaaatttttacttttttcactaaccacanaattaaaaccaagtgttagtgtcacaaaatttgtgatccttgagagattttgacgagaggtttcctagttgcagacaagaggcaccattgtttgtggattggacatagaacacttcttcaaaacaactgtctccactttaggtttttttttttttt

SEQ ID NO: 13181 - DNA, 760 bp, Arabidopsis thaliana landsberg
cacaaatgtacccagagagtccagaatggggtcaaagaactgatgttgaaaattctaatggtttctcaatataccttttcatgtcaatgttcacatacagtttaagtatccaggtataggcaactacggttgtgttagtgtataaattatcttgcaaagtggagttagtttgttgatgaatggtcatagtttcaagacaactaattttgctgaactttgttatcataaaacataataagtcaagaaaacaactgattctagaggggggatacaaaggaatctcaccaaaaaaaacaccaacattgtcaataaatcttcaacattttagaatgaagagaaattgtggatataaaaggggtcttagggattggtgtcttcttcttcttcaatcttaggagccaagtagtaacgaatgtaacccatctcagcaaccttatactccacaaccactggcaactccgacgataagctgattgtcactgtgtctgacaatggagttgcctttgtgaaggaattcatgtacctcagggcaaatgagagagacactggctccttcatctctatcacaattgcatcttccggctgcaatacacaaaacaaaagcctcaatttaacatgttactccaatgaaacagccgtagaggatttgtcaacactatcataggtttatgcaaagagttagacatgttaataccttgtctacagttgtgttctgcctgagcacaatgttagccgtttcaacgacaacggagaaaaaaac

SEQ ID NO: 13182 - DNA, 781 bp, Arabidopsis thaliana landsberg
ctcgccaggagcataacaagcagcatagaatatacagttggggctgtagctcgtgctgcatcacagaaaatcttttttacacgtggagcaggtaatctttattttcctctttagataatggtcacaaggtaatgctaagtctttagtctttatgattgtttttgtcgtagagaatcgtctacttccttacacccgtgaagaagaagttgttgagtcccttagagaggctggttttggagacgtctttttcttaatatactcatggtatataaacatcaatcattttactaattaactttgtttaatgtactatttttttgtttgaacgtaattgtctaagtttctgggtatgcgaatgtgtaggcttcgacatgaacatcatttagacatcagagatatgctcaaactctggctggaactgagtctcccaatcaccaaaacttcacctctacgataaagaccgcacgttgtctagtgatttattatcgtcgtttcttttctttattatgagtaaaatagcgtgagttggtactatcaagttgtggtaactttttatttataaataaataattcttacttataagccattgatttcaaattttactaattgtaaaatttcctttctctatacaaatttttaattaaataattcaccatgttataactaacagaactaggactagattaagaatcagaacgaaagtatcaaaaagaaagtcgcatcatgaagaaatttgacattgggcgtatggttgcagattaatctattgttatattaaac

SEQ ID NO: 13183 - DNA, 623 bp, Arabidopsis thaliana landsberg
tccacattcaactgcaatttcaaaagcaacatcagcgttttgcgtttgcgttcaaatagctctataccaaatgaatttgaataaatttctcaaattgttctagcatacctttccttcatcagaatctgtgtggcgttgaggaaacacaactctcaattcattatataaatagaatctccgctctccatcatctcctgcatccaagcttttcttctgacctaatttggaggctttcttgcgtaaagggcaaataaatttaagatgaagtgcgtagcgtaagactccagactttgaacagcgttgtcctgtttctctgtacgtctcacgacaattcttgttcccacactcattcggcgaatgcaattcatccactgactcggatccttcactacctttatttgcagattttttggctttggtcggaacagaggaggccagagtaaccttttggcgcaggaaggtctgaccatgacacaagaattcgatcaaatattgaattagtacataaccgattttgggtaaattttgaaaatcgagtttgcttaaggctaatggttcatatgaaaaaatatacactaaatgtatgtaaacgcaagcaacaatcgaaatctaaaacgggatga

SEQ ID NO: 13184 - DNA, 1069 bp, Arabidopsis thaliana landsberg
atatatgaatttttggtgttttcttaacttattaacaaacaattatttgttctaaaataattaagattgtgaatagtgacctagaagactattataagaaatataattaaaattctttactttaatatgatgattattaggctattatgactttataagcaacgttatagagttgataaaatgataatgaagacaatatttttgactttgagcgttatgatgtttgtattttgagttattatagatatactatacaatgtactattatgtgtttgattttgttgttaaaacaatatttttaatatatggtttaaagtatggtgttttatattttgatctttccaacaaatatacactttctagaaaattctgaaaaatcgtctccgcaaactcattagtttctaatatcatgcaacctaattttaagtcattttctttatcttgacgtgcttgttagatttctttcttttgtgttaaattactattgttttattacaagatcaatgtaagctttttgtcacatgataaagtaattttatgtgtcatagcaaactaatcggatcatttgaaaagccaattgggcctatgtaaagctaattgttgggctctatttaccagttaaagcttgctgtgattagcataggctaggttttagatatacaaaatatctgccttttagtgcatctttttttcactgaaagatagattatagaggaagttatacaaagctaaaccgacggataacatgaaatcctctgagactaaatcccaagagtatggaaagcttaccaaaaactacttcgaatgcaaacaaagccaaatacaagaatgaaaaacataaattgaaccatggatatcaaaatctataaccagaatctaacataagagactttgcccaccatcaatccaaaatagagaaaagcttgcagtagtggctaaacgacaggaaaattctaatccatagcatcagatagcggctcctcctataacaaatgaagactacctcacagttcaaataattgcagcatcccaaccagcaagaagaaatcaaatacaactcctggaaaca

SEQ ID NO: 13185 - DNA, 917 bp, Arabidopsis thaliana landsberg
agagccccttaatcgctttcttctaaagctatcatatatctcactgtcttttttcttttcacatcacaccataactagatgaagatgagaaagaaatgaactcactggtttgataaaatcgacgcgatcaacttcgagaaaacgtggtgaaaccccagcgaaggtgtaagcattggagaaagccaactcaaaagctttgcgcatcaagaagcctccaaaaattctgccatgaatatttcgttgctgtggctggcagatcaatgagttttcatgggaagtatccttaattaggatgctgttccgatctgcaagagctggcatgtccaggaatactcgtccttctgctaataactcatttagcctctctaagtccttcaacttctcatgctcttctttaccctgtgctctcttttgttttcgtagtttgttcctctcttctgcctctttccacagaaatttttcatgctcagttttctggcacgacttggttaattggagttgacttgcctgtctgagcatcccgagccacgaatgtaaagtttgctgcaagggcaaccgacacagagaagttgttggtatctgcaaaaaacagttgttagaagaaagatatagcaaatcatgagcttcttcaacatgatgacaaggattgttgttgacagaacatctcaaagacatctcacaacgcttcaagctggtattcgcaacgatatatatttctttatttaccaccttattcaacagttcaagcatgaccgttctatttttttgagacagtgaagctcctccaaacctaacaagactcaagtgtctatggtgtatatagtttacagagaaactgatcccccccctttggagtacttgtaattgcatctacatggaagatgtaccaacccatgtaacagcaccaactatactaa

SEQ ID NO: 13186 - DNA, 941 bp, Arabidopsis thaliana landsberg
tgtcaattgagaacggaatgcagcagcggatgctatcgctaataaggctagatcttaaaatggattgtatcaaactttcacaacaccaccacaatggttggatgactatctgtatcatccctttacaatctaatgaaagtctagatgttaaaaaaaaaaccaagagaataaaaatccaacactggcccttttaaaaatactcctaaatatacataaaaccaatgcctatttttaaatatacataaaactagggtttatgtagaatttcacactcttcttaaactaaaccgcaaattcaactaatattcttacaccatattatataatattgatattttaatgaaatatacaatgaaattaaagtttaatcaaatttgcattgattttatgtttatgcatagagacatgttgtcaacacttgtgagagtccctttatcaattaaagtttaacacaaatagcatagtcccctatatcaagatcacctgcaactaaccaaattctcaccaaaatcactaacaaatgaaacaaaaaggaaaaaaaaaaaacagcatcaatgttcatcttttcccctacatacatatatataaaatctaaaataaacacaattttattacataacatattaagattatatttattggatttcttcctctcttttttaagtgtgatttactgttgtctctaattctttcatcagcaaacaccgattacgtacaaaataatacattagttatttcttactcaaaaaaatgcgccaattcaaaggcttgtctaacgtgtgtatataatagtgttacatgcttgcctatactacatataaagagagagagacttctaagattctcctccatttttgctacatttttttttctttgattaaaaacatttttactatttttcgttttttgctatttccttgaacttaaaagaagaaaaaatg

SEQ ID NO: 13187 - DNA, 611 bp, Arabidopsis thaliana landsberg
taccggctagccaacataatttctaccggcttataagccttcctccttcaaaggaagcaatcgtggtcaaatgctactgccagtgtcaaatttaggcgattttttgcgcgaccgacgtggctgtcacgtgggcccaacgtccggagtgtgtctgcgtcagtctccacaatggacggctgagatcgtccggtgtctgcgtcagtctccacaatgaacggctgagatcgcagaatggcagaacacaaaagggcaggctactattacttacttaataagtagtagagatatgttgttaactggaaaataaaaaatatgatcatatttcactaaatatctcatttaaacaagatatactaaaaccatatcaatatatatgcaactcactagcatactcttatgtgtctttcttttgacgtgctctagtttcaccttctttcatatagctaggacatctatttatacatcggttaggtgctctcactaaagtatataatgaaacacgtcatggtctagctgttcctttttcatgagataattaacaagcatttatgttaattactaggcataaccattagtccattgcatgacaaactgtatacaataatggttat

SEQ ID NO: 13188 - DNA, 623 bp, Arabidopsis thaliana landsberg
agatcatgattcgatactttatcagatttacattcctagtcacttacttacatgtcaagttacatagaaagagaagtaccgataaagtcgatgatgatacggccgttgcaggaacggccagttgggtggtggaagaaggtttctccatacggcagaaacgcggtcacaggaagatggttacgatccgagagaccaaccaagtttcctgtgtcggtaatcgaatcaccgaaactgataatcgactcgagattccggcactgcgtttgtgagctcacgattgtgacaaaaagggtagataaaaagaagctcactagagaatctagtgacgccatacgagaagtccgcggtgaaatttttatctttcggcttttagaatgttatattattttacaaaatatcttgtttcgttttttcgtaaacaacaaaagaaaggactggtgagtatatgtctcaatgattttgttgttgcttataaataatggtgggccaagactacaaaactttgtatggactagaaaattttgtatttgtatcgttttaagatgggtaggtggacttctaagttctaaccaacatctagaaaatatctacagattattttcatggttatcatgagtgataag

SEQ ID NO: 13189 - DNA, 847 bp, Arabidopsis thaliana landsberg
aggtgaagagatggccaagaagtaatctttcgaatgctattagaatcaaaagtatgttatgcgttcaatggaaaagtagattgtattagatgttaaactattcactaacgagcattttaaagcaaaatccaatctaactatccaattgcctccagaagctaactcttttcgatatcagacttttaatgtcatcagcttaatcaattttgcaattttcaaatgaaagaaacatacctgtaaccggacaatgcggttgatctgctcgcggtcaagaggtttgaaaactatatactcatcaaccctattcatgaattcaggacgaaagatagaccttgcagcattcatcactctctctttaatcgtttcataagagagctcattagcatcatcatctgtgttgttcagaataaactgcgaaccaacatttgaggtcataataatgacggtattggtgaaactcactgtacgtccttgagaatctgtgactcgcccatcgtccaagatttggagaaacacattgaagacatctccatgagctttctcaatctcatcaaatagaatgaccgaataaggccttcttctaaccgtttctgttaactgtcctccttcttcgtaaccaacatatccaggtggagctccaatgagcctagacaccgcatgcttctccatgtattcactcatgtcaattctcactaaagcttcttcagtgttgaacatataagaagcaagtgctttggctagctctgttttaccaacaccagttggtcccataaacatgaaactagctataggacggcctggatccgaaagaccagctcttgatcgttggattgcttcagctaccgca

SEQ ID NO: 13190 - DNA, 769 bp, Arabidopsis thaliana landsberg
acatcaacaatataataaacatcttcatcttctgtttgaattaatgtagtaaatgatagagaggagtgagtgaagaagttgtgaaggattaagggttttaaagggaagatagagttaaggaaattacattcattggtttgaagcttgcatgcttcggtactaccgtcgtattggaatttaaggttggtcgacctaaacacgtaatccttccacaagaggtcagacgcctcttccatttttcatgctgtcacaacaaacaaattaaattttattttttttgttttataactatttcgggactcatttgttaaatagtttatcattcggtgggtttagtcaaacgatatacagagagatcacatgctaaaacatgtgaatgaaactaactttcacttaacttttacttcctaaattcaacaaacctttattgttttctttcttgagactcgtcctacgtcatctcctttttgtctagacctaattaatgaaaccaaaattctaatttgcttacgtcgagtatatagactgaattcggttatccattaatatgctttcatgttttttggtttatagatctattgtttcgttataaacataataagttgctaagctccattttttcgttatttttacaactcacaactataaagtaaataggaatttatatgaacagagtaaagtgcactttatatatttgtgatcaatttgtcatagtatattgaacgaattgatgagagctacattattcaaaatacgagcagtaaaactg

SEQ ID NO: 13191 - DNA, 944 bp, Arabidopsis thaliana landsberg
caatgttgtacattcatttttaatcaaaatttatccagaattacatcggattatgcatgaaacattttaagaaataaaatttccctcgagctgatccacacattcgtagctcaaattacagaattaagaacaaaaagaaaatgtattacattatttagtattttttagcgaaagcattgatcaaggctaaagcgttgctagttcctcttcccaaattcaagatccttgcccggaccgaattcttgacccgcccatccatgacccgacccgcaaacccatcggagcaagtgtttgcattagtcaaagcagcgctggtccacgtttgagcattgctcatgtggaaccaaaactggtcacgacttttagcactaccacacatcttcacttcatggatcgacatggtcaaacggtcaacggcatcatggatctcctcgatgcagtccttaacggcttgaatctctcgtttcttgagactagtgaaacgccccaagcgccagacgaagaccttagtggactgggcctgagtcacggtcacattgagtgcggtctcggctagacgtcgagggcttgtttggatggagttggcgtaaccggtgagagagttgacgcatacggttgggtatgttgtggctttgcaagaggcttgtatgaagtttatagcacgttttgaagttattgcggctctgggggcggaggacgacgccgtgagaatagccgtggataagaggaatagaaagagagtgtagaatatttgttttgccatttcttttgaaatgttttgatttagataatatttgtggacatgtaaagagttggttttgaatttttatagtggactagtacgtactctttggtgtacgtttggtttttcttagggtttataataatagaataattgatttgcttttgactttgacgctttggttgcttacattttttcaact

SEQ ID NO: 13192 - DNA, 470 bp, Arabidopsis thaliana landsberg
tgcatgctatcattcgactcacaatgcatagaacccaacccatatcccagcttaggcagtggtagaaagagtaggtaatttatgcatcaagggaagaatggacttggcttcgtcgaagctttcttgccacgaaaggtctatttctgggaggtcgggatcttgcccttcttccggagctacgatttccggagggtcggatccctctttgccttgcaaaaataggcaataaacaatatatcaaacattgttggttaataaagtgtgtcaagttataggtgttattaatttatgacttagagaatatttggactatttttggtgcatgaaatatcaacatgagtatttgtttatataagaaaatgggaaaaggagacaagataaaaggaaaaacaattcctggttcagcgggctgggggggatttcggcccagcgagcgcgcgggcgagccggcttaggcggccacgagcgag

SEQ ID NO: 13193 - DNA, 892 bp, Arabidopsis thaliana landsberg
atgatcaactgatcttcttgtttggttatcatctctttagtgaaattccaacacgtttttcgaaaaccgaaagtgttgtgatccattagttacattgtaaaatatataattatttccatcacacgcgtgagacagtggcattgttttggttgtaaatattgtctatgataaatccatgatctcgattctgttgttgacgtttttcaaagaccagaaatgcaaggctcttatgatttgattccatggaggttttctacggggtcgcctaatatatcggaaagccaccaatcgtgtgatgaccaccggaaactaataataaatgttagaactgacatataatcgataaaatatgtccgaagaaatacgacatagctgttggaaattgcatttctgttagagacacaacacagcgaaaggctcatattcacttccatagatcgtccaccatgtatgttgaacatagacattttgaatccatacataactaatttttcttacagatctaaaagtgaactaaaatctacaaaacaaacaagaagagaattcggatttagaaatccagaattgagagcaaacactttacttagattaaaacaaaaaccaaacttaaagagaagaaacagaaccgccgacaagtgccggcggccctaaaccaatcggagaagatggaggccaaggaagagaacggttacttggtaaatctttttcattcgccactttgtaagactaaatcactgttggttacatttttgaatcttttttttcctgcaattaatagataatttttttgggtatcacatatgaaggaacttgcttgatattgatccgtagtcaccgtcatgtgcgttatcttcatctctgtctcaaacaaagattcaattcctctccctct

SEQ ID NO: 13194 - DNA, 441 bp, Arabidopsis thaliana landsberg
tgtgtgctccacaaagaggtcttctccctttctcttgaactttgggtgctctttctgctgaaggacaaacactatatctccagtgacagtgtcaggctgcaccaacacaaaaacataaaacaaaaggttagtctccagaagaaaagtaaacataatagtaatcaaagctggagtaaatgtatgagagtagataccgcttcatctgcttgtccttcaaatgtgatcttctgactgtgttgcattcccttctccacattcacttcaagcaccttcttctcaggaatgaccttgtctcctttgcattgtggacacctgtcccgatcattgatggtctcacctgtccctttgcattcattacatgcatgctgcatctgctggatcattccaggttcaagctgcctaatagacaccttcataccagatccctgacaccctcacatt

SEQ ID NO: 13195 - DNA, 398 bp, Arabidopsis thaliana landsberg
tttgaactttgggtgctccttctgctgaatgacaaacactatatctccggtgacagtatcaggctgtttccaaatgaaaaagaaaggaaaatgtcaatagacgaaatatataatgatcaaagccaggacaaatagagtatcacataccgcttcatcggcttgtccactgaatgtgatcttctgattgtgttgcattcccttctccacatttacttcaagcaccttcttgtcagagacaaccttatctcctttgcattgtggacacctgtcccgatcattgatggtctctcctgtgcctctgcaatcattacaagcatgctgcacctgctgcatcattccaggtccaaactgcctgatcgagatcttcattcccgaaccttgacagccaccacatttca

SEQ ID NO: 13196 - DNA, 611 bp, Arabidopsis thaliana landsberg
ctggtgatgtctaaagagtgctgcatctatgctatcccaattagagaaccgagaagatagattgattagtgaggaacagaagcgagaaattggaactgaaccctatgcgatggagctagagtcgatagagaaagctttcaaaaacaaagaggacataatcgaggaaatgaagaaagaagctgagatcatgaagcaatcaacggaagaggcacacaagaagcagaccttctggactctcgtttcgtctgtaacaacggtttttgctgctgcatcttttgcctatgccgctagggctcgttaaacgtctcagaatggttttgccacttaaccactatcatgacatttatctcattcggcttttatcagtatcatatgagctttttacctttaccttgcaaataatgttgtttaggtctctgcaactataatatgaaatagaatctttcttcatgagctctatatatgtgcatccattgattttctttagccatttttggacttttgaattggcctgtgagcaagcaagcaaaggttaggagacttttggttcttatgaaagtttcttaaacaagaggtagaaatttccatgaaattttaccaatttgtaaaat

SEQ ID NO: 13197 - DNA, 498 bp, Arabidopsis thaliana landsberg
gttctagaaatgttcataactcgatgaacttagcttagtgtatgttcatggtcttaaaaaaatacactgtaatccacatcaaaaaaagtctaaagattcttcatttcttaaactatatgatcaaacccctaattctacaatgtgacattatcctcaatcttcatcaagttttaacagaaggagcccaaaaattgttatatgactaagatcagctaaattaagaacttgtagagaaattgaaacgagaatgaagtagaagaaacgtacaggccaagaacacagcgagtgacgtcacgtcccttctcgaggcatttctctgggttaggatcattcttcttacatttcaggaacgccatgttttccggcatacacctgattcctatatgcttcgccgaagctgttaaaaccgccgacgtagggatcggattccccgttccgtccaccgccgcattcgcctccatagctcaagattttttccaaatccctaaaatcttatat

SEQ ID NO: 13198 - DNA, 812 bp, Arabidopsis thaliana landsberg
taaatggagaagaccccagtgaccaatagaacaacactaagactaatgtagatagagatgataacaaggaatgccgtcttttagttccgtttagtcaatcttctagtttgattggtaaggctggtgagaacattaagaggataagacgtagaactagagctagtgttaaggttgtttcgaaagatgtttcggatccttcacatgtttgtgccatggaatatgacaatgtagttgtggttagtatctgaaatagcgtctttatttgcctgttctttgttgctttctattgatgtttttcggtcttttgatcgaatagatatctggtgagcctgaatccgtgaagcaagcgctttttgctgtttctgcaatcatgtacaagatcaatcctcgtgaaaatattcctctagattcaaccagccaagatgttccagcagctagtgttatagttccatcagatctttctaattctgtctatcctcaaacgggattttactcgaatcaagatcatattcttcagcaaggggcgggtgttccgtcatatttcaatgcactatctgtatctgactttcaaggttacgcagaaaccgctgcgaatccagtgcctgtttttgcttcttctctcccagtgactcatggttttggtgggtcttccagatcagaagagctggtttttaaagtcttgtgccctttgtgcaatattatgcgtgtaatcgggaaggagggatcaaccattaaagaataagagaagcaagcggttcttgtattgaggttaatgactcgagaacaaagtgtggtgatgatgagtgtggtat

SEQ ID NO: 13199 - DNA, 444 bp, Arabidopsis thaliana landsberg
ttcgatttttgggactactgctgtacacgccgtgcagcaggacacgccagcgtaggcgtcccagacttcgtcgagggcagcgcctacaacgctgtctgcggccagagagttgctacgccaccccctagctccacggcatcactgggggccatgaagcagtggcgcgacgacgtcgaccggctgctcggcatggcgcattctacttcgaccaggtcgaggcctcggtcatcccggcgccaacgcgaggcaacgacgtctgtgtgctcgccctccgtaaggagtgcacagaccgacgacctccgggcggagctcaaccgtaggcgtacgagagaagacgcctgggtctccttggaaagggcgcgcgagcgccgccaaaacatcgatgtcgcgacctcgatcaggacttcgctgtggtagcaccacagacaccaatgggcacccagt

SEQ ID NO: 13200 - DNA, 1093 bp, Arabidopsis thaliana landsberg
aaaacacaagaagattcaaacaaatataagactgagacaagattaggtctttgggcgaacaaaaaaaacacaatgggaggtgataaaagtaagagatataatttctcataatgatctcatcacaatttttatcaactctaatatatataggtctaaagacagacaattatctaagtctttctgtaatttcttaagaccactctgtcttttctctaaggaaagaccaaagagacgagaagaagacaaaacaaggcattaatagtttaaataaagcacgtaataacaacaaattattacgtaataatttaacacaaaatttatatttcttccaaatatacaccaaacacctctaaaaaaaaattcacccttttcttctttttctctatatatctaaaatcacaacacacaaaaatactcatatatacaaaaatatatacaatatacaaacatcgtatatatcaagtaacagagagaaaaatcttttttcttcctctccttgatcggagggtcgccgtgttgaaaaggatggatggtggtggagagacgacggcgacggctacgatggaggggagagggttgaagaaagggccgtggacaacgacggaggatgcgatcttgacggagtacgtgagaaaacacggtgaaggtaattggaacgccgtgcaaaagaactcaggtttgctccggtgtggcaaaagttgccgtctacggtgggcgaatcatctccggccaaatctaaagaaaggatcttttactcctgatgaagaaaagatcatcatcgaccttcacgctaagcttggaaacaaatgggctcgtatggcttctcaggttataaatttttatcataaatcttttttttcttatttcttcatttattaatttttgttttttaaattaatcaccttatttgtttcttcaattcaagaaactagagggctttaaattttcttatatgcaatttttttttcctagttaaacacacaatttgcatgattaaatgtgtttgaactttgaatctttctttctcttggcatgattaatcttgcttctctattattttgtttgatgcttataagcatgttttttttttggg

SEQ ID NO: 13201 - DNA, 809 bp, Arabidopsis thaliana landsberg
  unsure (1)..(809): unsure at all n locations
tgcaaattaccttaatgatgggaaaatatgcatgtaagtcaaactcatttcttcgtgagagaatcttagtttgcgtttagtcaaaccctatgctgacagagagcttatattatttattaattcaaggtttatagctgacttcatcctattattatgaaactatctatattcatctgtgtctcagctataattaattacccatctatattcatgtgcgagtagtgataataccgtttgttttggtttcttaattgaatcttgttttatgagtaggagcgtttgcggcaatggcattattgggaagaatggatcaaatgctatctccgaaaggcatttcaatgtcagttgcaccacttggcgcagtctccgccattcttttcatcaccccttctgctcctgctgctcgggtaaatctttagttaaccgtttttccatataatagcggctaattatatttgcggttaaacgcaaacgcttcattgtcttttctgtgagacaaaaaatgcaaataccaaaagtgagttgttaggatttggatggtgtgtaacaaacatagaggaattgaataatcaaaagtagaaagtagtggttagaggagatattttcccactaagttctatatccataagctagttgaagattttcttctaattttgatcttgtgcttacacttttctatggaataaatctagaggtccactattttatcgatgattgatactttcatatatttggataattagtcacaacctatttcagccatcttctcatgtntagattggaaagagatgccatcacatcaagttaaa

SEQ ID NO: 13202 - DNA, 541 bp, Arabidopsis thaliana landsberg
ctccatatcaacaaacatgacttcctatgtccttgtgttgttgacatagccaaaggtaataggcatagctagctttcccagtgccatcacctgttgtcctccaaagccacaaagaggaaaagttgaatcctaaatcttgtcttcggggtcttgcatttgcttgaaagccttggaaaatatggtatctgatgcgctacctgtgtcggctaggacattatgcaccacgaagcctttgataacataagagataaccatcgcatctctatgcggataatctttgagatgaagatcatccttagagaaggtaatagggatatgggaccacttggtcctaatgtagggtccttggacgcctacatgatgcacccttctttaggcctctttatttcgttttttgttgcttggttcgaagctcgagcccctagtgatggggagggcaagcttcttagatgctgatgtcgaagcttgatggcttgctatcctctaggtcgtggtttagattgttgtggtcgtagaatcacggaggtggtgctaatgttgg

SEQ ID NO: 13203 - DNA, 1346 bp, Arabidopsis thaliana landsberg
tttgttttttctcattggatatttggaagaaaagggcaggggattatttttggaaccacattcaagacacacagttgtcttgtattaacataatgaacggatatcaatgattcactctgtggatgcagtcaacgtctttggagatgttctttgggtttcgatctggagtcaatatttggtagagttgggactgtctattttttcttgaaggcgaaaaattcatccttctgatgacaccgttagatggtgatgatgtttcccaaatctcggccgaagtggcttttgtggagagaataggttgaacattaactgagatagcgccgattaaagcacaatatatcattttgtcttgtcttttccactgagtgtacctccgattcgtcgtgatggaaccattggtggtgacagtaggtggtggtgcaacacaagaaccatcaatgtagccggcaagatcacacccatcgagtagggcatgaacctaacaacgccatatcatgaagttgttatccatgagtttggtaaagcttgtcatattgacattcaagagatgaacagaatcagaggtgacaatggtctgagagaaggtggctggagaagaggccacgggaattgtaaaaaaatataaaggggtcggctactgttttaggttagagatcgacagatcgtattaaagtttaaagagattttgttatatcactgggatgagaattttacaatatataaagatattagacaagggaactagagactaactgaaacaacccgaccagttttttttttaaaacataattaaatattctcataaatatttaattaaaccaaccaataaagcaacaattaaacctcaagtcaaaaatactattttatgaataaataaataattcaaccaacaaaaccaagaatgactaacaatcctaatacaaccctaaccggttctaataaccaaaatactaaaataaaccaaatgagttcctagatcatcctctcttccttgccatgatttcacgatcacactttatctttatctgcaccaaaaagaaagagatgcgtaagtattatcacaaatacttagtgaggcgatcctctcatctacgagctatacacacaagcaaaaaaaaggggtataatcacaaatacaacataaacaaaccagtcattgaacaattcacccaaaaacacattcactgcacctacatatcatcacacaaaacaaatcatacaatccaatcgctcagataagttcatggtcacgcactcaccttaacaaagtgattctaacaacaattaaacccaggagagactctccttgcgtctgaaacagtccaaaaacgttctacacaagtcac

SEQ ID NO: 13204 - DNA, 679 bp, Arabidopsis thaliana landsberg
tgggtcgtttattgtgatcttagatttcatcgccttaatgtcatatagtagaattgattattaacttgttacggtttctgttaccgtcttggatttcctcttgattccactgagacatttttggtcctcaattcttaatgttctttgacatgcaaagatattagagaatgcattcccatctactttatttttggtgttttgatatttctttctgctaattctgaacctgtattgttttaatttgaccgttgttgaatcaggttgtttatggctaagtggtattaccggttctatcgcctataactggtcccaacctgccatgaaaaccagtgtcaagatcatccacgccaggtgaatcttctaatcaaaaggattgattgattataaatggttgaatgatttttttgtaaagtttttgagtctcatttgcattttgaaacattttctgtagccatgaacatttatagttgagcaacatcatcatctccatgtcccaaaagcatgtacatttctctgttcttgcctgtaagctatagttgttatcgacataaattttatgttcttagccaaatcatttgttcgagacatccagtcacatggtactgtacgaagcacttttctcaccgagcttcttctcaggttgcacgctcaggcgctgactttagctgctttggctgga

SEQ ID NO: 13205 - DNA, 707 bp, Arabidopsis thaliana landsberg
ttggagtttctcttctcattgctggccatgatgaaaatgggccaagcttgtaagttctccttcagttggatctcttctactgaaatggttcacttgtgtaagttagtttctcttcttgtaaatgactctgtcttgttacaggtactacactgatccttcaggaacattctggcagtgcaatgcaaaggcaattggttcaggttctgaaggagctgatagctctcttcaagagcaattcaacaaagtaacttgaactttttcccaattgtttttcaataaattatttgattacatcactttatttgccattaaaacctttagtttcattaacttgttgcaggatttgtctctacaagaagctgagactatcgctgtatctatcctaaagcaagttatggaagaaaaggtacaaattttacaatccaaaactgtaaacagaagttcttgctcaatctaattgtattggttggtgataggtgactccaaataacgtggatattgccaaggtagcaccagcttatcatctctacactccacaagaagtcgaagcagtcatcgctcgtctttgattgaaaaaactcaatttgggtaatttacctatcagcttgtgtcacaaaacttgttacttttgtctgttagattgaggatcatgtcaaaaattaaaacggttgtgtaagagaatcttttggctcccatgtcattcaata

SEQ ID NO: 13206 - DNA, 723 bp, Arabidopsis thaliana landsberg
tacaagcaacggaagaattttaaagattttcaaaatgtaacccatattgagtaatttccattacataattttagtttgacctacgttcttcattctgtcaaataaaacgtcacaagtcctgtataattaattcttctacacaattttccttttagtgatcccaaataacgaaaaaccatttagtttagttatttgttttgtttaattgctcacaacaacaaaaccagaagtcgtcgccattatcattcagacaatattcagccaaaatcagttttaaatggaattttacaaagaacccaaaaaacgaaatgacaaacgttttagaaccaaaaaagagagccggacttgttttgatgttcatcagctacttattgcaatatgcagagagaaagacctcatatgatagataaacacatgaaagtgaatcacgaaaaagatgaagcttctaaacggcgatcccaagggacttcttgaacttctctacctctaagtagacagttgagtaaggtaggaactcagagaagtaatctccgcttaagtggttgatggctacagcgagttttgggatctctagggtttcttcgttggttagggttctaatgaatcttgctggattgcctccccatagttcacctgatgggatccttcttcctggcggcacaactgaacccgcttccaagattgaccgggtctcaaccagtgagccttccattagtattgagt

SEQ ID NO: 13207 - DNA, 1365 bp, Arabidopsis thaliana landsberg
  unsure (1)..(1365): unsure at all n locations
tcggatttgataaaactcaatgacaaacgaattatagggtggcgtgtttagttcgtcgagatcaaggccaacagaattggtcatatagatatgtagggctcgagaaactgaaaccaatgttgaactgacaccaaatcatagaaatacatatatgtatatatatgttcattactatgccacacacacaacagatgtattatgtctacctatatctatatgtatatataagtaacatatagcagcagataagaagagcatccattaagcaatctttttgttctagttgatcacattgttctatttgataaaaatattagaaaacatatattgaagtcataagttctatcaccaaatcccccaaaaataagttttgcacttaatcatagcactgaccaaaacacaaacatacctggacttaacccatttttatatgtacatacatatcaacaaacctatgtaggacaacattattatagaaattttgattcgtgaggaatatataacctctaatcaaattctagtcggctcttatcatggtcgatatcaaatttgtgatacacgaagtggctagatatgaagaaagatttgagactttttttttccttcgcagacgaacacaatagagtttcacagaaaaaaaaaaaaggattcaaacataaaattctacaaacgacaanaaataaacctaagcttaacatgatgaacaagacaatgtccgaaatcacgatgataatttgaaattcattagtccattaaaagcttttctaacctttcttcactctcgcaaattcttcgccggaaaagcttctccgccggtatatatataatgattatcaatatatacacatcagaaaggacctcttccaccggaattccccggccaaccttccaccggaagttgcacatttggttgcatattcatcggtaaattaaagaacggaagtcctcctcctcctccagctgccacctccggaaacaaattacctccgccgttagatcctcctccaagctgttgctgctgctcatcttcttctaaaggaagtctctcataagcaacattagtaaacgaagctgcaatcacaatcaccggtccagccgccgtaagctcacccacaacgcttcctccaaccacctgaccttgtcctccggctaagaaaattgtcaaactcgttgctccgggaggtgccggaggaggaagaaacgatccggagagagaaagaatctcgaacgttcctttgagcgtcacaaccgctccagtcgcaaatggctgacgtatgctgacgttcgtgaccgttccgctaccgttcagaacgagatccctcgctgtctccgacgagcataagtcgcaacgcagtcgaaaacata

SEQ ID NO: 13208 - DNA, 798 bp, Arabidopsis thaliana landsberg
gcaggtcgactctagaggatcccctcactcacgaaaagattctaaaaccctaaatcccctctgaagccattaaaccctaaacatgggattaaagggaaaagattgggcaaatggccaaatcatgaaaggaaacctttaccaaagatgaagtatattagaaaatctacaaaatgtattaaggaagatattgcaaaaaaggcccaacaaaaaccccaaatcagttcactaagtggaaagcacaatagagccatcaaaaatttctctaagtcccaaaaccaaccctagcctaaagatcagatgtgttcacctttgtgctggcgccaaaaccacttggactaaataacaaaaagtggccaaattacccaaggcacacccctgaaaaatttgaaatcaaaccatggccgtttgacatggtttggcatcggttttgtcgctggtgaacagtgcagacagacaagacttggcgcccacatatctcacaagctagggcagatcttccattggaacttacacaaactaactagccctaggtgccaggaagagatcttgcacaagacacttggtgagattcgcacgttttggagctctgtaggcgcaagaactcgggtagatgaacatggccacgtgttcgacgcgccctggcgacaccagaccacgccctcgggcatccgcacacgtgcgcagcccgcgccgtgccaacccgtgccctcgcccacgcccatgcccgcggctataaaagcaccccggcctcgaccgtacaccccgcgcgtcctgacccaaccagagctaagtttgggg

SEQ ID NO: 13209 - DNA, 621 bp, Arabidopsis thaliana landsberg
gagattatctctttgaccagatttaagtagagatattcctcatgccggtcaaaaatcattttatgatgaacagaagaaaacttcttccaatcaacttgaagaacctttgatccatcactctcatcagaggcttcaccggcagaagaactctttacacgaacatgagtcgtgaaggaaaatcgaagaccattttcacatattggaaacgacgaacaccaaggctgatatgcagaagtgtcaaccgtgggaataaatgtatcacagtcgatacttgtatcaatctcagttatgtggatggcttcacagctcggtttattcaaagcttccctacaatacaacaaacataacacgatcaaagagaattaaaatcacgaaaaaagggagagtcttgactatagaacacacacctcaatatgtcgccaccttctattacaaacactttctcaatggacagactaaacggaggtgcagctaataagtctagagcagaatctatgctactgcaagttacaacattttcagtgttggctatatcgaaaccgctagaacgagacaagacaacattcaggcgaccagagagtggcctatactttttgggaatagactcccacgttttcctac

SEQ ID NO: 13210 - DNA, 533 bp, Arabidopsis thaliana landsberg
  unsure (1)..(533): unsure at all n locations
aaattaagagctccaggacagccggacctgtgagacttgcctcataaccaaaatttacaataactacctaaaatggcttcttaaactggtttacagtttgcttgaaagtgcatgtagagagacacacacgggctggtgagatggctcaacaggtaagagcacccgactgctcttctgaaggtcctgagttcaaatcccggcaaccacatggtggctcacaaccatccgtaacgagatctgagatctgactccctcttctggtgtgtctgatgacagctacagtgtacttacatataataataaataaataaatcttaaaaaaaaaaaaaaaagaaaactgagagnnnnnnnnnnnnnnnnnnnnnnnnnnnnnnnnnnnnnnnnnnnnnnnnnnnnnnnnnnnnggtaatagtaaacacattctgagcaaagaataattcaaaatgaaacttttaaaaatcaaatgtgatgaatttgagggcgttctggccgtgaccgattggttgtgtggtatcataggacctcagtacagt

SEQ ID NO: 13211 - DNA, 598 bp, Arabidopsis thaliana landsberg
taagagcacccgactgctcttctgaaggtccgaagttcaaatcccagcaaccacatggtggctcacttccacccgtaatgagatctgatgccctcttctggtgtatctgaagacaactacagtgtacttacatataataaataaataaatctttaaaaaaaaaaaaaaaaaagagtcctagcctgtgcctctaacccctggtctcaggagacagaggcaggaggatctctctgagtcggaggcctgcctagtctacataataagttccaggacagccagagttacatatgataccctgtctcaaaagaaaaaaaaaaaaaaaggtgtgggggggagatactggaggaagagactgcttcttcctcttccagagcacacaggttagatttctagcatccacatggaggctcacaattgcctgtaactctagttccaggagattctgtgcctccatctggcctcagcagacactagacatgaacgattcccatataaacaggcaaaacaaccatacacctaaaattttacatgggtaccttcaagatggctcatagtataaagattctagctagatacagctgttgacataagcttaagt

SEQ ID NO: 13212 - DNA, 580 bp, Arabidopsis thaliana landsberg
tatatatataactcgttttaaaactacttttactgttttcgatatatatagattatttgcaagcttgcaagaggagttggaaaattaagaaaattatcctctctcttaacgtctgcgtcctctgcctccacggggtggatcatgtctaccgttagctgtagggtcactgtagtcgttggtgctcaccatcaatgaccgttctggcaccaccgtcatttcattttctgtcatgtacatatttggttgttaatatacatttaaacatagtactatactagataaaattgataaacaatactaacaacttttgtatataagaactatcgtattattaacaactagagtatttaagataaacctcaactctcaataccctcgtttccaatttgtttttgaacaatgtcgacactcattcaaaatttatgtttgtatattaaacaaaacaaaaaattatgttttgtccatcaaagtttatgtaaaacacacgaactcgggtaaaacaaaatcgacctttttcttctgtttggaggttttaaaatcgaaatctttgcttggatttcttacaaatacgagggactac

SEQ ID NO: 13213 - DNA, 562 bp, Arabidopsis thaliana landsberg
  unsure (1)..(562): unsure at all n locations
ttcactaaaagaattggtaaagatttatttgtttgtcaagtttatgttgatgatatcatttttggatcaactaatgagctattatgtgatgaatttggtaaaatgatgtcaaatgagtttgaaatgtccatgataggagaattgagcttctttctcggtcttcaaatcaaacaattgaaagatggaatctttgtaagtcaatctaaatatttgaaggatatgcccaaaaagattggattggaaaatgcaaagtctattaagactcctatggcaacaaatggtcatcttgatttagatgaaggagnnnnnnnnnnnnnnnnnnnnnnttttcgttcaattattgatagtttgctatacattatcgcatttagtcctgatgttatgtttagtgtttgcatgtgtgctcgttttcaagcatcacctagagaggttcacttgaaggctgccaaaagaattctaagatatttgaagcatcccccaatattggtctttggtacctaagggtgccaatttgaattgattggttatcagatcggactatgcgaggtgtaagttgatagaa

SEQ ID NO: 13214 - DNA, 873 bp, Arabidopsis thaliana landsberg
tttgatttgcgtagaggctgacgccttcggtcatggatggactgttcggctgggttagccggaccgtttgtctgaacaccagaccgtccgcacgtaggtgccggaccatctgcgatgctcgggccaggctgatgtgtttggtttattaattgtgcctgtcccccagcgcctttggactttttagccttctcatctgaagcctttcgagcaatctccttttgcgatataattgacatgcgaggatcgccaatgacgacgcccccgcctttgcctttatcggccatttcgggccgaaccaagacctttttacatgtgagttctattgtattaataggaaaaggttgtgtgtctacttgcatctcctgaaaagccaatcggccctcatttatggccgattgtatttgtcgacgaaaaacattacaatcattggtggcatgagaaaaggaattatgccacttacaataagcacgcctctttaattcatcaggaggaggaatagtatgagttaatttaatgttgccgtttttcagtaactcgtcaaatattttatcgcatttggcaacattaaacgtaaacttaacttcttcttgtcgattctttcgaatcgactgtaaagcagaacacggtgaaggtttagcctgccctggccaaaccagttcggcggtgtatacatccgtggattcatcgtccgagttatcatatcccactagatgcatcttatggctagccgattttgatgtttccttacttcggctttcacctgtcatagcccgctggtgcaagtgcactagcgaaaagaattgtgtgccatctaatttttcttttaagtagggtcgcaacccattgaaagctagccctgttagttgtttttct

SEQ ID NO: 13215 - DNA, 565 bp, Arabidopsis thaliana landsberg
  unsure (1)..(565): unsure at all n locations
tggatgttttagccttctcgtctgaagacttttgagtaatctccttttgtgatatattcgatatgcgaggatcaccaatgatgattcccttgtctttgcctttatcggccatttcgggccgagccaagacctttttgcatgtgagttctattgtattaacaggaaatggttgtgtacctacttgcatctcctgaaaagctaaccgaccctcatttatggccggttgtatctgtcgacgaaaaacaatacaatcattggtggcatgagaaaaagaattatgccacttacaataagcacgcctttttaattcatcaggaggaggaatagtatgagttagtttaatgttgccattttttagtaactcgtcaaatattttatcgcatttggcaacattaaaggtaaatttaatctcttcttgtcgattcttttgaaccggctataaggaagaacatgccgaagatttggcctttgttgacanataaattcagctgcatatacatctgcgaattcatcatctgaactatcacgctctattagatgtatagtacgggcgaccgattttgat

SEQ ID NO: 13216 - DNA, 660 bp, Arabidopsis thaliana landsberg
aagccgtctacgtacagaaattgtttttgttattattttatacttaagaaatatatcattgttgtattaaaataaaataaaacatatcattgttatagaacttgtttttaaaaattgcagaaaaacctttaaaaaaataagtctatatatttacttgataattttattattttactaaactgttaatatcttttatttctttgttaaagaataaactgttaatatcattagaatttttttttcttcttcttctgattcttaattaagatctctaaatatttcgatgaaaggagaataaccatcacaacgatcgaaatctattagtagtctttatatgtagtttataaatagttatatatgatcggcaactgactccatatgcacatatcatcacgccacgcccatgcagattctttaatttctccgacattgattgttgcttcttaccgaattaaaaaaaccttaccccactaatctgataaggctaatatgtgtctgacgctcatgagtaatggcccgatcctatcaaatttgggtcccgaaaagataaataaaagtgtttcttcaactactaaggtagaaataccaacagtgagaaataagtaaggtaggggttgattagtttatctgattcgaattatatggccaattagtttgtag

SEQ ID NO: 13217 - DNA, 849 bp, Arabidopsis thaliana landsberg
  unsure (1)..(849): unsure at all n locations
cggacaactatatgaaggttcaatcttagcttcttctagttattaattcatactatatgaaggttcaagtaatatatttttggttgcttagaaaattggaattttcttatatattgaacaggcaatgcgtcttttcgtgggtggaccagtgtggactgcttataatcgcccacatgaccatcttcctgcaaggtacaatgatgccttgttctcccatattgtctcgacaaagcttactagatctgtagttatatatctaagcaaagaggcgacaaaagtgtttatgtatattcaaacggctattttataggaaagcgtatatgaaaaaattcttgaaggtgattggggaccgtaacatagacgcttcagcgtaaagaactctcggggatcagatttttataagctaaacatatgtttagatgttgtctttatgctttattatgtttaccacatggaaaccgaagacattttggttcatgtgtcttttggcattattgttgtgattgtaatgtaaagaagaaggaaaatgacaatatatgaaagcaagaaaaatatgaattgttgttactaaaatatataaaactatcggtcactattagtctcaacctactggtggtcgtctatgcataatacatgatatacatccgttactgtaaataaataaaatgattatttgaattgaacacattacttatggagtatccataatctcatgtttttagaatttgtacccaatgataaataaaatcaaacaaaagaatttatagtcttttgttatattccttgcctcttggtgactaagaaatcgatacatttaactanaaaaaaagagaaagaagaagaagaaga

SEQ ID NO: 13218 - DNA, 959 bp, Arabidopsis thaliana landsberg
tcaggtcgactctagaggatcccctcgattccggttacgagagtggcacgccacctctacgcgacgtcaaacatcaatctcccgaacttcttctcgaaatcgcggtggtctaaagtctggagcaaaaacgctaattggatgggatacgtcgccgtttcagacgacgaaacgtctcgtaaccgactcggccgccgtgatatcgcgattgcgtggagaggaaccgttacgaaacttgaatggatcgcggatctaaaggattatttaaaaccggtaaccgaaaacaagatccgatgccccgacccggccgttaaagtcgaatccggattcttagatctctacactgacaaagacacaacctgcaaattcgcgagattctcagcgcgtgaacagattttaacggaggtgaaacggttagtggaagaatacggcgacgacgatgattccgatttaagcatcaccgtgacgggacacagtctcggcggcgcgttagcgatattaagcgcgtacgatatagcggagatgagattgaatcggagtaagaaagggaaagtgattccggtgacggtgttaacatacggaggaccgagagttgggaacgttaggtttagggagaggatggaggaattgggagtgaaagtgatgagagtagtgaatgttcacgacgtggttcccaagtcgccgggattgtttttgaacgagagtagacctcacgcgctgatgaagatagcggaggggttgccgtggtgttatagccacgtgggggaggagctggcgttggatcatcagaactcgccgtttcttaaaccttccgttgatgtttctactgctcataatcttgaagctatgcttcatttacttgacgggtacgtttcctttttattttacttttcattgtttatatattcatgttcataaaaaaacattggtgttgccgtgattgaagatcacaaaaatataaa

SEQ ID NO: 13219 - DNA, 616 bp, Arabidopsis thaliana landsberg
atcaatatccatctccttcgtatgaatcgatacagaccttttacgataccgatgaggattggccgggtcctagatgcggccatactctcacggcggttttcgtcaacaattcccatcagcttatcctcttcggcggcagtactactgccgtcgccaaccataactcctccttacccgagatcagtaagattttactcccgatttttcgaaatttttagggttttgagatttcgagatcctctctgatgatgatggctttgtttcttgtatgtgatttgtttttctaggtttagatggcgtcaccaattcggtccattcttttgatgttttgaccaggaagtggacaaggtaattgaggatcttgatgtttgtttctaggttttttttttcttattgatgatttcaattggtttagaagaggtggatcttattagaatttaggaaatcatttagttcattattctaataggatctctttgtaacgattcgtaattgtgtaggcttaatccgattggtgacgttccgtctcccagggcttgtcatgctgccgctttatatggcaccttgatccttattcaggtgattgtcagagaacacagatctggaaagattttgt

SEQ ID NO: 13220 - DNA, 888 bp, Arabidopsis thaliana landsberg
ctctctaatcattccaagaattaatgtaattaggaggcaatgcggtgtactatgcaaaagcggtaccagtaagggataaaaaaataatcaaacacaaaatgcttccccatcggccaattcgtcaaggtgtgctaggaactggcatatatgttcgtctgtgcttctcccattttcatcagaaaacttagaaaacttcggtatccttgcccttgtggacatgggacaatgtcaaaccggtgatcatatggcttttgatatgattgccccattctagctatactaactttaagcctatctcgaaatagttcaaccatctcttccctaattttctccattgcgcccggtggcaaaccactggaccctaggctgtgaggctcattcggtcaggcattgttatgccaaccttcttgtcgtgaccgatcaataatgttgatcggcctgtgatcgtatggtgtgttgtggtttaaatctgtagggggcgaaatgtactactggtgtggtgtgtaataaattggtgtgtagtgtgagacagtaggttctgtgtatgtgtatctggtttgtccggtggtacatccgaactggccggttgtgttcgctatcattggggtgccacgcggtagccctgctggggtcccagactatccgacatggaaagccggacggtctgcgtaagggcagactgtccgggcaaaaactcagacggttcgaccgtgtccaggggcgccgatctgccaagcagggacggcggtgatggtacttgccctgaatatgagttcatcggcataccatataatggctgaggctgcaaatccccatctgtagtcgacatattagacatagatatcctgttactagtttcatatgatggaaaactaggagcaatagact

SEQ ID NO: 13221 - DNA, 894 bp, Arabidopsis thaliana landsberg
ttttattgtttctaatgagaggcagcctggttttttctctcctcttgcgggcagggaaggtaattctggatttggtcctgggaaggtcttagtcgaatcagttttagatgtttcggttacatatttaggtgtgcaagcttatacatatacatagacttgttgtgaaatgttttcggatttgcttatactgcaggtacaaactggcttactcatcgaactttagcgagattctggatcctataatcgagaataattaccagttattcatgatggagagactggtaatgatgggagccaaaacatacttcaaaacattcaaagagtacgaaacagatctcaccttaactgatgatcctaagaagaataagaactgggaaataccagtatacaccatggatgaaagaagagaagaagcaagctaaagtttgtgcgtctttacaaggtctcataatttagtcttatgatttcccacgttcttgtagtcaaatgctaaatcagtgtatgtaaaaacaagaacagagttgcagagtttagaggtttttcattggctttccagagggctcttgtgtaaatgggttttgtaagaacagatgtagtaaaatctgtagtaaaatcttgtagtcaaatgctaaatgggttttgaagtttcaaatatgtaagcttctgagcgtttcccttaactcgcaaatctgtactacataacctacacaatttttcctaaactacgaacataaagagagaagtttggtcagatctttggccggatcatacatggtgtgatcatgttggctccaaaagtcggtccaatagcagcagaagaaaacatcagctggaattaacaatgtttctgcctcttcccattcagagtaaaacctttttaagttagtgggactg

SEQ ID NO: 13222 - DNA, 509 bp, Arabidopsis thaliana landsberg
cataaatcaatatcaaagtaatggagactcttcagcaagattgtgatttgtgaagtgatatattaatgccaaccatcgattatttctagctgaaatttagagtcagcaagattgaaagaatgtgaattatctacgaagaaactgtttttcttgctaacattattgggagaaaaacttaaaagctatatgatggagacatctacaagttaagaaatggaatattaataaatctcaacgaagaaagaaaagaaatgaaagctggcgagagcatatgattcggctgccttcacatggattcccatcctttatgtcccatctcttctaaacacccatcttatcgttcaccacatcttttttttttattagacccgaaatataaatgataacttcaagaaaggaagaaaaccaaaatttaaaatttggataggtacattaaatggatgatttcgaaaggtttcttataattgaaacacgatacatttccaatgaaatcatcattgcataacaat

SEQ ID NO: 13223 - DNA, 145 bp, Arabidopsis thaliana landsberg
  unsure (1)..(145): unsure at all n locations
tgcactagcattnnnnnnnnnnnnnnnnnnnnnnnnnnnnnnnntcaacaaatggattgaatagtccatgcatattattagtaagaacatcgatttacacagagcgacagatcgatcgattcactagtggaccgtcgcggtcgct

SEQ ID NO: 13224 - DNA, 793 bp, Arabidopsis thaliana landsberg
gcaaaagttctcagacgtggagaatgttgtaaataaattgcaagcaacttaggtatcccttagccaaaatttcaatactatgcaatctcgtgttcgatctttgagtgtaggaaaccctcaagaagttcgaggaagtttgtttagttcaccagagtcccaagcgagaaatgagacaggtgggcagaccacgctgaacgcaagtgatcccaggtgtcaactagatgtcgtacaaatgcaatttgatggcgaagaccagatcgagggcctctataagcaagaaagttatgatctgtttgaggctataaagaaagacagctgtgaaccgaaagagagaaaatcaaagttccatcaagccactagttcggaaccaaacatatatcgggtcattgaggagacaacgcaaacacctttcacccctcaaatcgctagtttaagaatcaaagattcccggaagctcaaccttgagcccacaatgggttggaggatcctcaaagttatctcgcagtttttctgatcgccgttggataaatcgatatgaaggacactgaagaagatgcatggtattgcaagcttttctctgaaaacctgatggggcaagccttgatgtgctttactcagctcgaactaggttccaatgaaaattttaacgaactctccgcaacgttcttaaattagtattccatccttataggaaaaaacatttcggataccgacctctcgaatctgtcgcaagaacaaacaagtcactctggacatacatcacgaaattcaaaatggactcgcaaagctccca

SEQ ID NO: 13225 - DNA, 456 bp, Arabidopsis thaliana landsberg
cgactcatcccctcgccctccgacaccgagtttgcccgagtcgaagccgagtttggtttcaccttcccaccggacctccgtgttatcctctccgccggtctctccgtcggcgcaggattcccagactggcgttctcccggagctcgtctccacctccgtgccatgatcgatttaccagtcgccgctgtatcgttccaaatcgctaaaaacagtctctggtgcaaatcttggggctttaaaccacccgacccggaaaaatctttaagggtcgcgagaaacgccttaaaaagagctcctttactgattcccatctttgatcactgctacattccttgtaacccgtctttagctggtaatccggttttcttcatcgacgagtctcggatcttctgttgcgggtcggatctatccgagttcttcgagcgtgaatctgcttttcggagctccgaattcttc

SEQ ID NO: 13226 - DNA, 1227 bp, Arabidopsis thaliana landsberg
attttaaagattaaaacaattcataaatcataacttaaagtttatcccatcttgcaaatttcattctgaaaccttcgcaaaaagttataatattttggtgcttatttcaataaagttcatttttggttttaagttaaatatatattaccaaattccatctcttatatgcaatgatgatatacaaatcttctatttattcaatctatatataaaatttggataacccatctatatttgtttacctattcaaattgtaatttgaaagtaagtggatggttaatcacatcaattttaaagaaaaaaaaccaaggaaatgaaaaagttaaaaacaaataaataacttaccagtggaagaagaagaagtgaagaaagaagtagaaggtcttgcattactgaaagatgatggtcttggagataaaagctcagccccgaccttaaactcactcatcttcacaagaaatacaaatattcactgattagctatatgaattttacttcttttttaggttttacttgttagaaactagaattttcacatataggccaaaaaggcactaaagagcttacccaaccaggagcactaccagatgaaccctcccagccaatatgagccacatgttttacatctgttggaaacccaatttctatttcatctctctctttctcaacggctgaaacataagataatattcttaaaagccaaacaattacatgagaacactctacaaatatgtgatagctatttggtataagcagtgttctaaaaagcggtctaggcggtcgtctagtactccccgactagacgttatgtgttcaggtaacgcctagttaaccgcttcgaccgcctaaaatagtgtaaatcgtctaaaatagtgtaaatcgtgttttaatgtattttttcaacttccaaaaatatatatttaaatttataagttttacctctataaacatagttataaacattcatatgttgtttgttataaattaaaaaaatgtttttatccaaattttgtttatgatttaatatttttatttttctaatatatagttttatatgatttttatctataatatcataactgtaatatcttttgttgcaaacacataaatcgcctaaaaccgattaaaatcacttaatctcggattaggcgttctaggctctaggcgctggatcaccgcccgcttagcacctaacgctttcttgacacaaggtataaatgctcaaat

SEQ ID NO: 13227 - DNA, 644 bp, Arabidopsis thaliana landsberg
agtatagtgtatcagattacgttagctaatgttatatactcctaaaaattagtatgatcgtaaatcaagattaggattgatacacgcatctcagttgtaaactggtatcattgatcttgcgtgaggttatatccagtttaagaatcggaaatcatttatctgggtgcaaaaacatctgatggaccaatttggtacgtggtgattttttctgtcccatgtcaaagtaaacaaaattgataatataattcatcaaaggggatttgttgttaatcaaaacgttagatagtcttttaatatcaatgcctttattacaaacgtagtctacatgtactaattttccagtcaacattcatagtcacaaaatacgataacatgaaaactttcatgaattagaagaagacgttgattgataaagagagaagaacaacaacaaattcaaatcacaagattagcagcaacttttaagttccagagacgttcctcaacagcgagcttaaagcaaacatacgactcaatcgacgcctgaagtacctgataatggttaaggttataaacgccccaatcgctcatacaaatcgtccgatcttaacctcactctacgcgacccaaacgctccttcacgatctgttcaaacgaacaaaaac

SEQ ID NO: 13228 - DNA, 801 bp, Arabidopsis thaliana landsberg
tcttttcttttttttgggggtgatttaggcccaaaatctgtatttgtcaatgggcttatcatcagtcttattaaaggggaaaaagggagttataatacatagttgtatttttagtatttttttatggagaaacagtcaataattaaataatcaattacatacctattcaataattcactctacatttgaataggtttgaatgattttctgagtgtaaacagatagtttctaaactgaaactcctaattttttaatatacgaaaggcacttaatctatatatatatttttgcaggcattttgtgaaataaatcttgtagttatgacttatttacaatggctgccactggattttaatgtttgtttttgataattaaaaaaaaaatattcgaaataaatatttgacatttaacaatcttccctgaatctctccacattagttactaaaataaaacttccaaaatatttactatcatttaattacttcaaaattatcatttttgatattgcttttctccatgactataacaattcgattataaacatcaaaccgcagagatatttgatagcatttaattactacaaaattacaaaatatttagacaataattcataaacatatcataaataagatcaacattaataaaataaatggtttttttacgggacgggttggcgggacgggtttggcagaatgttactttaataaccaattgtaaaactataaaaataaaaaatatttttattaaataggatacaaatttgtaaaactttttatgttatacctaaccttttaaaaaaat

SEQ ID NO: 13229 - DNA, 959 bp, Arabidopsis thaliana landsberg
gatgaacctgcatatataatagtacaatttatacatatcatatctaaacggtcctgcctatataatgagaaatggaaagaaaaaatatgatttaaatattcttaccttggttcaattcttggagccggttttgcgcaaaacccatatgaataatgctatgtaaatcatcttcggaaaatgttgaatactaaaaacaaaaccaaaaagggttaagatcgcttcacattgaaaaaaaaaaatcaaataagaatagtggtagaagaatttgttttaacaaaagaaacctgagaatagagtcactgaaatgagcaagtgttggtaagtgaatgaagcttctactggtatcaaaagtttccagagggtttattatgttattagaagtaatatcagggttcaactgtaaatttttattgtgatgatcacccaataacgtttctgctgaagaatctaatcgaagtacttgttgatgatgcattagattgttgcttgaaggaaatatctgtcagaaaacaaaagaaagaaattagtttaaacaaacacacgattggttcacaaagacacaaaagtaattattattacaataattgtcaattaaaatgactataaatgttgtgacggtgacttacatccttagacaagagagcgtccatgttaaagtccagcctggtgttcactgacgataacttcatcgacaagaactgcaccatatttgaaattaaaattaagaaacaaaaattattcgaagtcgtgtagttgttttaaaaagtgattatgaaataatggaaagagtttaaagtagaccaataatctaatgagtaattacctcaacttgtcgttgcaatgattggacatagtttataatttcatccaacatcagtgcttttccagtaaccttttaaaaagtaaatttattattgctctaatcacaactatattacaactaaaaacgagttaattag

SEQ ID NO: 13230 - DNA, 754 bp, Arabidopsis thaliana landsberg
tcggttaatttcgataacaaaataaaagaataacatggttcttaaatccaacccgcacgatgaatcggattatctttggaatcacttggtcattgtatcaaccggatttgaccacaagtcaattaaataaagtttatttaatatatttaatatttagaaaattatatagtttttataaaataaaaataaaaatagtaataccaagtttaacaaaagtctaacaataataaacaactaaattttaattaaatttgatgaatactaaatcattgtaatattcgatcgtcattttagtctaacaataataatcaattaaaattttatttattatttttaagtccaactaaaatctaaaaccataacagaaatagtagagatcattgatgacgaaaataaactaaaagaatatcacgaatttaaaataatgaattttgtttttctctctcacaattctattcattctttaaaagcgggattgtgaagtcttcaccaaatctaaaacattaaatgatgacaaagttctaaaaataagtgaatatagtttgaaaccctagattctattccaaaatcaaataaaaattttaaaacccatagccggcctgttttaatcgcttcaccagatcgcaggttaatgaagggtgttttgtggatttttctggtttttagattgtcgagtattagttctaaacccaaataggaaaaatgttcgggtagcgggttaccctgtcgaccgaacggtccggatcaggcgtga

SEQ ID NO: 13231 - DNA, 1038 bp, Arabidopsis thaliana landsberg
  unsure (1)..(1038): unsure at all n locations
acacaaagattgctcgcttcccaaacattcccttcacccgcatcgtcttataatcagaaattcccgacaccgcattaagtgaaacctgaggattaacctaccctgcagcatcaccaacctcatgttgatccatcgcatccataaaaacatcctcttcatctacctccatactaaagagctgagtctttttgtgtgttaagtaatgttctggagtgaatttctcatcacaccaataacacataccacgagctcggcgatcactcatttctgcctgagacaaaaacttcttaggtgtaatcattggtttagcaaacggtctgttactaccttgactagcacccttagactcatactcctttggtgttggtaacactcctttgtgtactacctgtgttacccccttattcgctgaccagttctgtacagaaggttttggatgagccctctcatacagcttacccaacagaaaacaatggctgatagtctgaggctgaaacattctcacgtgcatctgtgtatcaattctcagacctgccaaataagcactgaccaaatactcctgtgaaagattcaacttaatttttatgagctcaaacttctcatgataagatacaatcccattagtctcctgcaacttcttaagctctgcaattggatcctcacaaatatcctcaaaacgttctttcaacaatttaatgtaagatttccagtcatacaacacctcaagacccacgccagtttgaataaatgaatggtgccaagtagacgcatgaccatcaaaatgaaccgccgccgtcctcaccttcatatcatccggcgtgtaatcactaccaaagaactcctccgccttgaatatccatccttaattcctgacccatcaaaacgagggaaatccactttacccaacctagtcataccaccatattgttgttgatgacccgatctaacgtcacggtaaggatctgagcctgatctattatccttgaaggatcggaacctncagagtgattaccatgagacaatgacgagatcggaact

SEQ ID NO: 13232 - DNA, 684 bp, Arabidopsis thaliana landsberg
tggtctacctctctagaaaacctttcagcatcactcaaaacccaaaagtcaaaaagtcacattcttctttccaacttttgttccaaagacagagagaggccaagattcataattcgagattctgactgtagacttcgagcaagaaaaaaaaagatctgaaggttgaagaatcatgaggtttgggaaagagtttgtgtctcagatgatcccagaatggcaagaagcttatatagattacgcttacctcaaaaccattcttcaagacatccaagcttcccggaataggtcagattccaataaccagagcagtactccttccttcgcacgtaacctaaccagacggtacaaccgcgacgccttggtctctgagaatcacgacattgtggtcaacactgtgacacggctcgaagaagggctcgagacggcggcttacgagactacgtttttaaaggccggagaagcaggtggcgactttgaggttaccttttttagaccctagatcgagaattcacaaggtaaataacttttacaggctgaaagtggagacagctagaactgaggctctggctctgaacaaacaaatggatgctctgattgctttcagacacaaagtcatggatcagaatcagaagaacccttctgactttgattcagtttcagaagacatcaatgcctcagcttctg

SEQ ID NO: 13233 - DNA, 617 bp, Arabidopsis thaliana landsberg
cgatatcacgcctgcatcctctttgcatgcatgcatctaaactggaggcggcgctgctagcttcacgaattacgattcagagtattatattcaccacgtggaacgcatgcatgcatgtgtagtgcggtcgtcgcgcgcatttgtgctagctcgagcaggattgttcgatccaaaccaataaagattaatattacgtattcgattagtatgttgtttaattagagtaggtacaatgagtgtcttaagttgtgtcctagagtgtatctaggggatgaatgtaaaaaaatctcaagacatgtatcttgacgaagacacagtgtcttagctctatgttcgagacatgagactatatgattgatcactttaatttattaaatgttttgattggtacaatgaatatggtaagacacatgttttagacatggccactgtattatgttatgttttagttgtgtcttatgcttggagtaacgtgcagcagtgtctagattgtacatgcgcccttatacgtgtgcatgcaaatgctatatatactaacctaaggggcctactaattgaagaaagaacctaccttccagggggaaaaagtaagaaacaaaggaaaacttaggaggtgt

SEQ ID NO: 13234 - DNA, 523 bp, Arabidopsis thaliana landsberg
  unsure (1)..(523): unsure at all n locations
ggggatgaatgtaaaaaaactgaaggcatgggtcttgacgaagacacaatgtcttagctctatgttcgagataggagactagctgattggtcactttaatttattgaatactctgattggtacaataaatatggtaagacacatgttttagacatgaccactgtattatgttgtgttttagttatgtcttatacttggagtaccgtgcagcagtgtctaggttgtacataccctaactgttttagttaggggattaaatagagtgggctaaagtttagcctctgaactttagcgctttacttttagcctagagaaactaaacatgaccttaatccatggcctggctgcagttcccttcacatgtccctggacgtaaccatacgcatagataccagcagttgaaagcacacagagcctaactgctgagctcaaagtccgtggtcagcttgtacacgtcactgtgatgaaatatatacatttncttcatagagatgcanacagctttcaagtagcacgtaatttg

SEQ ID NO: 13235 - DNA, 491 bp, Arabidopsis thaliana landsberg
  unsure (1)..(491): unsure at all n locations
atatccccctgagttgattctgacttcgaaactaaattgttgagcttatgaacatgtgaatcaaagactaggcaaattatccaaatggtcgtgatggtcatgaagcaccaaaatcagtataagaaatggtttaaggtcatttccctttcaagaccttaagtagagtgtgcatatggtctttcttatttagtttgagggtctaattgagaattatgaatagactaagggcttatatgactaccttttaagtttgagaacctatcgggggtcggatcccaggaccctaggcgtccacgagtcagaaggagggcaaatgaaaagtctgccttggaaggaccggcccccagatgacttcggggcaccgagcttagggaccgggcgaggcgaaaccagaagaggggtcggacggaccgtctagaagccactcggagtagattctacgtctgatcgatggactacccnnnnnnnnnnnnnnnnntgcattaacagcg

SEQ ID NO: 13236 - DNA, 524 bp, Arabidopsis thaliana landsberg
catatgctgcatatgggtttgaatggaacatttataaaataactattgatatttttcttcagtatacgattgcgatgatgggatatggtccagaagacaaaaatgctgtattggagttgacctacaactatggggtgaaggaatatgataagggaaatgcttatgcacaggtatattttctttcattgttcacatctgaaccttgctgttctctacaataatacgagtatccttcaattggcctttttcctcttgttacatttatagagtttggttactttgcttacagattgctattagtactgatgatgtctacaagactgcggaagcaattagagtaaatggtggacaaattactcgtgaacctggcccattacctggcatcaccaccaagataactgcatgcacagatccagatggctggaaaacagtatgtgccttttttctcttgttttagtgtgtcgctaacactaaacacccatgtatagtttgcctctaacatggcttaggctgtccatacatgg

SEQ ID NO: 13237 - DNA, 902 bp, Arabidopsis thaliana landsberg
gaacacataatctcaacgcgaagattccagatcacgtcgccaataaattccggcatcaccaccttctcaaaaacgacatttgttttgtctccggcaccatcccacgatggagatgaatatttggacaaaacttcgtcacctcggagtaaacgggattggactctatttagggagattttacagccggagactggactcgcgcgtcgtaacaaaaccgattctccaatcagcggtggaaacgtttgcgttcacgtttgcgtttgagacggagacggaatcggtaaaaagctccaagtagcaactatcttcatcaataaacattgctgtcatacctaaagcgaagagaaaaataaggaagaggaaacctaagcaaccaagataggtagcgcaacaatgagctggagtaatatcctcgggccctcgccggcgacattggccaggttggtgaatgaggccacaagaggtacatcgataacttgccatgtcggatgtttaacacaagagaagataacaacaacttatatagtactacgtacctaaaatgttacacacacaaaacaaaaaatgtaactaacgaaggcgttttttctaaaaacatttatgtatattttagccattattttttgttctaatacgttcagcttgtttagcatattgaagaatattttgattcgaaagcaaatctaagggagtcttgtttatctactttaattattaatattaataatattttaaatttataatacttaacttattctaatagataacactaaagtctaaataacaacaaaaagagtctaaattaatagattaaaaaagccctcaacggaagcaaatatcaaaagtgagtaaaactgttaaacaaaatcagaactacctttatcttcaacacaaaatatagg

SEQ ID NO: 13238 - DNA, 724 bp, Arabidopsis thaliana landsberg
ataaaacttatgcctgagacccttggctattttgataacatggcattctatttgttgtctctcccttttttgagcttacatcctccattcgcttctgtttgcaggcgtacatcattgactatgggcttgccaagaagaatacagatcttcaagacacacaagcatataccatacaggtacttacattgactcatcatgtcaaaagaatcttaaatgactctcactttgttaatcggggtgtttcttcttagggaaaacaagaaccttactggaacagctccatatgcaagtgttaacacccattttggaattggtgactctttttttatcgcttctcatattttccctacccaactgtcttctttgcattccatcactttgtatgctcttaagagacttggcacttcatcagtatctttataaatattgtaatataataactcttacacagagcaaagtaaaacggatgatctggaatctctaggctatctgcttatgtatattcttcgaggaaggtaaaccgataaatctgtattttgattttcttcctataattatagctgtccctgatccttaatttctgtttcagccttccttggcaaggccttcgtgcaggtcccaaaaagcagaagtatgacaagatcagtgaaaagaaaagactaacaccagtggaggtattgtttgccgctccaataaatataaacttctttggtatattgagtat

SEQ ID NO: 13239 - DNA, 1312 bp, Arabidopsis thaliana landsberg
aggggttttgcgaattttatcccggttttctagtgccgacgttacggtataatttttagctgagcgtttttatttcgaaatcacatgtaatcatgaatttgctttcgaaatttaataattgggatttgactcacaaaaaattaaccatcaaaattatttatataacaaaataaataaataaaaaaggaaaaatagcagtgaaatattgaattttagtaagaatttcaaaaaattggaagcctattctgccgatcttgttgacttggctccatcttatgtttttcctctcaaatttatcggaacaattatttggttgtgtggttccaactaaataagcgaatatatttatcacgagagtcagacaaaatttggttaaatttttccaagtaatagagaatatatatcatcagtttttgaagcatggggatgtggtgtactactttgtttatggtttcttgtgtttccatctgtttaattctaagccatgttcaaggtattatattaaactcttttttattgactgtttgcaatttgcaatcaccaaaagaattgttgcaaacaaagaagaaaagcagctctagaacatgtcgacgcaattaaaaactatatggtattactaattttcttatatctataaactaacaatttgttttggttgatgacaaattagaggtagaagctggagcacctccccaagactgttggaatctcgtcactttccctgctaaatgcggcattcacggaaagaagaaatgcttcaaagaaatggaatcaaagtatcaacaacgttttcttcagtgcacatgtaaaaacttaaaaccggaacccaaatcacccaaggacgaacatgactgcacttgtcaaagagctaatccttatgaatgtaattcctaatcttataactttttagaaatttcagccatcaatactaacatattatttattaattaataataagaaaactatggtgttaagatcccaatatttcaatcacaacgaaaggcaataacaattttatttaattaacatgtttcactatcgagtttttttttttgggtcggattgatttaggttcaggttgaaagaacatgtattcaagacttagataccatgaaagaaattttttgacgtagattatgaatttactatttagtcacgccttccgatatatgttcttaagattgatatgttctaaaaccggttagattgtgcttcacaatggttgttgcctctgtaatgtatgtaaaaacatctaatatcctttgtaagtattcagatatttacaaaagacccaggagataggaaaactgaa

SEQ ID NO: 13240 - DNA, 714 bp, Arabidopsis thaliana landsberg
  unsure (1)..(714): unsure at all n locations
ccataagtacccttaacacgcatagtcctgtatcctgcaattccagacactgcattgactgaaatctgaggcatgattttgtcatcttcaccatgaatctcatccaacgcatcctcgaattcatcttccacatccatacaaaaaagttgctgcttcttatgtgacaagtagtgttccggagtaaatttctcatcacacaaatagcacaaacccttagctcgtctctcactcatctcctgctgagagagtcgtcttgtgttacctgccttgaaatctggtttggagtagtgattctccttgttactgtgactctccatcnnnnnnnnnnnnnnnnnnnnngctttcgtgtgtcccacagtcttaggttgccacggtgttgagtaaggcttcctagggtgtgccttctcatacaacttccccaaacgaaaacaatggcgcaccgtctgaggttgaaacatccgcacatgcatctgagtatccacacgcaaccctgccaagtaaacactcaccaagtactcctctgataaattgacccgaatcttaatctcttcaaacctctgatgataatcaactatcccatctgtctcctgcagctttttcaattcagccattggatcatcacattcatgatcaaacctctccttcaacaacctcacataaccaggccagtcatatggcacctccaacccacacctgactgcataaaagatgatg

SEQ ID NO: 13241 - DNA, 700 bp, Arabidopsis thaliana landsberg
cgccgtgcaggcccggacgtgggcggcggaattggttttctgggacagaaccttgtgttcgctgagctggtcttcccacatagacaatctacgtgttgtgagttattcattgtctcactttatttactgtttaattttgtgcaatctgctagtattaaatacttgggtgtgattgcactgttatgggcggatttgtgtgctcgatgatgatagcggtgtagtgagacaacgtgacagtctgggttttagtgtattatcattttcagcattgatattatttgtgcctaattaaatctctttgttgaggctgtttacctatgttaaattctgttaatttatttagtacacagctcctttctatcattatttatatttgattattaggcttattatatctgatctaaaaccctaatttggtaagattagactgtcacgttagtcaaggatctctaatcacctattagcgttggagggttgtttattacagcaaaccgctattttgagagcaatattttaagataaacaatcatgtttattagtttaatctgccttcttcatctgcaagccatgtttaattatgaaatggatctgagtagctattttacatgtttacatgttctagaattgctactgttcattgctgcattaattacatatggcattcgtctgagttatatgcttgttttattcggaattaaaa

SEQ ID NO: 13242 - DNA, 650 bp, Arabidopsis thaliana landsberg
gtctgggttttagtgtattatcattttattatttgtgcctaattaaatctctctttgttgaggctgtttacttgtgttaaattctgttattttatttagttcacaactctttactattagtatttatatttgattattaggcttattacatctgatctaaaaccctgatttggtaagatagggctgtcacgttagtcgaggatctctgatcaccttttagcgttggagggctgtttattacagcaacccgctattttgagagtaatattttaagataaacaatcatgtttatttgtttaatctgccttcttcatctgcaagccatgtttaattataaaatggacctgagaagctattttacatgtttacatgttctagaatggctactgttcattgctgcaataattacatatggcatttatctgagttatatgcttgttttattcggaattagaatatttaatctatttaaatatgtagaaagcatgtcacttatttctctaattttacaacaatccagaaaaccaattcgtattatggcctccagttctgatgtcattaagcctgaagcgttcgacgacgcaagctttaaatgctggcagattaagactcccatgtggctcactgacctaaaattattttgggtagtg

SEQ ID NO: 13243 - DNA, 580 bp, Arabidopsis thaliana landsberg
ttccgttgccgttaagatattatgtatccacagtatataagtgcatgcaacaaaaaataactgtaacgtttaaactttaaaatatagttttggcatttttcattgcaaaaggtaaaattattaaatattcgactttttatttcgtttttcttcctataaattcccctttcagtttcctaaattacttaagaatttcctaagatgaaatctctgtagttttttttttgttcctttcttaaatttcgaaagaaagacatttattaaaccaaaataactctttagatcattgcaaggaaaaatgttgaaaagtgcaagtccaatggcattctacgatatcggagagcagcaatactctactttcgggtacattttaagcaaacctgggaacgcaggagcttacgagattgacccttcgatcccaaacatcgacgatgcgatctacggctcagatgagttccgtatgtacgcttacaaaatcaaacggtgtcctcgtactcgtagccacgactggacggagtgtccctacgctcaccgtggcgagaaagccacacgccgtgatcctcgccgttacacttactgt

SEQ ID NO: 13244 - DNA, 831 bp, Arabidopsis thaliana landsberg
tatcaatgcaataactccaaatttatcaaaattttatattactttttacaaatcagaaactagtaacattaaactttaacagaatcttaaacaatcttaattaaataacaaaaaaatcttcctaacattataaattattaaaagtccatataaattacaaaccaataacaccgtattcattaactgataaagaatccaatctgtagactttagaattataaagctaatggccaccttgattgttgccgacgtttcggtgatactccttttttttatatggtaagacgtaacatatcaaaagctatttctcggcctaatttcacgcaatgacaaaaagaacgtaaaaacaaaattggaaaactctactcagcactaaaataatgaaggaatggtttttaatctaatataaagacaataagtacacagaacttgtaaaacaaatgaaataattaattatacatttaacattacatttaacaaaaaaaagtatttaaaagacgaattctatgaaattagaaaattatgaccacacattatacatgtaagattcaaataataagagattttataagaatgaaagtaacgccacacacacaaaatcttaagaatctccaacgagagagtgagctccacgtcatcgctgtccatgtttgcaagagagaggaagagagtctgaggaaggacggaggagacggcggatttcagatcggagcttaaaaaagacgtgaatgaagctacctctttgttgattccccaatgatgatttggtttcgtcttgttacctcaagtctgtgaaaaagatggggtactctttaaaagatccatgacaac

SEQ ID NO: 13245 - DNA, 615 bp, Arabidopsis thaliana landsberg
  unsure (1)..(615): unsure at all n locations
gagacgaaaaataaggaaatccttattctcttctaccgaagtctctcataatctcattctttttctttttctatgttcttgtcttactgtcgatttttggattcgttaattttgaatcatagagaactggttctgtatgggtcaatggtacatgtgatggtacaaatgaacgactatgaaagatgatgactctatttgaatagtgagttttgtgcactctcataggattcatgagatcggttcgtttttcgtactttaattttttatcaaatctgactttgagaattgattaaaatctgatttttatttgatgttcctctaaacgtgaaactacaggtttgataagtattgttttctattttttttattcattgttgatatgtcaaacattgatggatgagggtgtgtttgtagctctgactatttttgttaatggtatgtgcattatggatgacatattatggatgacacatcatggattgttgattatggatgacacattatggatgacacatcatggattgttcattatggatgagatttgttaatttattagttaagattaaaaggtgaagaattggaaaagcaagtctaggatcccncaaaagctatata

SEQ ID NO: 13246 - DNA, 569 bp, Arabidopsis thaliana landsberg
tacgtaaagaaccacaaccaaacctagaaccgagaaccaaaaatatacataaaaatacttatatatacccaaaatatattagtcatgtatatatttctaataatttaaatacctaaaaactacaattataaacgcattttttcgggtacctcctctacttttgggtaattttgatagatatatatgagtatattcggataatataaaaacaacttttttgggtatatcaagtattttgtgaatttaggtagattttggattattttcattaatagggttatattttcttttgggtattgcagttactattttgttttttttttggttacttcttggatattttaggatagaaagtatcaaatccgaacaaataccaacaaattttcaaatcaattcaaatccgaaagaatcgaaaccaaaaccagaccaaaattttaatatccaaaatggaaccaaatttaatttatgatttcagtagccatttcaagaaaagcattgtctcataaagtataaagcaatctttaattaaaaatcacatcatcgagaacaatatattctcttactaaaac

SEQ ID NO: 13247 - DNA, 1178 bp, Arabidopsis thaliana landsberg
tggttataagagtttacatgagaatgagcaatctatatttctccatattgtagtcttcttcaactataaggatagtaatcttgtgaaagccatgtttgctggcaataacttggatatcaaacacggattgaaaatcctactcaacagatctctcatatatatatctaacgatggagaaatagtgatgcacaagctactacaacaaatgggtagaaaagtcgttcaaagagaagaaccttggaaactccggatcttagtcaatgctcaagagatttgtgatgttcttgaacgtgccaaagtaagtatgtcctcctgtatatgttatattttttgttcattaaattagtatcttgaacaagtcatttaggtgcaaatcctacagacaccgtgctaacaatttcctattatttggaatattggtttagggtaatagagaagtttctggcatatcatttgatacttcaggaatcaacgaagtgtttataaaaaagggagctttacaaaaattgcacaatcttcaattccttagagtttacaaaagtaaaattaatgatggaaatgatgtcgtgtatataccaaaggagatggagtttccaagttttctaaagttattagattgggaggcatatccaagcaagagtctgcctgctaaatttaatccaaatgatcttgtggaactcaacttgcaaaatagcaagctcaagaggctttgggaaggaccccaggttagttttagtttatatgtaacttttttactttaattatagtaaaaatgattgtcagctacctaactgttacggaatgcattgctacacatgccaaataaactaaatgactctcagctacctcacataggactgtctagccatgcattccgcaacaattcttaatttacttggcatgtgtagctatgtattatcttataaatgtgttgatgttctttttcggttgtgtctgtttttacattcagcaccttccaaatctcaagaagatgaatttgagatggtcctatgatctaaagcaactcccagacctatcaaatgctacaaatctcgagagcttggatatgcatcgttgcgagagtttggtagaggttccttcctgtattggagatcttcacatagtagagcaattggatatgggcttctgtataaatctacaaggtgttcctgcccatg

SEQ ID NO: 13248 - DNA, 845 bp, Arabidopsis thaliana landsberg
ttgtggtttagctttagctttataaagttttaaaactcttctcattacccggatttctgtctcatactgcatttcattagtgtacacttttgatatagaactttggatacatgaattacccggtcttgatacttttcccgcgcgctatttctcatcctatatattattggctatacatcaaattatatatttcaatatatgaattacatgtttctggctcttactcattatttcttgttccctatttacgaaattaacagccttaattaaattgaaataagtgatagagacaggaaaacaactatttacaaaaacaaaatgcaattaatgagtggtacattagtggtaaaactcagataacaggaggtttgaagtattaaccagacttctctatatatgtttatggtttggtcatatacgtacattttcttacaatcaaaactaaaccaaagaccaaggagccatggaagatcaaaactcaggtattgcttgcattcttgatagggtttccttcatttgttcaagtttacattactttttgtccaattattcgaaaaagtagcaattttattgtatctcttagggtttgacttctaacatttcttacgattctttgaaattaggatcgactgtgaataagcaaagtgaaaaggtaacaagagcaaagatttggaatagcttacgaagatacttttacctgtgttggtaagatcctctcctcttctgtctaacaatggcgtctcaagttccttgctgcatgcaaactgctccttgttacatcgtcagctagcgctgatcgctgtggaagacttgcgaaagaaggaaaactagtgattatgaatcct

SEQ ID NO: 13249 - DNA, 669 bp, Arabidopsis thaliana landsberg
aacatgtttttattactagatcaaagatttgaataacattttagtgtagttgatgcatgatgtctcaacaacatgtttcaacatcaacgactttgattggtgaataaaaacaaagtattacaatttgtatagcttttttttatacaaaacataaaaaaattatcaaaagtgttacaaaaagttttactctcacttttattgtaaggttttctcgtaccgttcttttttacagctttataatattccgaaaaaacgtacacctaaattttttatacgacttattgtaaacaatcagatccgttaatctaaaattttgtacagctttgtgttgtacagccagatgacaacaattttagatttattatgtttatttaagcgttggttcagcacatatcgttaatctaaaagagagtgaatctcaacaatgactacatgcaatctcaattatttgcttaattagtgcattgactagtttatgtccaaaatacaataatttctctacaaacaaacaaaaattctctacatacacacagacaaaatcaatatgtttaatattcttccattaatggtgagttgaccaaaattaacaccgcaattaaactcaaagtgactaaaaagattactaacaaaattgtcccgtacgataagacactgacgagagaaagtcgc

SEQ ID NO: 13250 - DNA, 932 bp, Arabidopsis thaliana landsberg
tgatcaaaagttttatcctaaaccttatacactaaaactatatggggtttatgttggtttaaactagcacattagatatataaactctataaggagacctatgtcaaccaaaaaagatataacacaccctacagattcgttggcgttttagactcttgatgtcattcaaaaggaatttaatcacttccttcagtgttgatttaagttttttcttaaagttccatagttctggagttgggtacttaccacatgcattatactcatccatatccttgattgttatttttaaagtattatgcacatcttctccccatttttctttaagcttcttcaggggctcatattcttcgttaaccagatcctataaccataatcatctcaaactattacaatattactgctaactcacaaccagttgcaccaacatatggaatatggatacaagtatcaacattcacataatcacaggttactactcctacatatttacctaaaacagtggtctagaaagtgtatgaatgaccaaacacttttcaaagtcaaaatgacgtcaacgtaaatcataaatcagggatataaacactcttaaaatgggatgagacagcaggaaagacacatatttgatttgtccttggttcctttatgtttgaatggatgccatgatgaatccttgagattctccttctatgtaaagcaaaggatggtagctttaaccagagcttcattttcagaatgtctcaacttgcaaacattcatgaagaggtttaaaatcaattttctccaatttttttaatcatgttattgatattgcatggatactcaacaatccagtcaaactcggaaaaaagtacttaaatattcaaattaaaactaacataggccaaaattaatcacacatagataattccaactttggttcttggtaaagacag

SEQ ID NO: 13251 - DNA, 670 bp, Arabidopsis thaliana landsberg
ctcgactctagaggatccccgaatccaaaatgttcaaacaaaacttctgattttgatggtttataatctaggtgatcggtatgcaacatgagcttcgtgatttaaagagtcaaatccaagagaagtcagcatattccgttaaacttcaaagagaggtaggttttgtgtcttgtttacttcttgttattctttcatcaacaaactgtcttgactctaaaaattgcaaatatccatatagatagcaataattaagaaagctgaggggtccaagtcatgtccgtatgttctggatggtgcacaaagtcttggctcgtgcctaagaatccgtgcctcctcagacagtggtatagatatttccaaatgctcaatccattggtaccgtgcagcatctgagtctagtcgaagagaagctatatctggtaattcgcattctctctttccctgatcatttggcaaatcttattatgttctcaaaataacttataggacatgagcttttagcttgagcactgagcagttcacatttttccaatcttaggtgccaaccggtcagtatatgctccagaaccatttgatgtcgggcgagtgatacaagcagacattgtttcaaatggccagaagttcaccgttacgactgatggtccgattaatactggttggtgtacaagag

SEQ ID NO: 13252 - DNA, 578 bp, Arabidopsis thaliana landsberg
catacaatgtttatatcttgatttattgtaaagatgataaagaaaaaaacatagtaatgattttatttagcaaaaataaaacatagtaatggtttgcatttccgacaactaagcattataaccattgaaatcaaatgatcaagacgaagcatatgatggatggtgcagtgttcccttgaggaaggaagagtaccagtgagcagagagtttagggctcctcttaagagaaggatccttgaagtccacgtacaataatccaaagctcctctcgtacccaccaaatagctcaaacacatccatcaacgaccactgaaaatacccttttacgtccgatcctttcctgctgtgtcaaattttatgcttagaatctgactgacacatccattgaatgataacttgaacaacttttactgttacctgagtgaatgaagcactgctttaatgtacgagctcagatacttcacccttgttgtgttcacaagtgatgagctgtgaggagtcatttgtcctgtaaatgaagaaatcaatcacccgacagagagagagagtttaagacacatgaagaagcaaacttaaag

SEQ ID NO: 13253 - DNA, 600 bp, Arabidopsis thaliana landsberg
ttttaaagttccggtttttgcaattggtccgtttcacagctacttctctgcttcgtcaagcagcttgttcacacaagacgagacttgcattccgtggttagatgatcaagaagataaatctgtgatctacgttagtctaggaagcgttgtgaacataacggaaacagagttcttggagattgcgtgtggtttaagcaatagcaaacagcctttcttgtgggtagtacgacccggttcagtactcggcgcgaaatggatcgaaccgctctctgaagggctggttagtagccttgaagagaaaggaaagattgtgaaatgggcaccacaacaggaggttcttgcgcatcgtgccacaggagggtttttgacacacaatggttggaactcaacgctagagagtatatgcgaaggggttcctatgatctgcctaccaggaggttgggatcaaatgctgaattcaagatttgttagcgatatttggaagattggaattcacttggaaggtcggattgaaaaaaaggagattgagaaagctgtgagggtgttaatggaggaaagtgaaggaaataagattcgtgagagaatgaaagttctgaaaga

SEQ ID NO: 13254 - DNA, 783 bp, Arabidopsis thaliana landsberg
tctcttcaacctaatgaacgtttttcgttttcagttgataagaagaagatatttctcagacgaactaccgtcgccttcttcagcatggtctctttcccatgcaccttcccagcggttagatgagggcacaagtgatgaagatcagttctataaaagaacaaggtatatatatttatcatcccaaaaaaaatcggatttcttttctttatcgggttttggtcttttgaattttgcagcctaagggaaggagatgcttacaaatataacacattaccgcaacacaatctcatgcagtctcctacactctatccgcagcaaccacctgaccgttacaattacgctattccgagattctctctttccagtgtagaggaaaccagcaatggtaatggcaggtctaagcggatggatattaacgtctgaaagtaaaacacagatcaaatctcacattattttcctgtaatcttccaaacattatcttcttttatttgtcaacactccaaacataatctaagtattctttttttctaaataatacatgattcgtgtgataattatcttaatcatgtgaaaaaaacttgataagtttaaaatttttttttttttaagttgataagtataagcttgatcagttagaatttagaatcccaaactatatcggattgtaaacaactcagttccttataaatacactcgaatcataattgtaagacaaagaagaagaaaaaaaaagtgttgtatccaaacgatgaagacaacaaagattgagagtgaagccgtatg

SEQ ID NO: 13255 - DNA, 759 bp, Arabidopsis thaliana landsberg
agcagataaatcttggattggatattagatccctagtattttttttcaagcattatggatgacatctattgctttgacttgctaaaacctaaaaagatatgtgtgctttttaaaaaaattcattctcctaggaattccattttagaataaattagccatcaacctaatatcacacaccaacacatatatttgtatggatttgagattttgatacttcacattctgttaggcaccgtcaaatgaggttcaagaagaaatcaattcattgaggtggaaacgttggacactttcagaggatttgaaactaaaagagcttgtggctgtgtatggtcctaaaaattggccgcacattggaaagcaaatgcaaggcagatcaggttagaaatgtgcttttgtttttgcttgtgtttttttttttccaaagattaatctttttcttcgtttttgtgtgttgaaggtaagtcttgtagatcaaggtggtataaccatttggatccaaggattaggaaagatgcttttagtgacgaggaagaaaaattgctaatcaaagcttacaacgaatggggttgccaatggtctaagattgctaggcttttccctggaagaacggacagacaaatgcagagactatggcgatgggtcatgaaaacaaaattggagaggccatcaacttatactcatgaactaactgcaaatgacaaaatagaaggtgagagaaacattcaatgttttttttctttttttttgggtctctttaac

SEQ ID NO: 13256 - DNA, 689 bp, Arabidopsis thaliana landsberg
aggtcaggctaagttttcagtattcttattttattagctgcctaacttaagtgattctccacatttgcaacattcttatgttttttaagagcgattttgggaggtactgggttttcagtgttcttattatatactagctgcctcacctaggtgattttctaggtttgcaacactctaatactttttaagaataactttcaatggcatccgtcatgcataaaatagttctctgtctgaattgacttttgtaagcatagtcaaaatagaatttcctaccacataatttggaattcatgtgtctaaaattggtaattcagctcaactgactctacttgtctagatattgttacatccagtggatatatagcccatgaataatatgttctttctattatttttgtcttactgtttcttacaggtctacaagcggagttacgatgtgtgcacacaactatatgagaaagagttattgaccgagaattcatatcttcacgtatatgggtttgttgctttttcttgagagggtctacatacttattttattttgtttcagcagacaaggtgtatgcgtttgttgattaaatctgttaatcaaattgttgttttaatagctggcttctcttgagctaagttacataaaccagtattatatttctcattctggcattttgttaggcttcaagcagcgg

SEQ ID NO: 13257 - DNA, 995 bp, Arabidopsis thaliana landsberg
aactcctgctgtaatgtgacctggaagtagtactagacgatggaccaaagatccgggaatcacctctttgaattctcaaattgcttctcttcctactatcccagcctatctcttcttcaaccgctttagcaaatgcgctatgcaccggatcacagctttcacacaacagcctcaagacttgcttaattgatggcctagaccggccttctttctcggtacacaatctcacaaccgtcacaactgcatcaagttgttttcctccagcatcattaatagagtctttgattctcgggtctaccaactcgaggtgttttgatttcgccaacaaaaaccgctgagacatttccacaaggttcctaccttcatcaactgctcttctcccggttatgagctccagcaacacaactccgtagctgtacacatcactcttctctgtcaactcttgcgttactacatattccggatctacataacctgaaaaaacttcaagtttttaaaactcagcttccatcaaaattagtcaagttattctgttcagtatctctcccaaacctggagttccacggatatcggtattcacaggctcaaagcaaacagagccatctctagacgaatgtgcaaggccaaaatctgaaagctgcaccaagaaaacattattagttatccaaataccaaagggttctctaacacagaagatgtgcagtactacataccttagcgacgaaattctcatcgagtaatatattgcttgatttaatatctctatgacagagaggaggatcacagcacaaatgaagatattcctggaggagagaacaacgtgcaagccagaacccaaaaactgtaaaagatatattatcaaatcagtttacagagaaaatgtcgatgaaagactttgcgatatttaccaaagcatttgccacatcaattgcaaatttcattctttgtcccccactaggtggaggcttttccatggcctgcaaaggaaaaaattg

SEQ ID NO: 13258 - DNA, 1266 bp, Arabidopsis thaliana landsberg
ttatggattattgtctatctttattttatgtaagattagattttttttgttatgattgaattttcttacttccattcatgttcggtctaagacaattaaacttgtgtgttaatactttttatgtgtgttcaatatagaaaacaacataaaacaattaagcccaataaaggcccatcggaacaccggaacacgagttttgtcagttaggtttggcgaatcagcacttataaattagaagattacagtagagaccactttttgttctttttgctacattacattagttagactgtttagaggctacttatcattctcgatttgtcaaacctttttatctcacaaccaaaaaagacaatatcaattcaatgactaaattttacaatttctccacaagatctctttccaaactcaaaaagcgctgtcgtcttcaaaggaaaaaaatgttttctcttatctcaagtatagaaaagtttagcaaagagaagctcattccaagtatcttgaaggccaggcaagcaccaatgtacacaatccgcatagctcgttggattctccagctgctccgctgtaagtggactccactgcttcttgtatatcgacgtatgtgcatctttcctgtaattcgacatttgcgttatgttcagtaacgttatcggtgttttcgatcttccaaacacttctccaatcactttcattatgcttttcctacaatctgatccccagtagcttggatcttctataagtgttgtctgattatagcaattctgacccggttcacctccccaatctatccccctgaaacagtcatagaacaagaacaaaacaaaatcaacaaaagccctaaccagtaagtttcttgccaagaaagtaacaatcagtttgccaatatagtaagtaaagtttaatctgtttatggtgtcaatatgtatctaactatgggctaaattgctcgataaaaagggtcaaagtcactaacttggcatgcgttggagacatgctagtgaagaagaccctagttttcttacgatccatgttgttcttcacccatctcaacatactcttcatacccatccggtacgcatcttcagtcgaaacctctacgatattcttctctttatcatcaaacgatccttgcctatatatacccccaatatcagaaacctctctaatatgattgataagtatagttatatgaattgttacgattttaagtttcaaaatgatttcaagatgttcatcttcaatccagtcatccaccacaagata

SEQ ID NO: 13259 - DNA, 820 bp, Arabidopsis thaliana landsberg
tttgccttttcgctaataacggaaaatgggaaggggtctgtggtgataacaacgtgacatcggcttggcagaatccagcagcagagcttgggaaggcggattgggaactagcattggtcgagacagctagtaatctagaacatcagaaagccgcaatgggtggtggtttagacccattgttactcaacggaatgtacgatcaaggagcagttagacaacacgtgagcacctcagagttaactggtggaagttcaagcagcgttgcactccctttaccgggtaaagtcaacagccatatactagcactccctgcaccagatggaaccgttcagaaagtgaaccaagacccgttcgctgcttccctgaccattccgcctccttcctatgtgcaaatggctgagatggacaaaaagcaatatctattgactcaagagcagcaattatggcagcaatatcagcaagaaggaatgagaggtcaagctagtttggctaagatgaatacagcccaaaccgcaatgccttatggtatgccgccggttaacgggatgggaccgtcgccgatgggttattactacaacaacccttactgattttattcattttgtttgcttttttcttacatatattttccgaccaatgtagatgtgttataatgcggtttttcttgtatttgttcctgatcttgcgtcctattattgaacctgtgagacttttgcctcttttgagtattgaatatacatccggtgttttcttggtattccttgctacacaactaggtttgggttgggtttgggttgggagttaggtggaaagctttaag

SEQ ID NO: 13260 - DNA, 564 bp, Arabidopsis thaliana landsberg
aagactcgaaattcagaagtccaagcatgtcctatggtaaacttgtgaaaccggagcatgtccattaccccaacatgagccagagcacacccaaagagatccggtctctgcagtaaaaggtgtaaatttattattatgtaactatgtgattgctattttcatgagctaaatatttactactcttttacctgattaatgcaagcccctactagaataccaccgttactaccaccttcgatacaaagtttcctcggttgtgtataaccagcagaaaccagatactcagccccggaaatgaaatcatcgaagcaattctgcttattggcaagagcaccagatttatgccattcctcaccatactcaccaccaccacggatgtttgcaaaacagaacacggtaccaagatgcctactaagcacaatacgggtcgcgctgaaaaacggcgtcatgcttatgctaaaccctccgtatgcatagagcaaacatggatgtgatccatctagctttatatcttttctagccactataaacatcggtatctctgttccgtccttactcggataa

SEQ ID NO: 13261 - DNA, 1236 bp, Arabidopsis thaliana landsberg
  unsure (1)..(1236): unsure at all n locations
ttaaagaaaccttgagtatccaatgtccccggaagtggagctacagagcaatgaatcggtggctagatcttcacctactagcaattgcatctccaggaacactctaggaggacttaaagagcataactacttgggtctctctgattgttcttctgttggaagctctactctctctccccttgctgaagatgacaaagctactatcagcctcaaggctacggagctgacacttggtcttcctggatcacaatctcctgtgagagacacagagcttaaccttttgagcccagcaaagctagatgagaagccattctttcctttgcttccttctaaagatgagatatgctcctcctcgcaaaagaacaatgnnnnnnnnnnnnnnnnnnnnnnnnnnnacacaatggatcagtttgctgaagctaaaagttcagtgtatactgagaaaaactggatgttccctgaagcagcagccacccagtctgtaacaaagaaagatgtgccacaaaacatacccaaaggacagtctagcactacaaacaatagctctagtccacctgcagccaagtatgaatagaagataggagcattcgttcgattttgatatggattactttcaacagctagctaactggtgttttttcggattctggaattttcagggcacaaattgtcggttggcctccagtgagatcctacaggaagaacacattggccactacttgtaagaacagtgacgaagttgatgggaggccaggttctggggctctcttcgtgaaggtcagtatggatggtgctccttatctgaggaaagttgacctgaggagctacactaactacggggagctttctttagccttggagaaaatgttcaccactttcactcttggtgagatgtttcagtgattgctagtgatgtgtttgaaaacctctttctatttaaggatcaatgaatgagtgcagtcaaagtagttaacctgcactgtttatttgatgtttaggtcaatgtggatctaatggagctgctgggaaggatatgcttagtgagaccaagctcaaggatcttttgaatggaaaagactatgtgctcacttatgaggataaggatggtgactggatgcttgttgaagatgttccgtgggagtaagtttcctctcctatattcaaaacttgttagaagctttctctactctctgccagaaatcttagaatcaaatctaacatgccatagaagattat

SEQ ID NO: 13262 - DNA, 1097 bp, Arabidopsis thaliana landsberg
  unsure (1)..(1097): unsure at all n locations
taaatagggtgcgcttatttcagttttttaattttccctcattcatggatttcttatgcatatttattttcttgtttgtttctgtttgtgtgactctaggtctcctcaaagttcttttaacttttgttctatttactggagagtccttgtgttctagtttaaggtatgaatccaatgcaagggccacgcagtattggtggttcgtctactgaagtgaatcaagtagatggtgaatcgatttattgcacagagacgtctttgaataccatgttgaatccagcagacactggatttccaaacaatagtacaccttcaggacgaccaacttatgcaagttcgagttctcatgctgctcaagatcatacctggtggaggtttggggaatccagctccataccaggtccttctgatcaggtcaattccattggaataaagacaagtcaccagctgcctcaagatggtactcaccactttgttggctatggatctgagggaaggcaaacaggtctgaatggtatgatggtagatggaggggttcatgctggcagtcacatcaggaatgtgccgtctttcttgcgcggttcaagttctaatcctatgccacagcatgtagatatgagtatggacatggacagcgataattgtaatgcacagacttccggggtagttatccgtcataatagctatgggagttcattaggaagctcagttcaggccgctggggagagcagcagtggtcctgcttctccatttggtggttggggttcgtcttgcaaaagaaaggctcttgaaggatcccctagtcattatttttctggtgaaactcctaaccgcattgttcagactgaaaatagtgcttcgcatgcaagtctttctcaatatggtgcttcaagtagcttaagtttggctacaccttcacaaagttctccaaatgttactaatcattttggccggacagaacaaatgtttggatctggtggtggaagagcagttgcagccagtgcttttcattctncaagaaacacagaaccttataaaagagctggcagacgattaaatcccaggcagcctcaagagtctgtagcattaagcgtatc

SEQ ID NO: 13263 - DNA, 727 bp, Arabidopsis thaliana landsberg
  unsure (1)..(727): unsure at all n locations
aatcaaaacttctataaccaatctgttcttcgcgagattctactctctaatacaagtacagattttgctatattttatacaaaacccaaaaactcaaaatctgagttttttttttcggttacttgatctattcattacctgaatcagctcctttcatgggaccgttacttctatactaaatctcttgtcttaaaggtaaatagttttattgttttttaagaaaagtttccatctttgctttgtttcaagttcatgttataaaaccctaatttcttgaatcttgttgattgattctttttccccgatctgttccatttccaggtttattctctattgggtcaaaatgggtattgaaaagtttgaaactttcatcttgatttcaacgatttcgatcttgatttgtatctgccatggattcacacctgtggataattacttgatcaactgtggatcaccaaccaatggaacactaatgggtcgaatctttctgtctgataagctctcttcgaagttacttacttcgtccaaagagattctcgcaagcgtaggcggtaactctggctcagacatttaccagacggcaagagtcttcaccgaagtctctagctacaaattctcggtcactcgtggtcgtcattgggttcgtctctatttcaatccttttgactaccaaaacttcaaaatgggttcagctaaattcgcggtttcttcacanagtcaggtcctt

SEQ ID NO: 13264 - DNA, 1043 bp, Arabidopsis thaliana landsberg
gagcaacaataaacaatctgaataactgtgatcaaaagctaacctgaaaaacgattcattttgccaactgcagcagcggcgtgagcagccctaagagacggaggctcaccagctggtttaagcctgcgcaattccggaaaattcacaattgccatcttctccatcaaaccaacgtggatttggaagaaaacaataataaaccaaacaacataatctgaaaactaaaaacgaagtctttattaccttgtccacttcctagtgagaatatcataagaatgcaccgtattggtaacaccagctaaccctaaaaccagaaccagaacaactccagatcaaatcaaaccaaacaaaaaaaaaaaaaaaatcaaattctcaaattcaataagggaaacttactgatcccaggaacagaagaactccctccctcaatagcagtggcgccgccgaagagaataagacgaggaccgtgagtcttagtagctgcaacagccgtaagtgtatgagcgcatctaggaccaggagcatcgtcttcatcatcccaaaaggtttctagggttttatactgaggagctagatgtagccaaggcttcgagcccattggaaaccactttacgggtataaatcgatcccgcaacagccaaaatactgaaccagaagcagagaaatgagaagacgaaacctagaaagcgaatcaaagaaggaaagactacggcactggacgaaagaactaggtagaaagttcagatcggaggagtaagaagaattcacggcggagaacggtggcgagttacgacggacggactgtcttctccacaaagtaaaaaccttttttttttttcagagactattttttgtttttgaattaaaagagaagaaaaaataaaattaaaatctttgcttcgccgagttttggaggacacagttttcttcggatagaaaaggcgttttcgctgagatggacttttagtcttcttctttagtcaacggctttatatgtatgtgaattgtctagattacccttggttttcttttattggtatata

SEQ ID NO: 13265 - DNA, 959 bp, Arabidopsis thaliana landsberg
acttcaggtacgagagagataccttataaacatttcgtagccaactttgatccgtacatcctgatcttccttgaaatccattatgttccaggcaaattctgctgctcctttggggttcttctgttagcacaaaatgatgacagttccgttagggataatacacaaggaagaaacataacttcaaagaaagttcccgagaccaagaaaaaaacatcgaacctgatttaagtcctgatcaatatcacaccgccctttaatattaaaggttacacgcttatcagctcttacaggaaactctttttttccgcgtacaagacaccgaagcttttggcgcttatcataatgcaatcctaccccaaggcctgttgaagcctaagggaaatttgtaacactatattagtattagtctacagcagaaaatgtttcacggtgacaaaatagaagaaacagcagaaaatgaaatcaaacctcaggaaaaaagtgtctaatcatcgcacagaagtaactcggagccccagttccagtatctaactctccatgaagctagcaccaaacaaaaaaccatcaaggaaattaagaaatcagaaacatgtttgcaagaaacgaaacataatccggctatactgtagccaaagccaaacaactataccacaacaaccaagctgggaacatacactgacaaataataaatcaagattcccggaagcatatggatgtttctttgctaataaccattataaagaagttcaagacacaatttttttcttatgcctaacacaagaagtctagaacctagataacattctcaaaacccaaaaccctaacagcaaaaatgatgatacagaatcctacgagaattccaagcagagagcaagtgtgtaagacacaaactactcctcaatttggctcctgcaacagctcaatgctagaaatttgaacaaaacctaggtcacaatttc

SEQ ID NO: 13266 - DNA, 594 bp, Arabidopsis thaliana landsberg
tagtatcaataagatatagaggttttacgtgtttctctccttccatagcttcgtttagagctgatctctccaccaaaagcataggaatttgctgttccactttcatatgtaagccttcgtaaaattcacgtatctcaaggtacaatggttggcattcatgagtgtccataatggctgagtcgagacattcaagacacagttttcgaccatcatcaagaatgagatattttgtatcttttggctgaaaccatgagccaaaaacagaacaacatctggttttcgaatcagattcttaaatttattttcctattaacagaaatgctatatcgaacaactgacctccattcgctcacaactgcaacaccgaggagttccatcacgctcatgtgaaggacaatacttttgcatccaaaagggatgtgccctatactcaataagaccagctggatttgtcggaatctagaggagttacatttatacatacacattaaggttagtacaacctgggaacaaattttgggtacaatatagagatcaacagaagttggctatcactcacaaagttatggcaaacatcacatttaggatgatgct

SEQ ID NO: 13267 - DNA, 562 bp, Arabidopsis thaliana landsberg
cttcctcgccgtccaaatcctctttctcgccgtggtttcttccgccggagacggtgaagacttcgctagaaccatggaccggaaacttcttggtctccacaaaaaggagaaacttacccatttcaaagtctattggcacgatatcttaagcggtccgaacccaacctccatcatgatacaaccaccggttacaaacagttcctattttggagccatctccatgatcgacaacgctttgacggccaaagttccgatgaactccacggtgttgggtcaggcccaaggattttacgccggagcggcccaaaaggagttgggtttcctgatggcgatgaactttgctttcaagacagggaaatataacggaagcacgatcacgattcttggcaggaacacggcgttgtcggaagtcagagaaatgccgatcgtcggaggaagtgggcttttccgatttgctagaggctatgtggaggctaggacaaagtggattaatctcaagaacggtgatgctactgttgagtatagttgttacgtgttgcattattgaggttaattaatgata

SEQ ID NO: 13268 - DNA, 609 bp, Arabidopsis thaliana landsberg
ccatatatgcagcatacaactgtacatttgattattgtattgtattggtttaccttgtgttacgctgcaggatccttttacactatccatatacttaactaataaaaatacacatatttaaaattttaatacagggcctatgatatacaaaggaatatatcatcttttctaccaatggaacccgaaaggagccgtgtggggtaacatcgtgtgggctcattccacgtcaacagacttaatcaattgggatccacatcctccagctatcttcccatctgcacccttcgatatcaacggatgctggtccggttcagctactattctccctaatggaaaaccggttatcctctataccggaatcgaccctaagaaccaacaggtccaaaacatagccgagcctaagaatctctccgatccttatctccgagaatggaaaaagtcgccgttaaatcctctcatggctcctgacgccgttaacggaatcaacgccagctcgttccgtgacccaaccaccgcgtggctaggccaagacaagaaatggagagtgatcatcggaagcaagattcaccgtcgtggactagccattacttacacgagtaaagactttct

SEQ ID NO: 13269 - DNA, 956 bp, Arabidopsis thaliana landsberg
  unsure (1)..(956): unsure at all n locations
tcgagaaagcttgcttttgggatgtttaaaaactgcaccatgaacagtggaaagaccattttgttcccaactttgggcgatccatccgcccattccaacttcaggacttgccctgaagcggaggaagccgttgccgcagccgcacgctccggcatggctaactcttacgcacccagccctggagttttcaaggctagaaggtctgtttgaaaaatttcatttttctttttgaaaaactattaaaaataagttttacaataaccaatctttgaaaaacaaccaaccaaacaaaattacatttttaaaaattgtttttataacgtaggaccgatcaacttttgcctttttgaaaaactattaaaaataagttttacaataaccaatctttgaaaaacaaccaaccaaacaaaattacatttttaaaaattgtttttataacgtaggaccgatcaacttttgtctaattagttatttgccgttttttatctcagggcggtggctgaatatttaaacggagaacttccgacgaagctgaaggccgaggatgtgtatatcaccggaggatgtaaccaagctatagagatcgtgatagattctcttgccggaaatccatccgccaacattctacttccaaggccgggatatcctcactacgatgctcgtgctgtctatagcggcctcgagattcgcaaatacgatcttctccccgagagtgattgggaaatcaatctcgatggcctcgaggcggctgcggatgagaataccgtcgcaatggttatcatcaaccccaacaatccatgtggaaacgtctacacctacgaccatctcaacaaggtatatttgtttttccccatttagctnttgatgtatatcataagtttgacatctaatgtaatataagttttttntaagtgtaaaacaaataacgttttttggtaatatatcgactaatcttt

SEQ ID NO: 13270 - DNA, 853 bp, Arabidopsis thaliana landsberg
gtatccaacataactctcgtttttgtccgttttcgaccgaaccactctggatagattagcctttgaataaccgaagacgcgactttgaactctttgctagcttagttttcaaagtattatcttttactccatgagctgtcgcaatatccgacgagcctataagatcaggtacgatggttcttgaaatccattgtcgaactggacttgcttgtcttcgagaagatgggaaattgcaagacgcttcatcgatttcacgagtttcggacaataaccttctgtgtgttcgtatcatttcccccattacatcgttcttgttcgtagtacactcatcttctggttccttatcttctggtttcttattgttgttgctgttctcaggctttacatcttcttcttcttcttcgtcttcaatagctcgggtggttttcttctttccgttactcgataacgcccacgccatttgatcctcaaagttcacttggaaactcgacgggcttttcggcttttcatcaatcgaaccgtctttgttatgttggtttggtttcttagattcgtctccataagactctgcaggcttcttgagctcaaagcaattagaatcgcttcctccagagtcttcttcacagtctacatcccgcggtggtgcactcaaggtgttaaacggaacatattcaagtgaattccggcggtttctcggtatttcattccgcttctactgaagaaatgtctcgatctcaacctccaacttattcagcactgatctgttcttaccatcaatgtatctccaccttctaatctcatctgcatcctttcgccaagccaagattccgcaatatgaagaacccacttgtct

SEQ ID NO: 13271 - DNA, 892 bp, Arabidopsis thaliana landsberg
tagaaggatgtttattacagaattgcttaatatcatatctatactttcgaaatattgtaatgaagataatttcacttagattttaggttatcttacagtttttgacttttgttcacaggaatagcgacataatttttcattttctatgtagaaaattgttactattcccacaacatctttaccaaaaaaacacatgttgtaacaaatttatctgtatttcgcttgagtaatatttctatataactttttaaatctctatattcaattgatgtatgtagtacaaagtctatctgcatcggaatgggattcacttgtgatccaatctaaagtcccggtaatagttgtattcatagccaaggactgtgccgaatgtggtagtttgatgcccgaactcgaattcctagactcagaatacgaatatatgttaaaattctacacagtcgacactgacgaggagttggagctagcaaaggattaccgcatagaatatcatccgatcactattgtctttaaaggcggagaagaaaaggaaagagtcctcggatattacccacagatgttaggtcagctcgccaataagtacctgtgattttccttggctcgtccgattatttatgtttgctgattcctttgtcaaacgtttgctactacagcgtcgtcatttgtctctttcaattatgaataagacttggtatggtataatgtaagacttgtttggctaattgggtaatgaaatatttcttgctgatgattataaaatataaaagatatatatatttttcttgcaatttctcttcaattaaactgtattatttgtgtttcttagcggttttaagatttaatacatatgtttatctttcttacaaattattttttttttcattcttataca

SEQ ID NO: 13272 - DNA, 749 bp, Arabidopsis thaliana landsberg
cacgggcctcgcatttccttctcagcggattggtcatcatcagatagcgacggagatttcatctgtatcaaccctgtgatgaatctcattgtgggtagagaagaaaaagacaagagctcagtgaaagccggagactttgagtttctgtcggaaaatgcaacgatgcttagcgctgacgagttgttctccgaaggaaagttacttcctttctggcaggttaagcattcagagaagcttaaaaacgttacattgaaaccaaaagtcgaagtccaacaagaagaagaagatcataaagtagtgaacgaggagggttttgttcataacaaggagcaagagaataataacaacaacaacaacaacagaggaagctggtttcttgacgacgacccttctccacgtccaccaaaatgtactgtgctgtggaaagagcttttgcggctgaagaaacagaggactaccacgactacgacggcttcaacgagggtatcgtctctctcgccgtcttcttcttcaagctcgacatcgtcttcttcgagttcgattggcgatgcggtgaagaaggaggagagagagaaggaagggaagagaggtaagaaagggttagagagaacaagatctgtgactatgaggataagaccaatgattcatgttcctgtttgcactccgtctaagtcctcttctcgattgcctcctctgtttcctctaaggctgcagaaaaacagagttgagagatgaacttgatcaacata

SEQ ID NO: 13273 - DNA, 3482 bp, Arabidopsis thaliana landsberg
tcagagaattcaatgtgctgtcaactttttataaaattatctactcactacaagctggacattgcaattagataacttggtgtagtgttccaccatctctgcaataacttcagggacttcagggatgactctgagctgtgtagtacgatcattctttttcatatagaagattttcatctccttcaaacacggaagatagtccaggaaatgttttatcatgtgcatctctttcatagttccttgaaactcttgaatctttaacacttttactggacaagatttgagtgaacgacctttctcctcccgagagacgcagtcacaagcatccccgcatttatcagtgacatggtgcaagagagtctgaaggcataaaggagacatttaaggtttcaatgtgtgaactctatttttgtacatgtttggtaaattagttatttctatacctcaatgatgagagtttctaaatgcggaccgttccttagaagaactggcatagtttgccattccctattcatgtcactccaaatacttaacactttgaggttgtagaacaccggcatcccttcacagcacctagaaagcacctacaacgctagcaatcacgcgattggaatatttgcgttctttatatcctcccaaccagccagaaatacactaaagagagaaaactgacctcaagggtatcaggagacaagtaaagttgttgaacatttcttaggccagtaatgagcttccaagcattgccaagaccaggaaaaacatcatcagccaccaacatttcattatttagtgctcttacttgctcgatttgagcttgagttagtaaaaggttgatttgagcctcgaccaagtttttcaagttcacttgtggatagtcctccgcaagagaatcacagtaataaaagtaaacaagacttggagcatcaaatgaaagactcttcagattaactacgctacaacaaccatggagatcaatagtcagctccttgaggatcgagctagacacagtcacattggaatccttccaccgcgtattagtcatgtctaactcctcaagcgcagggcaagcaagaagaagaatttgaaactgaccaatacataaccagcaggagtcaagaacgagagttttaagcatcggtaagcataaaaacttctgccaccaataaagatcagattcactttctactctcagcacaacaagtgtcctactcacaccaacctcgtgaggcagagaatataaatctctgaaatcaatgaaaagatcaaggtctgaaacaccacgagccaacacattacatatccaacgatccacatgttctaagtcaacaccggttttacacttgagggagaacgtctttatgagagaatcaccctgcaaatccaaaactctatccacaaaatccatgaagctctgcaaaattccttctttttcccgcttacgctcttctggatgaagaaagacagagtcatcaaactcgaggtaagggacaaaagcaaacagattgcgccacctcttggagagaaccgatgtcaaagcagcctcctttgtggataggaaggacaatatatgataaaggagatcatttggtagactgctgaacagatccatcctctgaactacacaaagctattggaacatctaaccatacataaacagagaagcgattgatcgaaatttaacaacgcaaccaaaagcaaaatgatctaagatacgttcaaagaagtataagaacagaagggaatagttagcttcagcacctacctaagaccgaaatcgatggtagattgttttggatttcgagagacaatggaatatatgaaagatccattttacaggaagaatctttgaaccggaattcaatcttgataaacgcaaaccgaaaaaatttagtaaattataatggtttggtttggaccggttattaaagcaaataaaccagacgtaaaacacaatcaaatcgcatgatttagacaacgtaaaggttttgagaaaagtgcagagcagaaaatgatgactgagtaattggtcttcataagaaatacatattagcagactaaggtttaactgaggaagataataatcatgacaatgtcgattatgaaaactcttacattcgaaaaagccactccgaaaatccacttcttatccatgggagtgtacaccaagaactcgacatcagaactaaagaactctttgtagagcatatgcacgacaagtttcatcgtcccacgatttcaaagattgttgtaaaatcggcataaacaacctccatctccttcaaacacgggaaagacgtcatgaaatgccatatcattgacgactctctcatcgttcctttaaaccctttaatctgcaccttcttcactggacatgataagagcgaactaactattccctcccgagatttgcagtcacaagcattcccacattcacctgtcacatagtgtataagaccctgaaaccagacaaataaagggactacaaatactgatccttgtcttggttaaagttagacatatgagttctgtccatacctcaaggactagagtttctaaatgtggacagttccttaagagaaccggcattgcttgccatcctcgatcctcggcactccttattcgtaaaattttgaggttgttgaacaccggaaatgattcacagcatagagaaaggacctgcaacaagacaaagctcaactcaacgctattcgggtgcaacatttgtaatattgcagctggcgttacaatctgtgtagtgactcagcataacactcggactaacaatgaatttgttctcatgcttcagaaagttagacaaggctgtctgattaattggtattccttgagactagcaagaaatgtactacaatagtaaacaaaatagcaactgacctcaagaatatttgcagataagtaaagtttctgaacatttcttatgccagcaaagagcttcaacacatttccaagacggagaaaaacatcatcctcatcattcggctctcttatttgctcgatttgttcgtcaagtaacataaggttgaatttagcttcaaccaaatttgtcaagttgacttttggatagtcctccgcaacaaaaacagaatacacaaggtaaagaagacttggagtatcgaaagaaatactctttgaattcagcaagtctgcacaaccaccttggcaatagataactagcttcctgaggcttgcacttgacacggtttcatcccattctagctactcagtaatagcaatgcttaattcctcaagtacggggaaacaaggaagaagcgtcgcaagcataccagaaccaatccacttagccttgataatgagagttttaagcattggtaagaaagtgcctccacctagaggccaataccaaatttacttcttaatatcatcttgactaaagtgctactgacaaacaacttttgaggcagatgatagtcatcatcatgatcatcagaataggaaatcgaatc

SEQ ID NO: 13274 - DNA, 1119 bp, Arabidopsis thaliana landsberg
acagctcattactccatacatatcaggttagctcttgctagtgacagaaaataagttttcgccatcgttattccaaaggctgacacgaactcttgacactgcaactgcaacgctaatgcaacatccatatcttgatccaaccttatactcgtgcttctccttgttctctcgctcctatcacttctctgtcttttaatacaaacaatctcgaaagatcatctctttggaacctctcttgaaacgaagttgtttatctatttctgattcttggactcagcgtttcccttgccaatcaagttaccataagtttaataatttatatcttttgaatcaaaattaaaagatcgtagtcttaaaattaatttttttatttatattataaatttgtttttgttaagaatgtatatcccttatacattaactgagaggcagtttaaaaaaataactttatcttcatgtgtgattaacaaaaatgctatgattacgtatcaccttaatatagctcctcaactcttttaattaattctccataatttactaaaatatatatttacaccaactagccatcggtatttaataacacttatattactcattaattaatccaaatataaactaaaaaaaatgaatttatcgtagtataagatttaatatgttctgatttcaattaattaaataaaacgatattatatttaacatatgcaataagagatgcaaatctttagaagattaaacacttaacattttgtgtaccgattaactttataactatacatgtttatataaccatgttacttttaaaaatatgaatattaaatatatattttaaaatttctaatcgattaaaaagattaatatccactaataaatatctacaatatggaatctaagtatctaacattatttgataatcaacttaactataaaacacaccaaaaaaaaagtgccataaatgataacatttcatcaatactttctcatcaatccagctgggccatcttggatttgaaccggataccttgcccttgatgtaaaaatattgcactcaaacctatgaatagcgaaaattctataactcacaaagaaaaaaggggatttttcttcaatcttttcgacatt

SEQ ID NO: 13275 - DNA, 703 bp, Arabidopsis thaliana landsberg
  unsure (1)..(703): unsure at all n locations
tccattcttatttcctctgttttatcagttcaattttgttggacgacttctcggccctagaggaactcgttaaaacgcgttgaagctaccaccggttgccgagtattcatcagagggaaagggtcaatcaaggatcccgaaaaggtgagagccatgaatgaaccatttgagactgtgtcaaacactttcacagtttaacctactggttggctctgaaatgatgttctggtaattaaaagagcattgaataacatatcgtatgattgtgtttttggatgatacaatgtaggaagataaattaaggggaagacctggctatgaacacttgaatgagcagcttcacatcttaatagaggcagatcttccagctagtattgtggagatacgtctgcgacaagctcaagaaattatagaagagttactaaagcctgtggtaatacacattttcctcctccactactctcaattatttattctgtgatatgttntggtatcagtacaaggcattaagagaatagtatagtcttccttggagggtattaaatcganaggacacgtttttattttaggttctccgtagctgttttgcccattgagctctatagtattactgtaggctctatctgtgcttacgtcagattcagtacattttgaattgtgctagtgtcattagcagcatgtgtgcctcacagcaagtagcatg

SEQ ID NO: 13276 - DNA, 607 bp, Arabidopsis thaliana landsberg
agagcggccacagtgtcccgagctcatctgtgacaaagatcttttcatggccgagcgtaatccacttatccgaggcacgaatcgcgatgaccggcgcaaatccgagcgcgtggttcatcggtggcgaggggagctgcacctaggatctatgtcagttactgtaccatcagaatgttattcagaacacttgacagagcagcttgtagcgaaccactaccaaaattccatgtccccacttgctaatccacctttaacaaagttgtagtcctatagtccggctacaattcgactatagtaaccatccccaaccgatcactagatcctactctaatttgacttcaaagtcctgctaatgtcacgggtggccataattcagttatcagtgtgactgacagctcaactttgagctcattttactccaaattttatatgtgctcaaggcttagctactcaagcaaagttgtaatcttgttatagctctgcaaatttgatgtgttgaccagggcaaattccttaagactgagatatacagggttctaaagtggacatcatgccatgcatttcagacttaggcacatggaggtatggggtgcctttttgcaagtaa

SEQ ID NO: 13277 - DNA, 1277 bp, Arabidopsis thaliana landsberg
caggtcgactctagaggatccaccattaatcaaacgcgtaaattgtgcaaatcattaggtgacaataagattatataaagcaataatgtcggccgtcaacgaaaacaaaaaagaacactaacgtcgagtcatatatagataatggctagtaaaaaaaataaaaaaaatatcgtacaggtcatcaggccgaatgttacaagttacaaccaaatttaatacacgaaaaacaataaaatgttccaataattttttgtaatcattaaaagcaaaatgtaatttcataatgttaatacatatctatgttggtgaacatacacttttgtccaatcaagtgaaataaacttgacatctcttgtctttagtcgcactcaacagcattccatcccaaccgatctcaatataacagcttgcgtacatcttgtgactcttactatgccatgtgtacaccttaaaacgtatcatggaccttaccttcaaacggaacattatcttcccttggttcctgtctcgttccatctccatccaacggtccttattcacggccattgcgggtcgacttaaggctccgtcgatcgagctcgtgttctttgggtcttggtcaaacggattagtaagtttagtcgaaccgatccgtttctctttgtagtaaacggatccttccatggaatcgtagtaaatgccgacgttttggttcgggttatgagccgttatcttgaagcttatgtgtgacgtctcaaacccgtcgggcctggatagaccagagattgagaacccgcggatatggacgcgtggtcggtgtggtcgtagactgatccataagatgaaagtgataatgcctaaacatagtaaaagagataagaaaatggcacatatgagtttagagactcttgttgtgaggctttctttaacccgatgaacgatgttactcgccgagtggtgacgggatatgggtcgcgttgatgggttcgatcgaaccggtaaagaatcgaccttgttgtgcattttttttttggggggtagatttagtgttagtgggtcatgggaagtaaaatgatgtaatgtgaggtttatgtagcaattttttctaaaagaaaaagattggtggtatttaagaagaaagcaaaagataccttggaaaatattatggttattacactttgagaagaaaagaatagacaactaagtatctaaatttttaactaaaaagatagaggaaaactaagtagctaaaagtgcattgcttttccttatatgcaatgcaaagatttagattgcga

SEQ ID NO: 13278 - DNA, 1169 bp, Arabidopsis thaliana landsberg
  unsure (1)..(1169): unsure at all n locations
tggggttacttaaatgatcccatgatatcgaagcaaaaagtacaagaaggggttgtttctaccgttgttaacatcatacacaaatgtgaccaaggcaacacttagccgcaacgtgatcaaacgttctgataccatctttaaatacatcccattcctcatcctggaatcgacttaatcaattcttcaaccttcgctgcctttccttccgggcaaaacggagaaattagcgaacccggtatgcttatatctagctttggcccttttggcgtccactctttatatatattctctgctccttgtacatcatcaacttcaacaacgagttaatcacagttcgatatccatcttccttcagcttccctttcttcttgtacaaattccaaagatgatacacgtctggttaactccctgctttatcaccatgcacctctatcgcgccttttatattgaaccagctctatggtaagcttttgtcattgcaacgattgtgactctttctagttcgattccttctttactaacccacgttttaaacttcttcatcgcggttatattcgcgtatactctcgaaacattgaacaccttgagactgccgactaccatattgttcttcttcaacttatatagaagcttctcgaccatatctagtctctggagctgaccatagagacaaatcatagagttgaacaggtagggttttaacaagaaccctagctctctcattctcttaaacgtggcctcggctttatctactgttctcacaggtttcgtgtaagagctcaagagaacagagtaatccctcatcttctcggngatgtttttgaacatcttctcagcttcttccaaaccaagaacagtgttaactagatgaagctgagctgcacaatcttccggaaaattatcaaacacactgtgtttaaacatccactttgatgcctgacacattacaaatatcatatcaaaatctatgttatttcctaaagaccactcgagttagagaataaagatcgaacttaactaacctcaagtgctgtagtaaagtttttgcagtcactaagattcttaataagacctctaaggtgagatggattaacttcatacccttgtttcctccattgctctaacagtgggatgatgcttgccttctgattgatatccgtcttgattct

SEQ ID NO: 13279 - DNA, 595 bp, Arabidopsis thaliana landsberg
  unsure (1)..(595): unsure at all n locations
aggggctcctgctggcgcacggcttgaaggactataaaaggggatctgtagtattccaccgtgcaattgtagtcactaaagttgaaaatcaagaaacccatgtgctttgtgatgggactcccattaacttcatagatagagctcttgttatgaacagcgctagagagcatgcaaagtagagactcccattggttccttccaattgaatcaccgacaaaaaccactcttttgttccgtagcttctccagcatgcctttggatcaaatctaacaaatcaaaggaataatacgaccgagtcagagaaaaagattaacgattatgctagagtggtaatgtggatcttccagattggtcttcagttataaatcaaaagaaattgaggataggcagctgttcgtnnnnnnnnnnnnnnnnnnnnnnnnnnnnnnnnnnnnnnnnnnnnnnnnnnnnngtaggtataattctcagtttcagaacaccctaaacatgtaaaacggtccaactaaatgtcacaatcagcagtgcagactgaaagcatgcgcatgccaaataagggtacagacacaaacagcgggtatatatgttcgagatacta

SEQ ID NO: 13280 - DNA, 993 bp, Arabidopsis thaliana landsberg
aagactgaataaatttatgtaatgtggagggaaaatttgaaagtacaaacctgatccaccaagacattaaggtcggtttggttatcagagtctatgacagagagtataggtgggtgttctgtctgaggcaccatgtgccttggtatatttaacctgcataaatgaagagatagcatatatttgcgttataaagctacccattcatcaatgcagatggttaaaaggaaatatgaaaatgcttatttcgagtttgaaccttggtctcgaaaagtcatagatgataatcttaagatttctatagttagcttcattcgcacagcctcttagagtgagagaatctttgtgatcagtcacaatgaaggcatttaatagggttccaagagcttgttcaactgaagaagcccatttattgccattgactaaagtctgcagaacatcacaccattagaagagactttttaacccacaaaatgttcacatcaaaagattgttacagcaacagttgcacatgtcaatataagataacaagtgaaatagtttgtttggtgcacagattgcaaacgaaacgagtagaaacttaccacatgggagccaataggaccaattggtggttttctaaatctacgatgattactctcaatagcctgcagaagattaatgactctgtcccctccaaatgcagtaacctggtgagcatgtatgtatttgtatgcctcttagatatttccgaaagaggcttgacaagatccagttgaaacactatattttgtgatgaaataactatgatgcaccttatttgtttgatgtttcttcagatcattaatgttcgaggttatgaatctttgcctcttttgatggtttttaatctagaagcaaaaaaaggacaacgaaaagattgaggtgttaattgcaattgtaaacaacctgcatatgcaactgattgaaaaaaagacttcagattcatgtgtaagtaataggtatagttgtaccata

SEQ ID NO: 13281 - DNA, 968 bp, Arabidopsis thaliana landsberg
  unsure (1)..(968): unsure at all n locations
tgttccattatggtttagtttcataaattaaggcatatgaaattatggtttagtttcacaaataattaagagacactatatattgtattaagtttttatataagtttctcttttttacaaggttcatttttttcataatggcatttggttcaattttcgctttaaaatgttattttatatatatatatatctatatatatacagaaaaactttgataaaccaacttttattcaaatttatctttttttttctgatggaaagtataacttactcacctttttggtttcttatttaaactactaaatttaaatccggatttaaagattcctttgaaaatgatctaccaccagtaaattaaaatatattcgacataattttaacactagtgataaaaatttactacatatgttgatattatacttaggttaaaaaaaaagaaagatatcctatgtggcaaccacctacaaactttattataaatataagtagatggcaaggcgtgtggttgccaaacacaaagaaaaacattcgacattacagaaaagaaaaaactataagaaaatcttaattaataaaataatatattcaggagggcgagagagagagagagggatgatgaaggaagaacaatgggcaccagtgatagtaatgttaatatcaagtgttgcaatgggatcagtgaacgctctcgttaagaaagcacttgatgttggtgttaaccatatgatctttggtgcttatagaatggctatttctgctctaatcttggttccgttttcttatatttgggagaggtatgaacattctgattcttattcgtcaaaactcagattttgaaactatctttacatacattttgctagttaatgaagttctctggntatgttctcgcatttttatagggaatatatatatatgattcaattttcagacgtcgaaattcaactacgtacctataaaagtgagta

SEQ ID NO: 13282 - DNA, 698 bp, Arabidopsis thaliana landsberg
catacattgtcatagagagcttgtgagtataaacctgatggatctgataatctctgtcttgcacaacctttgttgattaggttcgtgtactctggtgaagaagattttgctagcttgagatctgagaacagagccatgatgatgatgtaaagtaacaagagctgcttcagtgaataaaaccccatttcttttgtattgtgtggaagaagaaactaaaaaatcaaaacatagtttgttgtagaagaagagttgttttgttatgttattggaggaaagatttttgtgggaattttgaggatatgggtaaatgagaaagattaaaatcttttttgttgttgttgttgttgtggggcttgtttggaatttaacttttttgggagtttatgaaattctgtgtttggtggatcagtaaaagctctttattttgcttcttctgagttttctgaatttggtgttaatggtgaaagagagagattttgtaagaggctgtggatggatggatgaccactcttttctctttctttaggagatgtggaaaaagaaataggattaggatagagagagtctgtagagaagggagcgtaatttgttttctttattttttaatataacaatcaaacactcttttctttcttcagccaccactgaccagtctaaagacagtacagtgagcttggtgtgtgtattgcagtctttga

SEQ ID NO: 13283 - DNA, 808 bp, Arabidopsis thaliana landsberg
atgttaacaaagtctttggtccttctgcaacacaaggttagtaggctttgattttttttgcccctgtaatgtttagtttgttgcgctgtgaataacataagggaatgaatccattgttcttcagaggaagtgttttcagacatgcagcctttggtacggtcggttctcgatggctacaatgtctgcatcttcgcttatggccaaacagggtcagggaaaacttttaccatggtaagaactactactatacttgtcttccaatctatttttagatgattagattgtttttgattcaatatactatggttttaatttatctttatactctagacagggcctaaggaactgactgaagagagcctaggtgtgaactacagggcactggcagatctgtttcttctatcaaatcaaagaaaagacacgaccagctacgaaatctcagttcagatgttggaaatttacaacgagcaagtcagagatctacttgcccaagatggccagactaaaagatatcctttgggttaataaaagtttgactgtgtcttggtcatttaaaatctctgagatacttaggttttgtttgttccttaactcttgattacgttagagatcagaaacaactctcacaatggaatcagtgtaccggaagcaagtctagtgcctggctaatcgacggatgacgttatacagctaatggatttgggacacatgaatcgtgcagagagctctacagtcatgaatgacagaagttgaaaaacccacaaggtagatagtcctcatattatcctattttgaccagagcactttt

SEQ ID NO: 13284 - DNA, 672 bp, Arabidopsis thaliana landsberg
aaagagggaagaaatgcaggttatgtccacctccatgaggacataaccgaggtttttgggacgtttttttttggtttagagagcttggtttggtctggtttacaagctatcgagaaggactcttttgcaaggaggtggttgtgaaggattagcacttggatatggagatggggactcgacaccaagtgtttttagcagaaagttcctctcctgcaaaaacagatcaatcaggtttcttttactataaaactaaaccagaaagttttccacaattcaatttgttaggtggatacttacactttcagagaattgtgggcttgggatgcctgctgctagagatctgaacaatggagtgacttgaacaggcgagttaaactcttcttcacccgggataggcacagtctcattagagttctttaacacatcatgaccagttgagagtaaacccacttgttccacagttgcatcagacacaatcccattatcttgtagtaactccccaccattttgctgatgtgatgttgtctgagtatcagacataagttgttgggttttatcaccagaaggatgcgtcattatggttgatcctgatcctgatcctgagctatattcagagcttgctggtgaatcatggagatcaggttgcctgtaagtgacaacaatggctattta

SEQ ID NO: 13285 - DNA, 418 bp, Arabidopsis thaliana landsberg
  unsure (1)..(418): unsure at all n locations
catggcaagtccctcccccctcggtcagggagatagccggatgnnnnnnnnnnnnnnnnnnnnnnnnnnnnnnnnnnnnnnnnnnnnnnnnnnnnnnnnnnnnnnnnnnnnnagatttgtttgttgaaggagagaggtctgactactgaagctgtagttgcagactttgtttttaagaatattcagccattaaaggacagagcgtacccggcttatttgtatagtggtgtcactgattcaacccgggttaccaacaagaggattcctgctgtggatttggtaagccgactggagatgattcttagaggcaaagtgtcaaatattggtgctcctgttgcatattctgcttggaatcagccaccttccaagtcttctgtcgattttggtgtcaatcctccagctggtgacagtggtttgg

SEQ ID NO: 13286 - DNA, 590 bp, Arabidopsis thaliana landsberg
  unsure (1)..(590): unsure at all n locations
gttcgtggatgaaaagttcattttggataggatgcgtatcgagttccccgatggganagatggagaacccgccattactattgggaatgaagttttggaggcgatgaacaagctatggaagaattgtatgttggtgaaagttttagggagaagtgtgccgttagctgtgttaagtaagaagataagagaactatggaaaccaagtggtgcgctgcatgttatggatctaccacgtcacttcttcatggttcgttttggttcagaagaagagtatttggcagcgctaacaggggggccatggagagttttcgggagctatcttatggtgcaagcttgggcgccggagtttgatccgatgaaggatgagatagtcacgactccagtttggatccgaatgacaggtcttccgtttaacttgtatcaccgacaatcctctttagtattgcaaacagtttagggaaacctattaaggttgataccccactttgaagtttgagagggctcgtttcgctagagtttgtgtggaggtcaccttaagaaccattgaaaggacgttgactgttaatggcgaaggtatttgtgcatatgag

SEQ ID NO: 13287 - DNA, 1287 bp, Arabidopsis thaliana landsberg
gtctgggtggcggtatagtacgtaattgccctctaaactaccgagattgattcatgggcctctattccaccccactcatttagtgaatggtgacatgatatatatatcataatggttttgtaagaaaataaagtgtatattatcataatatcataatttgtttatgcgttttcaggagttactataggtgcacaacacagaagtgtaacgtgaaaaaacgtgtagagagatcgtttcaagatccgtcgatcgtaattacaacctacgaaggaaaacacaaccatccgatcccatcgacgttgagaggaaccgtggcagctgaacatctactagtccaccgtggtggtggaggcagtttactccatagcttccctcgtcaccatcaagattttctcatgatgaaacattctccggccaattatcaatcggtgggatctctgtcgtacgaacatggccatgggacctctagttacaattttaataataatcaaccagttgttgactatggtctttttcaggacattgttccttcaatgttctccaagaacgagtcttgagagaggggtatgtacgtactatagatcgtgtcggtatggttgcattatataagcataaatcatttgtactatatgtatgtaagtagattcttaggtaatgtatttattcatatctatacatgcatgttaatttatatatatttcactgacacactggcactgctactaatcatttgtaatcttgattattaaaagagttaattagagtattttacattttgtcctcttccaaatcagagtattttttgtataattgggtatatgatgtggtatcttaatttatttgggggcagacaagttatatattgataaaagtaaccatcacacttcaaaagaggaggagtttagagaagacaatgatgtggttattttacatagcgatattggaaccaaaagaaagaaaaggtggaaagctgaggatgatttcactttgatttacttacatctgttattgttcaaaaaaaaaaaaaattgctaactatatcaaccttatcaaagaaaaaaaaactgatgtcttaattttcctttagataaaagtctccgctttttttgttgcggaaattgttgactatatttaacgacaacgacttgctccataatcagttccctcgatccaagtttttcctatatgacggtaaatattctctgtcattttatccgattaaaaataatcataactaacgtacagtatacagaaacacatgcccagcctaatgacgcgcttgtgttt

SEQ ID NO: 13288 - DNA, 883 bp, Arabidopsis thaliana landsberg
tttccttttttctttttgtagatgagccgaaacaaataattaaaaataagtttcagaattaaaaataaaagcgagaaatctcacattattaaaaatcaagctcttacatatgaagtattatattgcaaatttgcagtgaaactattgagttgctagcttttagaaattacagattattaaaagaacatggagacagatatggaaagggtcatcaaaacttagagcggagggtccaatcagccatttagcccacatgaagtaataattattaggccaatctcaatgtcttgaatcttgatccatgtgtgtcccttactagcatttattctttagagtatataatattttttcagttcttttttatttgattttctagaaaaaaaattatttcaaaaagtttgattttttcctaatttctatgcataattagctttatattttctattatacccttatttattctttgctttttttttcaaatttattagaataaaataaatcaagattaattatcataattaaataaaaggtgaaaaatgtcattttaaagtttaccttaatatctgtgtttttcctagaaaatcaaatgtgtgtattaatttcatcaaattattataatctatttttgtttctgccaatttagttcccctttgtaaaaaaaaaacaaattctccattttcttaactaattgtactaagacaaatttaaagaatctttctattcatttaggtataaactaaataaatttctactgatgtaaacatatagttcctcatttatttaaaataatatcaaaatttttaatatttaactattaatctaaataattgtcatttgcttatgctaagttttgtataatggtcagcggttggaaaaaaaaaaa

SEQ ID NO: 13289 - DNA, 1126 bp, Arabidopsis thaliana landsberg
acactaaaagcagatccaacggtgataagtgatcctcatcggctttgagtttactgttatgaatctatccgaaacattaagggccggggtcacaaaaagagagtctctccatttgtgggattatctaaggattctccacaaaagagtggcttgtatactttaccaaatcgctgtgctacttctcagaatgctatgatacctaaatttgggatcttgataaaacatatctttagtgacgacttcatatgccacttgacaatatctcttaatgtaattccaaaaatgtgtagaaacaacaataaatagctttgggttggtaccaccgatttgttcttcttccataaccacttgaagcaaattctcatagttcttctgccattgttcattcatctgtaaagatcttttgtattcaagtttcagtctttccatttccatctctgttgctgcagagccttgttgctgaaacaacaaacaaaccgagaaaatattatgttttgagtcatttttaccaaaactgtttactgtagacagtgaggaaacacaaacctgaagttctttaacttgctcgtcaataaggtcagcactgaggaaagaagagtaaacaggaacatcagaaaatggcggcggatcaaccgtaacgataccatccatagtatcttctactggtcttccatatttttccaaaggcggtgggattaaagccccacgacttttccaggaaacttgggttttgttggaattagcaacaatcgtttttctaacaatttgaatattgttcacaggaccttttctagaacctgtaagaaaaaagtttgaaaagcaagaaagggttgttaaattgacttattcattttgtagaagtaaaactcaaacagaagaaagtgctagcaaatataccttttgcatggatgagagtacgaacatggcgaagtgatttgggatcccaaacacaaaccacaccatcttctgatccagatatcaaaaggtttccgtctgcgcaatatgctaagcaagtaatagctttgctgttcagacaaaaattattgatcaataaaaattaacttagacagtcaaacagccacagcagtcaaatagattactactagctaatgttcaaatatataaa

SEQ ID NO: 13290 - DNA, 877 bp, Arabidopsis thaliana landsberg
catatgaaatgaacgctgcaagctcgctttgatttgtctcggaaaaaattccttgtaatgaagatgaattctatcgtccaccgatcacaagaaagattaaaaagagatgaatcaaatacagaacaatactacactgagaaaaaatctagatttgactgaacaaacctgaatctttgttaggcaagtttggaccaaacatataaaatccttacaagtgcttttcccatcagaactttgaagcactttgtcaacaatttcatcaaggctctacacaagaaccaaagtaaagtatattcactactgcttccaatattccagtgatacaaaatatcgcaaacacaattctcaatcaatgacgttagagcgagttttttcacaaattttgctaaagcaaacttaccatgaatgagctaacaaaagcatgggaatgagtaccacggaggggtatcccaaacagttttcccgctgcaacattactgcagtaataaacaaagcaagcaaaatgagaaaatcatatcctctcttcccttttgatgtttccataacaaaacaaaaatatcactagtaaagacataccttgttgcatcaaaacctccaaggtagcaatactttgatgcgcttattgcaccatcgggtccctataacaattgcatatcagagatgcaacaaacaaaacctcaacatctaaggctaaacatataacaggttttgagagggaaacaaacctgagctcttctagcaccaaactcaagcagaagcttagattttcctgcaacaaaccgatgtcttgctgcatttgtagcaaccaaagatgcgtatttgatgagattgaggaatggagtttccaacaattgcaccacctaagtaaagagcacaa

SEQ ID NO: 13291 - DNA, 615 bp, Arabidopsis thaliana landsberg
gctctacgtagtttattatgataaatatacaattaaaatatattgaaaaatcgaatgtatataattgtaattttattaaatacaaaagttattaaattaaatattagaaaaagtgtgtgaatcattatttactatttaaaatttaaatattattaataaatatttgaataaatttatattttatacccgtctatttaggtggattttagctagtataatatagatttgatttaaagtaaataaatgaaataagtattttttatataataggggttaaatagaaattctttggaggacaggggctgaggattaaaatcggagattgagagagcaatgagaggtgtcggaggtccgttgctgtcaatcggagatcttctcgccgatctcggtgatgaaactggcgactccccgcaaaatcatccaaatcctgaagtttcatcaaaatcatactctgatgataccatctctggacccttggatctaacccgactctttcaggtcactttctgatccaaaatttgccttcagtttcattgattcaatggtttttgatcttttcggtgtcatgaatctctaccattgttcattcattatagtcaattgtgcgattattcg

SEQ ID NO: 13292 - DNA, 1425 bp, Arabidopsis thaliana landsberg
aagtaaggcagaaacagtgagaaagaaaaagggaaacaaaggattatacaagaagacacgacgggtgggatttgtctcttggtcacttgcctaacttttagtcttatttctcgcccaattttatcatttttttgatccaataataaatttctcacattattccgtgactatatttactagaaactctttttttttccttcttttaacaatatccacttatgtaagtttttaaaataaaatatgtggacttttggtataattatttcaatttttcgtaagtttatatagggaagttttacaattatgcgaaattccgttgtaatatatttataaacttataatcaattaacgataggattatatgccaaaaaatataatggacaacatgatttttcaaaatgtatattattgtattaatgttcagatttttgtagttggtatttgactccaaaatctgatataagatcggatagatttcaaagaaaaattgatatcaaaacggtagtatccgtggtattaataaaaacatttttaaaaggctggaaaataaaataaaaacaaaattcatacaaatatatattttcaagaagtgggggctcacatgtcagcttcatgggattcaatcggacggctagaaaaagattacttagaaggcttagtgggacccacgtgtacagagaggggggactcgtgcccacacgtcctttggtccatccatctttccaaatcggacggtgctgattagttccggtttaaagctattgatagttagataccatcactatataggtttaattagtattttaaaatcaagtggcaatctaatctttaatcacgtaattaaaattgaatttttaaggcaataaaggagtttagctgtccatttttagtggtgccgaataaaaacctgtcgtctggagggaagacataaccgaccgttgcttcttttcactttccaaataaactgttcaattttttaattaattgcatatagtagaagagttgaattttcgaaagagtccatgtgagagaatgaatactctgagattcgctgcggtgtgtaccaccgtatctgattctctcaagcccagttgcaatcaaaccagtaccggttatctccgagatagctaatttcattatcttaataaaaacagaaaaccaaaaccggttatttccgagttgatatcttcttcctcgtcttcttgttaagctactctgtagtacagagagaacaaaacagagaattaaagaatcgatttagaccaaattggatgtgattcgttcggacaagaagcgacgatgaggggatctcggtttctcctctctcgcgcttctctgtatcaccgacttcgctctgatcatcaacatcacagtttctccagttttatcaaacgtagctcaattcagagatcaccagctatcaat

SEQ ID NO: 13293 - DNA, 309 bp, Arabidopsis thaliana landsberg
agcaagtttgagggtgcacaatggcttctcattcagaagggagaagaggagtaaacttcttcaagtataccttcaagctgcctgagaattacatgaataggctaattagcgactgcaatgaacactatctaagtgttggtgttagtaagtatgctcaactctggaatgagcaaagaaagttgatattggaggatgcacttcatgcttttcttttgccatcaatggagaaagaagcacgatccttgctaactagcagagcgaagagttagtagctttcatagtatgaacaggcttctgcgaaacaaggag

SEQ ID NO: 13294 - DNA, 747 bp, Arabidopsis thaliana landsberg
cgatgtgtggccccttggcaagaacgcataaacaaggttgaccaagtgtcttgatggcagcgcaacatagcccgttcggaggcaatgtgctaaacggagccactgatggtctacacggcactagctgaatcaaagccgacaaaaatgtacgaccacatgggtgtcccagcgtctctctcaccagacctgactggaccataaccataagtaacatcactgtaaaaacctgactctttttcattacaatcatccctttttctttttgtgacaatgtcttgtacaaaaaagacgaaagctcatatataacttgtactgagagtgcaaaagagaataattgcatgaagaacctaatggagttggattagatggatcatgaaacttgggttttattgtttctaggctcacgttttctacgcaattagttagattttcacatgcatattgataacaagtgattatcatctcatatattaacgtaacacagagatgatggtttggagaaaagatacggcataagttttttgatacggcataagttgtgtaacgtacaaccaatttaaattcatgcttgaagaaatgataaaaatttatgatattatactctcttgtggtttagtgtgctaagtaatctgctcactcgtaggggtccggacccccacaaagggggagggagtcgactgaacatctcagccattggcggaaatttaagtctcgtttatattttaacatgtgcccatccatgagtca

SEQ ID NO: 13295 - DNA, 605 bp, Arabidopsis thaliana landsberg
atcccaccacctgtatctccaactctgtcggaggccattgctgccttgctaaatgctactgctgacaatacccggtttctccgagagatggcaggaaactagatccaccagcaaggaggtcgaggtcagaatcaggctcctagagacactacttatatggaattctcgaaaactcgtccccctgtcttcgttaaagcggaagaacttttggaggcgaatgagtggatccacgtgatggaacaaaaatttggactgatccgttgcacagagacttagaaacccatgtttgctgctcaacaaatgtgaggccccgctagtacatggtgggaaaacttcgtagccattcatcctgaaggtcatctcatcacgtgggcaaagtttaagcaagtgttcagggagcattacattctagatgtcattcttcagatgtagcttgaagagtttgttcgtctgaagcaaggcagtgactctgtaatgcagtaccttgccaagttcaacacctatctcaatctgccatagaacaagtcaacatgaacttaaataagaaaattgcttcatgaggtgtttgagcgataggctgtagcgaaactggctacctgtttgga

SEQ ID NO: 13296 - DNA, 841 bp, Arabidopsis thaliana landsberg
cacacaagtaatgaacaaaagccacttatgatgataacgaccatagaaaaacagagttttcaaaatatatgcgcggctaagccattttcatcttctttatctgttgttgttaagaacatgtcgaagccggaatgtttcaccttggtctccattcagtgaccgcctttctaaacagcacacggttaactgtcttagcagtttctctagatgggattgcaagtgacagcttctctgcacatctttcttatttggatttgttgatagtattgctgcattcaccgcatcagccactaattccctctgtgagtcttctaggaaataccagaccgatgattcctcaggcttttcatacgcgagcaaagcaaagcagtcctgaataatcaacaagaaaatagagttcctaagcgaagcagcaacatatatagtctctgtatctgaacgcaatacatacatattctcagaaaccagatcttgcttgaaagagaaaggagtaaaggagacattggtacctcgactatatcttgaaatccagttaacccaacaaatttagctaactggagtctgccatagttcacaccttcttcaagttttccaacctgtttatgccatgtttttccaaaaccatatagttagagaaatagccccatctgcatagatgtgaaagtgaacaaagaaggaataatccagagaactaacttaaggtgatatttatacacggtgacaaggttccatgcatctatgtaacatggtttccagtgtgttataggttctgtgcattttttcactagtttatggtttaacaccaaagtccatcacacagttcaagcagctaatttttgtt

SEQ ID NO: 13297 - DNA, 1216 bp, Arabidopsis thaliana landsberg
gctctttatctcattctgtctcctcccataccccatcaaatctttgatattactaacagtcagtccaagatatatttatataagaagacaagagagtctagaagaactaggagtagaaatagggcaagcatttgtattctagtaggaggctaccactgcttttgttctcagctaggttgcttatcgaactagaagatgaacctgaaccacccatgtttatgttagaattagtgcctgttccactaatgatttgcttcaaatccccatgcccattgaagtaattataatacccttgtgcgaattccccattgaacccttttgtcctctggacaatgtggtggtctatcatcatcatcatcattatctcttcttgcttcatcataatctctgatcttatcccattgacgtctgaagaaaaactggtgtggttgttgtactgatcacacatattgtgggtgagcaagaaaccatttgcgttcgaggtgttgttgttgctgtccgagagatagagatcttgaggataattagggttaatataggaaattatctgtttgtcaccagcttcgaagccattgatgctggagatgagggattttgttgggtattgattagggttttcagcatacggattgtaagaagaagatgggattgttgttggtgaggttggtcttttcacatcctgagaaatagggtttagataaggagaagccatggctgatgatgatgaatcagaggaagaagacaagagtttcttccttagctttgtgttccaatagttttttatgtcgttgtctgttcgtcccggtagatgagctgctattattgaccacctacaagtttcaattgatgtatattaatagctaatattggagaaaagtattgcactcttgatgaattaaagttgctcgtagttttgactaaatcatggaatcaatgtagctcgtgattttgactagatttatgaagaaattaagcacgtttggaaatattttgatcattacttcaaaataacacataaattcaaaattagatttaggagaaattttgttactattataagattaattgtaggagagtgtgaattaatattttctttaaacctatctaagcagataactttgaaagggcctttacaggcaagtgggctaaaaaatgattttcattcttacattttttgttagggatcttatttttatttaagattgattttctcaaa

SEQ ID NO: 13298 - DNA, 899 bp, Arabidopsis thaliana landsberg
atctccaaactcatttaggtcataataatcagagtctccgataatgatgtttacggacgttgatcacatcaccaccactttacgcatgcctcaatatacagaccaaaacaaatcattccttaaagctaagcacattacagaaatgctcataacaaaataaataatttacattctcatttcattcataagatatttaataattacattgcgacttgcatcttacatcataatatataaaaaaacaataaccaacaatatcaatattagtgaatccatcataatgaaaaatcctaagcaactcctatacactgaggaatctccctcgaatcatcgattatggaacagagattatacgaaattaggaaataataaatatacaaaaaaaaacttgcagagaaatctcctcttttcctaagaagagatccattaaaaaacctcccatgccgataataatcctttaattaatctttatcaacgaaatttcagacactccggtttacgaatccggttcaaatcacataaccaagtcagagacccacccgacatcaggagtatcacccgctccctgatccggatccggttcaatccgacccatgcaattctctttgctcagcttctcgaacagctgcgctcgcagttcacgacccgactcgacccgttccatcgccggttcttcctccaagccattctcccaaatgttcataaaaccaggtcgggtcggtgtagttggtgaggtacggaaagcaggacccgcatccgatccacgaggcgacccgaatccggatcggtatcctccgatttgattgttgtatgacgacgacagggtagacttcactgtctttggctgcggtgtctggagcgccgcctatgagggggttttcgcctgttgtagcgcccgc

SEQ ID NO: 13299 - DNA, 1409 bp, Arabidopsis thaliana landsberg
atgttgccggacttgatcatggttggacaagtgttttacgtatatatttttttacattcaggctcttactttttacaactcgaaaagtctgatagtgaagaatctgaaggtgagaaatgcacagcagatccagatttcgattgaaaaatgctccaccgttcaggtctctaatgtcgtggtaactgcgcctgcggatagtcctaacaccgatggtattcatatcactaacacccaaaacattcgagtctccgaatccatcattggaacaggttactattttatacattaacatttgttttctttattttgtccgtgacttaaaaaagttgcttgcttaccaagagagatggattttaaggctatatataataatttacggagattgatctaaagggagttttaatagttgttttttcctaaatataggcgatgattgcatatctattgaaagtggatcacaaaatgttcaaatcaatgatataacttgcggtcccggtcacggtatcaggtatcaaatcattgttttgaataatatatcaaaagggttcgatcataatctaatactaagaaaatttgatatttatttttgaaaacatgagcagtattgggagccttggagatgacaattcaaaggcttttgtctcaggcgtgactgtggatggtgctaagctttccggtacagacaatggagtaagaatcaaaacttaccaggtgaaacttcacaaactagtccttcgattttaactaaactctcaaaaatttccccatctgttaattgttattccatttaatccaacccaatttatcagggagggtcaggaactgctagcaatattatatttcaaaacattcagatggataatgttaagaatccgatcataatcgaccaagactactgcgacaagagcaaatgcactacagaggttcactgcaatctgatcaaatctatccaatactcatcatcattggtaacacatattcttggatctaatcatttagtatatattttcagaaatccgcggtccaagtgaagaacgtggtgtaccgggacataagtggcactagcgcatcggaaaacgcaataacgtttaactgcagcaagaactatccatgccaaggaattgtgcttgacagagtgaacattaaaggaggaaaagcaacttgcaccaatgctaatgtggttgataaaggagctgttctgcctcaatgcaactccacttagttacttagatcgcttagatctatcaaacacatacatatagatatataaatacagatagatcgattacaaaatatactaaatatacttgtggatatatatatacatggacaataaataacaaatattgtctaactatgaattattggaatattgtataggaatacatgtttaaacaatgttcttgaga

SEQ ID NO: 13300 - DNA, 583 bp, Arabidopsis thaliana landsberg
tttttaatgttaaatatttttagtaattatcgaccagtagttatgtaagaaagttcatgatttctaataattgttatcttgaagtttacaatttacaaatataaatcaataaaaataaagaaaaatagaagaacatcaaacttttaagaacataggaagtataaatattagtgtcctaattattcttttcgtcgaatggtttaatagaggtcgcttctttgatttctacttaaacgtctatttctcacgtgcaaaaagaatatatattaatttaataccatcaaggcatttttttgcctataaaaatttgaagttaaacataaaccaaatccatcaaagcaaacaataatacctcacaaagaacaatatggctccacttcacttcaccattctcatccttttctctttcgttatcgtagtctcatcctcaagctttactccaccgcgtcacccatttgatcccttaaccgagaccgaactcaaactcgtccgaaccatcatcaacaagtcgtaccccgttggtccgaatcataagttcactttccaatacgttggtctcaacgaacccgacaagtctctagtc

SEQ ID NO: 13301 - DNA, 739 bp, Arabidopsis thaliana landsberg
aaaaatgccattcaattttcttgctacttatccaagatatcaaaaacttaaaattatatcagttcacatgaaggtaggggtcttatactcaatcaaacatccaataaaaggaactatatgataggaaagctaaaatggattgtaaacaaaaaaaaagtctagaaagccaaaacaccaataaaaagctgcaaaattcaaacacattctagcaacataccaccagctcttccacctacttacccgaagaagatgcgttgtcttgtttaaataacacagtagctacctcttttgtaaatccagtcctcatcataaaaagctccatttgcatagcaagcatcttcttcaattttttgtccaactcacgcttctttggtccatctttgaccatatcccagtatgcaatccactttgcttcatcaatacccaaataagtcagattctcaaccttaaagaaagagacgagctcttgaccaaaagataagggagtgcttatgacattttctctagcctcttcatgttcatcatccgaagagttagtctcttctccagaagaaccatattcgttttcagtagaaccagactctgtttcggatgaaggtgctgacgccatcggaggattctcgattttttccggctgcttaggtgccatatttcaatcaacttcttcttcagatgcaagactcttcttctccttttgtttgctttttgaggattatatataaactcttggtaattgacg

SEQ ID NO: 13302 - DNA, 565 bp, Arabidopsis thaliana landsberg
cctaattattgtaaagtctttgaaacatatttcaacaatttgttttcttccttgaattatttcgaacatatatagtatatataaataaggttttgtgcaactttaccttctatctccaaaatatgcagaataatgctataaagtccaaaataaaaaacaatataacccttatacattatatctaagattaagtctatgttcttcctcgctttgaatgtgattccccaaagatgaaggcttcttcttggcagatagaacaaatccgagaaattcatgatcgttgaatgacgatttatagctagatttttgtcgtttttcctcgaaacaacagaggattgttagatagttatgatctttgatgcatttttatacttccaatgttcttggtccaaaggacggctctgatcagaagacatatcgatgtaaaatttaatatttttaaatattttaaagttaaaaaatgaaatattttgtttacgccttgtaattatggaggaaaatgcaaaaaaaaaaaaaaaaactgtattgatctggtgctgcttgagcctaatcgttttttgtgatg

SEQ ID NO: 13303 - DNA, 610 bp, Arabidopsis thaliana landsberg
gtgaatgtgatgttgttgctggtacgcgaggacgtttgactactttcactacatcgacgcgttcttctttcgctatgttgtccatttgctaaggatccactatcctcgatgcgaacacaaggttgacttgtcccttgtggtttgggttgatgatgagtgattgtcaacatggatagtcattttggtgtgagtcttggtctaaccagagtacgagcttgtgttgtgcaaccatctctcggattgtggtgtatatgtgtgttgtccaaggatggtggtcgacgatgaaggagaagatagtgtgggttcatgccgatgagccgatagcagcgaaggacgagcgttgggtcttgatcgagggactggagaagctgggtgactagctatggtggctaacacttgggacacatacttgtgcgaggaagtggaggagcagatcgtgttgccgacgtggtcgcggaccagcgaaacacgtgtccagtacgtgggtgacacgtatggagtgcactactcacggtggtttcagtggttgaccttaaaacaccaactctacggttcgttggtttgccgagtttgggctcaaacttggtggtgtggttcagcgagaatagac

SEQ ID NO: 13304 - DNA, 915 bp, Arabidopsis thaliana landsberg
tcctactacacatgatctgagatcgaccctggtattttcaataagatttcacctatcttaccatgaaggaggtttgtgatttaaagacataagatatacactaatttgaacataatacataataagtatcaattatgttgtactcgtataaagataaataattatttgaagtaccatcaaatctcataaaatactattttaaccagaaaaagttatttgatctaaaagtgtaaaatgtggaggtatttattatttagactattaacagtcgtgaaagcttcattagacgtaaatggtgatacaaagcaaacttaaataataagagagataaccaactaatacacaagatagatgatcgaagaaaaccgaactacattcaacattaaaccggagatataatcactaatagacatgcagtgccaaataatcgttacaaactaaggtttttagaacaacaaagataatgaaatataaatcaaagacagtattcatgcagtttttaattaacttttatttttctacaatgtataaagttgtaagaaacaaattaaaagcacatctcattgttaagaaagaaagaagaaaaaaaacaaaatgacgagaaaattcaacatagtttaaaaatagtagggtaaggcaggtggtaaaactaattaagattcctctcttttttcccatcgtctcaactacttcaccattgagtttatactaatcatgcagtttttgtaagaaaaacaaaaaaaaatactaatcatgcagtttatattcatccacaagtcattatcactatgatcagccgacgaatttaatagatagtttgactattgagtcactgactaaaaaggtttgtatatcaatcttatatcatttggaattcattgatcacaacctacaatttgaatgaatcgaagtatg

SEQ ID NO: 13305 - DNA, 282 bp, Arabidopsis thaliana landsberg
ttacttcagtctctgcctttgtaagaacaaaagctgttctataaactgattctctttgccttaattcttcgataatatccatagttgaatcaatctttctctccaagttttgtaacctcaaaaaagaaacataagatcattatagttaagatttcaacataaagttttggtgattgttcttaatagccatttttctactcacctgaaagttaccatctttaaatgactaaccagaaaaggagctttgcaaggtaaacacatgtcttttctttgtgattctac

SEQ ID NO: 13306 - DNA, 1187 bp, Arabidopsis thaliana landsberg
  unsure (1)..(1187): unsure at all n locations
gttggagttgtcttagattttaattagcttcttagctcacattcttatgacaatgagatgtacgtatttttgtttccaagtagttaatgccgctcgaagatgcttgataacttggtcttcattcaacttctactttagtccaaatacatgagatatgatagcgatttttatgattatcccaaagaaagtatatattgatctgatcttattttccttctgattgtcaaaactttcatatctgaagattcaaatttatttcaaaaccagaaactaatttactcttggcttagctaattttatttgcgtcatttaaagatatgaatacggatcaaaacgcaaaagtggttttatttgataaacaaaatgttttggattatttaattctgagatgataaatgtgaaaaatagtcacatatatgtaaacaatatccctcaggattagctcttttaagttgtaattaaaatcggttaacaaaaaaaaatgtgaaaaaatacaacaagtatttttcaaacttatttcacgaattataattgatacgagatagaagtacatatcaaccaatcctctagaatagttggataggtcaacgttacaaagtaaaataaaaggtacaattcttaaaacatcgaaagtatgagtcttgagactcttgaaaaacatacattcataaagttcaaccgcgatgatatttccagaacaattgatcttttccagaacatgaaatctcctcaacgatcagcttgctatgatgagccatagttttacaaacatccttgattttctctgttagttctattactttctccttgattgaggagaggacgagtttcatgttcacctcttttccttcattctcaatatcatcatccacatatatcaaaagatatgagatcaaaaatctttacttatgtacgcttaaacttatatacacataaaaagtggtncggaaaaatacaaaggaaaactctcccaggcactattaccaagacaccaaaattcattatttttttcaacgctgttgaagcttcggcttgccgacgttggaaccgttcttctcctctcagttacctcaacaatttgtatttcatcccaaactttttttcccatttacaagctntgacaacctcgtgaaccgttatgagagaaagatggaaagatgtctggaggacctctttcgatttaccct

SEQ ID NO: 13307 - DNA, 513 bp, Arabidopsis thaliana landsberg
gcataattatttgtttatggactaggactgggcttcttaaaggggattgcaaatggctaccgagctatggggctttgtgaccattttgtcaggaacttttcttctccacaggacaaaagacatgggaaacagtaccagcttacgcgggtccacatcacactcgcctagagacactcctgtcttcataaactcaggttccagtcgcagctcccattccactagacctgcaatactataatcacacggctacgatagtagatcatctaacggtctagaacgaggcaacacgacttcaaaagcctcaaagagaactgtttttgggtgacaaatgagaaaaaaaacagagcagatggggtttaattaaggctataatttgtcttctggataacggaaggtttagtgaatgatttgttagggatactatttgattgattgcttcatgtagagttgattctaagattattcgtttgttgctcatatgagatataaagaacagttttaaacagagaacta

SEQ ID NO: 13308 - DNA, 1010 bp, Arabidopsis thaliana landsberg
ctccaagtcgctcgcggctcaatcgcgcaaagatctgagctctccgatgcaaattccgcgacgggatcttttagagagcctggtcatatacagaagcttcaagactcaatgcacttgagcctacactgatgattctcgccagcttaatgacctatacaattttccaacccctatggcctttttcgctgattgaattcagtgggtttattcatatagtagtaatgtaaatggtatagagatgagcaaaagctatattatatattatattcattagaggggtcatagcttttttccttacaagagatttgtaagctggcttaatagaagttgttaagaagcctcactttatgtgaataaattattttgttagctaatcataaacaatcagaagtttcctaaaagaatttgaagtaatgagagttgatctctggtgaatggtgattctaaaaaacaagctttggttcatgagtaacttgtcaagaggattcaccatagcaacaaaataactcttaaaccttcaataatgtttgacaaggaataaatgcagaccaaacatatggaattagaaaagagaacatagcattcattattgaaactatctaaatgtatttgaatcattttctgtaccaccttttatgtattcacacatcacattctacatcatcaccacagtgtttcagacttagaaccatagatgacatagaaaacagagctcaagttctcgagttccaaaagacaacatggttgagaaaaccgcacctctccttttaaaacttgcaaaacatgctagacgaacgagccaaccgaattgttagaccaccaccttgaatactagtctcagccttgaccatattccgttcatagggtttcctgcagcctggacaacgcccatctccatgcaaatggtcttgtggcagaacagacagagccgaaatccacaaggacaggggaggaaattcgaatccgtcaagtccaagtcttcgtagcatatgggacatgaagacggaatc

SEQ ID NO: 13309 - DNA, 654 bp, Arabidopsis thaliana landsberg
acactgcttgtagcaacgcttcctcattattcattggaacggtctcatatccgctgattgtggctgcacgaaaagacgatgatagggtagttgatgaactacaagtttgttgtgattcttggtatggatagttatcctcagtagtgatgccttggtttttgattatgtactcgaaagctttcgacattatccctccacgacatccttgattgtagtctctgtcgcagtctaagagttgttgctccgatagcgatacaagctcgcctttagtaatctttgtaatgccttccactttcgccaccgcggaaaacgcccagcatcctcctattccgttttcaaaaaattcatgtttaaaacaatgtatctctctattcttttgttttttgttaaggaacaaaaattaaaatccaaaaaaaaagaatcaacataatgacgtcaagcccaaataatgcagattgttataaaaaacaaagcttaaataattatcacatcggccttgatacttaacgggtgtaacagccccctcttgtcttcaatccatgctctcgccagtatcactaacattaccatatctaaacggcaccgtgtttttgcccgaagacagagttgaaattctggttatagccttgggcacaactagtccagtgtgtgtcg

SEQ ID NO: 13310 - DNA, 725 bp, Arabidopsis thaliana landsberg
tctttctctatacctttcaatcttctcacgttctcggtctgtatctttgtcaagtgacttagtaggttgaggacatttgccttcactccacaaggattctgtagttacagtaatccaatggttagagtcaattcaatacgtccgaagaggtatgtcagaagtatattataaaaggtactagacttactcttagacacgataccagagagtaatccatctgcagaaagaaaaaagaaaaaaggtcaaatcttaagttctttgactggcgagtgtaagaagagaaagcactagttggactggttattaccattcttgtcacactgagccaaaaagactttgaaggcgtccataaggtctggatatacaccaattaaatcactcacctaatacaagaatatatatgttcacgagtcattgacaggtaaagtccataaggtttctcacaaacttctccaacttaaccatgcagtgagaaagcttaagtcagcataaaagcataccaaagactgcaattctggttggctgattatctcctttgaatagagattaagacatcgtaagaactcttggttatccgcggtatcaagctttgccttcactctatcaacaaaagcaagttcttggctatgacctgtaaccacataagacaatttaagaacacaacatctatcatagacgatgaactcactcctaactttctaagaaaatcaatttagaaacctttt

SEQ ID NO: 13311 - DNA, 1045 bp, Arabidopsis thaliana landsberg
cgcccccctttagcaatgatacgtcaagcccttatttatacaatcatgtcgtttttcacgaattaaaagcttagctgatctcgggtggtggatctcggctcattaacttcgcacgttactgatcttcagctcggaccattaacgcttctcattcaaggcgagattcgtccgctaccgaataaatgctggatcgagcttcgaactgccgggtctataatgggccctttcattgggcatgacctttctttagaagtcaaactgcgggttgggctgaaatcgagattcaacatccacaatttgccccccaagtcttcgaagtagatctcttcggagacttaagtttaactcggatagcttatcctcaaaaattacagagcgttatctcgggagaaaacaaatatcttcgaagtaaaacaggcgactgaatcgcgcaatttcagagatttttcttggatagagtgttacgtttcgagatcctagggttttcgatttctcgctcatccaattgcttatataaactgacgaccccttcaccttcttcctcatcatttataagcaatcggactcgccctcgtttcaggtaaaaaaccctaatctctcctttcaattttattctcatttgaccgattacatagaattctagggaaccactgagatcctctaggtttagagttgcttaggattttagccggcgatacttaggaaagaaatccttattgatttctcagatttccagcttagaaaccaaagattctatgcgccgtcaccgtgcttccactgttctccggtaagactccgccacttttctcacatccgccgtcatcgttcgcctcagatcgtcagattcccgcagaaaaacttcgaaggattctttgattctcgggaagatcttcatcgggtgttcaagtgttcttggcaaaaaaaccttctcagctcgtcattcgtctcttaatgcgacgtcacggtgtttgttatgccttcgagacaaataactcgcggtatattctcgatatacgaacagttcggtaaatacacgacgtcacta

SEQ ID NO: 13312 - DNA, 901 bp, Arabidopsis thaliana landsberg
atataccaatgaggcattggttactaccaaaggatacaaaatctttccttttgaaagaaagaatttttctattgtatgtatatatgagagagaataaagaacatagtcaaacaatcatctgaacaccaagttgtggcagctcttgtcacacgggtatgggcaatcgactaacttcacttccgctctatcgaaataccaatctcctacagctattgccaccgcctacaaacattccatagacaaagtcaagatctagaaagtggaaacaggctttccttgtgtgttactttgtttgtgtgggaaagatttgagtgaggttttacctttttcctgataacaggagaatcatcggcaaaccaagtatcttgtctctcggtttggcagtgagcaaagcaagaattgatgaacaatccattctgtctagacattgagaagcccttgactactctaagcatctgttccctgaatcctgttctcgaataaaagattaaacgattagagtgatacaatgatgctttaaagggtgaagtccacaagtttttatgatctatagaacaaccttgcaagaatctcaactgtgcaggagtacattttccatggtttagtctgcagtcatgccaaaatccactaggatcagctgatgttggagctatactgctttgaatctgtttaaaaaccattacagagacttgtcagcctaaccatcaactttctgttctttagtagcaatgtggcacttttcaaagggagaaaaaacataacctgccatgtatcatatgctgcgttgacgataaaaagtggagttttcatttgactgatcagattttgcgggaagaaacactgtacccatatatgagtcctcataaacttccacgagttaccaaatgacccgccttgcaac

SEQ ID NO: 13313 - DNA, 561 bp, Arabidopsis thaliana landsberg
cgcaggtcgactctagaggatcccctctgaaatctgtacagaatttgggcagattcagttactgaatttgtgaaaagcacaacttctaaacgatcagacgtatgactgtcaaattttaacacaagtaatataataatgttatctacaactttcttgtgaccaccaataactgatttcagcattgtcttaagcaaccattgcaatctctggaatctgttcataaattggacagattcagttactgaacttgtgaaaagtatagcttctaaaccattaattcacagcacatgcatttttaagacgagctagatacacaagtgaactataacttttatacagcacatatctatagaacacatgctttacttgactagattagtcgcacgactagaacgtgtacacgcaggaaattcagcttgcggttagaatagcgcttaactcgagcacctcaaccaaatcatgaaggactagtgccgaattctcaagtttaaaccattatgatttagttatcaagtgtcaattaatatgacgacacttaagcatttcaatacacgatgcacg

SEQ ID NO: 13314 - DNA, 781 bp, Arabidopsis thaliana landsberg
ataagcagccaaacaatgaagatattacacaaaaaaaaaacaggtaaaacttggacaattttgttgataacaagttatattaaccatttaatatacaagcttttaattatcatagtacaaacatttatacatagttccagagcctaataaagattgagaagtttgcttcagacagctgtccttctacgggacccacaaaaatcccagatttcctatacaccattcgatcaaacatccaacgatcatcataatgagatacaactcaaaactaatacgcacgaccgtagaagaatattcacctactcacggcaataatctacactcagctttactaaaaccaactctcctattggtcacatcaaactcaacccaaagattttgctgatgaacgttcccgattatattactagctgcaccaagcatgcttgaccgtccgattccaacacagtgaatcccacctcctacgttaaccaaaaggctttgtttctcaacgagtatctcaacacctctcccaaactcaaacacaagatcgcctatcaaccgtccgatctccatcgaatggttaccatcaaaacacatgtcagctgtcgaaccgtacacgtaacctttctttaatcttgatcccacaagcctcactatttcttctttgactttatcatatgccacgtcgactaagtgagtaaattcagaacccgaatcaaccatggtttgacccgacccacctgcatcgggtctaaaaacagaaccgggtatgttgagtctcttttgtccgattctgata

SEQ ID NO: 13315 - DNA, 604 bp, Arabidopsis thaliana landsberg
ggaaatgccgcagctggattcttacgtattaagtctgtcacgtttagaccattttctccataaagtctctctatgcaccttagatttagtgctgtattaagtcaataagaaaatggaaagtgttagcttaaaagatgatggcttaaagatatggtaagcgaggtgggacggagagaactacaatcactaatataggtccctggaaaataaatgcccacatacctgtgaaatggtcttcaatccggaaggagccctcaaaacttattttcttatcaatgataatattcaacaattcttctgcacttttggcagcagatcccacagattccaacagcatgtccaactcaaatctgtaagaagaagcaagtaaacaatcttaacatacaaattacttaaagactacaaaagctatcaaatgtgtaatactttttgtaaacgaacctatcatcttcacatctaaacaagctttcttcatattggttcctgcgcatgtgcttaaaagagtagtcttcacttcctgaagtgacagaaacccagtgatcatttaacacagcagctcctgatttctgtctgtggcgcacagacgggattggatactgcaaat

SEQ ID NO: 13316 - DNA, 922 bp, Arabidopsis thaliana landsberg
gtcctcttctgaacagagaggtgctccaggtagcaagtttcttaactacttgaacaagaatatcatgcctgcttttgaccaggtatattgtaactttctcaccttttcgtttaggtgtttgaccgtagttttgtatgtgcatgatctctttgtattcccttgggcatattaagaatagactagttaatggtatcgagggcatgaagtcacatctgaattactgaacgtggagcaactctttttgttcatacatgatattgccacttgtctgtcttgttgtttcattttggtaaaatctatattactccatgggtgagcataatattttgccaaatccacttttactagctgccagaggagaggaagcttaatttactcagagctcttgctgagatgtccccatacacaacagctcaggtagcacgtcagatacttccatcaatagttcagctcttaaaggtacctcttacgaaccaaattctcatcttgtcttcatatcttatattaagaatttatggacatacatattatttactgttatcatttctctggtgtatattcttattttgaacgtaaacactgtaactgttacgatttgctctcagaagtacatgcctgctaggaaaactggggaagaaatgaacttcacatatgtcgagtgcctgttatacgtgctacatcatttggcgcacaaggttgtctaactatttttagttgcttggcaaggtctcttattcttccttattacttatctatttctgttgaacatataggctccaaatgcaacaaacagcttgtgcggctacaagatagtgactgggcagccatcagatagactcggggaggacttctcagagttcaacaaggaatacactgaaaggtactgtgaataaacagtagtagaatgagattcagttttctt

SEQ ID NO: 13317 - DNA, 850 bp, Arabidopsis thaliana landsberg
  unsure (1)..(850): unsure at all n locations
tataggatatcctgtagtaattaagcataaatatggagtttcttcgacttattatcaataatttttgttatggggtaattttgttacatgcatgcatattgtatatggaagcaaacatccttcatggctctctcttttccattcgttgctttatatattaacaagtaatgaggagaatgacataacttcatatctaatatatagtcgaatactaaagcaaataaaacgttttgggtgtttgaaaggagatttagactagaaggtataattagaacgaactgaagaatatatgatcacagcctcacgtaaaatataaaatgtatgaatggatgttgaattaaaatgaattttgtacctcataacatatatcttaacatgcaatatataagatttgtaccaaatcactcactcatttcaacgaattactaggtttttacatagaaattcattttaatttcgtacgtctcatgcgtcgtccgacaacttattgattatgcataagaattaaggaaccaacctaacgagtgtgatcgtatatattagatattctctctgttacatgaagtttgattgatgttttgagttttgcacacaaattaaaataaaataactttatattattgaattattattttcttagtttaataatatcactattacttctctctttttctattggncacaaacaaaattaataataatatttttataaaacattaaatttggtggaacaaatacaaaatccaaaacatcaaataataaagaatcagagggaatacaatttaatactcgttaaggacattatcctttgnagtatcatgtaagggatgtgacgggttagttgcttgac

SEQ ID NO: 13318 - DNA, 764 bp, Arabidopsis thaliana landsberg
cagaattgaatcgattgacatgttgtgttggattagggatttaaagactttatttgtttgatttaggtgatatttatgatatttcaaagatttattattattattattattatttaaatctcatcaattatttagtttaaataagaaattttggagtattttgtgcgatatcagccttttttctccattcgccactacatttttttgaatgctattttaggttgttcaaccataacattaattaaatggtatgttcgattcaatggtagctcattatttacgccacgatatataacgttgtagcattttatcgatactatttttttcaaataaaattgacacattttacattttatatttaatatatttttatatagattaaatttggtcatagatatatattttaaatatattttttcataaaaattacatataaagcataacaagtcttacaaaagagtaatccattttagctttttgatttgctattatagggcttagcattgttgaaatgctatgatatagttatcagattcaaatcccaaatactatctttaatagcaattatgaaaaccatgctatcctaatatgctattaatgttcatatttttgtaaaattcattaaagccatgtgagtctagcaagatgggaaataatatgatctttcgacttaaggattttttcaataatcttgatttgattcattaaacactcttactttttttttgacggttaaacattcttactcatagtgagaataacta

SEQ ID NO: 13319 - DNA, 569 bp, Arabidopsis thaliana landsberg
  unsure (1)..(569): unsure at all n locations
aaggttggtggatttaagagatgctcggaacattgctagagacattgattctcttgtttgtgggagaagcagcaagaacaagctttccaaataaattagaactttttttgagtttttacatgtcaaaacacacaattattgaatattgatacaaacaagtgaaaaaagaagataacattattgatgatacattgcaagagcttcgattgtggacagagtaatcagaatctcattattttgtttccccaagagcgtttctgaggttagagtacttggtttcgagctcataccatgaatccaagttcaccaaacggttaaactcttcgaaagttatcatcttttctaagtggtctttggnnnnnnnnnnnnnnnnnnnnnnnnnnnnnnnnnnnnnnnnnnnnnnnnnnnnnnnnnnnnnnnnnnnnnnnnnnnnnnnnnnnnnnnnnnnnnnnnnnnctttaagctcatcaggcgtatgcaatggcgtgcgtccaccttcaagcatgttacacagtctgtaaccttttgtgcgccttccgatttcttaagctcgtcatcgtccctcggtg

SEQ ID NO: 13320 - DNA, 566 bp, Arabidopsis thaliana landsberg
tacccattctatatccttcagattgaggaaccaaactctccatttgagtatacatagacgaaacctcagccagttcggatttcttggcgctcaagacattgattcggagttcattacaacgaaaaatctcctgattagcttcatcgatcttggctttaatctcgggattatcgtaaacaggttgcttaacaatgtagaaagagagaggtttatctccagacgaatcctcttcagctgcaagtcccgatgaactatcaccaccggaaaaaatagtgtcttcttcttcgtcggtggtgacctcgctatttgtcaaagattggtcgcattcgtaaagaattagatcgtttatctcgggcgaaggaaccacctcgaagccatcacagaatataatctgctcatccattttgattatttcccttgagtcaagaacaagacatgtcaaaatgaaactgaggtcaagacagaaacttaagtctactaaaaagtgcaaaagaaataaacaagagatgtgttcccaataggcccatatactacaagaaaataaaaatggtagggatttaatggaa

SEQ ID NO: 13321 - DNA, 736 bp, Arabidopsis thaliana landsberg
agatcccatgagttttgacctttcttttgggcggacaataaggtccacatgaactgaggttttttgagtctagaccggggcaagtcaataatacaaaaagaggacaacttgtcaaatcattggtccattcaaatgaaaagaagcccataataaatgtgacaaggatgtgtaacatggccacaaaataatcagtttggtttcgttcattttggactatggggttggttttgaaattccattccagcacatagaatttcagaacaccaattacgaaaggctttatcgtgttagaagttatatattttgagaagaaaaataaaagatattgttattatgaaggatcatgaactattctaagactgagctaacacgtgttacttgcttaatccttacactcaaaaaagtctaaatgttaatggtattaaaaattattcaccttggttgttattcttatttctgcaaaaccagacaacaattcagtaatcaaaaggacacatacgtaagttgaaattggaaagagttcttcaccaaagctaacttgatcctcacgaacgtctcctaaaatagcaattttcagctgaagaacaacacacgcctcctaataaactcgttgtctttctcacatacacaaaaccaaatttagcaaaatggttattattacctttctccctcctttcggaaatggccaccaccaatcatacaatctaccttcttcgtcattcatcattcacttctc

SEQ ID NO: 13322 - DNA, 837 bp, Arabidopsis thaliana landsberg
gtgctctcagttatctatgttgagaaaaatcgattttacccttaggttttggtgcaggagggcagcgatttcgaatccttcctcactctgccgtctattcatcgatttgaccggcggcactgtataatctgcgatttgtgtggctcagattgggtcgggtttaactgttgctggagctgttcatgtgtacactgctacaaaattttcgccttctgcagaaacttgcatcaagtgttcgagaactgcaacgataattgtgtcgacgtcgttatagaatcacagatactgatttgtactctctctgcatttcgacatttggccactatagctgtttccgattatgttgtatatggatgactatacatgtcatatatgtaggggatgtgttattttcaaatgttaaagactatattagaagtttatttggatttattgggtgatatagtgtattgtacctcagggtagttttataatcaacgttttatgcggctgtctcagagatgggtgttgaaatgaagagagggtaaggaactagctagctttgtttttccaaacttgtgtttatggaggcaggtgatgtgtctgtttttgtcattgctagtagctgggaattctctgaaaaggcactacaagaatattggtcatctgtagcgggcgaataacgctatcttacgatacgatagcgttttaagaagcgatctatcatcgcccgtgataatagggtcgccactttttatagcgggttttgggattgctatcatatttccattatatatagcgctttgttctttgcaatcggattctcaacaatagcaattatattttgctattatttgg

SEQ ID NO: 13323 - DNA, 897 bp, Arabidopsis thaliana landsberg
  unsure (1)..(897): unsure at all n locations
catgtaatcaacgatccagatttcatcgaatctcatcttcatcgcgttcttcaaaccggtgatcatctcatgattcttctcagaggagctcttcgtctctactctgtagatctcgattcacttgattccgtctccgacgttgagcatccgatgaaacgtggtggtccgaccgaagtttttggttcttccaacggtttaatcgggttatcgaattctccaactgatttagcggtttttaatccttcgactcgacagattcatcgattacctccttcgtctatcgatctccccgatggttcgagtactcgtggttacgtgttttacggattaggttatgattctgttagtgatgattataaagttgtgaggatggttcagtttaagatagattcagaagatgaacttggttgtagttttccttatgaggttaaagtgtttagtttgaagaagaattcatggaagagaatcgaatcagtggcgtcgtcgattcagcttttgttttacttttattatcatctcttgtatcgtcgtggttatggtgttcttgctggtaatagtcttcattgggttttacctagaagacctggtttgattgcgtttaatctcattgttagatttgatcttgccttggaagagtttgagattgttcggtttcctgaagcggttgcgaatggtaatgttgatattcagatggatataggtgttttagatggttgtctttgcttgatgtgtaactatgatcagagttatgttgatgtttggatgatgaaagaatacaatgtgagggattcttggactaaagtttttacggttcanaaaccgaaaagtgtgaagtcgttttcgtatatgagacctttggtttattctaaggataagaaaaaagttcttttggagctt

SEQ ID NO: 13324 - DNA, 871 bp, Arabidopsis thaliana landsberg
tgcataaagcccagagatcatcaaaccaaagcttgaactattcggctttatccctttccgctccatctccgcaacaatggagtatgcagagctcgctgaaccggattcacagaacactttgatcatacgattataagtctcgagatcaggttcaattccatacatcttaggcatctcaatgtaaactcttttagcttctttgtaatccttagctactaaacaagcaaagagaagcgcgtttaaagacttcaccgtacgagagatttcgaatttctcgagatcacgaaaaactcttaaagagtgatcaagcatattagcttgagcatacaaaacaatggcgtgagcagcgaaacgttccgatttgagatctggtctgttttcgatgaatccgtcgaggagattcgatacagcggagaaatgtttcttctcggcgagattctcgacggcggcggagaaagcgattcgatctatgtggcaatctggagtaagagaagctgcacggcagatttcgaggatacgatctggatctttctcggatttgagaagagaaagagctgctttgcttttttctttgcttgtcagaggagtttttgaatctggtgagaggattgttgaagccgaggagagtgatcggatttgtggtgatgcgttgaggtgacggaagagagatgttgatgaacggattcgagagagtaacgccattgctgttttcttagggttttagatttgttgaagaagaagaagaagactgtgaaatggagaagaagacggagactgaagaattagggattttagggttttgtgaatctaatcgtaaccgctgaggggttttttaagtcatcattaatgaccggtgcgatgaaagaaaaaa

SEQ ID NO: 13325 - DNA, 734 bp, Arabidopsis thaliana landsberg
acttttaaaaatcctcgaccaacgtatggtcataaacggttatcgcaaacaaagcaaataaacctttgaaaaggtgctccacagaggaggcagacaggtcaaacaattggaataagatacggtaaccacgtatcggagaaagggtcataatgcctctcttttccacactatcagaagtttgcaaattatccaaacaattgatgatcacatgaatgaacctgataattggcgaatgagaagatagagagttgaaaaagcttcggtaacccctactctgtagtgatggggtcataataccggtcttttcactctattaaacagttggcaatggttgggatagagagtcttagataaggtccatactaaacttaacagctgatctcgacaaaggtaactatcataccaacctacaaaaatcgatactctattagtgtggagtctacgaccagttaaatcagagctaaaggatgtttaaggaaaatactttaacagaaaattatcgatacttaacacgggcagcaaaactccaggacacttccaaagtggctttaacccaaagcgattcgaaatcagactttcacaattattattttgtcttaacgattatcgttttaaacaccaagaacatgtcatcaatcagtctcaaaaatgctaaacaagattaggataactatggtagaattgtggaagaaacaactgaacataaaatagtaatggtggttgatataaaacat

SEQ ID NO: 13326 - DNA, 957 bp, Arabidopsis thaliana landsberg
ttgtaattatcaagttaatatatataaatttaaaatatcaatactttcttacactaatagaaacagatggagaaagattctggtaaggtgtcagatttctatttactgtgtttttggacaaaaaaacaaaggttcgagtcaatttactgtcgtgaaaaaatgtctatttattactatattgtaatctcttttcttttttttccttcgactatattgtaatctctttgatatatatgtggtagccattcaaaagagtaagaaaaaaatttaattgctatattgtgattttggattctagattttccgatagctaaatataaaacatgtattctcagaatctcgctgcaatattacattaagatttgcctcataatcaaaacctttttactgcttaaaaacaaaacaaaaaaatccttttaaaaacaaatgtaaaagtcctttttattctaattaaatctaccgagtataaaagtttttttttccaaaaatgtaaatatttcctaaaagtgaaaacgatttagctttacaatctatgattatagacctataaagatggaaatatactttactttacatatatccattatggaagtttgtttacttacaaaaaatatgaatccctttgggaaatgtttttacacaacatattattttccccacataaatgcacattatgaatggaaataaaaagtaaattttatattctttttcttatcaattaagtaatttccaaatttgaatttaaagcatgatttatatggaaagccaataactttaacaaaaacaatatttggaaaaataatatttcattaattaagattatcttcaaccactataaaaagagttttaattgcatataatcatttacttcataaatatttagagcagtcacatttgaaatctctcctctcttattcttattcttattctcctaaacgtgtatctatctatggagct

SEQ ID NO: 13327 - DNA, 1602 bp, Arabidopsis thaliana landsberg
agaaagctcccactctctcacaccccaaagcttcttcttcttcttcctcttcctcttctctaatctgaatccaaagcctctctctttatgacacaagatcgctcagaaatgtctgaagatgacgatgaccaacaatctccaccgttggatctaccctctaccgccatagctgatccttgctcatcttcctcttcaccaaacaaatctcgtaactgtatctcaaattctcaaactttccctgaccatgttctcgaaaacgtacttgagaacgttcttcagttcctagattcaagatgtgaccgtaacgctgcttctctagtttgcaaatcttggtggcgtgttgaagctttgactcgatctgaggtttttattggtaactgttacgctctttctccggcgaggttgactcagagattcaagcgtgttaggtctcttgtgctgaaagggaaacctaggtttgctgatttcaatctcatgcctcctgattggggtgctaattttgctccttgggtttctactatggctcaagcttatccttgtcttgagaaagttgatttgaagaggatgtttgttactgatgatgatttagctcttcttgctgactcttttcctgggtttaaagagcttatcttggtttgttgtgaaggttttggtactagtggtatctctattgttgccaacaagtgcaggtaaatgttacaacttattggatatgaaaatgctatctttgagtaatgttttgatagttatgaacttattggatattaatttgttttcagaaagctgaaagtgcttgatttgattgagtctgaggtcacggatgatgaagtggattggatctcttgtttccctgaggatgtaacttgtttggagtctttagcttttgactgtgtggaagctcctatcaattttaaggcgcttgagggtcttgttgctaggtcaccgttcttgaagaaacttaggctaaacaggtttgtgtctcttgtggagctacatcgtctgctacttggagctccacagcttactagtcttgggactggttcatttagccatgatgaggaacctcagagtgagcaagaaccagattatgctgctgcatttcgtgcttgtaaatctgtagtttgcttgtcagggtttagagagttgatgccggagtatcttccagctatctttccggtgtgcgctaatctcacctccctgaacttcagttatgctaacatttctcctgacatgttcaagcccatcatactcaattgccacaaactccaggtgttctgggtatgtatccttcttgatctatgtcttcatggctttattaagttatatgtgacttaactctagtgaccgtattgtttgtgttagatggatagaatgaataaacttgatattagttgtgtaaggaacttgagtaaaatgcatgacttgaactttacaatgcaggcccttgattcaatatgtgatgaaggactacaggcagttgcagccacttgcaaggaactccgtgaactcaggatcttcccttttgatcctcgggaagacagtgaaggtcctgtctctgaattaggccctcaagcaatctccgagggttgtaggaaactagaa

SEQ ID NO: 13328 - DNA, 1039 bp, Arabidopsis thaliana landsberg
acaaatttttaacaaaaagtaccgatttgttttattttttaacaagctaacgaattaaaaaagaaggatagtgttgttctctcccagtatatacgcgcatatatacacacttatatactcaaaagtttttatataaatttttttctctctataaaatataaaccattgtaaaacctaaattacttaaaaagatctctctcatttgaattcttcttattgtttagattccaggtcaaactgtgatccattatctttgctactaaactaagttcttttctctgatcgaatcaaaaagttttcaactttctaaatttttttagttctaagaaaaaacctctccgagaatggttttatcggtgaagcaaacactctctccgaaaattggacttttccgacgaaacccttcatcctcactaggaagatctcctgtttctctctcgtttccatcgacggagcttccaaaacgcaccgttttagccgtgtcaaagccgcttcatctctcttcttctctgagagctaagtctccggtagtgagatgtgaagcttatgaagctgaccgatcagagcctcatccgatcggtgatgatgctgcggcggcggaaacgaaatcagaggcggctaagaaattgaagatcgggatttactttgctacttggtgggctttgaacgttgtgttcaatatctacaacaagaaggtcttgaacgcttatccttacccatggcttacctcgacgctttctcttgccgctggttcgttgatgatgcttatctcttgggctgttgggatcgttgagactcccaagacggattttgatttctggaaaactctttttccggtaagtgagttggtggcgaaattgagtttggtgggttggtgagaaaaattaggggaaaaaggttaaaactttaggtttgatttcgatgtttacgatgatgggtatttaggtttaatgtcaaattgatgcagatcttgcatgaatatttgttgtttttttgttacttgagtgatttgcatagttttgtttgcttcctaagataa

SEQ ID NO: 13329 - DNA, 573 bp, Arabidopsis thaliana landsberg
gcgttctccgcgaagaacattaacgaagaagaagattttaaatgcagaggaaaacaaatgtacacattgggcagggcttgacttgccatgtccatggttgccttgaccatagaaatcgttgcacatttcaagaaatggaatcttgatctcattaaccgaccgtcgtgggaggtttacgggcttgtagaatggtcttacatggattggctctcgtttcgatccgattacatcgctcctcttgtcatcagtctctccagattctgcactgtactctttttgattcagtctcttgatcggttagtcctctgtctcggttgcttttggatcaaatttaaaaagatcgaacctaagctcacagacgaatctatcgatttagaagacccatccagtttcccaatggtccttattcagatcccaatgtgcaacgaacgagaggtaaactataaacactctgtttttactctgttttcactctggttttactctgttccgctctccctttactctgtttttattctgtaaaatgttaagttttctcttacatagtataatattgttatgttttgttttttc

SEQ ID NO: 13330 - DNA, 886 bp, Arabidopsis thaliana landsberg
ttttgattatttagattgaatactacgaatatatcattttattttagttgagtttaggtttggttggaggtggggatttgttatgaaataatctggttggattcaactgtattcttggttgaaaagtaagaatcaattcatgataactttaattttacgaatatgtcaaagaataagataggtacttatgaatcgaataagtaaatttcattatctacaaattaaagttatctcggcttctcataacccacgctatctcgttatctcggcttctcataacccacgaatattgttcctcaatatgtcaaagaatccttgaccacgctatccacgctatctcggcttctcataacccacatatctcggcttctgtgaagtttggtcaaccgcctgaatagatcaaggagaccacgctattcgattaccccatccttaagaatcgtttatctatttgattgcctgttatcacttctacttagttactcatgagcctatcattgccattttgcttttagtttcatttaatttctgttattgcacattatgactgttagaaccaacaaactctctacttggcttgacttagtgcattctaatcatatctcatccctttgcatcacaccagattggattgacaccctaagtactacaacaacatgatagtgctttaggattaattgactaaaaatctattatcaatttggcgtcgttgctaatttggtgtttatttgctatatttgagatcattagaaacgttaagatcaagttcgtttttgttatacaacttactaaccttgtgtcttttttgtctttgtatttcaggtacccagcaacagcttcacagactcatctctgttcgtctactaaagtcaggctgctacttgtt

SEQ ID NO: 13331 - DNA, 575 bp, Arabidopsis thaliana landsberg
gcttcgttacaaagacttgtcctaacagtatcatgttgggtcttatggttttgagattcaagtaggctctatgcgccagtaatgcgttgtgcatgttcccgggagatgcagagatgaagatgtcgctcttcatactcacgtagtaatcgactgcagccatcagagaagctttcccttgtacatcagctagttcctcagcagaggctaggcttttcttgttttcaatcccggggaacagtttacgcagcgttgagattcttgcttctcctccgtaaacctggtgtgacgctagatagagacgggtattgttactgaaacccaaagctgacagcagtaaaccaatctcttctggtgtcaacgggcagcgacctttgtttcttagctcctcatctgtgaactgtgaatttaagacccttccttgccagatcacctggcgatattttgccagcgccagtttttctgctttgccaccttcaaagtcacagcctgaatgagcagccatgtcctaaaaaaaaagatgaagcaatgtcagaactagatgttactgccaagaaatgggcacatttgttgagaat

SEQ ID NO: 13332 - DNA, 881 bp, Arabidopsis thaliana landsberg
atcaaagaagaagccgtgacgttatccacgtagggatattccatctccggaaccggtgagaaatatggaactctttgtgtgttctgatgagcccacgacggcgacgacgaggcatagtgatgatgatgatgactgtaatagtttccacctccgttgtacgaattctctactgggacttctgccgctgatgaacctccaccggagatcgttaagtttctggctgtcgcacgcctctcctctttcttgaatcggattccacacgcgttacataacgactgcaccaagttaacattgtatatgttacatccaaaatatctttgaaaatgtagttattatagacatgtgattatatggagattgtataataaatattagggaacaactttatagactttatacaacttgaattaaaaagatttaaaaagaaatcacttattttgttttatggtttagggtaaagtttattaacaaaaaaataaaaataaaaatagtttagggtaatgtatttatggaaaaaaaaaatataaaacaaccaagaaagtatatgatgttacaaaatttgattagaaaaataatagtaatttttcatagaatagttccgcatggtatataacagtttgagttttttgaagttttgaattgccaaaatcatacttttttactttcattacaatctaaatactttttcaacaatccatgtactattttcattaggcatatttatctatggacctatggtcatctcggcattgacacttatcacattatctgatcgtacatgatctattaattaattaccttaggtccttttggtccgtttctccatagaggagttgaagtggtgtcgcagctagcacaacggcgaggtaggctatgagcaa

SEQ ID NO: 13333 - DNA, 549 bp, Arabidopsis thaliana landsberg
taaattcatgccgttctctaaccagaaaaggaaataagaaaatttctttcaactttgagaattgaaagcaacacaaacacactacagatagagatagttcaattattcaatcaccgcactcgcagtttgcaacaagacattaaaaagagggaaacacagactaaattaaaaactagtcaataagccttgccaattaactactctttgggaaagacacgaagcttgcactgcaaatagtcattcgtctttgctagctcgacaatctcttcagcttcgtcttgcttggaccctttcaccaatgcatcaactacctcctgcaggacagcctcatcgactagcagacgcttagcaaatatttccttgcagagctcataagcagactctaaatcgcccgccttacatattgcaggaagcaatgagttaaagacaaatttcaacgggcgacaaccattcttctcgatttccttgtaccacgttatggcttcatctaattttccttcactgacaaatcctttaatcatggcagtgaatgtgaaacatcaggtttga

SEQ ID NO: 13334 - DNA, 802 bp, Arabidopsis thaliana landsberg
  unsure (1)..(802): unsure at all n locations
ttgtggtgtctgctttttggtaccgtgtgtggcttcgttagtaatccgtgaggccaatcgttaaactcctctctcggatgatcttgttttaaataggaaaaaacaaaaatatcagagagccaatcaatggaaagaagaatgttgggaatgatatttgcaattttgcacatgtctcaagtggacaacagttttggtaatcaaattttttgttttcaacgaatacgtaatcttgaacttacgagaagaagcagaggatatgcttggtctatgagtaatctcttgtttcccatgtagcttgttctgcatccacccgaaaaactgaaaagaaaaaaaaacatttatgaataagtaatgtaacacattatgtgatcagaaatcaatgaaccagagcgtatgagtgattaaacgaaccttcatgtcttagtgacccggaagaagaagaagaagaagacaaagaaagaggtggaaaaagaaatgaaataactcgggtttaaggtgaatcaagaagcttaaatacaagtagaaattcaaagattaagatctttattttttgttgttgatgaatttgatggttcaaattccaaaattggcggccttagttcttcgtccagattcacttcttcgaaaaagataaaggatcaaagaagaaggaaaaagtttttttttttctttaatttgtngggttttgttaagntctgttcagataaacctattccccactctttttttacagctacacgtacactcattaacgcactatccatgcaacgacgagccaagaacatctttgacgattaattgt

SEQ ID NO: 13335 - DNA, 1088 bp, Arabidopsis thaliana landsberg
tttgctagggaatgggaagggcggaaggccttaccttcaaccccaaaagcgagcaaaagatcgcagttttccaaagcgtcaagcgtgatctgcatacaccatcgtgccctgctgctgaattctaaacatttgcaaggaaaaatcgtcgtcgtaagggtaagagccaagtccaaacaatgcactagttacagggattcctgtaagttggacaaatctgttcaagtcatcgatcgaagtcaaagagcaaccttttccaacatacaagcaaaggctgcttataattttatcccactgtataagaaaacttgaggctgaagtaagacaacacatagttcgggactaaagggcctgaggcacgtattttcgattggttggagtcaagatggactatctacattattcgattgagtgtagagttgtgtgcaataactaataaagttgaagttccagttattcttatcaactcatggcgcttgtttgataagatgatcatcatcaaatattcaaatggaggaatttgaatagcgagtaaagagcactaagggaaacagattgaaaagagtttgaaaaacaccatcatagttcttaaaaatcgtcttaccaactcaacaacataaaatcccagataaatccaatacaaacgaagaacataaatcagaaaaccaaaatctttgcctagatataagagactttgcgatgacgagagcatcattactgactagcgccaagccacttggtgaagttatcgaactcggtgtagtcactgtctgaaatcatagtctgataccaagccttgcctgctgctttgatcgcttgggcctcctcctacagtaaagaaggaaaaaaataagattaagaaaagagacaactttttgatcagtcacgcaaccagtaaaaactatacaaaatctcaataaagctggcggttcgagtacacaagtgaactgaatcatgttaatcatgtcgtttaggacagcagaagtgttaatgaaaatgacacaaacgaatatgagtaaccgcaaaaccaatttaaacaatcaaagaaccattcccaaataacatcaaagaccacacctgatttgcaatgc

SEQ ID NO: 13336 - DNA, 459 bp, Arabidopsis thaliana landsberg
  unsure (1)..(459): unsure at all n locations
ccaagggcaaaatggaccaactcttgggtttttcatttaaggccacgtgctcttcacaatgttgctttgcctcgacgcaccatttgtgatgccaccgccgagttttgaannnnnnnnnnnnnnnnnnnnnnnnnnnnnnnnnnnnnnnnnnnnnnnnnnnnnnnnnnnnnnnnnnnnnnnnnnnnnnnnnnnntatgcatccccacatccggaacacgtgtccctttagtcctcgactgcgctggcaatacaattcgctctgccacatcctcgcgctggtgcgtgtcccaagtgccagtcaccgtggctggtcacccagcttctccagtccctcaatcaagacctagtgctcgtccctcgttgctcccggcccatcgacacgaacccgcatgatcttcaccttcgcccacaccagaagctgagagatatgattgcacatacataagttcatactctggt

SEQ ID NO: 13337 - DNA, 755 bp, Arabidopsis thaliana landsberg
tgaaaatcaaacagagccgatatcgccgaaattcttcaacgctttcgaattcatatcctcgatgtcttccggatttgacttatcgagcttgttcgagagcaagaggaaagtgcaatcggtgtttacgtcacggtcgtcggcgacggaggtaatggagaagatagaaacggttacgaaggagatgaacatgaaagtgaagagaacgaaggattttaaagtgaagatggaagggaaaacggaagggagaaaaggacggttgtcgatgacggcggaagtgtttgaagtagcgccggagatatcggtggtggagttttgcaaatcggcgggagatactttggagtacgataggttatacgaagaagaagtacggccggcgttaaacgacatcgtctggtcatggcacggtgataataataacacttcttccgaggattgttgaatcagtagtttttggttctgatttaaccggttatcggttaacgtagtataactaagaactgttacattgaacccaaattttctttggtttaataaaattttggttttacttctttttctttggtaaggattttgattttgcttctaattgaacctaattgtgttgtttttaggtacaaatgaataaataatttgggttcagattaaattaatcgacaattaagggtatgttaagtcgaaaacgaaaatgactatgagtcgggttgtggtttagaagaccgacacgtgtggtttctcagagacttcgaaaagattca

SEQ ID NO: 13338 - DNA, 1362 bp, Arabidopsis thaliana landsberg
tgttgagtttcttgttgtggtcacagagtcaagggggctaatgaggagccccaaaagggtgatgaagatgaaagcaagccatgagacagagaacaatgtctcatgcttcagaccaagaagcttggcttctgtgtttgcacaagaaggtggctctgcagtgtttagctatgaaggtaattgcagttctgatcaagatctccttcttctggacttgccgtcaaacgggtcatttcctcaagcagagctacttcaccaactctgaaaggtcaaagctacaaaacctcattgagcttctcagagcttaaaggaaggattcttaagctctctatctcttttctttgatgagagatatactcttaagctttctgagaaaacgaccaaaatgaggtttctgctttagaaattggaatttgcagacataaaaaaaaaggaaggatatttatttgagtcttgcttgggcttctctttggtggttaagtttataaagtgggtcttataatatacatacatatacataaagcctcttctcttacctctctttctgtgacccttttaattttaaacttgaaagttccatcttttttggtttcttatctttggacttttttagtttctgcttttttttttgtataggatgaaaaagatactgtaatatcatgtaaacttccgaaaatgcagaaaatggaatacatgagtactactttattagaattttgggagtaatgcaaaaataccaagagttgtccaaactagaaaagaatacctcttttcctttttccttttttgtgtatgtgaaaagattaatgcaaaagacgttgatgcgcttgctttagtatatgtataaatactttttttattttatctttataatcaactatcaactttataattctaccacttgaattacaaaaaattttcagttttaacgtgttttctttgaaatttagcaatggaccaaagcgacaagaaccctaatcggcggctccgagtgattcccaagtggtcggagctttgtccggacttgttacgaagtattttcgaacaactgagtttcacaaatctcaatcgagcaaaattagtttgtaggtcatggaactctgcttcgagaggctgcgttcccaaacgaaatcagattccgtggctgatacttttccctcaaaagagcgaaaacaatagtagcaataactgtgttttattcgttcctgatgataatgacaaagtttacaagactcgagatctcggtgttgactttgcacaaagtatttgtcttgcgacttacggtagctggctcttgatgtttaaccatcttcggaatctctacattcttaatcattgacgttagagaggattgatctaccacat

SEQ ID NO: 13339 - DNA, 524 bp, Arabidopsis thaliana landsberg
gcttcctgtaactattcataatcatgctgaaaacatatggttagtcacatttttgaggaccttcggaagaggaagggccccaactgtagcccctcgcggtattaatttgtttccttgtaacaaatttagactgtgacatggacaaaggactttagccgaagtccaaaaaacaccttctcttcgctagaatagcgaacgacacagacatgcggcacccaccaagtcgtggggcgctatacatataaatatgagctcgtattgaaagtgtttcttgtgctatttcagttgtttacactgctctcaccattttaaactttcttgttttgtcgagattttaagcttcggcatttcaacaagttttgatttgatggctggtgagaaaaagactgtcgacccagcactgtccaagttttacaaagctatggagaggaccaatgcagaaaagattgcacatgagacattagccgggatatctgaggattccagtgacagtgaagaccttgatgcagaaagtgagaaatgag

SEQ ID NO: 13340 - DNA, 568 bp, Arabidopsis thaliana landsberg
cggagatctactgggagaggtcaaaaaatacttagcctttttaaatttcaccaagaagacagtcatcgtcaaaggacaggagtcttttacggttgcgcaagccaaagataacaacaatgaaaatttggctgtctttagacaagcagaagctattacagttgctctgcatgattctctacttagctacatgtctgtatcatagaattttagcagatggtcagtcgccttaaagctaatgaagaaaatgaaaattacgtgtgaagagcaagcaaacaaattatctagggttgactccgaattccaatccaagaagaccttgacgatggaagatgttcagaccctagagtcatcattcaaattttgaagatggactacaatccctttcatattttgtataaaaaggaaatataattacttgtaaatgaagcatagatatatattgaatacaaaatcttctcatataaatctgttttaccctcaagttccactctttaatctttggcaatgaaatattttcttttatggcagcgaaatataacgtttactatttcgacatatcatgtggtat

SEQ ID NO: 13341 - DNA, 574 bp, Arabidopsis thaliana landsberg
aagaataataagatgacactttatattcgtcgtgaatcttccaaggttcgttggttttttctcttaatcctaagtcgaatcctgggtttttcagatttttgactgatttgggctcttttgtttgatagctatggaagagattttgctctgagatatcgacggagattggtcttcttgctgagaactggaaatatcttctcgctggtcttatctgtcaggtttcaccatcttaaaactctatactttgattcattactgagaactttgatatgttagattcgagagcttttgtagatttcagaataattggatcgatatttcttatgatgagtgtttaatgatggctgaaatggaaaacttaggatacttgtaattatgattgttttgttaattgttatacatagtaacttttatgagaaagtttgtgcctttgctttctcagctgaaacatgtgtgttgggtttcgttttgagttcaacaatgtagcatctcccatcttgagtttcttatgtgcagtacattcatggtttagctgctaaaggagttcattatattcatcgcccgggaccgacac

SEQ ID NO: 13342 - DNA, 707 bp, Arabidopsis thaliana landsberg
tcaggccatgactatatatatactaacactaacttacatatatttctgaagaattagttgttgattgaagtaaaaacctgatgacaggttggtccaaggttttgtttaaatccaattaagatatttggaggcagctttggaggtacaacgctttacgagaacccattctatgtatctccaaaccaggtacttggttcttctataagcaacttgatagatcacattgctatatatgattatctgtcagagttctcatatattccaatttcctgccttttagattcgagctttggagaaaagaaataaagctgggaaatttgctaagaaaataaaggcaaaaacaagaagaaagatgcatgaactctcaaacccattggagcctgatgaatttacagacatgtggaacgatgaatgataaaagtcgaccaaagtttcttttttgctattgtaaacttctaaattcacaaaatcaacacagttttgtctttaccactgctttcttccctccctcttatctatcaaagagtgagattgcgaatttatcacacagttgtctaagtaaagactgctatgtcacgaagaagcaaatcaattttatttctttatcgtcttcataaggctatatttacataaacaagagtacataaaaagaaaacgcaacaaagaagcaagagttaacgaatgtagcagcaacaagcaacaagctc

SEQ ID NO: 13343 - DNA, 581 bp, Arabidopsis thaliana landsberg
tagtgaagaccatgaaacctacactaatcaaagagaggtaaatgattaactattatcttatatataacaatgagaccaaccaaaaaaaaggctttgtctatatttaatctgattaaaactgtatctgtttatgtcgtagtctcttcagctttcctctgcaataaacttggaatcacaccacttctttttaatctccggttattgcctattcggttccggctcggtgaagaccgctccacccagtatttgtcttctgcaaccgcttggttccaccgttctttaaaagcttgcagctcccacgttgattgtctccgtatctgcccacaaaacacacacattacactcctgctctatagacaaaagaaagttcctaaagcagattcatcatcaggtaataataactcacctctgttcttgaatcaaaagtcgcagaaccgcgtctctgtacagaagaaaaaagtgaccaaagtagtgaaatttctgtttgctttacagttaaaaaatgaggatttggatagttatgtagcttacccgattcactccgcttcgagctgagttctgttgaaataggataagaatat

SEQ ID NO: 13344 - DNA, 840 bp, Arabidopsis thaliana landsberg
agaagaaaacaaagaatctaaagaaatggttgtttttgtcactctcaaatggaaaaatgagtgattagattgaacgatttgacaaagtccttatttcgatccaaatgtaccaaaaccataggctctaaattcgcaattcaatccggattcttttttcttctaagaaataaaaaactgtgactaacatgtaacacagacactgattaagctcaaaaaccatcaacatcctaaaaacgtaatatctatagagtttttggaacacacctatcaaaaccaaaaatacatatcaaaatgtatagatccgcgagctggaaccgagtgccagaagactactcatccgcaccgcctaagggattgtggatgggctcggtgatcggtcccctcgacgagaacgaactaccttcctacaataatccaccagaggagatggttaagaaggagaagtcacgtgccaaattcgcagaaaacgccattcacatcataccatttgttctccttgcatgcgctctcgtactttggctcttctcaaatccaggtatatacaattagtgagccaaaaacatgcttgtgtttgatcaaaccatgcccggttttaaagtgaaagaaaaaacatgcatgttgttaaccacgaactcatccgcaataatccaacatgatcaaattggattgcaaatggtagagagatcatgtctgcatttggcggttgtgaagttgggaaatattttatgtaagtgttacatgttgatactttattctttgtggcacttataacatcgatgcaaattttgaagatgtggatgttgggatgagagaacactctactgcggctaagattgaagg

SEQ ID NO: 13345 - DNA, 1008 bp, Arabidopsis thaliana landsberg
aactatataaacttctacaatcttatacttaatttggcattaaactaagtagtgaaaaaagtaaccaacaaaacggtagggatatagaagaacaaaaaaagataactcagataattttacataaaatgaaaagaatttaaaataaatatttatttgtatagttgtttcttgttttatttttctacaacgtatataattaatctagaagttctctttgtggaagtcaaacttggtagttgtctttcgagaaaaatccaaagctagattttttaattcctttatcattcctggcattccacagtagaagactcctgcaatcaaaattcatattagtatttagtctaaattcatcactttattaattattatacaacatcacgtacataacgagattaacggtcgagattagttacctattcttttgccgggatgttgaacagcgatcttcttgtagacttgtctccagttaggtttagcgaagtgggacttgacacgtgtacccgacacaacatccacaccgttcttagcgtgttgcaacgactgaagcatggcaatgagagccactcttgcatcaccttcctcgtacacactcgtgcaataattgtgaagctcgatgattccttcctcgtctaactccgaaatctcgtccattattcccttgaaccactcgaatgatccttgttccctagtcacccagtagaaataagctttccttgtcttaaaccctttactattgttgttactgttattgttctcaatgtcgctgtcgcggtcaggacctttcatgttgttgatgatgtccttaaggatactgatcataggcgtggctccaatgccgagacctacgaggagtaccacgtcgtatttcttgtagtcttgtgcgggagcaccgtatggaccgtcgataaggaccttcgggaacgggaggtttccatctcctccgtctgctcggagaagaccgcttttaccggcggtaggaggtttcacccaagttattgcaaataaatt

SEQ ID NO: 13346 - DNA, 721 bp, Arabidopsis thaliana landsberg
aataaaggttttagctttcaaatatttgatcatttcagacaaacacagtttcctctgagatcatcaagccaaagactttgttcagcttcaagagtcaccactcaaactaggacaagactacctaaaaatgacttcatcacccaattcgttggacaagacgtacaatttcagaaaacccacttgtggtcctagataaaaccacagaaacagagaatctaaaccaaaaagatagattttttccacccagaaagaaataaaaatcgtaactttagataacaaaaacagagaaaactccaaaatgaacaaagaaaaaaggaatcaaatttgagaggcttacacagtgttagcgtgttgaatatcagcttcaagagctttcagagaatccttaaacgaaacttttgccatttaaaatctaattctcatcaaacgaacagaggaatcaaagagtattaaagcgagaagaagaaagaagaagaagatagaagaagcaaagaaaacaaagtttgatgcttttccttttagcaattagatagaaaagatatttcttcacccaaattcgatgatcagagatgagagagaagaatggtattttcgtaaattcgggtatgagacaatggtattttggtaactttgcatatggagataaacttcagttacgattctcgaagaagctttatcgagaaaagacgcggaagtgggttacaagattgaccattttgcc

SEQ ID NO: 13347 - DNA, 809 bp, Arabidopsis thaliana landsberg
gtagacattctttcaagctatgcaaaaagatctttttttttcagtcaaaatgatgttttgaatcaatgttacatgaataaaaactcgcaaaacaaaaccaaacctcttctctaaggtgtgcattttcaatccgaagcttttgttcatcaaagtaaggatcttcactaacaggaggacctccacagttaggacatatagcatgcttgagagcttctctgatagcaatgttttcgcaacgaattttatcattctctgcctttagtgcactattatctgctctctcatgttgagcctacacaaaacagtaccacaacgaaaatcaaaatcctctcttttcgtgttcagaattacattttaaactcaaaagagagagagagacagagacacaaaaccttaagctgagttcttctgttctgaaaccagaacttgatttgtcttggagccaaacccaattctctgctaagctggttcctctgtttctcatctggatgaggacactccttgaaactcctgtccaagtttcaacgattacaaaatgaaaacagagtccaaaagataaaaaagagaagggattgcagagtagtacgattcaaggcgttgaatctgttgagcggtgtgacgatggtaacgtttcttcttcctatcagtttcagagccgtcgtgatgatgactaccaccaccgtctccgccgcttccactaccacttccgccgacgccgacgacgaaactcatttaataaaaattaatgtttcgaaaagacagtaaaacagtctttaatctctttacttttcacccaaccacaaactact

SEQ ID NO: 13348 - DNA, 627 bp, Arabidopsis thaliana landsberg
agaggactccacttctgattcttgagattcaagatttcttgatctccatcatcatagatagcctgcgaacgaacatggcaacagcatacaacaattaaaataccataaaaaggcctgaaacaaagatgtatagcttaggagaacattcaaaaggctactggttgaccacaaacaaatcaggcgaaccaaaataggggagacggataaaattgggcttaccagatgtttcttctttgcagcatcatatgactcgaccacacctttatagtacctgcggtaaaaaacagattactcatttgaaagcatagaaaacaaaaaattacaataacaggtagtccagattctgctgtctaaaggaacaaacatagaagtccagaacagagaaaatgcaaattgccttcttgtaaatcaaatataattcctaagaagaaaatacaaaatgcttacgcttgatccataggccaccagactttgatcctcgatccaactaaactttcaccagatgcctgcccaagaattgattcggtatgaaaaagtatacaaaaggaaaactcgtacagagcaaaggaaaccagtacaattaaagggatatcgtttcagagaatattttcttcaacttgaagagaa

SEQ ID NO: 13349 - DNA, 737 bp, Arabidopsis thaliana landsberg
tctaaggtctatttagagaccattaatccattaatcaaaaatatttttgaaagaaaactgtgattttgagacatacctttcccacatagtcgttggcttcacccacaagacgtatattcattccaggagttaggaaacatgcaaaagattggccagcacttccagtgaacctatagaggtacagagtggaacgtgtaagtttaaaacatgttctcattacatatatatttaaagtttgttacgtgtttactgtctcataacattgtcttacgttaggttcagttgtccagcaaaaccagtgtctccgtatttcttcgcaatcaccccagcaatccgaccgcaaacagaacgatctacattgtatatactcatggttttgtgaaccgtcttttcattctcaattgcatccattatctgggaaataaccaaaaagtaagtattaagagtcttacttgcatagttgcatatgtagaagagtacttaaacgagtaaagaagggttttttcagatttttgcataagctgcataatgtgttacctctggatcctgaagtagagtatcatcaagaacaggaccatttgaatgaacctcctgcttcctaatggaagtactgcttcgttttggtagcccaacagactgcaaatttggagaaggaatgagatctacacagatacaactttgcgggtaggcatatgcactagaaaaacgataaacacagctctggtctgcttacagat

SEQ ID NO: 13350 - DNA, 736 bp, Arabidopsis thaliana landsberg
acctaataaagccagtactacaccacacatcttggtttggcctataagtaggttacttgcctaacacgcatattatgagacatgaagacagcaaatacttattgttatcaccagaacagaacagtaagagtgttcagccgaaaatctctttcagcttggaaatcgaacacattactaaattcttctcgtagaatctgcacaggaccggacctgcaaccttccagacaaacccgcaacttttaacgttattccacttgatggcatagtcgtaagtgacgttgtaaagtgcaagggcctttgggtagagttcttctagacttatcttgctttctttaaaccctgcagcactgtagaactcctgttacagagagaagaaaccgttcaaccaatgatttgtttataaagcattacaatcaacaaaaaaccagtgatccatgaaggctattggttaaagcttttctcttagaattaactaaattgaagagcttacctgcttgtatttctggataacttcattacaggaatcatcatcatcagagttcatcgcttgacacatctcctttctgtaatccttgtgccagagtttacatttctccatgtcaaactcagagaccggctcatcttcaaaacactgaagtttactgattcctgaaaggtaacccagagctaaaccgttaaaacatattcaacgtgatgagttattgtgtactttgattatcaatagtaacaagaagat

SEQ ID NO: 13351 - DNA, 628 bp, Arabidopsis thaliana landsberg
gtcacgcgtgtacccggttacacgcttaaatccaaattctatccactcatatccgcacacgtgtcatattacaagcttagggctctttcgtgccacggttttggttttgtccaacacaacacaacacaagactcgagagagtccctttcttgtgcgttaacgtggcgtcgttaacggcatattcttttatctcatgaaacagacaaattacgaggcaaatttgggaagtagtaacacgtcatgttgaagattgaagaagtttcttcgaatgttgtagaaccatatggatcatttttggcaggtttagtgtttcaagcaataaaatgtacattgtattataacaccctaggcattttttgaaacgaatgatatccaccctattaaaattcgaaaatactaaaaccaccaaaataaaagaataaaaacgacgaaaaacattctgaataagcaaacaaaagaataatcatactaaagaaacagcaattgaactcctcacaacatgatgtccatcggtccagctaaaccatccaaaccgatatcgatccctccgagcctcacctgtaaactcatatctctgtgtagtaaaaatgatgttaaaccgcttcttctgaccaatcttatcaaagac

SEQ ID NO: 13352 - DNA, 656 bp, Arabidopsis thaliana landsberg
tagatcaatcaatcggtctaccaaaattgtatttctatagtattaaccatatgatgttggataatttatatatatgatcatgcaatatatttactttgtgtagttgaaaacacaatattatacttatatgtgtgaacatgcattcttatatatttatttcgtctagctatcaattttttttctttaattttatataattagctgcaattttttttttttaactccaattttatacttcaatgacgtataatattttatagttgttggcctatctttgtataacctaacgtaaaatgctatttcaatataacaaaccttacaaattacaattacgaaccctattttatcacttttcttcctaagaaagatttgtctgaactctgaaatagtttttcttatacgttaacaagattttccacagtgaatgacttacaaataaaacgagaaaagtctttcaaagtcaactaaccaaagacgtgtcatttagttctccaagtctatgagtatctgtccttctcaatattgacttagtcgtggttcgaccattccactagctctatcttgactccacttggtttccttttgcccaatcattcatgatctactgtacttgaaacacaacccataaaagaagcttctttacagatatcaatcat

SEQ ID NO: 13353 - DNA, 676 bp, Arabidopsis thaliana landsberg
acttatataatatatttatattagagaaaaaaatgtattttgattataaaacaccagataaagctattttttcaaatattaaaaaaaaacaattattgttggttaacgtcgatcactgcagagtcaatagattggtttatcattgtatgtctattgtgttaaccatacgatgttgtaaaaatttatatatatataatcatgcaatatatttactttgtgttattaaaaatacaatattatatttatatgtgtgaacatgcatttttatatatttatttcgtgtagttatcagttttttttctttaattttatataactagccaataatacattctcatcttaactctagtgagccaatattttttttttttatccagttatactccaataacgtataatattttatagttgttggcctatttttgtataacctaacttaaaatgctatttcaatataaccacattacaaattacaattacaaaccctactttctcacttttcttcctaagaaagatttgtctgaactctgaaatagtttttcttatacgttaacaagattttccacagtgaatgacttacaaataaaacgagaaaagtcttccaaagtcaactaaccaaagacgtgtcatttagttctccaagtctatgagtatctgtccttctcaatattgactt

SEQ ID NO: 13354 - DNA, 882 bp, Arabidopsis thaliana landsberg
taagaaaaaagttaagggaaaccaatacaaggtgcatttatatttaataacccaatgaaaaatgacaaaagctcagtatggttacttgaaactgggatgcattcaataacactctcatagagttttaaccactagacgataagaattctatcaagtgtgacgctcgactctctctcaattaagtatcatcgaagccttccctctgaaaaatctctccggcgccggtgtagcctctgctcgccagcgtcgggatcccagctcctcctcatttcgtcgtcacttctctcctttagtttttttctttattttcccccttttgaaacttttcccaaccctctcccctccttttaatccatcccaaaacctgttaaccaatttgcctcaccttgctttgataccagtccgctcctcaacattaatcgaagaaagaagtatgaagcatcaggcttttactctctcccactcctttcctgcaactctttggacagattttgtctcagatctattctatgtgggcaaggatgcgaacccctggatctttgccgctgactcgaaccacggtcatagcctgttcccaccgatatgtcactcattggagatgatccctgcgctgcaaatcacttctcttttcgtggacggccgccgcattacctccccgacttggcatcccaacgtgaaactaggtttttcccagtggacctagtttcctttggtggctcattttcccctttaaggcccaagcccatcttctggtttaaaacttgtaaggctattaatctcaggtctgatttctttaatcctatgttaagcccattactatatgtgtgtcgatctcgtctaatcgatggccatgaacaccatgtgatagaggcatcacattga

SEQ ID NO: 13355 - DNA, 1316 bp, Arabidopsis thaliana landsberg
cagatagaaggctcgatggaacaatgtcagttgctgctcgttatatagcagtgcaggatttcaacactctccctggggtgcatagccgttaattgaatttgaaggacttgggttaactcgctttctatgatagcaacacatgatgataagatattttttggctctttttctactttttaggttactgtaatgataatgtctctcaaggctgctagtctcggactgaacatggtggcagcttgtcatgttctgatgctggacttatggtggaacccaacaaccgaggatcaagcaatcgatagagcacatcgtataggacagacacgaccagtaacagtggttcgcttcacagtaaaagatacagtcgaagatcggatattagcccttcaggtatgtaaactggttgatttagttctcttcaatttctctataagctttaagccatttcatttttgatctctaaacacgttttgtcgatgcagcaaaagaagagaatgatggtagcctctgcatttggagaagatgaaaagggaagccgacagtctcacctcacagtagaggacttgagctatctgtttatggctgattcatgagaacgagcttcgtgctcttttttgaccaatgcgggcgggtacatatgatagggtttttgtgcagttttaggaggaagaaactcttcgtttaactgactacaggtttgtgcaaaaaaaaaaaaaaagattagaaaagacgattattgggtttggggtataaaaatagaaagctgatccgatttgattattggttacatttagactttaggtattgacagttaaaaggaagatgacaatacataggagtgtatttgcttttgaatttctcattgtaagatcacaatgcgattggtccagcgagttataatagcttactttcaagatcctcaatttcctagtactttaatacatacaaaacaaattcgtattggtaacacacctaagatttccaaattttatacaggaatattcgctcatgtcttaattaattccttgaatttgaaatctcataaaaaaaatattctatcggcttcgagtctctcgcttggacactttcacgtcatttttccagacatagcgataggtgacatgtgaagacttgtacaaaatagaacatatgaataaacatgtcagatagagaatccgagttatgtcacatctatggttatataacgcaaacacaagaccgaataaattctagaccgatcaaatcgattgatgataactaaaccttcgtaaagcattttggtcattctctagtgctctattttagattccatattc

SEQ ID NO: 13356 - DNA, 1005 bp, Arabidopsis thaliana landsberg
  unsure (1)..(1005): unsure at all n locations
caacaatcatgtgtttgttactttcaggtattccagaaacgtctgccaccttaagcagtagatcttctttgtaggttcttccagtatgctcctaatttgagatgtannnnnnnnnnnnnnnnnnagcttttctctgactttgttacatattctacttccatattttttttgggatcagcatcagaagctaacccattataagtatgtcttatgattttctgataggtggaagcttgtatccaccctttctttgatgagctaagagacccaaatgctcgtctgccaaacggccggccacttcctccgctattcaattttaaaccacaaggtaaggttctgttatttgcttcttcttttttccgtgttaaattctttataagggaagaaaattagtatgtgttattgataagcgtgtgtcctacagaactctctggtatccctcctgaaactgtggaccgacttgtcccagaacatgcccgtaagcagaaccacttcatggcattacactcgtaagtctcttccctgttttctgtacgacctatcaaatgttctcttcttttctctaagctctctagatcccagtctttgggaaaaaacnnnnnnnnnnnnnnnnnnnnnnnnnnnnnnnntcactggaaaaagaagcaatgacttttgtattaaggtgcttgcgcatcccttgtcgtgaagtgaggatgcgtaaaatacaacactactttgttagatatatgatatagaggaacatacttacatttgcaagactcctgccacaacacaattttccaaaaaatttgtgaaccttaaaatgaattgacagtttagtttatttgtccatgtttacgaacttgatttgaaccatattactcgaattacaccaaaccaaattattttcaacctttaggagattttttaagaaagtaatatcctttcaaacccgtgagaactgaatccaaaaaatgngaattataaccaactactaaattgtgttagaaaaaaatatttaac

SEQ ID NO: 13357 - DNA, 530 bp, Arabidopsis thaliana landsberg
aaactcgttcgttacttggtggacatgagatgcttctttggaccctccagagaccatttatgcagtcccaaacacgtaagctacgttgttctggggtaaatttaaaacatgttgagaacatttccagtgatgtaacatcatcacatatgcaggtcttctggaaactggattctatggaaagttcttcaaggatgagacaatgtttaatgaggaattattctggcactggtcatcttgagacaacaagaaactatggggatcatacatacttgtagaataatcacgactcacctgttcttgctgttgaagcaatatcaaaggaaataatgtatgaagatgatgaacatggagatgccaatgatcttgaaatagagggtaatgcttgacaacgcaaaggggaaaacgaagagagaaggtctggctcactttaggatgcaataacactgtcaactgtaatcaaccatcatccacctttgagtgaacagaatatgtgtctaaattctacagaataataaatctcattgaactta

SEQ ID NO: 13358 - DNA, 947 bp, Arabidopsis thaliana landsberg
taatagaaaagatttacaaatgattaaaaactcttaagcattagagaaaatgaaaattgtaattgagagtacaaaaatgctaccatgccccagtaacccgggttataaaccccgacgcctcctgttggacaagaattgctgtcacaaaggacttccattctaagagcaatcttgttacgctcaaaacacgaagaacggtctgtaacaacataaatggatgattcatctccaataatggaccaaggccagatattggaaggaatgatttgtccaccagcttcaaatcctggaaccaaagatttttattcaccattcttctttttaatgaaaagctttatagaaaattaaactccaagataaaatcagaaaaacctctattgctaacaagttcagcccatagtccacctgctccagcatgatttatttcctgtaattaatttcatcagaattcataaattttattagagctaaattataacattaaacatcatgactagtaaagttacattaaaatagtttctatttagctcatgcatgcagcatgcttaaagtgtgactttcacaaagtcaccattatttctttaatcaatgtgaataaaggcttagagagaatttgggtgagaaatatcctataattaagtcatgaagttgtgaaaaaacctcaaagaagatcccaaatagagtttcgggaatcggtcgccgtgtcacgttagaagcatctacttgcagtgttacaatggcgtcttcttgagcgtcaacaagacaaagggtttggtaaacagaaaacgacccaaggacaaatgaaagtaagcaaacacttctgagaaatctccaagatgtctccatgtccataatcaccaaatttaaccagagaaagaccttgtagagacaatttatgcacaagtgaaacaagatttagttaatacaggttcaagaaacctaaaaat

SEQ ID NO: 13359 - DNA, 673 bp, Arabidopsis thaliana landsberg
  unsure (1)..(673): unsure at all n locations
tcttctttatatctagctctttgcttcttcaaacgtctccagcttctccgtatatattcttaaacgattttttaatcattataggaaaagatttccaaattccataaaaaaaaataaatttttatttacatttttcttttttctcattgaatttcacgttcatcaagtctctcaaatccttctaagtcattttcctctttggattcatcatctaaacatattccaaaaatatattttcaaattttctagtaaccgacactcacacaaaaacattcgcatcctgaattacttcttaaatcatttagcaactccatcaaacaaaaatttgtatactattaaactcattcaacgactccatcaacaacaaatgcatcttcataagaatctttcaaaatgtgtaatttcactttaaaatgcatgttttgattattcattggatccgtacagatataaggataaacaaagaatttagtacgtaggagtcgaaatgaataacttattactagagatattattgttacttcttgactaaaaggattttttttaaaagaaaataataatttaaatgacggatatcgtattgaattgattttttattaattcatactttttggttcttatttcatcttccatcatttaagaaaacacanacatntttcagaactaacgactc

SEQ ID NO: 13360 - DNA, 694 bp, Arabidopsis thaliana landsberg
taggtggggaagtaaataattttacttttttatcgggatcaccgtttccacatagagtttgaatgccttgatggaagatatattcactgtcgacaatgcctactttcttgcttcggtcaccctataacgacatattcaaaaccgattcatctagagaatgcaatcggatcacaatgctaatggaagctaatgatgtcttaaagaagaaaaagactttacctgagcacagtatccaagtttcatatccattccccaaccatgaaccagatcattctgcaaaccgcaaaaacaagaagttggatgcaatttcatttaaagcagaacagttatattgtttataagtgttcatgtcgtaaaattacttgtattagattccaagtgcaaaaccacgcagatcttgagaaaactggagccattccttcaacaaaactgaaaaaaaaaacagagaaaaatagacaaacaatgacattaatatctgtgttttggtatatagagaagtcttaaactgttatgctacttagaaattttaccctgtgcatggaggcccttcactagcatttgaacacttcatattgcctctactatcgtaaactctcctgcaattatgtaaccattttgtgtagtaataaaagacacaaattattaagagaactccttaacaagtatggtcacaaggaactcacctatgaaatat

SEQ ID NO: 13361 - DNA, 661 bp, Arabidopsis thaliana landsberg
tcgtttctgttcctgattttatacgccctaagaggcggttgttgaaggcgcttctctgatatttataacagccgcacaacttctcttccacaaacccatgcaccagtgaactgccctaatcgatttccggtttttaagtttttactttaaaccggttaaatatcaaatcgaggattagaccagcaataaccattggatcttttctctttctctttttcttttttttttgtcatcagtataaaacttttaatactttaatttatcgtttatacaaaacatgagaagcatttgaagaatttttggtttattatacattaaagctgcaaatgaagacagttgaagatgtaacaatatgaacatgtataagagttatgcttctggatatttcagactaagtaggtgggagtttggcacatcatagaaagtacaaactaataagatggttgcgtgaggaatgaaaggaaggtgtctcgtatgtctacttcttgtggttttaccagaggatccatggtgtctctccatccttcataatctttgggagaaccagcaccaggcagctcgaacccattcacgtagaaggttggtgtggcggaaactcctcttgagacgctatactgcaaacagaacaaaagcaaagcaatgatagaaggtaaggtaagct

SEQ ID NO: 13362 - DNA, 661 bp, Arabidopsis thaliana landsberg
catctcatcttgatcattacttgtccaccactacgtttttaattgagcctgaaatttgaggaggttggatctattgtttgtgctaatgtgaatacccaaaattatattccatccttttccttcttactaaatacacccacagaactcatggctgctaaaatgggaatttggattttttttttttttttttgatagtgatattcttcttccctttcatctcacccattgcacacacatatatatatatatatatattttctctttaaaaaattgcacatatatattagctggtcatttaatataaaactagagaatacagctaaatttggtctttttatattctttgttgtaaaaaaagtcgtttgtaattgatttggaatagctttacaatcggtttatattttattttgattatagaggagaccgtctcttccggatcttgttttcattacagattatatagttttattcaaaaatgcactctctcgattggaacaagcctttccgatcccatctgggaacgagaacatgtcatgacttcacgtaggacataagtgtaaagtatgtcatgttatgacttcaaggttctattgtttcaaatcctccaaatttctcgatatcacacaccctagaattagtagatttttttttgttatgatgt

SEQ ID NO: 13363 - DNA, 944 bp, Arabidopsis thaliana landsberg
aaattatccatactatgaatctatacatgatttgaaaatatatagtttcagtacacgcccaaaaaaagaaaaattattatgcaaaataacttataacaagaaaaatgcttaaaacccttgagccatttgaggtttgagttaagagttaattaatgaaatatatttggcctaagcgattcacttgccgatcctcgatactaatttggttctgtcaggaaaccaaattaacacacgctatgtctagatatatataaatacttacaaataataaatatcttttaataaaatgaagggaggagaattatggcgtattacaagcacgatggtgccatagcagcaccaccatcaagaagtggacgaggtggtggtcacggtatggttcgcatattcatatctttttatttttacaaatgttctcttttaaattaattgtataccttctcgatattttatattttcttatattgtagttattcattatgtgtaaatattaatgcaccgattattttttagggaagaggatgatgccctaccataagccaaatgctcctatacaaacaccaccatcaagaagtagacgacgtgagggtggtcacaacggtactcataattcataaaatttcaaaaaacaaaatcaataatttatcacctatccttaaaaacaaattatcaactttgcttgcgatactatatatttttctattatacatattctttataaatatatattaatgaatatatcttatcttgtagggagtagacagatgggtatatataggccaaatggagacatatatacaggaccatcaaatagtggacatggtggtggtcacattcatcaaaattcatctccttagttttggggccatctacataattggaaacttatcttaaaattccccaaaagattatgaattgaatgtattttggcttcatgtgatccc

SEQ ID NO: 13364 - DNA, 996 bp, Arabidopsis thaliana landsberg
ttttagatttttggtttataacatttaataactctttacaatattaaaactttacttttgattacttttatattacattttgaataacacaacatcataattagaaatgtatccatatttcaaatatttcttttattgtctttttttttttttaattttttacaaaaaattaagagattatttttagacgtcttacttttttttttttttacatatgtttttctttaaaaatttatattttttcatatctattggtatttttcctttttaaaagtatcttaattaagtaatttataacttttaaaatgtcagttgatgcaatggctaatccggattggttgttttaaatctcataacagcctaaggagcttataggctcgacttttaaaccatacataatgaatctatgaaagtaatgattatcaagctaaacgtattttatatatctagatgccttctatgatattgaacttctttctatttaggtcatgaggattactcctcatgaaatctcaagaaatcaaagaagtgaagaacaaagagaaaaatgaaatttgtatcataaaactgatcaatgtgtaaatttcacatataaacgacaattcaagtaaggaaacgatcgttaagcttgcgaaattttaatcaaatccaaaagcagtccatgcaaatcaaagacgaattgtaatggtataacacatttgctaaacacacttgcaaaagctcatcttccatccatggcaagctttccaatgctcatactaaaaaaaattggcattgtatagtcataagtgtaacgcccgtaaatagaaaaatcggttagggtttatacttaaatcgtccggtttaatcggttgggttaattggaaatcctagagtgtgcctataaaagaagaaaactcgaaattagggttttaattagccacttttcgttttataaaagagaaaaatagagagaaagagagaaaccagaatcattagggtttggaagaaacggtt

SEQ ID NO: 13365 - DNA, 527 bp, Arabidopsis thaliana landsberg
ctcttcctcaagactcctcatagcaatctcttcaacatcatctactagtctacaacaaagaagaagaagaacaagaaatcacataaaagatacaaacaaaacccacaaatccttcttaagaaatgtcttataaacattttaccaagtattatgacattctcagacttaatgttgactccttggttcttcttctacttcttcaacaattcatccatatcaacaacttcaccatcatcatcactactttcaaaaccagtaaacccttgttcatcatcatccataacttcttctctattatcatcattatcatccaatggatattcaatctcagaagcagacacatcaaagatcacaacacggaaacaagaatccccttcgtaatgaaaaaacagaaagtgaccatcacttaaagagtgagcctctgcaaactcactcctaactttctcgaacgaaacctcatcactgattcttttaaccgaattgatcgcttgaaaccacaggagtctggagagtccgttgtcagtgag

SEQ ID NO: 13366 - DNA, 891 bp, Arabidopsis thaliana landsberg
  unsure (1)..(891): unsure at all n locations
ccttatcctacttatttccatccaaagagcttaacagagatttggagatggcagaagaaagtgaagagtgtgaagaggaagtatttgttttcgtttgttggaggtccaagacctaaattggatggatctattaggggagagattataaagcagtgccttgcatctcacggtaaatgcaactttcttaactgctttgttaatgactgcgataatccggttaagataatgaaggtgtttgaaaattctgtcttctgtttacaaccttcgggagattcgtacactcggagatcgatattcgattcgnnnnnnnnnnnnnnnnnnnnnnttttcttcagcccaggttcgggttacaaccaatatatttggtattttccaaaggattataccaagtactcggtttacataccagagaatgaaatgagaaatggaacggttagtctcaagaatattttgggtatgatcgataaggagaggattttgaggatgagaaaagaggttgtgaagattataccaaaaatcatatataataaaccagggtttggaccggagaagattgaagatgcgtttgacattgcagtggataggatgcttgagagggtagcaatggttaagaggatgatggaagaagggaaagatgttcaaagtcagtattattcacagacaaaggatttgaaaaaacttgagattatacatgaaaaaactgcttaagccttaagacattgtttatgaatgcacattcagtatttatagcatgttgaatcacatttcagatacattttggaattgtaagtaaatcaatcgattttgttttacaaggatgcatacattacaaatttctctctttctcgttccttaagatgtggagcaaccaaaaactatatgaatatgatc

SEQ ID NO: 13367 - DNA, 581 bp, Arabidopsis thaliana landsberg
tattttagattccattggctacttttctgttattgatagcggtatttgacaattatgtgatccgaataattgggcaaatcgggcaagacataggttcagtgtctttttcattttctagtatgacgaaaatgctccttcttgattcctttttcttactcttagatatttattttctatgagatttgatgtaatttttaacaacttaggagtcttttatattttaattttccgttgcaaccaaatatgaaaactgattaattagaagttaaaaaagaaacataaattatttagatgataaattagttaagagtacattaatacaaactatttaaaacattatagagaactaaaattaagaataatatttattttggattttgttgttttgtggatggattatggaaaagaagcgataagttttgtggataagggtggttttgcatctcatcaaatggagagtcgtcaaccataggagtagccaatctgcgtagaactctatctccactccatagaagttgaagctctactcttcgcgatgaagtgtataattggtgcccacaatcaagaattagcattttcag

SEQ ID NO: 13368 - DNA, 670 bp, Arabidopsis thaliana landsberg
caaatatgatctacgagctactaaacttataccatggaagtatcaccataacaaaagaaaaggattcttactaattgcaaaatactgatatctgataaagactgcgcaaaagtaaccagagatcctctcttatcctttaactagacaattacttacatatttagccaattccagagcacttctctgaagttcagcttttaatcggctattctcttccacctgcttagaggataaaaacacattcttagatgcctaaaatacttcgatgacaaacaaaaaccatcttgcattggcaaatgctaacaaacaagagacagatcctacactccagatacttaattatcccctatgcatcaaccagacttaataaaaccttgcatttcacaactacttctctaataaagcagacatgtcaatacagaaatttagacagaactcctggaaatggattgatagaggaagtacttccccacgaatcgaaacaatttcaaatagagacacagacggagaaccagacctgctccttgatggtggtttctgctgcttcaacagctttgatgacctgaaacaagttgtcgttcttaaactcgttctcaggcaaaagagaagaatcttcgaaacccaatccggaaaatctctccgccaatctttcctcatggccgttctccat

SEQ ID NO: 13369 - DNA, 622 bp, Arabidopsis thaliana landsberg
ttttttccgatgggtgcgcgcccatgggcctcaggagcagtggttactccttcgagatctttatgtttccctctgcatacttcattgatctattaattccacgtaacttggttgtagcctagctgcaagggcaccctgagcctctgcgtcggtttgttgatgctattagcaatttggtcgtagccgtggtgccaagggtagcccccgagcctctacactgggcaagaggacgatcagggccgccttgacttttattgatacatctcttcgtcgcctttttgtagggaggacgaggggaaatgcgcaatgctaccctcggtgggcaatgagcatgacacttcttgtggactgttagcgcgtaatccaagtggaggcccgagccccattcgctaggggttggcttgcagtccagagacaccccctaatatacccgtggggattcgctggtcccggatccattcgataggatttgagggctcgttgtcaccctccgatgggataccattacgaatcgttcctgctgatctcggatatgtcctagggtagcatgggatttgtacccaagctcggccatgtacgcacgtaccatggtcactctgctctacctctggggcggttgttg

SEQ ID NO: 13370 - DNA, 776 bp, Arabidopsis thaliana landsberg
ttgtctgcaggttgctgttgaacacagagtagaccaatctggacacaccttccaacttcagctgtatgagaagaatccgcaagagcttgatcaagaagatcaactcctttggtttcacaccaagattcccatgcctgttatttagtttcacatcctaagaatattagagcaagaaactctgcaagtgtaggaaacctaagtcttaacttacatatgcaagtttaccaaaaaacttacatatgcaagaagagtttttccctcttcgctgaatcttgagatcttctctccaatgatgatttctaacagtagaactccaaagctgtagatgtctgatttctcagagaataccccagtccatgcatactcaggagccatatatcctctgttcaaacatcaaataggttcacctatatggaatatcatgactatgaatcttgtagagaatgttttcgaagaatggttcttacagagttcctacgaccctgcgagtgttgtcctggtattgcgttccctgagacatccgagccaatccgaaatctgatattttcgggatcattttctcgtccagaagaatgttgctgaccttcaggtctcggtgaattaccctgaggcgtgagtcacggtggagatagagaagtccacgtgcaacaccttgaatgatgttgaacctcttttgccaatcaatctcaaacttcagagttgaatctatccaataagatagtacagatcagtgatagtagtgacaacgacacatttcataattctcatatgatgga

SEQ ID NO: 13371 - DNA, 373 bp, Arabidopsis thaliana landsberg
tgcaaatcctgaccgttacatgtttaataattatgtataacgtatgcccttgttttatcgaacgttagatttttcctctgataagagtgtgcaaggcacgtgacgaccgaagagaaagtcatgttggatattgtatgtcacatgcatgaggatccagtcgccatgagactgagattagggagattagattctaagggatatatatgtgagcaaagattctaatctcatttgttcttttgttgattcattgatttcttttatttttctttgttgttcattgatacaattgtttgatttgatcgtcgataaccgataataattaagagatatttgagttttaaaaagcttatcacactcatttgccaattatgtt

SEQ ID NO: 13372 - DNA, 634 bp, Arabidopsis thaliana landsberg
gacattacaactctttctaacataaaagctatgtcgaaccacagaaattgaaaaccatggttgttttattcttagctccactagtcattatttgcaaatcatatccagaataatttattttgagatgattttttttacttttcagcttgagtttactttattcgattgaaacatgtaagtatataactcggaacattttaacatttggaatgaagttctaggtaaatgtataaaccaggccaataaaatgagacaaaagcaaaacaaacatcaaagattcaaagtacatgcatatatgttcttctctgcaaagctagcctcctaaagcttagaccatctcatgggtcacacaatgaggccaaatactagaacaaaaccaactaagaaaacgcttgacacaatccaaacacagaatatctacattattaactagtcaagacaaaaatcttacttatcgaggatgatgtttaccatttacagaaccatgccaaaagtatttgttgttctctgagtcttcctctgctcatactctgcatcatctgtaggcaactcataacgacaaacaggacatgtgttccttactttgagccacggtacaatgcattcgctatggtacttatgattacatggcagt

SEQ ID NO: 13373 - DNA, 555 bp, Arabidopsis thaliana landsberg
gagagctcgttgctggtcgaagatttcttcaatgacaaaatgatcttttcaaatatgaaagagagacctaaattcaaaggctgtggtcaagatcacaacagtttagagatgacatcattttacctaaattagagatgaatcccaccggagatattaaaccggttagtgaaatgaaataaattggcggcaacaaagatgagatcaaaagttgtcttttactttcttcatggggatttttttttttttttttgctggacatggtgacttttggttgtggatccaaaccaagtcttagagttggaatactccacattcttttatcaccgcttggttaccctcgacgttgaacgaaaataaaagcttgttggacgtcacatcagcttcaaattggaaggtgagcaaatgctctcttaaaatgggaggcaccaaaaagcaacgtccaggtctccatgaaacatcgacgccaattttacctttctcagtgatattaacaaatacaactgttgtttccctatcagcggcctcatccgtgtaattgacaactttttcatccac

SEQ ID NO: 13374 - DNA, 728 bp, Arabidopsis thaliana landsberg
aaagtaattaggtttagatgtatgttagtcctttatgtaatacgagaatataagaggcccatttaaagcccaataatcagtttactcgggttaaggaaaataaatattacgaaaaaggagcgaacaattccaccatcacgaatcgcgatttttttttgagattacggaagcttcgcttgatttgggatttttagggttttctttctccgaagacgactccgagagaccaacagtgatttgacaatgacgctacctccaggtctttactccggcaccagctctcttgctctggtaattcatctctctaatcggattctcgatctgtagcacagattcgtttttttcttttgtaaagagtttgtgtgattcaacgagtctattgcttcaatgatcaggtggctcgtgcttcggcttttgggttgggtctcgtctatgggaacatgaagctcaaggtccttaaggtcatattctatctcaattttgtcttgtttttatcgaaattgttgattatattgctcgtatctgctatgaatctgcaataatattgattaatgaattgttttcatcatctggtgattgtaacatttgaattgttggtgacatgttatctcgaaattgttggctacacaaattttatcatcagaaaatttatgattttgatcgtagttaagagtgagatagcaaattttggtttgatttacagtgctctcgagctatagatgtgaatt

SEQ ID NO: 13375 - DNA, 1148 bp, Arabidopsis thaliana landsberg
gaatatctataatgtacaaattaagattgttcaatccaataaaagatttagttctttatcaaaataaatttttatgagagttcaataatcatcgcagaaacttattatataatttcagattgctaaatccaatatgagaatgtaatcgtttctaaaaatagttaactcttatccaataataattattatgtagacaaagatattaggtgccatattaaaggagaaaaggcaactattggaaaaggtcgtcgggtggtgtctacgcgctatcgcagaaaaaagtgaccatgattggttacttatttcgctcctatatatataagacgtatttcgtcccatttcgaaaactcacatcaagtttcttcaattcattaaatcacttctcaattagctcttacgaaattcttttcattactaaaaaaatttacaaacaaaagtctcttgtaataagctaaatggcgatcttcaagattcttgtattgttgttgagtttgtgttgtttcagtcaagcacaactttctcctactttctacgaccaaacttgtcaaaacgctctctccaccatccgatcttcaatccgaaccgcaatcagccgtgaacgtagaatggctgcttctctcatccgtctccatttccacgactgcttcgttaatgtatgtacttaaaacatttgattcaacatgtgtgtgtgtgtccatacatatatgtgttttatggactgctctaaactttatattttttttttttttttttttaatttgaagggctgtgatgcatcggtcatgctcgtggcaactcccaccatggagagtgagagagattcattggcaaattttcaatcggcaagaggatttgaagttatcgatcaatccaaatcagctgtagagagtgtttgtcccggcgttgtttcttgcgctgatattattgccgttgctgctagagatgcttttgaatatgttagtctctatatccatctttatatacatatatcttgattattaatccaaacatgtacatatttatatgttcagctactactttaaactttttcaagttgtataatatttacttctctgacgtaaaatgtcatgtaaatgatatacgtttacgggtgcaaattttgattaatcataagtgctaatgaattc

SEQ ID NO: 13376 - DNA, 653 bp, Arabidopsis thaliana landsberg
atcaaccaacctattgcatatgagaacaagatttaatgagctttagcttttcctcaaactcctggaaatgaatggtcagaactgtgagccaaaactcagcatgcaaaaagaagtagaaaactcaaaatcaaatcatctcgtatggcatgtaaggtccggcctcaactatgcacatatgtacataagtatggtaaacacatattttcaaggtaaaagagaggtagaaaaggaacacacaaagtcggtgttgaatgctaaaccaaattgaccgcagtatggtttgactaccttatactaagtatatcacttaagaactgtagacagctacttttattaaatgtgcagaagcagaaactataccagatgatttcactaaatgctctcacggtggatgacttttgactgactgctgagatatgattaaaaaaagcacaatcctaagagccataaactgccatccatacttacccaattagttccttctagctggcaatagaaagaagcagcagtatatccggcaatccctgacgtaagtgcatatatgaccactaatgcagtaaacaatgctccacggttgtagggataaaagacaccgactaacgcaagcatgaagatgaatacagctctgcatacaaataaaaaggcgtgctact

SEQ ID NO: 13377 - DNA, 408 bp, Arabidopsis thaliana landsberg
gacaatgtcccaataataatgatgaccaggcacaagaaaagcatgggatcagagagaaaaagaagaactataggaaggccaagggcgaggcacacatcgggaaggaatgggactccaactgctcctcctgcgactctaaggatgaaggactagctgcctcggccttcaacaaatcctcgctcttccctaacgaacgccatacctgtcttatgaccaaggagaaaaaggtacgtgttcgggacacacccaagtacacttcatctagtgatgaagaatcctccgatgatgaagtagattactcgagttttgtctagggaccgtaattaggggtagcgcaacgctccttaatctagctagaaaacgtcttcaatgcataccatcaacgactgcataaagcgcagggctcgt

SEQ ID NO: 13378 - DNA, 1067 bp, Arabidopsis thaliana landsberg
tggccaatttcaaattagttaattaagagggggtgaatgaaacatgttcaccccaagaattgttcttatttgagtgggtcatgacaaaacgtcaattacaagcctcatcccgatgtagtcaattatatgcctcatttatatgcttaatattcaatatattcagtttggaaactaacatttatgttacactactaatttttaagtaagtggatatagttgcatcatataatagattatatttaacatatacgtcgatatatctacatcggccttggaaattataataggattttgtagcttgtattcagctaactagaaactggatatagatctctaatgtagtcaattatatggctcatctttatactgaatattcaatatatccaaactggatatagatctctaatataaccaattacattccacatccaactataagtatagacaatatcaatatatccaaactggatatagatctgtgatgtaatccgatatattccacattcaactataaatatagacaactatatctatcatatatatggctttcttgcaccaacaagtatcttctgcgaatcaaatctcccctgattgtcatttatttaacacttgtttctacaagaagctcggggatatttacaaggtgattctttctcctgattatatcaagaaaatgttccaatggttttcctaacgcattatgtttatttttttatttacaatcctaagttctcgtgatgtttaaaggctattgtcttatactttgatcagccatatgtaaaataaaaagtaactataacaatgcgatactttcgaaaataatgtatatcttggcattcttgtgattcacaatttttgttacttatgtcgattggtatctctgtcttttccttgtaatgagataggggaatcacaagggtgccttatttgccaagttcaagaagtggtggaagcatgttgatatattgtgtaaggcgtatatattaataccaatacatgatgtgtaagtagtttttccttctacccctgcaattacaactttacgatatgagcttaaaccaaaaact

SEQ ID NO: 13379 - DNA, 1001 bp, Arabidopsis thaliana landsberg
aaacacagagattaactagatttaaactaccatactctattttcttatgtataaagagatgcattcatccatggtttcatatgaatggaagaaaaaggtggaagtgattgttccatcatcactaccagacgacgtcatagaggaaatcttcataagacttccagtgaaagaactaatccgactcaagttttctcttccacaagaatggagattgaggatcgagtctcatggtttcggcccacgattccacatatataacccgaaactgcaccccatgtttatccttttcgtaaaatacatcttcaagtgtttatacatttactccaagtctggtttcactttgtgttttactattctgctttatcttggtttacctttcctagtgcttttgggtgtcgatgttcttactaggtcatttataaatagatgtctctttcagtgttaagagatcagacctattttgaatagtagaaagagaacatgtttgcttggatattcttgcgagacttttgaacaaatgtttccatcgcattgttgtttccgaagaaacatcatttcttaaaaggaaattgaactcgttcagacactgacatggtttcagacaatctgtttggattcaacttctcttctaccctctactcttcttaatctatttttttttatggcatttcaccagtcacgctcacacatttgtgaaatggtgctcgaacttggatttacctgagtacaatagttacaacaccattggcttcaattggagctgctggctctagaagtcgatcccttagtcttcccgcctaagctctttgaacttgaggttcgatcatattcatatgcaccatgtgagctcgcatccaatagctcattctccagcgctcgatatagtttatcgtgtcaatgttcattcatagtaatagtatgttattagcttctttcatcacgcagagccaactaattcaatgcatacgttcttaagcatcctcagcactaagtttcggtgt

SEQ ID NO: 13380 - DNA, 590 bp, Arabidopsis thaliana landsberg
  unsure (1)..(590): unsure at all n locations
tgacatgtgctgatagagtccgctnnnnnnnnnnnnnnnnnnnnnnnnnnnnnnngccatgtctatgtgcaggtgaacctatagggtcacacacttaatggaaaggaatcctagttcagattggatctgaattagactgggtttagggttgttaatgagcctcggagttagaagcccatcagaacacctatataataaggggcggggcacggttagggttaacctaacttgccacctacaaaccagcagtcgtgcccctctcaccctcgcctagccaccgtcgcgaacctagcagttcgatacgcgaggcttcctccctatacatgtggatacctcaaagatgatgcatatggagcactaggacaaaccgcgtgaggatgtgaaggatgccaacgactaaatttggagaagacatgtaagtgatactaattgtggaatgaaaccacttgcggaaatttgaaagcacttagagatttgtagtgggagcatattgcatttctctggggactctaatttctttcaatgagactactacccatttaataggcttcaaaacaaagtattgggctcaaatacttagattatggagt

SEQ ID NO: 13381 - DNA, 875 bp, Arabidopsis thaliana landsberg
agataagcaaagacgacaacaacaaaaaaacgtaagttcttattaaaggctctaattggtttcacctttaaaaagcgggggaaataaatataaaaaagtctgaatctatgattggttaaaattaatctcttactggatcacgaaattgttttgtcaatctatgattccaaggggtgtctaaacacagctttaaacaattataaccaaatctatacaaaatatacatccaaacttgtctcgaaaatttaatgtcatggctaaatctagaactaggcttaaaactcatgaaacaaccaccataaaccattgcaatttgttttgattagaaaagaaaaaaaaatcatttcatagcaaatgtacttgggacaattttcacaaacgtaagcatacaaaaacatcccaggagaccacataagttataacaagtgatttttgaaaggcaaattctgaaaaaaaatcaactagatcgagtgctcatccatgtgatgaacatttatgcaatctagagttgagttatttacactagatcgagtgttctgttataacctgaacatgaataaaaacgattttctgaatagctatttgtctaattgagaaatcgaaatagtgtctaagtaagtgtaaacagacctctagtaaagagcgattgtgattattatttgttttctcatattattgagatttgttttctcaggttactagagatctaggtcccattttatattggatagagcatgtatgggaaacttttctattgtgtaagaccactttcaattagttgcaagaaaaatatgatttatcttcctatcatatcatattgtgaattttgaaggttaattagtcacaatacatattttagttaggttaattacatg

SEQ ID NO: 13382 - DNA, 548 bp, Arabidopsis thaliana landsberg
gggttgggtgtaacgaaattcacctcgaaatcacaagacaatcatggccgaccgttcttccgttgtataagcaaaagagatcctagctcgtggaaaaacaagaaagatgtaaggaggtatttggttgtttatgttgtttttctgtgaaatgggaagctagatttgttgtttatgataggatcacttgtttaagtgggtggaggatgctgtgtatgaggaggttgaagatgtattgccaaacctaggaatcatggcaaatgagattgttaaagctagatccgaggttaatgagattgttaatgagttgagtgcttctattcaagaattgaaagaaaatgcaatgtgtagcaaaatggaaatccggaagttgaaagtgttggtgaaagtctctttggtgtgtgtttgtttaatgacaattgtcattgcttaccaaatgtttggtaaagcaacagaaacaagctttgttctaggtcattagtgtaaggattgtattaatttgtcttggatttcgtctcggtgtatgttatccgtcggatacatgttcatgt

SEQ ID NO: 13383 - DNA, 1382 bp, Arabidopsis thaliana landsberg
  unsure (1)..(1382): unsure at all n locations
accaatttataaacaaatagaaaaattcttatcagaaaaacatgtgttcgaaaaagcggtttacgcggctgcctaggagctagctgttttggtcgcctaaaatcatatatattttgtttcattgtaaattttcaatttccaactaaataaattaaattataagcttaagtttcctatattgtttgatatgcattaaaatatttatttttatctaatttttgtttacgatttaatattttttaattttataatagaaagttttatatgatttttgtctataatatcatatttagaatatgttttgttgtaaacgcttaaagtgcctaaaactgttttatgttctgattaagcattttagacactagacattgggttgttggcgtctagcattttcttgtaaaattcttttgtctagtattagttatcaaaagatttaatggttgaacaccaaattcgaatcccgtatatgatcgcgtttctatattattatatctctacaatatgatcaatgactctgccgtactactatcaaaaatttattctctagaattcacacatgcatatattaccgtgttttgtcatgacacttcccaatattacacaaacgacttataattcgtgataaaaaaatatattatgctttgaaataactcttttgaacaccatcatgcttattttcatgctaggagacaacaaaagtgacaaatatgtcatgttttcccacatactatccgaagccatagaataagaaatatacatagagttggtgtaataatttcttgttttttctctagtaagttcatttatcaatcttctctctgagcatgctgcacttaagacttgacttagctttctatataaacacttgcaaacacatcctcctagtctcaaccacattccatagccatctctctctccctctcactctttctctctttctctggtctgtttcaaaacatagtacataataatagagacaacaagagaaagaaaaaacagagtgatctgtttcaaaacagagcagaaaacagagtgagatgggagcaatgatggtgatgatgggtcttctcttgatcatcgtgtctctctgttccgctctccttcgatggaatcagatgcgatataccaagaatgatcttcctcctggaaccatgggctggccaatctttggcgaaaccaccgagtttctcaaacaaggccccaacttcatgagaaaccaaagactccggtaagaaaaatactcaaatcaagattttttttttctctacgctaaaaattaacttagaatcaacagatacgggagtttcttcaaatctcatcttctaggttggccaacgttaatctcaatggactcagaagtaaacagatacatnttaaagaac

SEQ ID NO: 13384 - DNA, 1146 bp, Arabidopsis thaliana landsberg
gtctccttatcattctctctcatggtttttcttttttcttccctgcaacatattcaaccatttatgggttattgggtgtatgatacaacaatgtacataagaaggttttctcttttgtctgtcaaggaaacacttagtttttttacctagcttgagcaatctcattcttccattgtgatctcttcttcttttgcttcctgggttcttccacattaccactttcggtttttgtgtttttattccttttgcctttgtgaatttcctttgaccttggattttttcgtttgttcgtgtcttctttagtgttactctctctcttgggttgcccactggcaacaggtggcttctccaactcctcaatggcctcagctttctcatcatcatcatcactagacgacacctgagcttgctccattgttacagctggctcatcatttcctgaaggctgcattgcattgctcatcttcttcagctgcagaacaaagaaaggaaaaagtaaatacctcgttggtttaatcactattcatattttataaaacatctgttttgcagggaaaagctattcataggttaaccaagtgtatacctttgcaacaaagaatccatccatgttgtgcacgtgaggatagaaacgtctagtcttctctaaagaagggtggaaccggtgttctctaaaactgctaaatctgaagatatgcagcaaaacatttgtgttcagatgacgaatcatgaaatttttcaatgcagatgaaaatgtatattaccctggtcggccaaaatcaagtccacatggaacgagtttaacatccctgtttttcagagcataatcgatgacagcttcgttctgcataatttgttgtacaaatagaactagtgagaaaacatgaagatgccaggaaaaaaaaatagtggaacagaaaaagtatggtttaccaacctcgggtatcataactgaacatgttgagtaaacaatatatccaccggttttggaattggcgtctaccaaatcaatcgcaccaagtataagttgctatgcgcaagaaaagaagagagtatggttagcattatataccaaatgcatccttctttatctactcacagtaagagggtataaacggcgtttatgccattttcatgtttaaatat

SEQ ID NO: 13385 - DNA, 773 bp, Arabidopsis thaliana landsberg
tggtcaaaaaacttggctttatctagtgcttcttgggttgttcgagatcctatggaaaatgttctacttcacagtcgtagatcatattctcaggtggcctctgtttttaaagcaaagattaaaagcagggaatgggcacttgaaagcatgtagagtttgaaatttcagaatgtcttatttgctgcttcaacatatgaaattattcaggcattgaataaacctgctgcttggccatctcttgtaagtcatattttccctttgctacaattaagtctggataagcagggatggatgatggtttttgagcccttacatttcaatgtgggagcttctcgtattgcttatagtgtaacatctgactatcgtctatcatcatatgttgcacaaggacctcttggttggttaaagaatttctttgctgagaaaatatttatggctacttctttttctcatatgacattggtttctcaatgtttaccgccatcataagtttgactttttgaggttactgttacgataagttatcagttcaaagtacaatatatttactatatttaagaaagtacaaaaatatttattttataattttgttttcccgtatctaatcttattgccttggtttttacctccctatatataacttggtcttgtacacctttgttctatttcttttcttttgagcttcttttacttcaccctttccccccgtcgttctctttcaatggctgaaagatataagcatgatttacaatacatgctcttagggcgtgatg

SEQ ID NO: 13386 - DNA, 772 bp, Arabidopsis thaliana landsberg
ccaaagagatattatcatgtaaatttatagtgatttattaattatatatagttaaataatttaatttaggtaattataatcaaataaattctcttactttggattgatgttaagagagttataaataattgttacaaaaaatatgtgtacatcttatttttagaaataataagaaaatattagaattattttgtatgcgtttgtttggaaaatattatcccaacaatattatgtatgtggtaatagatttgagaaacacaaatgctccgatgaaacaacagatagagtaagtctattattttgtttttgttttatagaataatttatattatacatgcttattagtattttgggaaacataaaactaacattgatttttaaatttgtagaccataccgaggtatcaaaggtcttatgaacaacgaaaaagtttgattgagtcttttgatcatgcaattgccatcaatagttatactcttaaagaccctacaacttttggtcgagaatatatggttgagagattcaacctagcattttacatgaatgtaacatattaaaaacaaatttgatgaattttaaaaaaggctacaagaggtggaaggaactaacgggttccaccggtattagggctgattttgaaacatctacgatttacgcatctgacaagtcgtggaaagatcacgagtttggaattagtaataaccatgctatatatatttactaatattaacacacaaacctagtataaatatttatagttttgaattttata

SEQ ID NO: 13387 - DNA, 2177 bp, Arabidopsis thaliana landsberg
aatggtgataagctataatagtctccttactgacatctttaaatctgtttgtactctttataaattaacaatcctctgtaaaccttttcgtgtttggctatatataaactattcaccccacacacacaaaaaaaaaatgtatataaattatttatgaatattaaaaaataacattaagaaatcggaagtcagaaaaatagacataaggcacacataagtctagaaaaagactggtcgtggccgtaatgtacttgtataaaaaggcctttcatatcttctggggaaaaactttgtactacatttcatcaattacgaacttcaataataaattctttatggggatattggctaatataatcacacaatggtttctagcggctaattaggatatgcttcgaaaataaatataaaaatcatttgagtaatttctaactaaaaacatctgtttcctctgaaatctgaataatgtcggaagccattgtgcttgtgagtattgtttgtttccctgtagcacagaaatataatattaaattctgaaagaaaagaaaaaaaactattacttgcatagttgcatgtaaacatttttgccattttaagagttttgaattgttttgtttacttaaatttgagtctgctgcatgtaaagaacaatttcaggccagttttgtggtctctgatggtctcacagggaacaattgttcttacaacttggcaaaatttatgtcatatttgtgatacttccgagatgttctgtatgttcatatactatcaacaatatataaactatctttttaaaaaaataaaaaataaaactattagaatgcagcaagaattatttatttatttatttatgatacttctgatgttaatgattaattacttgttgtggtgttatataatagtatgaaaaatgcataacactattatattgcatacaaaacataaaatgtcggatcaacatgctctctattatttaatcaactagtaaattatattccttgaagcctaaaaataaacattttttatatccttgaactttggatgattcttgttcaactctcggagtataatctattaaaaacgaatttcaatcagggaaaattatggctttctaatgattttgctttttgaagcagataatagaacaagtaaagttccttttaactttaaccctagctaattgcaagaatagtaagtaaaaaaaagtggattaaaacttctaaaaggctggagaaacttaaaagagtcgcttagagaaacataaaccggctatgtacatatgactagaatctaaacatatttcaaaacaaaaacagtaaagcaaaattaaattaagatttaaattagaacaaacagacataataatttatcacttttctcgatattcatttgattacaaaacagaaccttctacttcatagagagtctttcttcttccccaaagtttcctctttagttactcccccattgcttgtgaccaggaacccatttaggacacttggggctgaagtaactatcaacaacccttgagttcaatagctcgataattggagcaaacttcacgcatctcggcgtcttatactgattaatcgatgctcccaagctgattgcgtaatccatgagcttatcgaatgtccctggctcaacaatcttgatctcaagcgggcctatggacttgtcactaacccttccttgtctataaacagtgttgaatgactcttctacagctaagcagcagtcctcgaagaccgaaggagggatcggtgtgtttccatccaaacatagctcccaaaacaggacataatggcctgggatggaacttgtgtctgcatagctcgtgtactcagagagtgaggcatcaaatgggacaaggtgtgtcactgcgttcttcaccgcgttctgaagctcaacctcgtcggtcttgtcggaatctatgctcaagaccacatttttgcgacatatgaaactgaattgaggcgctttgttcttgaaaccagtcactctcaataaatcaccaactctgtatctgcaaagccctgcaacaaatacacaaaacattagaacagacccttaaaaaatttctaatcttttgactataaatgaataagaagttttgttttcttaccggcgtaagaggtgacaacaagctcgtattcctgaccaagcttgacatcaac

SEQ ID NO: 13388 - DNA, 1394 bp, Arabidopsis thaliana landsberg
tccgtgccatcatcgtcaatggccttaatgatctcagcaagtttatctttggggattggtggaacagaatgcttccaggcgtgttcacacgcttggcgccatatgtaacctgctccatcaagaccaagcttagactccatttgcaaatctacacctgacaaaagattttcttcatcactgtcttcttccattggttgtcggagtagtgaaacctgtgaatatgcaggtacaacaaagtccctcccgactacaaccttaaaagacaacacaacaccaggtttcacaatagctcctgcacacactttcacctcatcacatacaatagcattccttatctcacatccatcttcaaccgtaacattgttccatatgtatgagccttggatcaccacatttgatccaatagaacatccattcccaataacagagttcaagatcttagtcccactcccaatatttgtggcatgtccaatgacataggaagctccaacatgagcagatggtaactgagtagcatcagaagccttgtagatcccttgtctctcgagcttaagagtgcgatttccgctgaacttcatatccggtacatacgggaatgtccgcctctggattatatccttgctcaccatgtcatagctcctgaaattttcaatcctagaagcataacacgagctaatctcatgagtgaaaatcttgtaaccgataatgtcatcagcaagaacaccttccacaaaatcacaacgcatatgttggtaatcgaagttatccacaaatagactaagcacctcaagagaacatatgtcaatgtaacaatcctgcatatcactacataacaaaacagatggattacgatccagcaatgatttatcgaagcagatgttgtcctcatcgtaataaagaagctgttttgttaaaggatttacagcgatgaagagttgatgatcggtgatgagtgactgtctgataaccatagtcatgatagctttctcatctttcttttttctatctctgtgttcttgaatcagctgcgtcaggggcatgttactaacaatacatccattaacaagaacaaagtcaccttgaatctgagacgtctcaatctgctgctcgtagatataacgcaaagcatcaccagcactggtggagttttgcggtgactctatagtttttaccgtaaagtctttgtgcgagtaccagtcagagttgttcagataatcgatgacttgcatcgagcaaaagacgaaaacttcttctatgccagcagattcgagccaagctaaggtgtaatcaatcatgggaacattcactagcggtaacaagacattggggcgttctaaggttaagggaaggagtttcgtggcgaaactgtcagcgagaagaatggcttgtaaccg

SEQ ID NO: 13389 - DNA, 673 bp, Arabidopsis thaliana landsberg
attgatttgattgagatcgtcttcgatcaatttatacgagtgtgcatttggatttggagaacgcgtggaagaaggaagaagaagtcagcttcggcgtttcttcgtcaacggtctctagaacgtcaatcaactgctcccacttttagatctcatgatttcgtcaaaattactaatataccccgaataattgattaatgtaatggccttattaacactttaaatttaataacacattacatatttatcattacatattacatagtaattttttcatcaaaaaatcatcactactaacttccatactaacatcatgcaaccagcgataacgttaagccaaaattttatcaacttacttatcagagacaaaatcaatcacaacttcatctaattaattacctagcaaactgagaaaatcgggcccaattgttgcctcgtaaaccgtgtatttctctctcgcttgtaggcgatttctggtttttagatctagggttttctgttccgttctgctcttaacgtcgacaaagtcttctcgcaagtgatccaggagtgagtcgtcgtgcctctccgtcaacaagggtgtggtgtttccccgctaatgtggttgtggccctagattggcggaggaggagcattgaagcggtggtctcccggttgtggacggtgggaggtgctt

SEQ ID NO: 13390 - DNA, 749 bp, Arabidopsis thaliana landsberg
acatttagtaaatatattaatgggggctatttttttactgtttttgtttttcattcctcctaatcactttaattttgaaaaagtttatcttaaaactgaacggatcaagttgactttaaaagttaccaatatttcaattcatatgaaggaaaacatactaaaaaatgatgagagaaactcacaagcttggatagcagattcgttgataatttgttcaagcgtctcaaacacaagcttactgtccacgagaaacttcaagtacccttcgattgtgaaattccatgttgatacaagatcgttggagtcactttttccttcttttacctgatctcttgggtgaattttcattaccacgaacctcatctcctccacaaacccattcggttctcgaggataccttctttctggcttctcccctgctgctgccacaacattcaccaccaaagtccgatcttcgtttgctcttcggacaagatggcgacgaggagcggctatggtccgaacatatcttattgtcactgtcttagctctcagactgacatagctctcgcagtcaagtcttctgcttgcaggaaagcggcaagaggcattaagtcttgatgtagccatgagtttgcaatctaatagacacgcaaactgcaatatgaaattagggtttgtaagagaaagactaaggaagtgttatatatagtctttgtcgtaagccgttgactagacaaataaagtctttaagttaaagactttaatag

SEQ ID NO: 13391 - DNA, 776 bp, Arabidopsis thaliana landsberg
aagaagctcttcttctacgattccccgaagcttctggtaaaaatctaaacgaaattcccaatcttgtccttagcaaagtttcggtttttacctcttgacaattttcaatcacatttaatgcgtactcaggattgagatctctctctcaagcaatggcagctacaagtgagaaacagaacaccacaaagcctcctccttctccttctcctctccgcaattccaagttttgtcaggtaaaatctttctgcaaatttctttgattagattttgttgattaagatgcgatcgagaaagcattcgtgtcacaaggatcttatgtaaatgacctgatctctttggcattgtaatgaagaatccttgaaatcgaatgccatttagatctgacccttttttgctggcttcattgtgtgagaacttctgtatcattgtaggttatatagattttacagaatcagatcttggggttttattagtttgatctgttgtgactcaaggatgattatgtaagttatatgagtttacttttttcttgtttgttttgtgtagcccaatatgaggatcttgatctctggaggagctggcttcattggttctcacttggctgataagcctatggccaatgagaagaatcaggtttgtatacaaaattaacatgcttttcaagtttgatcatacttttgaatgtttcgttttattcatcaggtggttgttgctgataactatttcaaaggctcgagagaaaacctcaagaagtggatcggtcaccccaggtttga

SEQ ID NO: 13392 - DNA, 620 bp, Arabidopsis thaliana landsberg
gagaatttgattacagaaatatgggtgactaataatacatacatatgcataaagtgtgttggaaataattaacaggaccgggatgctcgtcactggcgtatggagcattacaagagcttgggccgttcagagtacacagcgacggcaaaacgctttttagaaaccgatatgcatggaacaatggtacctatcgtttttcttttttattaaataacaaaaataaattaatggtaaacgattcttgtgattaaaaaattatcaaacgggtggtggtggtgcagctgcgaatgtcttgttcttagaatcgccggcgggagtggggttctcgtacaccaacacgacgtcggacctggagaagcacggggacaggaataccgcagctgataactacatcttcctggttaactggctggagaggttcccggagtacaaaggcagggacttgtacatcgccggtgagagctatgctcgccactatgttccgcaacttgcccatactatccttctccatcaccggagcttcttcaatctcagggcattctgataggaatgcggtgatcaacgacgagaccgacttgatgggtatgtacgactatttgagagtcatgctttgatcttcg

SEQ ID NO: 13393 - DNA, 1156 bp, Arabidopsis thaliana landsberg
acagaacatgcgaattggaaaccacggggcgttacagttggcgttagagctaatctcttactttagcgcgtgttcggcttttaacatggagatggtatacacgatcgagctgtttccgacatgtgtgagaaactcggctatcgcaatggctagacaggctttggtgcttggtggagttttcagccctattatggtagcagctggtcggaaaaacgcgttctggtcgttcggattgtttggtcttgctataggtttgttgggattgtttgcagttggattgccagagactagagggagtgatctatgtgacactatggacgaggaagagtgcaaagaccggcggagtaaagtcgccgttaataatgtcattgcatgaaatggtgaagaatttgaaaacacatgtgaatttaatgtagatttaatttagtatttatcacttgattacattaagacttaccacatatcttttttttttggttagttgaaaagtgtttctaagaatgagccatcaaagcaccactctgatgaaacaatctcattttacagtttacacctataacacatggatttcttgaataacaaaataattcaaatttgtctcgtttggatattgatgccgatggttaaacgtttggctgtttgatttttgttagagataattgtgtttctgttctaattttcacacgttgtgtgaaaatgaatcgttccaatcccaagaaagtatattcattggggttgttggtagttggctgtttggtaattgaatgggaagaacaaaccagacagaaatttgtacacttcttggtagatatgtttaaaaggtttaatttacaaataggcccatctatcagcccttttgtaacccttttaggctcaactaagtggtctcaaagttcacaaacccaaaacttatgtggatttattattttaagcccacacaaactaacgaacggtgagctggcaagtcacgtgatgacacgtgatccatcaacccatcacttaccattaccccaaccggtacggaagtgggtttgtatcttcctacttcgactcctcttgggtaattataattagttttagatgaaaccaacaatcccaaaaatatatttagaaaaaaggcaagataatctgtatacaaaaaaaaacgagaagggag

SEQ ID NO: 13394 - DNA, 765 bp, Arabidopsis thaliana landsberg
tgcaggtcgactctatgaggatccccgtagtttcaacaacttctgcacaacatgacttccatatttgttgcgggctagatgcgcatagttcctaattagctttttcgcgagctcatctgttacatgttgattatcgagctccaagacatattgaaccacatagtttctgaaggagaacatactcgtgagtaaaaaataaagtggatcatatatgagaaagaagagttgtgtagatatcattcatatcatgtttacccatgacagttcaagcagagtttcaacgcatgttcgattacttccgaaatcaaacgttgccttatctcatgattcggaacacgttccttgtcaaaacattgctgaagcaagcagcatccgttttgatcaatcgctatctggtaacagtgttgagagacaacttcaagaagacgctgtaaaaacagaagaaagattgtcatttctcaagaatacttgtgaaagaagattaaacttgtgattcatggtcaataatggcacattttacttgtcccacatgatagaaaattattgaggtcagatctgctacaatcaaaacatacagattctaggaacttaagaaaacaaacatcgcaaaattaaccgataacaagcaaactcaaacatcaaattgattaatctacttgaggtgttctatagtagattctttcatcaactatatggtataagaaagtgacttgaagcttaatgaacagaactagaacacaactccatgaccataaacaaagattc

SEQ ID NO: 13395 - DNA, 417 bp, Arabidopsis thaliana landsberg
  unsure (1)..(417): unsure at all n locations
tgaatcaggggtacccttactactgtatgaagacgcggtacgcgttccttagccacacggtgaacagcgctcgtccccaccacatgggcagatcaaggggcaccatatggcaaggaaagatgatacatccgagatgtatcagtcgagctggacctccgcgagggagcgccggacccctgtacgcacaacccgaacccccgattgtggcccaagactcccgagtaagcgtaccaggtcccttggatggggaccagatccctccgaggaaggtccgggccgcaacaaggtcccaggacaggggaaaacctggcatnnnnnnnnnnnnnnnnnnnnnnnnnnnnnnnnnnnnnnnnnnnnnnnnnnntccccgctcaggcggaaacctgatggtggcacgtggctcattgcgcgtgacat

SEQ ID NO: 13396 - DNA, 992 bp, Arabidopsis thaliana landsberg
cggcatttgatatagaccgtttcctcttgtaaactattcaaatgcattacacatgccaaatgaagacatccacacggtttgattggagattgtttccattagctttagatatttgaacgaaaaaatatccctttattaaccatctcatgattacgactccttttgaagtgaagagatcatggactggtggagatacaactaattttggtttcactcttcactaacatcggaaacaattgtataagaacataatcatgttcactcgaaaaaagaagattaccacgacctttaaaaaaaaaaagattatcatgacctaagaaaaaaaatgattatcatcatgaccctcacgtagacagccttagctttccgtttcttctcatccttcttattctaaaatgatttaaattgaacgagttaagttgaaattggtttggaaagtttattaattttaagaaatttatgtaacaaactaaaaaggatataatacaattgttatctaaattttaaatttcaacgtgatcggagaactgaaaaaaaatgaggaagaagctaaaaaaaagtaaattgaccatagagggtaattatattttgtgttaaaaagataaagatatttatgtttaactcacttcaatgagcatctatatatacatttttacagtcattttgtgaaataaatcctggagttggaacttatttacaatggctgccactgacttttaattattgatttttttctgcaataaattaattaacaaataaaaaacattccaaatatatttcaatctcatatatcacgcaaatttctccaaaatttgaactagatttcggttagcaaaacacacctaaatacatttatgttagtgttgtcagggcattacttaacatagtttatggctctacatatttggtaataatcgtttttggttaatatttttgaaattaaattcaaatttggtaaatataatttccgaaattaaattcaaaggtatagt

SEQ ID NO: 13397 - DNA, 1011 bp, Arabidopsis thaliana landsberg
  unsure (1)..(1011): unsure at all n locations
tgattttagaggattttaaaacttttataattccttttaaagtcatttgaaaacttttgtaaatgctttcaaaactctcaaatttttttttttttttttttaaactcttaaaattatccttgttgtatatattatttaaagccttttaaacccttaaaatatattttacaatggttttaaatgatttataaggattctaaaatattgaaaaatattttaaaaaggattttaaagtatttacatgtatatttaaaaactttataaggattttaataagttttaaaatggtttacaagagtttttaacaattttacaaagctttaaaaaactttactaggattttctaagagttttttaaaagatttacaatggttttttaagggttctaaacaaaattagaaagactttaaatgcaattttttggcggaaaaaaacagagaaaataaaattttggcacttaaaattacatgttctcattagatttgatgatgattaatttagtcattttggttaagaaagtggttatttttaaaaatgggccaaaaaaggatatcatagtagaattgtggtttgggcttaaaagcccattacccctcccctaattagttttcaacttttcattgagtcttcggttttcgactttggatcggagtcggggaacatgaatttcgacgagaccgtgccactgagccaacgattggagtggtcagacgtggtcccattgactcaggacgatggtccgaatccagtggtgccaattgcctacaaggaagagttccgcgagactatggattacttccgtgcgatttacttttccgacgagcgatctcctcgcgcactacgactcacggaagaaaccctcctcttaaactccggcaactacacagtaatcaatcttataattcatataatcaacaactatctgaactcttatggttttgaaatttaatggatttagtcttttattggtccttgttgcttcaattnttagtcttaccgatatttttgttt

SEQ ID NO: 13398 - DNA, 1180 bp, Arabidopsis thaliana landsberg
tacattattaagcgaatgcacaatttaagcaaagcagataaaacagcgaccctagacattcacaactacgaatacgacgggccccacttggagataataatgcggggcccaataaatcaaactcttcttacatcgcaaagcggtgcacgctccttggtcagttagattttgcaacatagcgtggtgagaaacgattttctaaagtcaactgatttgggtatcgatataattaatacatacatttatgtgtgtatgttgtaaatgatcattaagtatgaaactatgaatgatgaaactatgattagggtttataatatatagtatgaatgggttaaagcttgtggttgactaattttaatatcataaaatgaagattgaggaagaaaagtgaatatttattaaagtaccagaaactcgatggaggcggagatgaggaaaatgacgaatgtggagaagaaggcgtcagcaaggaagccaccgaggagagcgagaaggaaggctgtggccatgaaagtggtcacttcactcgacgatctggctagagacatgtgcatgaagttcttgagatacaacaccaagttgcttgcgttcgctaaaaacgctagattctccaatatctccaccacttgaaaacacatgcacatacacaagaaaaagcaaaataaaagaaatcaatcacatgattcccaaaagattaatcaagactagagaagttaaggaaaaaggggtaaatttggaattttgagactgacccaagacgaaggaggcggcgagcattccgccgtgacggcctctcaaggcggctttgtttctccagtcagcgtagccttcccatttggagacatcaccatgcatttctacttcctgtatttggaaataatcaaaattaaaagactttagaagatatctatttctctaaatagaaactaacatcagcaccccaaaactgatgtcttgttcttaaacaactaaaaattgcaacaacaaaaaataattagaatgagaacaatattagatgcttgaagaacccaccatttgatttctctctcaaattttgatgagaaataaaggtaagggtttttgaagtacataagtgataagaagggtgttttcggaataacaaaaagtagattttaagaaccctaattagtaattagattttaaagacataaaaatgaaa

SEQ ID NO: 13399 - DNA, 700 bp, Arabidopsis thaliana landsberg
gaagtatatggttgacgtaatcgttgcttccatgttgatcatgtagagacattgttgcaatctttctgctggtacattcgctttcgttatggacgtcttgtgattttgtagttgctttcttatactgattctatctccctatatacatattttaaggttttgttatttaaaacattagagctactgaaactaaaacatcccaccaaaactcggacgttctaagcgtgtataacattggctatgatgcataacctataggaataaatcctgttattgtatgaatttttgaaacgttaacaaaagaaactaaaacagtttccaaggaaacaatttaagtatatatatatatatatatatacacggttcacatcattttctccatcaaagtgagaggttagagctaagtaactaactatactttatgagatattaaagcccaatcatttatcaccaaacaaagtctatttataagttgtttttctagttcttacttcttaccaagtgttcgctagtttcttcacgaagtccacttccaccggaagcgtagttcatcccggtgtgagcttgttcaggtgatgcttcggcgaatggcggtataaaatccttaaaaccggataattcacctgacgataaaaacatcacaaattaaattcatgtatgttaccatatacacagtcgtcttttctaaagtacaattaca

SEQ ID NO: 13400 - DNA, 906 bp, Arabidopsis thaliana landsberg
ggtccatttcaaattaattaatattccaatttatcataattgtaatgtggaagttgatttttaaacataaataacatgaaatttatacgaactgatatgattagattgtaaacaaaaataacaaacattattgtgattttgtaatcattcactgtgtaatacatgataacccaagaaaaaaaaacattcaaagaatttgctataagatcaaaccccacaatgtacaaatcaaagaggggttaagcacacatattcactttaccaacctacaaagaagaatcaaaaagaataatagagatccaaaagcaacataaagttttcttggaatgagaagagctaacaagagatgagagacttcagacgttaatatccattcgctttgacctggcactgccattgttggttgtttcttgtacactggaaagagagtatctcggaatggtgtagttatcaggggtggacactggttgttgcggatagagcgtgggaggcggagttaggttgcgttgtgctggaagtggtggtattgtgttgttgtacttgtatggatctccatggaaactgcaacaatcaaccgtaaagaccaaacccaacaaagaaggaaaaagacttggctttttagcattgatgttaccttgttcgcttgtaaatttgatcatcatcacttgtaatctcgtctaaccgttgcgatgatgacgttggaaccggcgaaataaaccatggtgaagctgctggcaattcatctgagaaatatcttcttcttatcaactgtaaaagatccgaaaatgttcttctcggttagggaagggtgtcttaaaaatctgacaacaaaagaaaggtgtggtaatgacacttaccatccggacaaatttgttcaaagcttgcttatcgccttctggcttcttt

SEQ ID NO: 13401 - DNA, 638 bp, Arabidopsis thaliana landsberg
  unsure (1)..(638): unsure at all n locations
tacctttttttggaagtctatctcgaaaaaacctctatgnttaagtgtacttggcttagagaaattttgggatgcgtgaacgactgagaagttctcctaggtgcacatgagtaaggacaaagtgcgcaaaaaagacatgtgttgttctatggggatggtctatgatcaagaggatagccaggagtaaatgttgcttgttcgagggcggctgaggtgttacagtcctcgaggcatctctatgcctcaattgggataccattagggtacattgttttaccatctttcatccttttcaaagcctctctaccttatattattggatatgtcagtgtttagactctatggtcctaaccaactagtaaatgatgtcgtgtgcccagaatctagatggtgatgcgagttggcacaagcagtttatcctggttcgggcaatgcgaggccctacttccagcagaagagggatgaggcttatattgctcacaccgaagtgcctgcggtagggattaaagctgaggagaggggaggacccaagtcttggactgattgaggaagtgcaatacggatgacagaggaaactacaagtgctgcttgccctgggagagcatagatgccaatttatcactagaggagatcaatac

SEQ ID NO: 13402 - DNA, 496 bp, Arabidopsis thaliana landsberg
cttttcttgccttcaagtcattcttcacgtaaaaccattcctccataaaggccccggaccaccttttccggtatgttggcaccggatagcttgcgttggggtgggcgataaatccataacagccaaaattgttatgatattgttctttgcccatggccttcgtctcgtatacaagctcgtgcatactgcaaaagcattttgcgcttggctctagtccctggcttctcacagcccaaacaaaaatccccattctaataatagcttcgggggttatctgatggaggtaaatctgataaattttcagcacttcgaccacaaacctgctcaatggaaaccgaagcccagctttgaagaagcttcggtaaatcacaacttcgtcttcctcgggggcagggacgttgttgtctccaccaactctcacaatagacatatcccaaaagtacctccctctcatagtgtcaagatgactctgtttaatcattcacttcccaaaaat

SEQ ID NO: 13403 - DNA, 589 bp, Arabidopsis thaliana landsberg
tggctttctggacaagcccggcttgctctttgacatggaaagtatttaaacccgtggcagttgcagcagaaggaccacgaccaacatacttaatgtcttccatatctcctctgtttacgcttctcattgctgtccatagccgtggagatatgtagctgaatgctcccatgttcatcgcctcttcttggcaccaaacgatctccgcatctttttcggaccaatacaaaaacaagttatagaggtagacataaaagctaaaccaaaccaatccaaagatagtttaggtacgtacttggatatctcttgagctcacgctgaatgagatcatatgggaaaggacaaagctgttcaactctacagatagcaacatctgttgcgccaaccttcttccgttcatcatcaagctcataatagacctacaacgaagcaaagcaagaatttctctttacatatctgggactggcaagattcatcttataaaatgaacaaagcttatttatacctttccggagcaaagtaccaatcttctgatgccttcttcaagatcagagtgatcattctgatccttgattaatcgcttaaatctagt

SEQ ID NO: 13404 - DNA, 580 bp, Arabidopsis thaliana landsberg
tccaaccctaatgatgatggaagtgatcagggtgtcttggagaagaagttaatgtgtaaaacaatttgtgtttaatttattgatgttatgagtttagtttggtttaagtggatatctgaactttgcttcttgtctatcggatgtatctttgtagcgtaataaatgtatatgtatgaatgactttaaaatccaattatcaactcaatggtaatttggattgtcatatcttgaaaactttggtttgaatctttatttctaagaatgtgaatgtaagcaccttagaagctacacgttttcaacaaaagagaataaagtagacagtggtggaggtaatggcgaagccgttgaccggagaaacaatcagagttgttttcgaggaggagagtgagaaacaaggcggcaaagaaagctatatgaggaagaacaaacatcgccgtgtaggcaagtacagcaagtttctgtacacgagcaagagaaagtacagcaagtttcaagacatatcagttattgagcaggttgggaataccgagagacatgccagagtattgaagacacctgggagtgttcagacattaaactg

SEQ ID NO: 13405 - DNA, 972 bp, Arabidopsis thaliana landsberg
tttaatttattctatatgggcccagtaaataaacatatactattcattagccaatggagaacataaatccaacttatcgtaactatcataattcattaccagtggcagatttaaaatatattttattaaaatatatttttataaaaagagagaaacactatttccaaatatctatctaaacttcataatatagctgactatatttttattttcagctattacattattaaaatagtataaacggtaatcttatatatacagtagactttttggccaaaaatctctatactatttcatccctacacagtttacctttcatatggttcttccagagtcacacagatgcaactcattaaaaaaacataaggtacttggagatcaactgaagataacaaatgagctcacaccagatagttcaagagattcacatgcataaggcggatagtagcaatgcagatcaactggagataacgaatgagctcacaccagaagaagcgagaagctatgcgatatcccaattgcctcgggaaatctcaaagcacattcgttttgccttcgactcacctggttatgaaccgttctttgcttctcaactgggtatatacgcaccacagaaagcgtgggatgtggctagaagagccagcatgaggtcacgagccaaagcatcaaagaagaattgaaaggagaagcagaaaatagatatgagttgtgttgtacatttaggctgtcacaccatactggaagttttgttaggccagtattggaaatatgtagaaatcttcggtttggcgtctttgtttgtaatgcatttagttttcaaagtctttattctggggtatttaggcacaaatgagaagacaaacgctcaattttatagatatagaagcctctcctacaaacttttttatagcaatcacctcaacaacagaaaaaaatgatgtgtttctttttttctaggggaaattcgaactc

SEQ ID NO: 13406 - DNA, 816 bp, Arabidopsis thaliana landsberg
cgaaagcaattcatgttgatggcctgatgggtgggtgggtttgggatggctgcagaaaaggaattattcatgtatggtggatctctttaggaagggctgggcaattagtgttctttagttgaggagattgatcacgaggaccagagcgaagagcaagacgctatcagctggactgaagctcatacttgagattatcagaaacattgttatatagagttgccaaacagaggttttaaaagaacacactttgagtaatgcaagattctttcattgaacataaacaaagcaaagtatccatcataatttaagacgagggtaaatcatagtggtcttgtgactaagacattcttctctgagtgatttgatcctctagtcgaagcaaagagagtgattttcttcacttccggttcttgctctcgttcttttcccgctctctcttcttgtaaagcttctcgagggctcgttttgcttcacagttggggaagttggaaagatcatagtaatgctgagcaacatctactaacctgtatacaagcaaagatattcggtttttaatccatcggatgttgataaacaagagataacaggaaccagagatggaaactaaccattcaccgcggatatctgtaacagtgcgtatgaaattccgagtagtcaagacatattcattgtaaatcacccactctggtttgtgatccaggcaattagatggatgcaagtgaaccacctgccaccagaatttacaggcaacccgtcagatgtaagctataaggatctttttataatccggaaatcaaaatctgtaacagaatgcaa

SEQ ID NO: 13407 - DNA, 678 bp, Arabidopsis thaliana landsberg
gttgttgttgtagctgctgttgctgcgtctgttgggaggaagaagaagatgaagaaggcgttgaaaaaggttgactgaagagagtcgacgtgtagtatgataaatcaacctcattgttactcgtaagcaactgagcgtattgaagtatgtcctggttataagtcattggccacgaagtagtagtagttgaaggtggaccaggtcgaggaggaggtgagttcatggattcactaactcctcttggtgcatgagaaatggttgtggtggtagtagggccttggacccgttcagggaagttcagtttagccttggtgcctttgaatttgagggcagctcggtcataggctaaagcagcttcctctgccgtctcgaaagtcccgagccagacacgggctgctttctttggatcgcggatttctgccgcccatttaccccatggtctctgccttacgcctctatagtgtcttcttcttggttgatcttgaagaacatgaaacaagaaattaaaacaaaaattacatattgcatgtgcaattctacatgcatgagaagaattattgctacgtgggatttcaacgattggttatagcaagagaataattgtttaatatatatgatttagaagaaaagaatgaaggatttaactaaagatgatgcatacaataatacttaaaacgt

SEQ ID NO: 13408 - DNA, 948 bp, Arabidopsis thaliana landsberg
tatttttggttaaataaaatcgcttttaaaaaaagtcctaatttttttaattattaactatttatcttttattcactgtaggattgatcacattggattgtttgagctaaaacaataacgacgtggacttggacgattatttaagttttatgggcttaaagcccagtatatcaaaatctgggcccaaagttaagatatgaaattagaacacgtcgtactcacataatctgacaagttcagacagcggcttaaatataaaacacaagcgagatgagagaaatccaaatgaaatataatagggataaaaaaaaaaaaatgggaacagctctgaaacttccgatcatcgatctttcttcgccggagaagctctctacttcccgattgattcgtcaggttcttcttcttctcccccttgtcttttttttcatggcaacaaaacgaagatattgattgtattatttatactctaaacagtaaatggttcttatattactgtagaaatgtcggttgtcgataatagtgttttagaatgatattgtgatgcttaaatatccaattgtttaggcttgcttggatcatggattcttctatcttacgaatcatggcgtttcggaagagttgatggaaggagtgttaatagagagcaagaaactattctctcttcctcttgttgagaagatggtgatggctcgtcatggttttcgtggttactcaccgttatacgacgagaaacttgaatcatcttccacctccataggttcttgataatagaatagctcatgaaattgctttgatttgtccaatgactggattcatgtgtttcaattataggcgttttggttccaaaaagtggaatgtgtcatttgagttttcatacaaacaggtgattccaaggagatgttcacttttggatcttcagaaggagttttgggtcaactttaccctaac

SEQ ID NO: 13409 - DNA, 513 bp, Arabidopsis thaliana landsberg
cgaggcgccgttcggtacgctacccgcttgagtagcgagcgcgatttggttgaggagtttattggctatggagtgtagcccttggacatggctgggtactgggcgaagtgtgcccgcgccggatgtcgaccctgggcgactggttggtgcgaagtcctgcctttgttgtggatttacggggtcggaacccggctgcattcgtgcgcaaagtggaggccgaggccacgaagattgtaggaagatatgtgccaaagaccgagaccctgcggagttgggatatccacggttcgaatgttcggttgaaccgcgtttttgagttgaaccgtttgccatatgctagctacccgggggatgacgatgccgatgatgctgaccgccggggaaaaaaagtggtggcagcggttgacgaaggcccttcgcagggagcagtgccggctgcggcgcttaagaagaggacattaggtcaacagctgaggggttgggggcttcggatcgttttgctgcggatttatt

SEQ ID NO: 13410 - DNA, 927 bp, Arabidopsis thaliana landsberg
ctcgaaaaagggggttttataaaaaaattcttgacaggaatccattccacccaaagttttttgaaattccaaaagaccaatttcattagagtcgattgtgcaaacccatttgataacagaaaaaaggtgataatcacctttctaggctcagtatgccgtcaagcattggacctaataggtaatttgtctacgtcttagcgtgttatgagcatctgagaaccttatttcaagagtagtaaggagatattgtttaatatataatctgagtgtttcgagcacttaccacagagacagagttgtaatcatacatgtctacccgtttgtctgtcaaccaatagtcgagaaatggaccgactatcaacaacgttgcagcctgagctggagcagtatgacccagtaggttgaatgagctaagcgagtactttcgctgtagataatgtacatactgcaacaaaagagagaaactttgtgtaaatcttaatcttaatctttgtgtaaaccgtagctcaaagaacttacgtattgttgcaaagcagtactccacacagcaacaaaagcagcaacaaaacctttggtgttaacactaacatcagtaacagtacaaacaccaacaccaacaagaacaagtccaatgctaagttttgtatctcttgagtaacgaatctttataaatactacttccaacaagcatgatacaggaatcatgctaagctttgcaatctgtcaagcataaaagagaagacaccatttgaaccaacaacaagaaacgttacataacacataaagcatacacatttacctgataaaacccaacagagcttcacataagactaacattcatttcagcaatcggaagatttgcccacagaataaacttaagaagctctgttaatggaagatgagaaggcctgtatatatcctaaacat

SEQ ID NO: 13411 - DNA, 789 bp, Arabidopsis thaliana landsberg
gattgtgtcattttgagttatcttttgttctttttgtcaatgtgattgtgattgatgaaaagtttctgcatccttgtgatgataaagaagaatgttgtctccctctactaggattatggtgtgaggggtttcccaaccattaaagtattcgttcccgggaagcctccaattgattaccaaggagcaagggatgccaaatccatttctcaatttgctatcaagcaggtttgtccatatcctctcactaattcttgattacatttttgttattgggaccttatcattttttggcttcacagataaaggcactgttaaaggatcgtttggatggtaaaacaagtggcacaaaaaatggaggaggatccagtgagaagaagaaatctgagcctagtgcctctgtcgaactaaactctagcaactttgatgagttggtcactgaaagcaaagaactttggattgtggagttttttgcaccttggtaagtagtgcatattagtaaactcttgaaatgttcaagcctctaatcttcttcttcccgatatttgaaactggaaaccattttttgctatttatcctcccaaggtgtggacactgcaaaaagctagctcctgagtggaaaaaggctgctaacaatttgaaggggaaggtcaaaccaggtcatgtcaattgtgatgctgagcaggtaatcactagatttacgaatctaacattagtggattcctaataacttttaacctttttggctcttaaaagctatgtatttgaagatccagcctttttaccattttt

SEQ ID NO: 13412 - DNA, 510 bp, Arabidopsis thaliana landsberg
ataagtctctgcctcatattcatactcatactatttctttcactatcctctctctctctctctctctttcaatacagctccaaaactcgtcctcaagacgctatttatccatttaagtctcttctcttttcgtcctcataatactcttatacacagaaacgtttttcattcataacaaaaaatgggttttataactcgatttttagttttcatgtcactcttcaccagtttggtttctggatttgctctacaaaagcttcctcttatacagttcgacgaaggttacacacagctctttggtgaccagaatcttattgttcacagagatggaaaatctgtccggttaacgcttgatgaaagaaccggtttgtgttcttgttcctctgagtatgttccgtttctgtttctttaattgttattaacatagtattcttcttaaatgatgtttacaggttctggatttgtctcaaatgatatttacttgcatggcttcttcagttcctctatccg

SEQ ID NO: 13413 - DNA, 942 bp, Arabidopsis thaliana landsberg
ctaaggtactgtaaacaagaaacaacattaaggaaatccagggtgaaaatggtcttattgtagcaacacaagatcagtattaaaacagaagcagagaggtattttaaagattttttaactgtcaagccatctgattatgcagaatggtcgagtgaggagctagcagatctcttggatttcaaatgtgcagaggaagataaacaaatgcttacagtggaggtaaccaaagaagagataaagaaagttttgttcacaatgcctagtaataaatcccctggtccagatggatttacttgtgaattcttcaaagagacttggaaaacagtggggaatgattttgtggtggctatccaatctttctttaaaaccgtatttctaccaaaaggagtcaattcgaccatcttagcactgatacctaagaaaaaagaagctgtattcatgaaggattacatgccaatctcatgttgcaatgtcttgtataaagtcatatcgaagattttagcgaatcgcctcaagaccattctgccaaagtttatttctgcaaatcagtcagcttttgtcaaagaaagacttctaatggagaacctactccttgccactgagatcattaaagattatcacaaagacacagtctcttcaagatgtgcgatgaatattgatatatttaaagcctttgattcagtccaatggagttttttgctcaatacgctgaaagctctagacatcccggagaagtatattcattggattcagacctttgtaacaacagcctctttttcattgcaagttaatggagagctagccgaatatttcggaagcgaaagaggactcaggcaaggctgttcactaaggtcatatctattcgttatatgcatgaacgggctatcccgcaagatagacagagcggctgaggacaaacacatgatctaccacccgaattgt

SEQ ID NO: 13414 - DNA, 603 bp, Arabidopsis thaliana landsberg
gattcatttctctcttgtctcttttacttgatttaatattctcttattgttgtgttttgattatctgtattgtttgatgttttcagactttatcttcatgggctacttgtagtgttgaggaagttgcttcaaccggaccagggattcgttttttccaactctatgtatgtttcagaagatttacttgtttcttattgattttttggctctgtgttgactatttgctctcttgattcaggtttataaggatagaaatgtggttatacagcttgtgaaacgagctgaagaagctggattcaaagctattgctcttactgtagatactccaaggcttggacgcagagaatctgacatcaaaaacaggtgatatgaaactactccaccatcacataaaccagattgttagatcttttggttttcttgatagttattatcttgcagattcgcgcttcctcgaggtctaacgttgaagaacttcgaagggttggatcttgggaaaatagacaaggtgaaaagacgtataacaaagtcttcaatggacctaaaacctcaatacttaaataaccttttttgaacatttgtcgataattgcagacgaatgat

SEQ ID NO: 13415 - DNA, 759 bp, Arabidopsis thaliana landsberg
  unsure (1)..(759): unsure at all n locations
actaacataacacattgcaccttgctaccataagtcttcagaaaataaaagtaacacacatactttttatatatccctagaatatatgccaaatatataactttataatatcaagattgaaaaccttgttattatgcaattttatatatgacacgtacgtacctatagtatcatatctaatataataacgactactttccttcctctcctccggcattaccttcggtgtcaaccatacagtcacgacggcgacgatctctcatagttccccactcatgcatcgaaagatgaagctttttccccgcgagcaagaaatccgctccttgtaccggagatagaatcccgaggatcttcgctaaagtatcaacccttagattatcggcctcgaccaataaacgagccatagcttcttcttgcttgtcgagagcttgatccaccactacgttagactctccgacattctccatctcgtaagccacagtggcgatgggaatatccgctgcgtcttcttgtaggcttgagactttcttggtcatcttctcttcttcgtctataatttttacatgcaacacattgattttagctagctgctccgcacttaagtcgctaagtgatgcaccgccgccaccacctgtcaaaccaaaccatattgaaccaaccgaaccgaaaccattagaaatttggtatagatctatggttcggaatcatttcttatgttcaattttattntaaaaaaataatattttgtataatatatag

SEQ ID NO: 13416 - DNA, 897 bp, Arabidopsis thaliana landsberg
ctctactctctcttttttttagtcctccataaaaaaatcataatttcccaagaaacaataaggaaaaacattatacagtagcatataagtatatctatctatttaacttataatgtgcgatcagatgatttcgtaattattactactaaatcgattttatgaataattgcactgatttgtacattctaaagtacttagcctaaaaaggaagtagtaattgagagagaaagaatctcataacccgtgactaactttctaactaagcagtgattagtgattagcacttatcaatcatgagaccacaataaacaaaagggccaaaacgatcaaatcaaaagtatgaaccttaaaaaggaagaaccgttaaaataacgaggttaaattttcttaaaaaaaacttaccgaatttccagcgagcttgaacaagagcaagcttagggttatggagtagatacggtacggttctccatagaaaatccgcttcaggttgaaaatcagcgtcgaagattgcaacgtaatcgcagcttttgacataactcttcttcattccttctttcaaagctcctgctttgtatccatttctgttgtctctgatctcatacttgatgtttactcctttactcgcccacctgctacactccatctccactagatcctgccacaacaaacgtaacggtttaggtttgatgtaattgagaacccatttcggaaaagaatcaaaaagaaaattactttgatcgttggatcagtggaatcatcaagaacttgaataacgattcgatcagaaggccatgagagtccacaagcagctccaatagatagttgataaacctgcattaacaacaacaatcaataacaacaaagatcgataaccaaacaattgaagaaagaagagaa

SEQ ID NO: 13417 - DNA, 349 bp, Arabidopsis thaliana landsberg
  unsure (1)..(349): unsure at all n locations
nnnnnnnnnnnnnnnnnnnnnnnnnnnnnnnnnnnnnnnnnnnnnnnnnnnnnnnnnnnnnnnnnnnnnnnnnnnnnnnnnnnnnnnnnnnnnnnnnnnnnnnnnnnnnnnnnnnnnnnnnnnnnnnnnnnnnnnnnnnnnnnnnnnnnnnnnnnnnnnnnnnntgttgaggattcctgctaccttgttcagtgggtcgtgtctaggcacgatatgcgaaaggataggatccagtgctgaaattgctccaaagtgcaggggtcactgagaaaggcgtgttcgctatagctgtagcttggcactagactatcggctgtgttagcgacgttgcgatctgagtggtattgaa

SEQ ID NO: 13418 - DNA, 810 bp, Arabidopsis thaliana landsberg
acattaaacatcaatttttagagaaagaaaagtatatataaaaagagaaaaaaactaatatggcatttgttataattttggtgtgaaaaggagggagagaaaaaaacaaaaaaacaaagaggatttaagggttacgagtcgcctccccaaaacccttgtccctagtctcttctgcttcttcttcttcaaaatctctctcttcaccaaatcctcagaagatgagcaacgacaaggatagcttcaacgtctccgatcttactgctggtaaaatactcctactcacgattactcttatctctttctccgcctcttaagccagagctgctttaaccctaatttcctctgttatctgactggtgttccttttgtttactgtttttttgcagctcttaaggacgaggatcgagctggccttgtcaatgctctaaaggtgagtttttttccccttctgtaaactgtcccgtgagcatttgctattgaaagatatggaggatgttgagttactttcctctgattgtttagatactataagccgtgtcttggtgtttagtgttttggtttcaatgtcattcttctagtacaatgatagtttatgagttgttaatacattgttattaattcacagaacaagctgcagaatctggctggtcagcgttctgatgtgctcgagaatctgactcccaatgtgagaaagcgcgttgatgccttgagggatatacaggttagcgaaattttttcacatttaccaactatgtgtgcttatatcgttaatggggttgttttgtttgttgagttttctcctgcttattg

SEQ ID NO: 13419 - DNA, 1002 bp, Arabidopsis thaliana landsberg
caaaagttccacttaagcaaactacccttccaatggcaaaagctgccccacaagtttcggtatatcttcttgtatccttgtttctatctattgctcaaagattaaaaaccaccactctaaattgctaaaggctgcttattttttctcaatgtcggtctagaatctctccggcattttgttgacagccttgaaaaatcttcggactgatattgtcaaagaatcgccagatttagtcatggcatatcatatattcgggtaagttgacgatccatttaatgatattttcagtttctttctcagatcataagtaatagaaaaatccttgtgtgtttatagcaatgcgacgcttaaagagataagtaaacgacttcccagaaccaaagaggaactccttgatatcaatggtctaggaaagtaagtatcttgaagctttttgaacgctactctctctctttgtataaccaaaggtatgaagaaaactcgggggattttggtgttttaaactctaaacagagccaaggtgagcaaatacggagatcggttattggaaaccatagattcaaccatcaacgaccactacaaaacccgtcccggttcagggaagaggagaagagacgagaacgttaatccgaatgtagcagaagatgatgatcccgattggagtgcgagtcagtctcacaaaaaggtagtgaagaacaaaaaataacacgttcataaactttaaaggacccaaacaaactaaaaaattaagaagctatagaaatcatttacatttgcaaaaatagtaattcaataccatctgtcaagcaacatatttgcccataccggggtgtgatttagggttaggttaaataaacctttacacctaatccaccatgtcccatgaactattgttaatatgtcatattctgcaactatttatatactcatgcaattcaaatcatcctttcggtatcacgtgtcaaatttcctcttaattaagttaaatcataattaaatttg

SEQ ID NO: 13420 - DNA, 449 bp, Arabidopsis thaliana landsberg
gatcatctatatatatggaatggataggtgtataatgaatgagaaaaagaacaaaagaggaaaaaggtgagtgttagccccaaattcacgttgccccctcgtgggcttaaggattccaaaccaatattgtgtccttatggtacgatctgaagactgatagcaacatgcattgatgtgatcactagccggctttttccatcgtctccattatgtcttctttgagttttttctttctatttgcacgcacaattcttctagatcaactcacattgtacgtaaaaacaattgttgattaaaacaattcgtgaaaatatgtgggcaataaattgtaatgcttacgattattccaaaataatgcatttatggatgagaaattgattagctaaagatgaacgaaaaaggtgaagcgtcttatatatagacataaaatataacaatttatacaaatg

SEQ ID NO: 13421 - DNA, 1077 bp, Arabidopsis thaliana landsberg
cacacagacctacattatgatgaacgtaaatggtgtcaatcctatacctaattcatgtgtcttgttgttctaatgagctgacaccacacagcttaacttcgcataatacaaacatgaaacaccaaccaaagaaattgttacttacttgtatatgaaagcagcaattcccaagagccactcaaactgaaactttatcacaatgtgtgttccctttctcttcatgaatttagacatcatcacctacaataataaaaaccatgtagttagctaaaagaatcattgtgagctcttatacataccatactgatcatgagaggaagagtactagtattactgcaatttaaacacttctttaaagacattgttataactaaggctaaaacaaatgatccaaccacatgcaaacgagttcagatgtgggttaaactgttataatcgagctattaatctaaaagatgcaatcccaaagccatttaagtttccaacaaaactattaatcaagcaaggccaactataaatcaattatgtaaacaaaattcttattagaatatataccaacttcttgaaatccatgaaatcagtttcttgcgcatatgagagcttgtacatttgttggtaacaagcatcttctatacttgttaagaacacgacttccgatactaaaagctgattccgatgcaacgatagtgatcgaaatgctaagaatatcacacgccattgatgataattctttaaaacgggatgtattgtttttccaatatgcaacaatatccatacttctaaaagaaaccatatctaattcaagctcttccaatacttgtcattttctcggtcatatcctccaccattttaagaataaccctatcactagaatcttcataatctctcaggtagcatttaatcgcccacacttacataaaatataagtttagtgtcgggtaagttcactagaacacattttgtacaattgagttcaatccgtttatctttttttaatctttggtttttttctaaaccgagattacaagattgatagtatccaaaatattattacgtgacactgatttaacttttatt

SEQ ID NO: 13422 - DNA, 671 bp, Arabidopsis thaliana landsberg
catccatacgtaacttccacgtaaagttacttgacaaaaaaaaatatttccacgtaaatgcatgcagatatgtaggtatgtattaatatatctttttttttaatattagtgtagaatctggactacgccccattggttagatccttaaagaatccttaagaattttttaattgtaatatgactgaatctgttttgccaattactcaacacaaagctttcacaatgaagctaactcaaagctagcaaagttaaactgaaagccatatactgattgtgttttgccattcacaaaattcaaagccaaagtaactcaaagtcgtattcattcattgagagcaaagcgtgaagcgagagaaatcatcacttcacaattcaatttcaagtaactacagaacaatgaaatctagaagcgagagaaatcaacaaacctaagagatcaccccaattcagatcgaatccaatcaacaggtaatccacaaaattcgaacccagaataatttgatgtgttgatgtatcttccgatttgatgatcgagacgatggagacgtcggatgatgaagatcgacacaaatcgattccgctttcgccgtcgaagaaaacaaagtacaaagacatatacgagtgacagagaaaacacgccgagaagaaattttttttctttaggacttttt

SEQ ID NO: 13423 - DNA, 745 bp, Arabidopsis thaliana landsberg
taggtaatttgaagcaggacatggcgtagaggggcattgctgccaacaacgacttaagtagaatttgcttcccagccactaagagaaaacgcgtcgtccaactatgagaccgctgtcggattttgtcaacaattgacgtgaaaatgtctctcttcctctgtccaaaatgctctgggagaccaaggtacttacccactcctccttctttcgaaattcccaaagtgagttttgcagccaacttcattgccaaaggagatttgttggagaaggtaattgtagatttgttgaagttaataacctgacccgaagcttctccgtatcttgtgatgatttccattaatctattacaactcttttggttggagcggcaaaagaacattgtatcatcggccaagagcaagtgattgattggtggactaccattagccactttaatatcgggaagatgaccacactcttgagccctttggcacaaacccgaaagcacttcggtacataagatgaaaaggtaaggggataggggatcaccttgccgtaatccacgagaaggaattactcgacccttcggagaccctttaataaggaatgaataagatactgagcttacacaagccatgatccaagaaatctaagtctcctgaaagcctaacctccggagaactgcctctaagaaggaccactcaattctatcgtatgccttactcatatctgtcttaactgccatggagacacgaactcttgcatc

SEQ ID NO: 13424 - DNA, 653 bp, Arabidopsis thaliana landsberg
acgcatatagatggatcccctgtgaaatcagaggcagagaagcaaagagtcatacaatgtcttgaagcagctatcaaaagaagagtatctgaggtaaatgatccagtaatatatagtgtctggtatatactctttctgtaactgtcactgagagatcattgtttgatgttttagggattgaagttggaactgtgcacgacggatagagtaggcttattgtcaaacgtgactcgcatattccgtgaaaacagcctaacggtcacaagagctgaagtgaaaaccaaaggaggcaaagctctaaacacattctatgtcagtgatgcatctggttactcaatcgatgctaagaccatagattccataagacaaaccataggccaaactattctcaaagtcaagaacaaccctcaagaacaacaacaaagacagaaatcgccttctcacgaatcaccgacaagatttctctttgggggtctcttcaagtcgaaatcttttgtcaactttggcttggtccggtcctactcttgaagaacaactggacttagatgtgagggtgcaatctcatgtaggtattaactggtttaaacttgaggagaatctgtaaatgtatcgacagatatagtctagattgatggggctaggatccaactttg

SEQ ID NO: 13425 - DNA, 582 bp, Arabidopsis thaliana landsberg
  unsure (1)..(582): unsure at all n locations
tctacaactgcatccattgtgtttgtttctgtctgtgttctgagttggcgagcaatacggtcgatgttatcgttgaataggaaattttggtttccttgtgaccgtgtttgcatacaacgagtaccaactggtgaagctggtgattcgcagtacctaaatcaaaacaaacaaacagaaaaaaacacaaagttagtaattttcagtaacatgaaaaagaacttgatcttaaatattctgaaatctcaaatatagcaaacaaacacccaattggcaacgacgccaaattgattataggtttttagtcaattatcctaaaacaccaatcatgtcgttgtagtattttaggtgtcaatccaatcagttgtgatgcaaacagatgagatgtgatcagaagtcactaagtcaagccaagcaataacggttttgaggtttctaactagccctaagcgaacatgcagaaaacagtcatagtatcagtattactagaatcactcgactnnnnnnnnnnnnnnnnnaccgaggatgtggtcgagtacatggcagaaaatgatgcaattgtagtcgactgcacagtctgttgcc

SEQ ID NO: 13426 - DNA, 521 bp, Arabidopsis thaliana landsberg
  unsure (1)..(521): unsure at all n locations
gtcgactctagactataggatccccctagaagcgattagtgacgagctgcttggagcatattcaaaggccaaatatgaaaccatgacaactgccttcggagctcgtggcaaaaagagattaaatagagtgttcgatgttaccgggtttgtgtacccggactactgctatccttcgcggaaacaagggaaaaagaggaaagctgctacctcgacgacttctagtgcgtcgatgtcaaaaaaggttaaagttttgacacatcagcccaggcgcattgaaacgaccgacgtgccgaagctaattgaagggtccgctcctattgtagagccaagttgctctgtgtcagtcgaagctaggacaataccggttgaagagccgaaactggagaaggtagcagagcaattaaaagcactgagtccaccatgtacaacggannnnnnnnnnnnnnnnnnnnnnnnnnnnnnnnnnnnnnnnaaaagaagaatggccagcgtgctagatgttgttatggaatctgtgaaga

SEQ ID NO: 13427 - DNA, 662 bp, Arabidopsis thaliana landsberg
atccggacacattttctgagtacaacatagaaatgaaactaaagacatataacttcattctggggttgctgaagttctcacctgcagtaagttcattatctggtcttgaatgagtgaaacaagtggagaaatgactaatgttattcctgcacagagtagagcaggaagctgcagagaaaaagatattatgaagacgtttttgatgtcctagacgcagagcaactttctgaagtataacctccaccaggacagaatactagcttatagtttcaccctagaacacaacttaaactgtcatctcttttttacaggatgtaagcaaaagtctgtgtatagaataaaagccagaattagcttttcaaataaaattacatttcaacgtatcagttaagatgccgttacctgatatgttaagcttttcccccctccggttggcatcaaaacaaaaacatcacaaccactcattgtagcattaatgatctctctttggttgggtcgaaatgagtggtttccaaacactaatttgttatagacctaatcattgcaatggagcacatgagtacacaggagggatgtaaataatggaacagcggacgacagataaccaatcacctccagatttttcgtccaaggaaaatcactactggtccaatttttgtcat

SEQ ID NO: 13428 - DNA, 395 bp, Arabidopsis thaliana landsberg
tatctcctctggtcttcgccttgcattggtaagacttatgtccttccttgtgacatagcaagcaaaccactggtttcaccctccacatgcttgttcactcccgaagtggtgttatactgggaatgttgggtttgtttggttttgtctttcttatcatacaaagccctaccacggtaaaccacctcttgttttaacaattcgttcttcgtagcaatctcatccaaacatgtttcgataacaacattcttaaaaagaacttgattgcaaggattagaattaacatttattgaatacaagcaagaggtataagcatcccttttcataatctcaggcatataatttctaggagcttctggagtactaccaatgtttactagcgtattatagtgtatgct

SEQ ID NO: 13429 - DNA, 709 bp, Arabidopsis thaliana landsberg
tagtgatatacaagtgttcttggaaaatcttgaatgaaacagcttcgaagaagactgaggtttatcttcctctctgttgaaaaaatagaagagtgcagtggctacaatgcctgcgtcacatgaagcttcaaattacgatgaggtttctatgcagcaaagtatgctcttctctgatggtcttcaggtagattctgaatttgcaaaatattgcctagtttctgataaattgttcaaatctccatctgacttagaaggacaatgctataataccaagcacatactatctttctatatgtgaaaccgatgacaaaagtaaaatgataattaatggtctctgtgattgaagatccaagtgttgttacaatgctgaatcatatcttgttttctaaaatctttgtaggtttatttgacaattaattgaaaggttttctgctcttttatttcctcaggacttgaagaatctgcgagcgcagttgtattcagcagccgagtatttcgaactatcttacacaaccgatgataaaaagcagatgtgagttagtattaagcagggcttcagatttattgtgtcacacaaaatttcttggtttttctcagtagttgtttctcatgttaagtgcagtgttgtagagacactgaaagactacgctgtgaaggctctggtgaatacagttgaccatttaggctctgttacatataaagtgaatga

SEQ ID NO: 13430 - DNA, 633 bp, Arabidopsis thaliana landsberg
gatcaccacaaaaaagcgtacattatgtttgtcaaatatgcgcatgttagcatactctaggtgacgcatcttctaagtaaacgccaataatcccaaaagtctcctcctttcgtctttccaagaaagtctcccaagaaagtctcccactaaagtgtttagagaaaactttaaaccatgagcaatcgcatcggattgctcgatctagagaagcattttgctttctatggagcttatcacagcaatcccattaacattataatccacactctcttcgtatggccaaacgtcttcgctactctccttttcctctactctacgccaccgattttagatcactctcaattagggttcctcaagtcgctgacatttgatggtgttttgcgtttggacattagttttaccctcactgtgacttatgctgtcttttacatctgtttggataagaaatctggtgttttagcagctctgttatgtttctcttgttggattggctctagcttcctcgcagcttgattaggacattccttgactttaaaggtaagccctctgttctaattactggaaaagattatggctttatgcttctacatgcatttgaattttgaagctcagtttcttcatgcttttgacttg

SEQ ID NO: 13431 - DNA, 443 bp, Arabidopsis thaliana landsberg
ctctatctataggaccttggtgatggactcctattacttaacacatacatctttccttgttaggaattagtctcttggatttttggcgaagaccatttcttcttgaaaaattataggtgttagccttccatattgctgaaaatggtcgttcaaatctgtgcattcaactgagtgcatgaagtgaggcagggcttctcagataatggtcgctgatatgtggtaagcccataaatatggtagctagctggtttctccatgtacaataacatgcgccataggaaaatatagttagtgagaaagggtacatgtagaagattgttgactgcttttagatatgcatgttgtgataagattgaaattgcgaaacttgttacctacaagtgggatggatgtgggatggacggggaataggagctagattgctagaatggagctgtcgagtc

SEQ ID NO: 13432 - DNA, 1158 bp, Arabidopsis thaliana landsberg
  unsure (1)..(1158): unsure at all n locations
tagctgagtaacagccatcaccattgtcttggcaacatccttccctgatttcttcaactctctggcaccttctgctgaaaccatctctctcattctcatgcaggtatctctttctttacactttatccattatttagaaccaattagacatgtcattggcaaaatgggctatgtctgacccgttttgagcccttattctcattgttaaagcccatccctgattaagcccgaggacttcagaccatggtttgtttttgaatcttttttgttcaggtatttttcacaattctaggagccacagggagtgtatggaatgtaatcaacactgccccaagtatcttcttatttgctgctattcaagtaatggttcatctagcagtgactttggttctaggaaagctattctgtatcgacatgaagctattacttcttgcatcaaatgctaacatcggaggcccaaccactgcgtgtgccatggcaaccgcaaaaggatggacttctcttgtcgtccccgggattctctctggtgtttttggggtctccatagcaacttttctaggcattggatgtggagtttttgtcctcaaacgattatagatttctaaacagttctaatgattggaggattctgaagctagacttcttgtaaattgctaattgttctcaacaaattttaaatctttttgttttccaaattatcagtgttttcatacaaaacaagcatttatctcataaacaataaccattttacattggtttgcgagctttacttgttcaaatataaaataaaatttgtctgtagatttttttttagttgactaatactaatatacatctagtggtacggttgattgtactattgtaccgctctttcaatacaagtcaaccgtacttgagatcgtaatttaaaagtcaactgtactttcccatatcaatctcaaaagtcaactctaccatattaataagattctattgattccaaatattttgtaaccaaaagtagggctagattcatccttctttngttgatttatcctatgaaacttagattagcatggttggaaattatgcgtttacttgcaactttcgattccaaaacaaaatatgcatgtacctatacatgcatgacttagatttgggcccaacaagtcttagtat

SEQ ID NO: 13433 - DNA, 745 bp, Arabidopsis thaliana landsberg
gttaagaaacaaaaacaaacaagaccaatggctagaattggagctttgattctagttttattcatctccatctctcagcttgcttcgttctcaacagctaggaaatttccggtaggaattccgtcggtaatcgatggcgtcatcttctccggagagatctctgctgtctccaagaaggtgacggtggtagggtgcgaaggcgaggatgatcacttgacggctggatattcgtcgtatatcaccggaaaatttgggtcgttggtgttgaacgctcttccaaaagggtcagttccggcgtctggacccagcaagagaatcaacgacgtcaagacttagcaaatttgtcattctcatgactaaaagtcacgtgtgatgacttctttatttaattattattctttttctttaaaagaaatttagtgttgttgtatatatatatatcaaatactatagttgtgttactactgaaattaaaatgtttgaattgctggcttttggttcttcgtactagaattttcaaatagagataccttttgtactaagcgaggatatgcgaagaatacaaaatgatctccaaacaaaattaattgtttcattgtatttctttcttatgactattatatatcgaagagtggttatgatcaatgaaaagcagagttttatcttaaacacaatcattgacttttcttggatataatgtctattagtttcacttgatcataaatctaaaattgtccgccttcaa

SEQ ID NO: 13434 - DNA, 669 bp, Arabidopsis thaliana landsberg
tcaaacaaaattgatttacgaatctgccaaattctaacgagatacggaggtactcagtaccaggtctcgaccgttgtgaatctcaagggttaacactcttcgtcttcgagctctcaccgtttaccatccgagatctggatcggatcgaaccgccgagagtgaagaatcagagatggctttggctttcgatgagtttggccggccgttcattatactaaagagagcaagatcaaaagactcgtcttaagggcatcgatgctcaaaaggccaacatttccgctggtaaagcagtggctcggattctccgatcctctctcggtcccaagggcatggaaaaaaaaatgcttcaaggacctgacggatatgtcaccatatgttagtttcttccttttgaatctcatctctcttaggtctatccctatggctcttgctttgaacagtggattgcagcccattgaaacactctcagctgtaaagtctcagcaaattaaggtaagtgattgatgtgttttgtctttgtttactttatatattggcttgttactgtgaaagatgggttaagtattgggtttgttgttgaatattcaggagaggagaacattccattctacgggattgattgcaacgatgtaggggctaacacatgagggaacaaaacatgtttgaaac

SEQ ID NO: 13435 - DNA, 712 bp, Arabidopsis thaliana landsberg
atcctctactcatgtcatcctagccaataaatgtataattaatatgtacgttagatagaacaagaaagtagaaaggtaccccagatgtgaagaaatgatttaatagttgtacctcaaaaccagttatatcattcttaagacgacatctggcacataaagtttggatgaatttaggtctggactttagccattcataatcttcttttgtagccttctgttccatacacatgaatatacctgccaaagtcgaacacactgagatctcctcctcaccaacttccatgtactcctcaaagctaggcacatggacagcgtgtgcccatttggcaagatcaaagttgcctttggtaactgtcttaaactgcatactcaaaagtatagaaccatattacgactacaaactttttatttttcaaaatcgtttttctataccataagtttcttctttacaaaaatatatacttttgataagctcttctacaaaatattagtccaacgagttcaattgattaatcataattacagagaagagtttgattggttacctcttctatagtggctttcacagtgtaagatcttccttctggctcaagttctttttgaaacacttcgaaagttttcaatataaaattcaacccgatttttaaataatctggttgtttatccatagctgagttaggtgcccacaaataaatcatcatcattttcatcg

SEQ ID NO: 13436 - DNA, 537 bp, Arabidopsis thaliana landsberg
tttcctttgcttgttagtcagcagtttgagatatggcctgaatctgaattcagacaacgcaaatgggtttctttgtctgaagcgattgagttgtgtcagaattcgtggatgagagaagctttggaagctttcattaaccggaaatgccagacccaataaggataatgtagcatctctgggaacaaagagctcttcatttggaagcagatgcatataattgaagagcaggtcctcaagtttagtgttctgatttgattcattcatttgttaatgatgttaggtagactaatcgataataactgattgttctgaatgattgtcttcacaacatgtaatgtgtacatatataacaaggatcaatctcatagatgttataacgacttggtcttcagttttgtgtgatttcttaagattttcaatttgttgttgttattttttgaaaaaaatgcagattaggcagtgatgaataattatgacgagacaaaggaaaacgaagtaagattataacaaaacgtaaaataaaatcaccaattgaat

SEQ ID NO: 13437 - DNA, 735 bp, Arabidopsis thaliana landsberg
  unsure (1)..(735): unsure at all n locations
acttcatatattagtaacatgtagtggtgtttatttacatgttataatagagcattctgacaatcttcaattgtagtaaatgttgttaattatgtaaatatgaaaaaactattttgatataatcaaatttttgaaaattttgcataagaaaaatatataactcaactattttcatcaaaatatcaataaacctttccaaaaaataggcgataggaaccagaatgaaagaggaaatagccattcgataagcaccaatgaccatatggttcacaccaacatcaagagctttcttcacaagtgcattcaccgaacccatcgctacatttgacatcaccatcactatgaccggtgaatatttttctactactctcactccttgcatatctccagccatatctctctctatatgtgagttatttttgtgtgtattacttagagagagataagccccaatgtgctttgagtttggcaaccacaaagcttcccatatttataagaaaagtgtgtatgtgttgttccactttggacttacttagctttgacgttaacgttaacctatatttttattctcctgaactacttatctaaaatcttactacagcatatgcatttgttttaatgaanagttaatcaagcacttcatactacaccctttaatntntnatgtgtacaatannggatttcaaacgttaaaatagcataacatattactatattcatcatatatccaaatac

SEQ ID NO: 13438 - DNA, 391 bp, Arabidopsis thaliana landsberg
ggatatgtccgtagtgaaagtagaatcaaaatggccaccgataatagtaatggtaatatcacaagtagcaatgggttctgtgaatgcacttgtgaagaaagctcttgatgttggtgtgaaccatatgatcattggtgcttatcgaattgctatttcctctttcattctggctcctatcgcctatattttggaaaggtttgatttttttgatgaaatagtaagttatttacttttttggcgaatattgtgagaatgctctactttaacatgaaataaatataaactagtatttgttactaatatatgaagtttaattattgacattttttcctaaaatttacgtcttattgttaacagggaaataataccggaaataacctttaggctaatg

SEQ ID NO: 13439 - DNA, 867 bp, Arabidopsis thaliana landsberg
tcgctcccagaacccccataacattattcctattaacatcaattatttatcccaaaatataaatatcttattgggaggctcacataccaaaaaaaaaaacgattcttatataaatttattgatactgaaaaacgaaaatgcaaattaaatgacttgagaaataactttatatcatttctccaccaaacatttcatttgagattaaataaacaaaaagatgaatatgcagtaaatagcgcataatgtattgtatagtcaaatttctgacctcttattagcagaaacaatagattgcaaattattaaataagttggtttttaaaactaacttaaattttgtggatgttttcaattatcttgaaatttttatccaataacacactattttctaagatatgacactaatttttatataacatgaaaaaacactatttatttacggttttgtcacacatttcttagtactctctctgttccattttatttgatagtttggaaaaacacacatattaaagttgagtgtaaatattattttttttgagttgtacactttcatataacctacagccaatgatctctaattgttcgctattaaagtttacaatgcatcaattattttgaaacaaatgttttttctagaagatcaaagttggggagaacaaagagagtataatgttggctcgctatttagctatataacacagctgcccatttctattttactaattatcttttagaaatatcttacatctaagcttttgaattgtaattctggtaaagtcataacaaacaatttgatagagatactaaactagtattacagattaggtatatctaacttgtgttgtaatttaagagaatatatata

SEQ ID NO: 13440 - DNA, 504 bp, Arabidopsis thaliana landsberg
aacggtggttggaacgccgagctacatgtgccctgagcttcttgctgatattccctacgggtcaaagtcggacatttggtcgctgggtaagtttctcttccatggcttagacagtaacatttgctctagataacaaagtattcatctgagtcttttcttctctttttgcacttgcgttcaggttgttgtatgtatgagatgacggcgctgaaaccggcattcaaagcctttgtaagttcttcttcttcacatctttaagttcatgttcctttgccttatgttcatgacattctgatttttgttacactttctgcattttaggacatgcaaggtctgatcaacaggataaaccggtccatcgttgctccacttcctgcgcaatattctaccgccttgtaagtatagattcttctttgtgatgtgaagctattagagcttattgaattctgcaacaacttcaatatgatttgtgttcttgctttcttcagtcgcagtctcgttaaa

SEQ ID NO: 13441 - DNA, 581 bp, Arabidopsis thaliana landsberg
ttttcattttaatcagtaattggtgtgatttatcctactaaaatcatcatatgaattcttataagtttaatgcatcttcggtaaagatccacccagaagggttttgtccttaaaattctttgttttccccaccttccaccagatatcaagagcgtcacaggcttcagatacaagttacattgccaaaccagctgcttcttggctcgatgactttcttgtatggctatcaccagaggcttttggctgttgtcggaagttcactaatggcagttattgtcctccagatgaccaggtcagtcttatcttatagagattattgtggaaactactttgagttttctgtttctatttcgctttaactgatatagtttctctcttcatcccaaaagatatgataatggttcataagctactttattgcctttaatcaaaaaccagctgttcaaaatgcaaactagtgtttcagtttctaacttaaattgtcaagttacagccaccttcctgcacggctgaggaagatatatgcagtttagaagggatatgtaaagactgaaccacagtaagtgtctctctctttcgtt

SEQ ID NO: 13442 - DNA, 1136 bp, Arabidopsis thaliana landsberg
atataaacagaaacgtaagcaagaaatgattacactatacatcagataccatcgaaagcaacacaagttaattcagaacatgtataaactaatgtaagcatgaaatgattcctctatgcatcagatacttactatccgaagctataatcacacatttgtaaataagatatgaaacaagagcaattaacaaaccttgtacttagcaacctcctcgctcacttccttgaggtcacctttggtaaagatcaaaccaacgtttccctacaaaaaacgaacacagaaccatcgcaaattattttctaaacacaaacacatcgataaaatctcaatcattttggacaagctaagaaagtttacctgaaggagaggaagcagattcaggattgcagtgtttccggtgttctcagagtgaatcctaacggaacgcttcatcatagtgttcttccccataagcacgacggagtctccacgaagaccctttctgatgttctgaagctgagttgatccgacgttatcggccgcaacgaccaagatctgggtgtactcatcgataagctgacatagcttggtatcgtaggcgatcttcttctctgccttagttgctttcaccattttcgctcacaggataagttacgagacacaaactcaatttaactctgtgtatagagagagtttgacgtaaagaaattagggttttggtatcagccgttttatagttcacgatttggcctgaggataagggaacctctagggttttctttgtgaatcttaatctaacggttcgtgcctgtttgcttcattctgatctgacggctcttgtttgttgggccttttcacaaattaggcccatttaaccagtaaaggctctcatctttcaaatgaagacatagaacgtcgtcgttgcaatcgtttggcgaatttaacagaacaaacacaccaaaacctccaaaacatgtgaagtgatcatggatttatatttcaaaccaaaaaattcacattctagtgaacaaactatttaagattgaatctcaggaacaagttcattgatgtcaatttccactagtgtctccttcccaaacaaagtaaatcccaccgttgcctgcaaccaaccatacgaaagaatcagagagacatct

SEQ ID NO: 13443 - DNA, 630 bp, Arabidopsis thaliana landsberg
atgggccttacttacggctttttcgtttactgtgcgatcgcttcgagtgtccccccactatttacccttttccttttttgttgcattgatggagtaataatgtgactgactgatgagcttttcaaagtaaaaaacaaaaaaagaatcaatggaggatcatgagaagattgatgggaagaagaagaagaagaagagtgtggctttgattccggctaactacgtctccattcttcagcttcaggaacgttggctgaaggagaaagagaagaaacaaaaggaaaaagactttgtagagagaggagtgaaacagcaggttgatcagagacaacgaaggagagaagaagaagaaaatgtagtgaaggccatggaaacaaaagtgaagctcgaggaacatagtttaagcggaggtgttcgtatgcattgtagtgtgaatcggtggaaaagggatcaagtatgcgttaagaaagaggaaattaaggtttctggaattgtgagcaacaaggacgaagatggtgtagattcgagggagaaaaagaagaagaatccggtgaaagagaacactaggagggttttcaagtccaaaggagagaatgctgctaaggaagtaactcaatgctggatcaagaagaa

SEQ ID NO: 13444 - DNA, 861 bp, Arabidopsis thaliana landsberg
atccttagctgctctcaccgaatccttcttctgaatttcattttgtctaatgttctctttcccagccagtcgaggtgagggggcttttcttttagcatccctgatatgcagatgatcaatgtacttctcatgcaatgccttgttttttacctgtttcagtactggagggctaacgagagttgttggatctttacttgaacaaggcaccggactttcaaggatttttggaagacttcgccctttttccattggagttgagagaaaattgcttgtggtgttaggctcaagaactgagaagagatcaaatccaagaccttgatccatatgattttgcttctccagtaaatgcctgaccactttctttgagagattgtttctgcgctgtcgtatctttgtctttggtgaattgggtttcagtagtttgcttgcagaaagtgaaaactgcggaatcgttgataagattgtttttgtggctcttcgaggctgagcttgacgaggagtaatcagagctgagttcactctatcaaaacattcctgcgcagattttccaggaaccatcttagcaacttttttccagaaattaggacttggcttcaccgtcaaataagctccttgtaaagctaactccaactcctctgtccatcctcctttctcaagcttattctttgccttcaatccttcttcttcatcttcttcttcttcttcctcctttccttttctcttcacttcatcagcttttgcttcagcattttcttcctcattcggctttgcaattctcatccttttcctctcagtaaggcagacactaacttcttcttcttcttttcattatcatcacaaccactaaacatcttcttagtc

SEQ ID NO: 13445 - DNA, 695 bp, Arabidopsis thaliana landsberg
gaggcaatcggataacaacgaccaaacttggaaacaatctttggataaagttttggaaacctttcttcccactaacgttagaaccatgtgtccattatgcactatttcttccgaacgcatttttaagaacgacgaaaaatcattcttgaactgatttaagtagctctcgtagatatttgaagggtacggatatttaatatgaatgcttttcgtattgctctcaaggccatctggaattctagaaagccaatggatactaaaagctgaatgaacaaaatggagagactttcttgggaatagccttgagtaaaaagaacccgggacgcccgagacaaagcactttcctttaacctccggtttcagcttctcttggaaagaatgaaacatcttgaaggtggtattgaaatcgttctctggaagatcgttcaaataacaatcgatttctggtgggtttttactcatttgttggtatgactccatgatcgtgtaagcgattgcggacatggccaacaccgtgttttgtccagtagaacaacccaagtctgccactttgatgcaaccaggaaacctatttttcagtagcatttctcttacgttctctatgaccaaaggttgtatctcatagaaaacacttctctataaaacaccaacaatatcataaattgtcataccttgatttactatatatgagttca

SEQ ID NO: 13446 - DNA, 694 bp, Arabidopsis thaliana landsberg
cgtgccctatttcagactaatctatatgacaaatgaaaaggctgattattattttcatttaaatttaaagtattattatacacaataccctaccatgattgaaacattaaaagatttcaacatggtctcttgagttcataaatttcttaccaagaattgatcgccgatgatgacgatgatcccggaagtggtatactccgcgtcgatccattggttatctttgaatgcttgaagccctaaagcttcattagcgactaggagtgtgattccattgacatcagtgtgatcaggagctcccacgactaactccggatctggacacggcggatagtaattgattttcattagatactcaatcgtttcgccgcctagaccttccttcaacgcctcatgccttaaacctagtccttctgataaccattccatgattttctccgatagcttctttatgtgacttgcgtactcttcattcacttcactgttaaaatccatcgtaaaacgattaattaatgaccctaaagtatttttgggtgattaatgttaattagttttataaataattcgaacgtaaaaccagttgagaatgagtggacttggttctcgtacatgtattctggaggattcttaggccaaaatttgtgattgactctagacggtggccagatgcggtgaaagagatgatccacccatgcgt

SEQ ID NO: 13447 - DNA, 556 bp, Arabidopsis thaliana landsberg
aataacgacaaataacaaactttgtcaccaactttgaatccgaatgttgcaacagtcggtcagcgagaatcatattccagatatcctcttggagagactcgtatctaataacacagaattcccaccggcttgtgccatcattggagggattctaggacaggtacagttctctatctcgcttctctaggactttgttagttatctagattaagcacttagcagagtaatgtgactcaaaaaagttgtatttgtacgtacaggaggtgataaaagttatatcaggcaaaggagagccgttgaagaacttcttctactttgatgcagaggatgggaaaggtgtaatcgaggacctatcccacaagctttaacttccaaacatgaaaggtgctgtgaaacgctgctcttagtaattagttccttgctgaagattgttttggacaatagactttagagtacttagaacttggctccttgtgttttgtatctactaacttggtacgctcctaaagacaatctgtaaccccactatttactttaattcatcaatttacacact

SEQ ID NO: 13448 - DNA, 928 bp, Arabidopsis thaliana landsberg
gaccggtctttgtattcagttacggtttgaaggcggctgtgatagaggaggatgctagtaatagatcgagtttttgttcggctgtatcaaactctgagagctgtgcacagtttagcagtgcagatgggagtgagttaacaggtttagttactttattattcttccggttgatcaacaatatgggatttttaaaagtgtccatgtgaactttgtttttccaggtccatctcaatctaatgcgtgggacacaactgttccttgcaagaggaggacgtgtgtgggccgtcctaagtcctcttctgttgaaaagctcacaaaggacctttacaatattttacaagagcagcaatcgtcatgtctctcagtttcatcagaggaagatcttctttttgagaatgaaatgtcaatggtctcagttgagattggacatgggagtgttctgatgaagaatccccactcgtttgctcgggaagaggagtctgaagccagctcactctcttcgattgagaacaagtcctccatcagtgacgcatactcacattccgtgaagcgtgttgagattggagcagtgagaggttcatattatggtggacaaacaataaagcaagaacaattcaagaggtaaagtatttttattgtatcttcaagatattctatacattagctctcagtttagttaaggataataatggatcctgtttttaatggttggcagaaccaagtctcaaactgaaagagtgcatgtcctggggagtcatggttcaccactatgtagcatagatttgaaggtaagtttcaagcaactctcaccaagtctgttcaataagttaaatatttgcatatgaaagtcaaaattttaaaaatgactccaggacaatgacataaacaataaacttcttgcaggatgttttcaactttgatgaggtca

SEQ ID NO: 13449 - DNA, 713 bp, Arabidopsis thaliana landsberg
gtaatttttgacaatacatttatgttacaaatagccattttgtcgaatcaccttaatgggagagatactcatatccgccagatcaaagtttacggccctagaccgtgcgtctccatctctccttcacttacctaaactgtgcacattatatgctatgattgcctttgcatgactcttgatttgattgcagaaatcctattccgcaccaaccttttcagtttacatcgatggagtttctcacttattcaacactgagatgagaaatttgagcaggagaagtttgaagaacatggactatgaaagatactgatgttgataccacatgaagagtctataatcagattagttattgttgttgtgcaatggcttttgtttatatattacattggatataacaatcataacttcagtaagcttatcaaccaagacccccataaaacatttgacacagtgattttggagatacggatttaaagcatagttaaaaagagctacaacaatctacatacaaagagcttttcgtggattgatacattgaaacctaaagataagaaaagccttctatgatgatttgcagagatggatttaactcggtgggttaaagtttacccttcacatgccggtttggtgtcaaagctgctaatgcatatagcaaaggcttgaaaagcagatagagggtagcgataatccatggtgaaaatatccttaccgat

SEQ ID NO: 13450 - DNA, 1208 bp, Arabidopsis thaliana landsberg
aagtaacaaactctgtatccataaggaaggaagatcaaaataacctatttacttttctatcatcgttcttaaactaatacagggaggtcattttcaatgggattacaaaactttaaaatagaatagaaatgtttactttttctctccaactaaattgtagaatttacattattatagtgtgattcttttttttaacagtatatcactatatttggtgtgttattgtaaacaactgcaaaagataaaatattatttccttactatatactacattattatatattaaaagcctatttctgattaaaaatgatttatattgctatttaataatcaaaaataagttttataactaaaattaatgtatcaaactaattttgaattttaaattttgattttatgaattattaattactcggctgtatttaaattaatacataatttggctgaaaatacataatgaaattcaattagccatttattgtttgtaatttatattaattaatgaattacaaaactattaaataataaagagaattttttgttaagtaatacaataatagaaaataataattttagtgtaatatttggtgttatggttggaaaaaaaaaataataatgttaaagttacactaaatatagtgttatttcttatggttggagatgcccttacatactataaggtttgtcactgtgtttaataatgtgtatctctagcattagcattgtgatgtgacaagtcctagtgacaacttctactttcataaccttagagtgcacatttttattacatataacaatgggtttgaatggtaaccattgtcatagcagtacagttttgtatagatttgacagttaccaatcacaaaagctttatcaaaaatgttataaaaagattttactttgagtttttttgtacagctttctcgtacagctcattctaacagttttgtactataccgataaaactaacagttccaactaacagctaaaaagcttatacagttttttgttattaatcagatccaatatgtatctctaacacaagttaacatatttactgcacaattcatttgacttattaagctcattgaaaataacaaatcacaatttttacaatgccatattttgacttcttcgtttataaacgagatgtcttgcccttgaatgatttatatatgaccagcttgtttttttttctaactacaaac

SEQ ID NO: 13451 - DNA, 1016 bp, Arabidopsis thaliana landsberg
ctgtttccacaaactggcacctcttgtggaatcctttgtagagcacgaaggtgcattgttccaattggtcttctctaaaccgcctctcgtggcccaatcatccgcgttccaaaggcttgagtaaagcttcattggttgattgaatgggaaacgtactcctagatccttagcattcttgaacgttcggattggtatgttgtcaacaaagaatctgatcaaagaaaaatcaatttttagtaaaccacaccggtttacaacacatgactcttagagtttagttaaattttgaataccccacaataaagactaatgagtgagtcacttatgttacctatccacgtagtctagcttatttgaacatttagaaaatctaaaagctgaaaaagtctacaactttttgactcaagagtctctgtctaagataatcttacaagaccccactacttttgataagatcaagatttttggccaccccaaggttaagaaaaataatactaataatttgaaactgcaccgaatatgaaaaaaaacaataattatcactagtaggaccatgttaattctgacaacttttcactatataataatatacgaaaaagtgtaatgtaagtaagtgtgaaggatagaattattcatacacgatctggtacatgttccaaaggattgagtaagtgtgataagccttagaaggatcaaaccagagatagattcgttgttctctgtttccctttcctcctgtgaatacatttgtctgtaatatagctggttgtcctgttctgtttccaaggaactcaaagtctatctcgtcatgctcattgttggtagatgatagcttcacaaaatttatttgtaataaatattgttaatcatttaaatttgatctaagtattattagtgactagtgagagagacttacatagaaagctgtgacaactccggctgtgtcaccagctggaagctttatgtgcatactaaaatgtccaaacaaatatgacccctttgattgaaatcctggc

SEQ ID NO: 13452 - DNA, 1107 bp, Arabidopsis thaliana landsberg
gaagtcaatttcccgaacttcgtaaaaccatctacatattcactttcaagtaaaaagtttttcactgcttagtttcatcaaataagcagaccaaaacttaacactaacaaacactcaatggtattctcttgtgaggttcgatcttgactcctccgcttttctcaaactgaaatctctctcttttttccatcatcaccattttgttatttcctgcagaaagaagaagaaaaatatgattacatcatataatggcgtaaaagcgagaagaatatatttagtgaaagtagtacctaatggatggttttcaagcagtctcacaagacattgaagctttgattctctcaacagtgcaagctattagattgttgacagttgcaacagagccaagagacagcttagccgtaggaactgagtcaaccagaatctgaaaagcaacagtcaagagcgaccctccatctcctccaggggctccactattggcattaccatcaggaagaatagcaaaacctgatggaagcagagccacatagtctggatcacctccattaagcactatgttcatagctacaatatcgactggagcatagatcacaaaggaagctgtaggatcagtgcagctctcttgtaggatcagcatattgctctggctagagtttgcactctgtgacataaagaaagattgaaaactcttagctaggatcagatgattataacaatagttcaaaacccggtgtaactcacatttacccgaagaagagaaacacagtttccggtatccctcccgttagcaatatgtgccatttcttgcacaactcctccattagacagaatatcccactgcaaatctcacaaaaacatcaaaactctgtccaaaacagaacaagagagcgtagtaactaaaatagttacctcatttcttgaattctcgtctctgaggaagtcaaagactcgctttggaggaacagggatccaaaaagaagtggctgcactaagaacaataccaggaggccttcctggatcatccacactcttcctagtcatcactctaacatcttcagctcctggaccggacaatgtaggccacgtgtgagcggttgaagcactcac

SEQ ID NO: 13453 - DNA, 1048 bp, Arabidopsis thaliana landsberg
gtttctgtgaacaccaagatattggactgtctccaaggtagaatacatgtcctctcgtgctcttgccatgatctggacccacgttatgactactatcactatatcctattaactttgtatccattgaagttgatcttgcaaacttgagtccaagtgtagtggtgcctcgcaaagaccgtaaaaattgcttcattgctgctctgtgtgatacctttggagcttgcatatatcggctcaatacacctacacaaaaagaaaagtcggggcttgtgtgaagtaaataccggagacacccaacattccttctgtagcttgtggcatcaatgtccttttcctttgaagcttaagacaacttcaaacctgcttccattggtgtatgaaccaaattacactctgccatacccgcttcttcaagtatctttaccgcaaatctcttttgactcaaatttatcccgtctttgtgttgacaaacttcgattccaagatagtaggtcaatttaccaagatcactcatatcgaaatttgacgccatttcctctttaaacttctctataatcttaatatttgttcctgagacaaaaatatcatctacatatatgccaatgagaagagtgtcttgctttacatgcttcatataaaccgacggttccatggtgcatttttcaaactgaagttctttaaggacttgattaagcttatcattccaagctcttggagcctgtcttagaccatacaaggccttgttgagcttgtaaactttatcttcgcatccttttgctacaaatccctccggttgcattatatacacagtttcttttagcttgccatggagaaacgatgtcctaacatccaagtgatgtatttcccatccattagatgctgcaagacttatcagaaggcggattgtttcaattcgcgctaccggagcgaacacatcttcaaagttgattttgtatctttgaacatatccctttgccacacgtctaactttatgcttgtttatgctgccatgtgagtttctcttaagcttaaaatccactttgaacca

SEQ ID NO: 13454 - DNA, 570 bp, Arabidopsis thaliana landsberg
gtagacttacataggtgtatagtctattacttttagattatgtaattgttttctaggtagtatagtaattgttttaagaagaaaaaatattactctgccacttctttctgtctctaatattcaaaactttgatttttaattgctaaacaaacaaaaaaagaatgaagaataatagtacgaaaaatgagagaaaaactaatagaaatggtattccaagaattttcttttaatcataacttaactatctgtttgtcgatagttatgttttggtaggtactacatttattaataaccaattcttcaaaagtgtctataaataaattaacgactggccaggcgaacatttattctaatctagtatctaatacaaaaagaggaggagaaacccatgaaaatttgtaaagtagacaataacttgagaaatatacacctgagaaaaaaatcgatttactgaaagaaagtgaaataagtttcgttgcccaaaatccctaatattgcgccaatgaaaaggacaagggaataagtatccttagagtggcaaccactcacagtccaccaccaacacccggg

SEQ ID NO: 13455 - DNA, 794 bp, Arabidopsis thaliana landsberg
gcagtttttattttagtttatatttttttggtaaaaagttaaatttaaatcatttttgaaatttacattcagaggacataaaaaaaaataatccaccaaaaacttcaatacaacacaaacaagaagaaaacataaacgaaaactcgattagcggagatccatgaaaaaacaccgattctgaaccgtaaagttcagccatttgcatggtttcctttggtcgaaagagttagaatcctcatctttattttctatttttgttatatgttgtcactataatttgaagttttttttaaaaaaccgatatatatagaacactctgattaacatggtatcaataaaaaataacatgaaagttagcattggtaagtggtaacctataataatgaatcaaatgatcaccacatgtaaaatcaaccatattccaaagatagttctctcacacctggtaacatattacaaatgcattactacattattagtacgagaggctgtctaaaattaatatgttttgattacgtatatcacacataatttatttttactcttatgttgtgaacgcgtaagcgaataagcatgtgcatgtacatgcacaaaattaattactgaaatgagaaggaaaaaagaacacctctccccaagaaaagatcgatcgtttgaaaccttacttaacctttttcaccacatttcacgcgtcaacttgttttgatacaactataaacccctaagtccaccctcttcttaatttttacagcttaatttttctttttttccaaattcttttctagctttttcct

SEQ ID NO: 13456 - DNA, 580 bp, Arabidopsis thaliana landsberg
aaaacaaattgtatattaagtgttggtcatattaacttccgagaggcgtggaaaactctcggaagttaatggtaaacttccgagaggccgtcggaagttattctgcggacggcgttagtccgtgctggacggcggacggcccctcagaagttaataattaacttccgagcggcggacggccctctcggaagtttctttaacttccaagagtccgtcggaagttagcctaacttccgactaatttgttccgacgggctaatttccgacggtttcggctaacttccgacggtttagattacttccgagagttttgcgctaacgttctacggtgtagacccttggaagttaggtattttggtgtagtgaacttaccgctcaactctctgaagttctccgtgtaaccaccacggtcgaaccgtcgatgtagacaaaaatctccggcggtgacctccctcgtccctctcggtgcacgatggtctctctgaactaggttgcgcaaaagctaggatgggttggcgaaggggtcagactcgtgttttatcgtgagaaattgatgtactgccggagactagctgccgat

SEQ ID NO: 13457 - DNA, 896 bp, Arabidopsis thaliana landsberg
gtttctttgtgcatatctcttgctagcgaaggagtctatgttttttctttgtttgagctcacgcttgtggatcaggggggtaatgggaagcataaggctcatagccattttggtagagctctcgatagcggtccctatactctcaagtatcgtggaagcatgtggtgagtaaattatctctctctatgcatggaaagttcctaccttgctatagtagttcacgagttttgtgatgaatttaggattgtgatagagtggtatgttctggttgcttacaatgttgataatgtctttgttggttgcttggcttaggggatacaagcggtttttcaggaggtccagtctagaatcgtcggattatttgaaggagaatagtctcttggttaggtgccgtgtgggtgtggtgaagtcagttacggagggaccgaggtattacaatatccctgtgccagtttctaacttgggacaacagttgggaaatttattggagagtgggaaaggctgtgatgttgttttccaagttgatggagaaaccttcaacgcacacaaattggttcttgcaacgcgttccccggttttcaacgcacagctttttggccctttaggagaccgaaataccaaatgcataacgatagaagacatggaagcacccattttcaaggtcctccctttaactctcttgctgtgatttcatctgttagataagggaatgtctaagtagagtatctacagtcaatttggttttacatggtcttataggaagagatagatttcttggttccttgccttttttttttcttttcgggtgagtgatggtggtgtcatacaggattgtctattcacggatgtaccatccccgctcttctcctggggcgctactcctattctcaatcaaa

SEQ ID NO: 13458 - DNA, 638 bp, Arabidopsis thaliana landsberg
  unsure (1)..(638): unsure at all n locations
tcgactccaaatcatgcctgatttcaagctatatcaaatggatgtcaagagcgcttttctaaatggaccactacaagaaagagtatatgtggagcaaccaccgggcttcgaagacccaaagaagccaaatcatgtttatcttcttcacaaggcactctacgggcttaaacaagcccctagagcttggtatgattgtcttaaagattttctaattaaaaatgggtttacaataggaaaagctgactctactttgtttactcgaaaagttgataatgaattatttgtgtgccaaatatatgttgatgacattatatttggtagtactaatgaaaaattttgtgaagagtttagcaaagtaatgacgaacaggtttgagatgtctatgatgggcgagcttaagtacttcctgggatttcaagtcaaacaactcaaggaaggtacctttctatgccaaactaaatatactcaagatatgctcaagaagtttggcatggaaaaagcgaagcacgccaagactccaatggtcatcanatggacatctcgacctaaatgagggaggtaacctgtagatcaaaattatatagacaatgataggatactgctttcttatgtgcatctaggctgatataatgtgagtg

SEQ ID NO: 13459 - DNA, 739 bp, Arabidopsis thaliana landsberg
acggatgactaggaagccaccatttactatctccttctcttttagacaacccgaaatcagaaatctttaactcgaaactcgggaaaacgaggatgttttcgggttttagatcgcagtgaacataaccgtgtccatgaataactgctaaaccctcgagaatcatacgcgtaaacgttctgatcaaagcatcagacaatttcatgtccttgaatctgctcataaattgtctcaagcttcctccagatgcatactccatgggaatcgtgaactctacgtcaccttcttcgttgattgtctcttgtacttttgtcccataacattggacgattctcgaacagcctttgaattcagacaagatctgaaactctttgaggagagagtcggcgtgaattatgttggaggttttcacggcggcgtaaagtgtatggccgtcgagtcgactcttgtacttgatgagactcaccgaaccagacgaaccttttccgagaaccttgttgagttctaactctgcccccacctttggaacagaaagatcaattctcatatttacttcggcaccaagcttagcaaaaccctaggtgaaagtgaaatgaaatcttaaggatttgggaaagtcttagagtactatattaattactttacaccaaaaaaggaaaacaaaatctggaaagattgagttggtcagaaatttaaaaatgtgatttatgtattttgaaaatatacattttggaggaaaaaa

SEQ ID NO: 13460 - DNA, 568 bp, Arabidopsis thaliana landsberg
caacaaagcagttcaatacatgcacaaaaaggtaaagatatattacaaagtatgcacaaatttaaagaattagtatctgattcttaaattacaaagattttttacaatgatattacaagatttttctctagaatttttctagcaatgtcttcagctttgacatcattcagcttcggatcatctaagcttcggatcatctgagcttcggatcacctgtcaagcttcggctcatttttcttcagcatcatcatcctgtacatattaaaacggtatgagagaagtgcagacttcaaggagaaggtaaaataacagacataaattttttaccggcttaaggtggcttcgagcttcgttgccagccatttttcgcccgccttttacccaaatttgagttatgaatctattccctatactccgagctaggctagggatatcaattaaatctgtcggagataagctagaatttgatctgttgacaatttttccatgttcacagccagattttatgaaggcaacagcagtcccccgagaagctagcagagcacagaaatcggcgtgtcacctataa

SEQ ID NO: 13461 - DNA, 155 bp, Arabidopsis thaliana landsberg
catcacaaggaatatctttcggaatcaatggcatgaaaccgttcttaagatctcccaagtcatagtttttattccaccatggtctctttccagtgtacatctccaacaccacacatcctaacgaccataaatccaaacctgctcctcgtattcgc

SEQ ID NO: 13462 - DNA, 774 bp, Arabidopsis thaliana landsberg
tatggattcccaaatgaagtgtgggaagttaacttaccagctgaagaagtgcctcctgagctttccgaacctgcactcggcattaactttgccagagatgggatgcaggaaagaaactggctttctctcgttgctgtccacagtgatgcgtggttactttctgtgtctttttactttggttcaagatttggtttcgatagagctgacaggtatcattctttctttcttggttgctgtgttttctcttctaacctggtgttcgttgtttaatatcttctctgctcaattctctaccattaattatcatgatatctgaagcatttccatactaacccgtacacttacaaattcaggaagcgcttgtttagtatgataaatgaggttcctactgtatatgaagttgtaactggaaatgcagagaagcaaacaaaggaaatgccctcttcagcaaatcaaaatggcaacagatccaagtcaaattcaaaaatggtaagtctcatgctctcctttaataagatacagaacattaattatgaactaagaacaaaccaaatcctttattaactatgaactgggaactatgaacattaattactatgctactcttccaaaccctttctcaactcagtatcgcgatcctatcaccttcggttctctatataactcctcccatagtacactaaccggtctagttgttcgttagttgagctgacaactcaactaccatccttacagaaaaggtctatgattgtaatggtatccgaaggtttgcgg

SEQ ID NO: 13463 - DNA, 763 bp, Arabidopsis thaliana landsberg
aattcacatgtcttaacacctgattagagttatcggagtctagcgcatatatcacatcattaccagcttggatttctagagaaagaaccttatcaaaactaaaaactttggacatagtaatgattctctgaaaacccataacatgaaacctttgcagcatcatcaacattctatcataaccatagaattccactaacaagtacagctgaacttgttcagctgacattccaccgggttcccaaacatggtttgcaagtacagagttgtgacataatgtcttgtcaataccagccttaatctccaaagtcagaacctcaacacaatgacacagtcgatccggggatggcacttgaaattccttgaccaaacttatactttcctgaaactcgctttcatgagaccgccaccacttcatcaacattttatcaccaccgttaaagttcactaacccaaagatttctccgggatccaaaattcggctaaggacagaagattcaataagcctaactccattcatgaacactatgtcagtcatagaagaaccagtaatttgtttcttgtctgtaccttgaatcttccttgcataaaaaatcccgtcacttctttcattcactgtagtaagaagcgttcctgcaccttctagtaaactcagttcactagccttttgtggaatcatcaccaagctatctcccctgttacactcatcattactcacaggcaattgtccgagaggaggaaacgagaatgtatgagagctgatttt

SEQ ID NO: 13464 - DNA, 790 bp, Arabidopsis thaliana landsberg
taaagatgttatgacagcttaaatgattatgcaatttattgttttgtctcttcatattctcagttcttttgcagtttctttctttcacgggtggaattgtgttcctaactctgatagtgaatggatccactactcaatttgttctacgccttcttcgcatggatattttaccagcccccaaggtcaaaaacttctctcatacgaataactttccgagttttaagtaatcaaatatatgtgtaaacagagatttttttgcttatgctttgtattcatgtgtaagtgaccgtgttagcctgagtctgagcctttaagctgtatagttcaatagggtctgtatgttctaggcagtaatgtattcgaagaaccttattagaaaccactttccttttgacagaaacgaatattggaatatacaaagtacgaaatgttgaataaggccttacgagcgtttcaagatctaggagacgatgaggagctaggacctgctgactggcctacagttgaaagttatatttcaagcctaaaaggttcagaaggggaactagttcatcatcctcacaatggctctaaaattggaagtcttgaccctaaaagtttaaaggacatacgtatgcggttcttaaatggtagttatgatcatgtaccctccaatatactattttacctggtagattattgacactttgaaaattggttgtgtcaggtgtgcaagcaacttactgggagatgcttgatgagggcagaatatctgaagttactgctaatattttgatgcagtcagtggatg

SEQ ID NO: 13465 - DNA, 585 bp, Arabidopsis thaliana landsberg
ggacgacagtaatggacggtcatcactctaggcaatacgcaaccattaggaaggaatatttagaccaaaatccgatctaccacggccatgacccggtccggtctggcggtgcacacgcgtgtggcagtccttcatccttttctcaacttctcaatagatgcatcaatggtccacctatttaagttgattgatttgtccattgaactttcgatatggtactaaagtactagtacaccgtatcattaaagcgggcctttagcattgactattattgaatattaatttgggccaggcccacactaattcaataatccccaccaaatctaagtcacactaaaatgctctcatcatctcaaacatttgatatactggtgttttgatggagactgttgagttgaacatccacctagaatctagactacacttgaccacaactgcacaatggactaggccttgaattgacagttttgcgtggagtaagtttcatctaaactctttaccagtactagatggccgagcacatccctctggttgtagcatataagtcaactccatagcctttcatgggtactagagccacccaga

SEQ ID NO: 13466 - DNA, 754 bp, Arabidopsis thaliana landsberg
aacctgacatccaaaatcagatagcagttcaagaaagaagcaaaaacagaaacagaataatcgtttcttcagtagcaagaaacagcgcgtagaaatcatttcttaggttgcaagaaagaaagtttatcccttgcatatttcttattttggctatataccttcttcgatgaaaactgaaacaccaaaatcagtagccttgagcattgaggaagcttcatctttactggacaacaagaagttttcgggtttaaggtcgcgatgaatcacacccatgaaatgacaaatctgtacaactttaaccacacttctaatgatctccgcggctgctttctctgagtaatgtcctcgtttagtgatcttatcaaaaagctcaccgccttcgcaaagctccattacaagatgaacactttgtctgtcttcataagctcctttgatttccacaatgtttggttgtcctgataagtagtgcattatctgtatctcccttcttacatcctctctgtcctgtcacagtaaatgtcatcaaatttctgaagattaatggtctaatgaggaataggattaccaatataaacctaaaactcaaatcaaagtaatgttaaaatgtgagtgtttataaggttcttgccttagttctgatgagctttctcttcaagatggatttacaagcaaagttcttgcctgatgaaatctctgtacatatatacgttataccgaattggccacgacctaattcgcgaccaagactatactt

SEQ ID NO: 13467 - DNA, 838 bp, Arabidopsis thaliana landsberg
ctaacgaatcttttctctctatctctgagttttgtctaatttcactacgatcgacgatggaaactgaatcaatcaaactcgatgttcaagtaacgactacgtctcaagatccgtcgttagggttgttaagcacggtaataatcactcttgacagagatctggaggaatatgactagaacgttgatagcatcaagagcctcggatcttaccctgattcttctactcccgacgagtcactaatcattctgaaactcccaacctccgaaccagactacatctatctaactctccgtagcaaactcaaagatcatctccacgatcatgtcttgtccgaagaaatagctgatcagattttcgaagcccaactaggaactcaaagtattgatcagtttccgtttcaacaacctttattcatgctagtctcggtcaaattgacacagaagttatacacctacgcgccttgtaacgcttctccgttggcaacagatttgactaagagagcaaagtagaagaatcgaactcgcatctgtttcatgaagattgtgtcgttactcatgttctctgtgggaaacctgtttacgaacagcaagagtctaattagggttttattcgtgtgtcgcaagtctaagtttagttttaatctctgtcgtagacgtttaagatgctaattagggttttctcattgtatatgtattgatctcaatacctttttgttgacaacattcaatgcagtttactttaatgaaactcagagtatcacccaaaattcccttaaaaattgtcattacaagatagatactataaatgatacgcaacattgatgttaaaatcgtttttt

SEQ ID NO: 13468 - DNA, 768 bp, Arabidopsis thaliana landsberg
  unsure (1)..(768): unsure at all n locations
ccgcgatacgtgtaaagaactcgagcgaagttgatgttttgttcgtgccattcttctcttcactcatctataaccgattctctaaggttaaccaaaagcagaagaagagccaagacaaagagttgcaggtaactatatccaaatatttacacattttgttatttttccttaaaaagtttcattcttaacattttcctactgattgcgtaaaacgttgaaaatatactaaattgcaaaggtttaagtataatacacatttttctaacatataacgtaatcacaaactcaaatgaaaaaagaaatgtattcgtaacgcaacaaaaagaaataaagtcaagagtgtaaacataatctacaaataacttgacatgaatcttataaatttttgataggaaaatgtggtgaaatacgtaacgtcccaaaaagagtggaagatctcaggagggaaggatcatgtgatcatggcgcatcatccgaatagtatgtcgacggcaaggcataagctatttccggcgatgtttgtggtcgctgactttggtagatactcgccacatgttgccaatgttgacaaagacattgtggctccatacaaacaccttgttccatcgtacgttaatgacacatcgggctttgatggccgtccgatcttgctctacttccaaggagccatctaccgcaaagctgtgagtactttgcttgcttatatgacatagtctatgatctnaggcatatngatattctcaaacctatttactaacttaatttcat

SEQ ID NO: 13469 - DNA, 645 bp, Arabidopsis thaliana landsberg
cgggctcatcattggggtgggcccagtcgtcgcacgggaggagtctggggcccacatatttgagaaaatttaaaatgacaacgatgtggctgtcgcgataaatataaccctaaaaccagcctcacagcttggcatctgggaacttaccatctgagaatagctcctcgtaggtgtctctatgacaaaaaacaattccagcaggtaatctacacgaatacttgtgaagaacattttttcccatctttattttaaatccccaaagcggatttctatcctgtttaaattataattatgatattcatcttttgttattaattaaaaaaaattcacttatacatatggttaaatgtaagaaattattatgtgtatatcaaaatgaacacaattgtataatgagtgatctattgacaaagtaattatttatttttatcattaactatcaaacatcatcacatacaggtttaacggatccgcgcgaggaacgatgtaacaccctaaattcttcatataaaagcaatccagttaatttattaatctctagcataatggaaaatattttacttttaaataatgaaaatggcaatatagaatagaataagttcttgaataaattaaatttaatcaagtgtttgatgtctcatgcaa

SEQ ID NO: 13470 - DNA, 200 bp, Arabidopsis thaliana landsberg
tgatggtaaagacgttttctcgtcccctgatacgctgccgttttactcacacggcactatcgcctgtgagttcggccacgtggagagttctacgatcttcgacgtgcttgactgtgtcatgacggaggtcgagattgactcggcttacgccgggtttttacaccattcgattgaccatcaattacgaattagttgcagcg

SEQ ID NO: 13471 - DNA, 689 bp, Arabidopsis thaliana landsberg
taaaaagatctgcttacctccaagagataagattctagcaaaccaacccgacagccttgacttcaaccgggccctaatatagtctaaaagctggaccttagaaccgctgaaacactcagggagaccgagataagtgcctgctccaccctcatttgtgattcccagcgctgctttaatccactctttacaaccctcttcaacctttgacccaaaagtgatactagacttttcaaaatttatcatttgtcctgtagcatcaccataaaccttgaaaatgttttttatcactgccacttctttcttatccgctttacacatgaacaaactatcatccgcaaacagcaggtggtgaatagctggtccattaggagaaaaacggataccacttatgagactctggctttcagcacagtcatgaggtgagttagaccttctgaacacaaaataaataagaagggtgataacggatctccttgcctcaaccctcttgttggaatgattttgccatgagctttgtcattaatcagaactgtgaaggagactgaagtaatcatgaacataaaccatgccacttatttctgatgaaaacccaacgcttctaacaaggccttaacatagttccactcgaccctgtcaaacgctttggacatatcagatttgattgctatgaactgtttagacaccgtctt

SEQ ID NO: 13472 - DNA, 644 bp, Arabidopsis thaliana landsberg
tcattgaattttgccaaatcccggaaccctagtcctccttctttctttgaatattgaagcctcttccaagcaatccaaggaattcctctttgcttggaccctttttgccaccagtaattcattaaaagtgaattaatttcactcaccacaccaagaggtaatctaaagcatgacattgcattgacgggcatcgccaaagccacagattttagcataatttctttacccgccggagaaagaaatttggcactccaactcgcagttcgttttttcacccgttctataatgtaatcaaacatctctttttccgtccaaattgttctggaaatcctaaatatttaccaccatcaccgtgatttggtattttcaatatgtttttagtcgattttgagtaccaccatggattcttgatccaaaagtaattatggattttgacatattacttttttgtccagaataatattcataaacatcaaaagcgtctttcaaagcttgacaattcctcacatttgcttggcaagaaaagagtgagtcatttgcgaactgaaggtgagtaattgctggaaccccattaccaatcttgattcctcgaatatctccttccgcaacacttgttttaagtagatggttcagaatatcagcac

SEQ ID NO: 13473 - DNA, 569 bp, Arabidopsis thaliana landsberg
catactgaagttactacacaactcaacaaatagaaaatattgaatatgtcgatctggcatgactgaggtttggattaaaggaaaagctcaatccttttcaaagcgataaatctaaattgatttcaaagaatgtcgatagtaatgacaatatatcggagtgagatttaatactagtaaaagtcttcttaagagttatcactaagactattcgcatgcaattcgataaaacaattttcgtaacgagcctttacaagtgatgaagaaaacatacaaaaatagttataatatattttgatccaaagtgaatctataacttgccaagaaaccaaaaatagctagtatatatactttttttagttttcgataacgaggaaaaaataaataaaaaccaaaacagataaaaagaaagaaaaaagtaacaaaaataaagattactagttaataaagcatcattgtggagaaaaccaatagttgaatcacgttttccagctttaagtcttttggaaaaaaaatcatttgatagatgaaagaactgattaaacaaaatgacagaaaaaacaaaaagaaat

SEQ ID NO: 13474 - DNA, 647 bp, Arabidopsis thaliana landsberg
cttagatccacaagccacttttcttcttcttaatcacctttaatggcgaattttatccttaagcaatctctaatcatactcctaggcatatattcaacaccaatcttgagttctcaagctcgaatcctccgtacatatcgccccacaaccatgggcgatatggatagtcaggttctcctacgtgaactcgggattgatctctctaagttcaaaggtcaagacgagagacggtttttagtggattccgaaagggtttctccggggggtcctgatccacaacaccattgactgatctttaccgatatatatatactttaccgaagatcgaagcacacatataactgtgactgatccatgcaagtcaatttaaatatcgtcatttacatgcttttcttttctttttcataaatcttccctacacttttgttgtatcaagattttggtattcttgtaccttccttatctttaaacatcaaggttttactctctatgttttcttgtgtctccaatgagttaccttttttgtaacagcgattggctatttcccctgtctttatcgtttaagttttaccttttcatttgtaggaaaaccaacaagatagaccctagagggtttttaaaagaatgattgaaatctgcacttcact

SEQ ID NO: 13475 - DNA, 676 bp, Arabidopsis thaliana landsberg
  unsure (1)..(676): unsure at all n locations
tcttcgagatgatcttatatatgacgttgcatagactaattgggcggaaatctttcatagtttttggttccccaatcttagggatcagatagagatttgtatggttccaccctttttgcatttctgaagttgcaaaaaaatgtttgacctccgagactagcgtttctcccactatctcccaatagcgttggaaaaaactgcgttaaaaccatccggtcctggtgctcgtgttgcttctatggagaagagagcttcacgtatttcctccactgtgatctcctttaataacccttcattcatctcatgggtcactactggatgtatattccttagggcactctacagattcagaaaataagtcactgaaataacgcactacttctgagcctatgtcattgtttccataaactgtcatcccatttatgtcttgaatggagtttaaacgattcctaacaattcgatttttcgttgaagcatgaaaaaatcgagtgttacgatcaccttcatttaaccattgattcctgctttttaatttnnnnnnnnnnnnnnnnnnnnnnnnnnnnnnnnnnnnnnnnnnncgtaggtgacgaatctgctccacggaatttgagttgtctgaatgtgcacgtcaactcttttattatacccttgatctggattgcagaatttgtgttat

SEQ ID NO: 13476 - DNA, 512 bp, Arabidopsis thaliana landsberg
tctcccaactcccacccctccaaattcacctttaatttcttcctctattatttcgactttgatcctcaagcaaactctaatgatactcctaatcatattttcattacaaaccttaagttctcaagctcgaatcctccgttcatatcgtgccgtgtccatgggcaatatggatagtcaggttctcctacatgaactcgggtttgatctctctaagttcaaaggtcataacgagaggcgatttttagtgagttccgacagggtttcacccggaggtcccgatccacaacaccattgaatgatcgatacctaaataaatactttaccgaagatccaagcacaaataatgtgactgattcatcatccatctatgcaagtcatcatatgattatcgctctttctatggttttctttcctctctttggttttcataaaaccttacgtacaactttgttgtatcaaggttttggtatccttgtaccacacattaccttaatacaccaagctttttctct

SEQ ID NO: 13477 - DNA, 645 bp, Arabidopsis thaliana landsberg
taatgggtccagacgaagaaaacaagttttttttggtcatcaaatgtcttacatagcagcaatagcaaattcattgggtggatcacaagtaagtatactaatcatgccctacttgtatcgtaggaaacaagtttaacttttttagaaatcgtagaaaactttgatgaaattaactaacagggttgtttatgtttgttgttgaacaaggctcttattatctagctatttcgtgagctacataaacaagattatcatcaatccagcagtcgacacaacagtgattccagaccctcatctactatgtgatgatttggtagaatcgctcaatatcatcaaacttgctgccttgagaaaggaatacaggtttgagatatcagatatgaagctacagtatgttcgacagataattacatgttagtggctgtaagatattctttacacaataatatgttcaatgtgtgatatctttatgacttccatgccgatatcttcttgttcctgtgatattaatcttgagtttcgtaatacgctacgaacgtttaaactatggatcatagtgcgacgaatgctattttcaatgtgttttttttgttacattgctttataaatcaagtatggctaagacttgtaatgtcttgacacatg

SEQ ID NO: 13478 - DNA, 541 bp, Arabidopsis thaliana landsberg
  unsure (1)..(541): unsure at all n locations
tttcttgtagaaaccactaaaactgtaatgaaatcaagtaacatgttttttatgtttgttgttgaacaaggctcttagtgatccattacgtaacctatgtaaacaagattgtcatcaatctagcagtagacacatcagtgattcgagaccctcatctactatgtgatgatttggtagaatcgctccatatcatcaaacttgctgccatggaaaaaggggttcataaaatggaggtttgagatatgtaacaccagatataaaaatgaagttgtatgttttttttcttctagttaagtgaagttgtataagttcggaagatatatctatttttttaaatgtagtaatgtgtaacggtatctatattattgtttacaaattttaaaagttattttacagttttgttttaaacaccaaaaaatcagctttttgtgtaatttctttttgttcgacacaaacgtaaaatcttctcttcaaaagagtacaatatttcgagcagcaataacataagattncatttttagttctaataaacattctaacc

SEQ ID NO: 13479 - DNA, 606 bp, Arabidopsis thaliana landsberg
atcttggaaaatcattgtttttgtgcttaaaaaatgtttaggctggagggttagatacgcttacacttagcagtctatacgatgatggagcctacatagcttcccaacgtcctgtctacggtgcaccagctcccaatccatttgcgtcccatgacccgtttgcatcgtccaatggcacagctcccccacctcagcagcaagcggtgaacaacccattcggtggttaccagcagacatatcagcatcagccccagccaacgtatcagcatcagtccaaccctcccactaataatagtaatccatttggtgattttggggaattcccggttaacccggtttcacagcagccaaatacctccggttatggtgatttctcggtaaaccaacataacaacccgttccgtagcactggcctcatttgatcatgttgtctattcatgtttgtatcttcttcattggtttggtggagagaaatggttttatttgtgagtaatagaaccacatgattggtttgttgatgatctttgttgttattgcttgtagaaagattatatatatgggatatatataatgcatatatgagttaaatcccctaaacaacattcg

SEQ ID NO: 13480 - DNA, 633 bp, Arabidopsis thaliana landsberg
catgcgttctatatatgattctactatataaagattactttcataaaatataattgtgtataataacccatatctttattgaaaacctcactatttgacatgatcggttaaaccattccggttagtagtgatgcgaaggaataatcataaatttatggaaacattgattagagatatagaagatttttcctaatgatttcttatgtgttactgcttcataaagcaagccgattatatggctttcaccgaccgcatgaatttggatcgtgtcaatttaccgggacatatatgaggagatattgttgactgatcatacactatataattttgttataaacttgcaagatgtagtttgcaagtgtatttggttaattgataatggtggtgaaataatgccataagtaaacgactattatatgtcaaattattcgcatcaggccaacaataaagaatgagttctctcccttacaattggtttaggtcaggaaccagatattttctatctaaatgtgttatacatattgagttgctccaccagagtgatataaaatgagatttgaaagaatatgaatctctctcaatgattggttatcttgagctatcaataagaaattgatttaaggctaaaataag

SEQ ID NO: 13481 - DNA, 511 bp, Arabidopsis thaliana landsberg
  unsure (1)..(511): unsure at all n locations
gctagttgcacatcttccagttctctttcaatcaaatcatcctcatccatcaaatcctttttcctcgttctttcacctagcaacttcttagctttctctcgtttagccttcaccttatctcgaagcaatttcaaatcttttggcgattggctgattagggcatcacccaccatcaacatttcgagatttatgaacagcaccatcatcttgtagctctccaccctctctttctgagttgtctttcccaggtccctcaactaaaggtctagagttatggggggcttctctcacattgtccttatgggctggatggctttcaagatgtaggctgctttcttttgtttctctctctatctcctctttgttatcgacactgacattagctgcctcaccacccccgattctcattgttctgattcaatactcctttggatgaacccgcatgattatcagaattcgattgttcatgggttgaacgtactgatgacgtntgcctagaaccaacatgctc

SEQ ID NO: 13482 - DNA, 974 bp, Arabidopsis thaliana landsberg
ctgtaaaatcctaataaaagtctaaaactacaaacaatagatacctacctatagtcgtcactctcttagctttcctcgaccctacaacgtttttgtttccagtaaattcaaccttccaagttgggctccggcagtatccgacaatatttttttctcttctcgtccggcgagccttccatattcggtggttcaggttgaatttattgacatttaaaaaagaccatgttactatagtctctatagcaaaacacatgtaatattgtaaagtaacacgttctaccaatttctcataatgcttatttcatcattcagaacatagcaatcataattttatcaacttggcataattatttttatttcgcacctttttgaacaaaatattgaaaatttagtagtataataaaatagatgtaaactcgctgtaactatcctgcattaattatagatatcgtgcacctcaattaatttgatatgtacaccgaactaacttgtctcgtattaccggcttaccgttttccaaataaataattttctgtattaggttcgtactacatttcctgtgtcatatgtctcacctcacttttagttgtacttcacctaatgatgcattgaaattcccgactaaatcctccttgtgaggagtatattatattatagccattttctaaagagaaaatgaggctaaggaaccatagtgatttgcgtaatttccactcatgatttggctatacacctaattactccatatttatatataatagtgaaaccttgtagcttatggatcaccattatctaattaaagtgtagttgccattattgatatttgcatgggagaataaatatgctgaccaatttttcactaaagtctgaatgaccttttttttttttttttcactaaataatgatatattgataatgattgtttgtgatacagaacctttacaaaaaaccagttaaggttaccagaatagcac

SEQ ID NO: 13483 - DNA, 755 bp, Arabidopsis thaliana landsberg
tttatagtctaagtaataggcccaattactttatcaccaagcccacacgtatttgttagtaatgcgtaagatgtaattatcccaaaaattacaattaagcaatttgacttttactaaagactacactcttcttttgtccaaacttacatatgtcatatatataaatcttttacaaggccttgcattgttgaaaaggatcagtggattgtaacaaaaactcgcaagataaagcctcaaattaaagtaagaacaaacgtcgtttttctccaagttgaatataaaactaccaaaacgtcgtttttgcttcattttataaatacctcatttaactatgatcctccgagtcctgttgcttcagtttcaggatctcttggagaagaaggcagagactatgtttggtttgattctgagcgttgacttccacgattttcagcttattttgcaacgccaaacgataggctctgttagtatacccatgatggacgaactgttttggacattgttcatatgatttcaaaaccttaaaatagactgaagggtaataactctggtgaaaaatggatggcatgcagagctttgatcgatacacaacgacacttagctatagacttcaatggcaatcacgagtgtatattgatgatatgagttctggagttggaagatatgtggtgtgttgcatcgagagatttttaggtgatcctcatagagttggagattgttaaaccttaaacagatacatgtataatatggcaatg

SEQ ID NO: 13484 - DNA, 562 bp, Arabidopsis thaliana landsberg
aactcattatctattgctacagtcaccacttttcatcatctgaaggaattccttgtaattgactctaccatctccatcttcatccacttgcataatcatctctttacaacattctagggttttaccttgcttgagccccaaggaagtcatcacagaattcaactcctcaacagtgataaatccatcaccgtcttgatcatacacattgaacgcgtctctcatgtccccttcctccttttcctccacaatcgaaccataaagagactcaaactcgtttatgtctacacacccatctccatttgcatccatcttctggatcatctggatcagatctttgtcaggcataaagattcctagattctctagagaatcgttcagctcttcctttgtgatgcgtccatctccgttcttgtcgaacatctgaaacactcgttttagatctaccggatcttttctccctggagattcagtttccgattcatcagacggtggtgggttcttgtcgtcgatgtaccaagaaggaggggaagaaaactctaagcttcttgggaactaaacaaag

SEQ ID NO: 13485 - DNA, 938 bp, Arabidopsis thaliana landsberg
aagttggtcctatgcagcttcagctaaagggaataagttgtccacatgggacagtaattgttaaaaggactacaatccaagatcttataaactcgcaacatttgaaatccattggtttcaatatccctagacatgtccttagccagggaagtaacattgatttaagtggacatcatgtaagaatccttaattcacagtataaaatacaattactctgtttccattttcttaatttcttcattctctatggatatttagtttgcaacagccgactatgactatgacaacgttgctggagtaacaggaaacattaacctctgggatccacaagtgtcacatgatcaagttagtcttgcaaccatggcgattgcaggcggtcctaaaatagaacagctcgccagcatttcagttggatggatggtgaatccgttgttataccaagatcacattcacttatacacttactggactgtaagttttgagtaaccacttgaaagtttacgcttattttttttttttctaacttggcatggttttagtgagatatatatggtaattaaatattgatttaaacaggcagatggatataataagacaggctgctacgacataagatgtcctggattcgtgcaagtcagcaagaggataccacttggtgtccttcttcaaccaatttctgtttataatggcacacaaaaagaaatggacttaagcttgcatcaggtagttacctccagagtctctggtgatctcatcttttaagtcacttagatattcatcttataatatcgcgaacaggatcgtgtcacgggggattggtggcttatatttggaggtgtgaatgttgggtattggccacagtcattgttcatagcgtcaggcttagtgaaaggagcagatcttgcatcttggggaggtcaagtgtacagtccaaagac

SEQ ID NO: 13486 - DNA, 730 bp, Arabidopsis thaliana landsberg
catacgccttcgacaccaacttacagtccacctatcaagccaccaccagtgcataagcctccgacatttacatatagtccacctatcaagccaccaccagagcataagcctccgacaccaacatacaggccttctatcaagccaccaccagttcataagcctgcgacaccaacatacagtccacctatcaagccaccaccagtgcaaaagcctcccaccccaacttatagccctccagtaaagccaccaccagtacaattgcctccaaccccaacttatagccctcccgtaaaaccaccaccagtacaagtgcctccaaccccaacttatagccctcccgtaaaaccaccaccagtacaagtacctccaacaccaacttatagccctcccataaaaccaccaccggtacaagtgcctccaacaccaactactccatcacctccccaaggtggatacggtactcctcctccatatgcatatctatcgcatcctatagacataaggaactaggtaaacaagatacagtacatatatttcctcaaggatcgccaaataggctttctagcacaagagagatgtatgttaaagctacatatggtactgcatattatgtggtaaaataaataaagttctataaatggttgttcacataaatgttacagtcgatctcgttgttaaaatcttgaaattgtatgccatacttttgagttcaagtgtttttctgtatgca

SEQ ID NO: 13487 - DNA, 972 bp, Arabidopsis thaliana landsberg
attttaaaaaacgcgtgcgtgctttgtgaccgaatcatcatttatgtttttttatgatttaatttcaaaatggtgcgggtttatagtctaatagcagtatttgtttatagataaatagcatttatttatttctttttactctaattaaattctttggttctttctttcttttctatttggttgtgacatttacattttcatatcaatacattgtatctcccttgttatttagctttcaactaataagaaaactcttcttaaagaaatctgactagttaacgtgatcaattatacgttctatattgtcgatcggtaagagttccatatattcactcgtttcaaacaaagttatatatcaaaaccggcagtaaaactaaattttaaaactgtcaagatccgaacaatcttaccatttgttgtgtacaataaaaacttatgactgaaaatgcatgaaaataatctattaaaaaccaaataaaaattcaaaatcctagttttcaaactaaattgttaactgttaatagatcaccattaattcgtcacaaagttcaccttaaccttttaatcactacttttaacttttggttctatgttggctctatcaaaataaaatttagttttaactttataaaaataactagaaactagtataataaccaaaaatggcggtgaaatagtcaaacaattcatgcaagcttgggacatttggataccaaacccaagatttagtctctttgatttcaaaccattttttcaatacataatcattttttaatatatctcttaattgattaaaccccaatcaagttaccaactctattgccttgctttttcctcttcatgacgctaaaatccacgaaccctctggcctatatatactttcgattcttcttctaatccttcatatctcctaccatcacaaagtcatctccttcttctttcttgatctagctagcgggaaattttgacatg

SEQ ID NO: 13488 - DNA, 785 bp, Arabidopsis thaliana landsberg
ttccctgggaaccaatggccggtcccctatattacatagcagggaaaaagtaagagcaaagttgtgaatacaacacacatttacagcagatgtgaagacttttaaaaacagtaaacaatacctaagctggccttgaagagaagaaattgcagaagccgaaggacctacaaatttaactctgtcacctgaaaatgataaaaatgcttgttcaacaaaacaggagtggtacatcaaaagaagttgaacagtcagatgaaaagaaaaacatcatgcctgctttgaatgtgtaacttttagaagttgctgttgacacttcttgttttggcaaagcctgagagcttaatgttgagccacctgttatatcagcatcaacacttgaagtcggtttcttatgctgcaatacttgtgcagcctgaacagctcttttagcaagcatagacagcctttcacgcctagaaccttctttagaggattcagcttccctggctggtgatccctgaaaccatccagaaacagtacaaaatcattgaattcaccggaatgaacaaacctactacttataaaggagcctgctgaaaaataatgtccgatgtccgagtggacactgtgataggtagtaatataagctatttgggacgaaaaagtcaacactaccagttaatatccacttgctcaagatgcaataaatattgtaataaataaaacaacattggaatgagtatatacattagtagtaatataagctgaaacactcctgattggttctcgactattaggattttttc

SEQ ID NO: 13489 - DNA, 924 bp, Arabidopsis thaliana landsberg
gaaccatatcataagaaaatcaaaagtgaaataagagatcaaaatgatgtttctcatagttgtctttgttatatccagtttgggggttgctactcaattttctaatgtaaaaattattattattttcttcatattatgatttatgaattcagagaaataaagtttttttttttatgtgtgtatgtacagggtgatgaattagagagtcaagctcaagcacctgcaatccataaggtatatttaaattataaaatatcaaatactgaataataaataataaatatattacaacaagaatatcaatgttatttttcaaactacataattttaaaatattttattgataacacaaatgtatattattatcgtctccattgatttgcattctaaatttgtttttgttatccaaccaatttcagaatggaggagaaggctcacttaaaccagaaggtaaattgtttaaaagatattatttttatttatatagtaaatgattgatcaaatcacaacttaaataatttaattgctgatttatattttttctgaagaatgtccaaaggcatgtgaatatcgatgttcggcgacatctcacaggaaaccatgtttgtttttttgcaacaaatgttgtaacaaatgtttgtgtgtaccatcgggaacatatggacacaaagaagaatgtccttgctacaataattggacgaccaaagaaggtggaccaaaatgtccatgaaaacaaaaaattgtaaaagcaaaataaaatctatcgttgttatctctcaataaaatctatgtttgtaatccttgtttttcaatatagaatataatatggagttttcataatttcttctattacaaaattaaagttaatgcacaaataaattgaagggacttggaccttttcgtgtaagttctttctttaaatca

SEQ ID NO: 13490 - DNA, 1001 bp, Arabidopsis thaliana landsberg
tttattagggactaccctcccaccaccatacatagaagaagaaccgacactgttattgctactggtcgcgcggtgaacatctccatcatcctctggaacatcctccaaaattgaacttctgcagtaaaaccggaaaaacaaacagaagaaaacaacaattacatcggaaaacacaaacctatgcaaatggtaataagtaaaaaagagacttattagaattgagagacgtacaagaacatatcatccatctgttcgatgccttcgaaatcgtgaagtgaagaagcaccatagaaagcctttgatcttttagactcttcttcttcttcactagtcctcatactcatctgactatacatcattccttctccattgaaaccatcgtaatcgaaacatttctcagctgcttcaggggagctcatgctccatccaccccacataccagtagatgggtatgtctctgatgatgattcttgataattaggcacaacaagctcttcagcataacaatccataaaatcaatcgatcgatctatcaacctgatgaatgaacaaatcaagctcactactttcagaaacaattcgaaaaatgtatggattcaaatctaacaagcacaaagagaaagaaactcactttgcagtgaacggatgagagagttttgaatcagacccaaatcagaaaccctcagatgaagtaaagatgattggttcaaaaatcaagagaagcctttgtttaaattttcttcaacagtaagcaaaaaaaagaccaaagagaaagagagagagaagaagacgaatgtgtttgttgtaatgtttcaacttccgaggaggtaagagaaccacaagtaaggggaagcgcgtgagataaagggcgcgtgaggtagatcttgttttcgtggctcagaattcatagacgagatttgtggctcttatctttcctccatctaaagcgctcttctcattggcccacgtgtactgtcatatcttttattgtgctccggagt

SEQ ID NO: 13491 - DNA, 714 bp, Arabidopsis thaliana landsberg
ttttggcatggctgactttgaatcggaaaaatgctgttggaaagaatgggaaacgtgctcgagactgtctatatgctgaaatcccagcatattttacatgggatggagaaaacaaacaatttaaaaagagaactagaggtttctctttgggtcgtattaattacgtttccaggaaaatggaagacgaatattatttgagagtgttacttaacattgtgagaggtccacagagctacgatgatataaaaacagttaacggtgttgtttatccatcttacaaactagcctgttttgcacgtggaattctagatgacgaccaggcttatatcaatggtttgattgaagcatctcagttttgttttggagattatttgagaaattttttctcaatgatgttgctgtctgattctcttgctagaccagaacatgtttggtcagaaacttggcatcttttatcagaagatattttgattaagaagagagacgagttcaaaaaccaaggtacttaattttattacagtttataaaccatggttaaacgattttccacatatacttacattgtatatttcttaaatgcagaacttacactaacagaagctcaaattcagaactatactcttcaagagatagagaaaataatgttgtttaatggagcaactctagaagatattgaacattttcctaagccttcaagagagggtattgataatt

SEQ ID NO: 13492 - DNA, 624 bp, Arabidopsis thaliana landsberg
atctgcaacagtttgaatggtgcttcatgttgctacagtcatggaatgggaagtgaagcaaatggatgtaaagaatgctttcttgcatggggatctcacagagactgtttatatgcttcaacctgctggctttgtggacaagaacaatcccactcatgtctgtcatttacacaaagctttatgtgggcttaaacaagctcctcgtgcttggtttgacaaatttagcaattatctgcttgagtttggtttttgctgcagtattaaagatccttctctattcatttacatcaaagggagtgatcttatactcctacttctctatgttgatgatatggtgttgacaggaaacaacttagaggatttgaacactcacttccgtatgaaagatctcgggcaaatgcactattttctgggtatacaagctcactttcatgagaatggcctctttctctctcagcaaaaatatgctgaagaccttctcactgttgcagctatggatgaatgctccccaatgcctactccactgccatttcaacttcataaggttccttatcaagaaaaactcttctctaatcccacttattttcgaagtcttgcaggaaaactgaaatatttgactttaac

SEQ ID NO: 13493 - DNA, 775 bp, Arabidopsis thaliana landsberg
tcttatgacgtggttcagtttttttaaaaacaaacatagattactcaattgatgataaaaaatatgtgtacaatgtcccacattgctttaacaattagacaatgattgtcatttaccgagattgattgaccgagacaataattagacaattagacaatgtgtacaatgtcccacattgcttgaccgagcagagcgtggactatttacacttttataataatcaaactcaaattaaattataaatttataatatttattaatttatcgaatgataatttttacacgttttaggttccagtgtaacagtataagagcatctcaaactcacttctatttttgcttctatactatattttagagtaaattttactccaacgcacttctattctcacctctaaatagagatctctatttttatctctatatatagaagatctatatttttttcactatatctagagtcaaactttattatttgtaaaatggtcctttaactttatttttcttttatatctgatttaaataaataaactaataatttggactgattttagaggttttagtttaaatatctattctaatatttgagaccattattattattatttttatttttggttatatgtgtaattcaaaaagataaataactaatatataaatgtgtaatagactaatgcatttacttataatcaaatggatggcaaaaagatgacatcctaaaaagagaatttacataaaatagaggggtttattgtaagtaactcgctatctttcg

SEQ ID NO: 13494 - DNA, 975 bp, Arabidopsis thaliana landsberg
ctgcttgttgttatcctcgaatccacctgacggtattttcgaaaccatccactgtaacggtgggagaggcggtggtaatggctcagctggattttggaggtaagagacattttcaactaaataaccatttgttgtttcaatctttggaaatggaactggtagagaagaagcttcagcattgactctgtgaaacgaatcatagagctcttgttgcctcttgctttctcggataccttctgattcttcttcccactgttgctcagacattgacacagagcgattgtcattgtcactgttgtctgaaatgtaagaagaagatctacagaaagtgtccttgtctgaatcagaatcaggaagtgaagtagcaatagtctctggcaccaactgaaacgaagaaaatgtatattcatctggaagttttagctgtagttcagaacttggcaaggtttctgaggatttgaaagatattttcatgtgatcaagtggaggagatgaagtaaaccaatcaaaaggagccttataatcttctcttaagtgctcttggaaggtttcagaatcaatgtcttcaacaatctctggaatagtttctgctataattttcggtttcgatggtttcagtcctaggagatttccattagtccatgttttaatggattcagtgtcacaagaactctcaacttcttctgattcttgatgttcttggataccactaatatcatacaaaggatttgagaagccattggaataactatgagtgccactacttatttccgaagccgcccatggatcttgatgaatcagttcatcagatttatataccggtgatgatgataaatgtagctctgatgtagcagcacattttgtctcatcaacactaaagttgttagaaatcttctctgtttcatgctatgtaatatcattgtaaagattcttctgcacctctttagtggcttggaaagcttcatcattttcaga

SEQ ID NO: 13495 - DNA, 697 bp, Arabidopsis thaliana landsberg
tcgattcattatatatacacacaatcaagagaggctctttcaaccaaaacattgatctattttgagagagatagaacaaaaaatgggagagagcaaacgcaccgagaaaacgcgcgttttggtggttggagcgactggatacatagggaagaggatagtaagggcgtgtttggctgaaggtcacgagacttacgttttgcagaggccagagattggtctcgaaatcgagaaagtccaactctttctttctttcaagaaactcggcgcacgtatcgttgaaggttctttctccgaccatcaaagcctcgtatccgccgtgaaacttgttgacgtcgttgtctccgccatgtccggtgttcacttccgtagccataacattctagtccagctcaagctcgtcgaagctatcaaagaggctggtaacgtaaaggtataataaactataaattaaagtttaattatgattgatcggtttagaaaattgtgcggttaatctgaaaaaatcttataagtaaagaaaccacacgaaaataaaataaaaaaaagccggagagtttatttttgttttactatttacgtttcatttataagaaaaaaaacgtcaacggtaaaagatccatattgcatgcatacaaagaaacttgatactcttgttgattattattacgttttgtttcttgttgtaattataatgata

SEQ ID NO: 13496 - DNA, 367 bp, Arabidopsis thaliana landsberg
gtgaatgcaatgttgaacagccatgttaataacgttcaatactaaacctttaacttagccacacaattgagggggagaaaatcgcttgtgcatgcagctttaaaggcaaagaatacaggtgcgtaccaaattaagcgttcagacttctttactcgaagaacctaaccaagttcctacttgtttctgcagatgttcttgatgttattctcggtaaatacccgagtcttgtcaaagagcgagacgaaaaaggacgaacttgtctttcggttggagcatctgtagggttttatcaaggcatatgcaagctgttagacacatcaacgctaagcatctttgattgcgacgatgatggttcatttcccatcca

SEQ ID NO: 13497 - DNA, 679 bp, Arabidopsis thaliana landsberg
gcatgcaagctaaatgaatccctttcctaaccaagccaattttattgattctttaacaagtcaacatgaaacctcaaaccgataacccaacccttatgagacacattcaccaagtattaaacttggtgaatctgaattccttgtctttaacacccaatggcatgaatcacatcttcaaggtggaaacacaactactaagcgcacaactactacgaggaacaagtggacaagtaaagaagatatcgtcctcatatctacttggctaaacacaagcaaagattcagtagttgggaatgagcagagagctgatgctttctggaagcgtgttgtagtttattttgcaagtactctgaatgtttctagtcagataaagagagaaccaagccactctaaacaaaggtggggaaaaatcaacaagattgtatgcatgtttggtggatcacatgaagcagcaaacactcagatggcgtctggaatgaatgaggatgttttgatgaagttagccaatgagatttacgagaatgattagggttttaagtttagcttggaacatgcttggagaatattaagacctcatcaaaagtgatgtgcatcactgcctactgaagtagctatcacgagtaagaaaaagaaggctgaggcaaagaaggctgaggaaaatgagtctccatctgttgtg

SEQ ID NO: 13498 - DNA, 629 bp, Arabidopsis thaliana landsberg
aaggtatcagaaatgattatatacctccagtgaccatcacaccatcctcgtttacagccattgcattaattatggttttctgttgcgaacttttccatggaaaaagataaacattgttcaaacacatcaattacataattaataatgacagctcctatttcaaaagcactggagatgcaaagtatataattatctagcagagacttacagcatgttgtggcagaactctccctttggaaggctaaatttcttggtgttgtcagctgatgcagaagcaaaggcattcctaaaaagaaaattaaagagataacataaaggaaaagtttaggtgcaaagacttcgctattggaaagataaagtagattcagcacgatacacaaaagtagattcagtacgactacacatactctttaggatggagggtcattgctcggacagatttcttatgatgtgttagcgttgacattgtttttcctgcatataataataatacagcattattcaaatgaaaccatatatttgcagcaactgataatcaaataaggaaggatttaaataatatggattttaagtccaaacaatggttacaatgataagatataccatattcgaggtccaaaaattaatgg

SEQ ID NO: 13499 - DNA, 631 bp, Arabidopsis thaliana landsberg
acagcaggaacaccagcaaagtcctgaaaaacaaatagaaaaaacgatatcacattcaagcatttttcaggaaatcagaaacatcattaatgtcatcaagaatgtgaatagcaaccaatcatcgtttacctgaagaagaacccgagcaggcttgaacggaatctcaacctgcttgggagaagtattctcccaatcaagaatcttctcaacatctttgctcttaacttggaactcatcacagttacgtatggccgattcaagaagtatcctaatggaataaggtagtttatctgcatccaccacaacatttctctcataaaactctcaccaacgagatcataacaacgtcttctaacaaaatattataatatctatcagagataaaaggaaactcaccgatcctgggatcgttcaaagcaggtaagctgtagtagttaccgaattcaccaccatcaggcttctctaacgccttcaatatgcttcggaaaggattctcggaagcttgaaacacatcagaaacagagatccacacagcacatcaaaatacagaaccagatttaaaaaaacgaaaaatagctggaaaatcagcatcggcgagaagaagaaatagacacatgaatcattttggatc

SEQ ID NO: 13500 - DNA, 568 bp, Arabidopsis thaliana landsberg
gaacaaccaaagcaatacattatctcaatgataccccataacaacgttgagtgtgaaacggtttcgatgatcatatccttcgatttattcaaaaaacctagagtaataagcttgagtgtgtacactaaaaagcatattaccttgtaggtcaaacagagaaataaacttgagtgtgttcactccaatggtcgtcagccatcgcaaaaactcaccaaacttcaaaccatccagagctttgaagtttctagagtaatagctagattccagattttaccaacctggattggatgataatatgatttatgagtcctaatgatgtgggacaatgtaccataagctcagaaaaaatgagtatgaaacgccatagcaagtaaagaccaagatcaccaatctgagaattaaaacatctcaaaaatcaaatgaatgatataaagcaacgacagagcaagattttaattatcataagaggattttggtatgaccagctgtgattcagtgtactcctatctcaaaactgttaaagaaaaaagtgaaaataaagatcaaacactacttaggaacggaaaag

SEQ ID NO: 13501 - DNA, 851 bp, Arabidopsis thaliana landsberg
cgctctcagcatggtgatggtggagaacaaattagttgggattctaacgtaagtgtcatatttggccctttgtcttctttttcgtttccatggttctgaaattttttctctacaatatcatgttttaatcttttctagtggaactttgatcttaaattgtgatttttgttagctcaaaggacatcttgatgcgggtgatatcccaaaaccttcctcaagagacaaccactgtggagaaggtaatgttttcgctatatatgtatatatgctgatgctcgttagttttgaatctggttgaaattattaatttcaactcttagatttatatgagtactcattttttgtctttgttgtttcttttcaattattctataggttatgacaccgaatccagaatctgcaacagttgatatggcaattgttgaggccttgcatatcatgcataatggcaaatttctgcatcttcctgtattagataaaggtaacaaaatgtctacaaaactgactttgagctataaagtatgaagcttgttatttcaacacttgtctaatgttgatgatttcatacagatggagatgttgtcgctgtcattgatgtgatccacataactcatgctgctgttactacggtacactttttttcttttattattctcttctagttgaagtcgaaaacatgagacaagatcgataaacaatccgagagaagaatgaacatgatatatttgttacatactattcttgttttgctataaactcttatttccttttgacaaggctggaagtacggctggaataaataatgagacagcaaactcaatgatgcaaaagttttggactctgctaggctg

SEQ ID NO: 13502 - DNA, 925 bp, Arabidopsis thaliana landsberg
atattgtgacaagaaggaaaaagatataacaagaaacatgagaagtgtatacatttttaaaaattcgtttttcaggagaggtatataggttatagattatcaatatatcatcatcatgtataacaagcaattagaggcagagaaacatagcccattaggtaacgatcatgggctatattaatcacggcccaaaacaaattgtgtaaaagtatactatattcagagatgatataacaaattgtgtatcacatattaaatctaatttaattatcacaactttttttttgaaaagtcagcgatcaattaaaatatcaaaacaactatttacttaaataaaatcttggaaagtcggacataaaatttcaatcatgtcattaatcaactttcaatcatattattttgtcaatttgctctataaaaacaaaagtaagttggacataatatttcatatatacgctatatgaattttatataaaaaatttgaacacttaaaataaatataaaagatcaaaaaggatattgattatagaaaaatagtggaaaataaacacatggaaaatattttttaagaaaattgtggatatccttcccatattttaaaaaattgacaggctgtaaactttaaaaaatgataatgttggagataaaatagaatattgtataccttttattgacgaaatttgtaaaccaatatatactcctagagtggtaattcataattttgtttcttataaatcactatagaaaaaaatattttctttcaatgctcaaaacatattttgtaaaatttagtctataaatacaaatacctattatctctaatataatcaactcgcttttctttttctgttcaaaacatctcgaaaatggcgagaaagaatcttggtcgtagaaaaatagagttggtaaaaatgaccaacgaatc

SEQ ID NO: 13503 - DNA, 651 bp, Arabidopsis thaliana landsberg
agagaatgtttggtgtgggtaggataactaatctcaagtggacactcgacgcattctttgtggaaccttttatcgtacgtggcacaaaaataatagtctgtaccgatggtttggatagagcaggaatagcactcatcgccttcttctgcttccggatcaacttctttgttgttgcaccaaaacagagggagtacatgatgattgttgctggtctcatcaaagagaggggaagaactgtacttggaaaggatatgattagttacctcatcttccgtctcatcatcaagagaattcaataatatacgggttcggagtctagggcataagaaaagaggttgaggagggagatcgtagacggaatcaatggattgtttatcaaaggagtttgaggtttgtgtttgtggtaatggttttataacgttgcggtatacaagaaatggtttcccattgaattccactttatgaaattctccgaacaagtccatggctgctcaatcggagatttttttttttttttttttctttggtttaggatatatattgttgttctccttcattcccatatatacacatattagcaaaatattataatttatatataagttcatatgttcaatttaaaaataattagttacacgaaagaaaaaaacc

SEQ ID NO: 13504 - DNA, 857 bp, Arabidopsis thaliana landsberg
gctgcaacttcattgagttccctgagtttataagaaaccaaagaatatctatcgttctatattaccttttcaacaacaatatcaaaggtcaagtaccaagctggttatggagactaccagagttggctactgtggatctttcaaacaactctctcatcggtttgaacggatctttaaaagctgtaagtggaagtgagatcgggatgttagatcttacttccaatgcttttcaaggaccactcttgatgccaccccgcggcatgcagtatttatttggctctgacaataacttgaccggatatatacctccctcaatatgtggactagctaatccacttatcctagacctatcaaacaacaatctccacggcttgattcctcggtgtttggaggctcagatgagttctctttcagttctgaatctccgtaacaatagcctcgatggaagtcttcctaatatatttatgaacgccaaggtgttaagttcacttgacgtcagtcacaacactttggagggaaagcttcccgcttctcttgccggttgctctgctctagagattctaaacgtggaaagcaacaatatcaacgatactttcccgttctggttgaattctttgccgaagctacaagttcttgttctccgctctaataacttccgtggcacgttacacaatgttgatggggtttggtttggatttcctctgttacgaatcactgatgtatcacacaacgacttcgtcggaacattaccatctgattacttcatgaattggactgcgatctcgaagagtgaaacagagctgcattacattggagatcctgaagactatggctactacacttcacttgtcttgatg

SEQ ID NO: 13505 - DNA, 711 bp, Arabidopsis thaliana landsberg
ttcgagtccattgactatgcaaatttaacatatattgactcttgctaattttgtaagttcattaaccttgttactttgctaggttcgattaccagggtaattttgtagaagctttcatctgctaatttttgtcgcttctttgtttgttgtgtacacgtacaaacatctggtccgacatatagacagcccaaaccaacactccgagtagtccatcttagagcccataaacaataatgaagttaagtttgtcgagaagataactttttaaaagttgtgacagtaatgccaatctttccaaacttaccattttcttcttatggatcatgcattcatttcactcctaacaatgttacaagtaacaaacgcaagagagagacaacaaaaattcttaaatcttaccaaaatatcatctaaaggcaagacaaagcttttatgcttttttaaccaagtctacaagtacaacaaccatcagatgtccctactctgtttagggcattctgttccgtctccttagagacctcttgactatgtcggttaccttcttcgacatcatcggtgtgacttattgcttcggctgctgactgggaatctggttgagttgaagctcctcctccattagagctttctatggaagagacaatctctgtgctttgatgggacaggtccagggccggcttggggataagagagagacgaccaaaagggcatgtt

SEQ ID NO: 13506 - DNA, 655 bp, Arabidopsis thaliana landsberg
tttgtcgtctctcccttatccccaaaccgtccgtagacctgtcccatcaaagcatagatattgtatcttccatagaaaacactaacggaggagaagcttcaactcaaccagattcccagtcagcaaccgaagcaataattcacatcgatgatgtcgaagaaggtaaccgagatagtatagaggtcgttaaggaatcggaagagaatgacagaaacagcgtagggacatctgatggttgttgtagttgtagacttggtgaaaaagcgtagaagctttgtcttttgatgatcatattggtaagatttaagaatttttgttttctctattgcgtttgttagtaacattgttaagagtgaagtaaaggcatgatccataaaaagaaaatagtaagttgggaaagatttgagtcatttttgttttataaatcatgtcggctgatctagtcagattcggtaggaaacacaccaaagagttataaagtggacttcatgggacgaatccatagttttgaaattatgttataaagtggatttcccgacccgaatccctaggttggaaattttttgacgctatactatatactcgagtctggaatattttccaactatcgcttttccccctagcctagacttcccacatggatgtagatttacat

SEQ ID NO: 13507 - DNA, 428 bp, Arabidopsis thaliana landsberg
  unsure (1)..(428): unsure at all n locations
gtgaaatacttttaagtcttgtgttattcaacttgttgttttcttaattctattacattcaagggttatgggatgttatgtaaaattctatgataccattatttgacaagaatttaatagaaaaataagtgtaaaatgtatagaacaaattctaagcttttatgttgtgatttgggtgaaaacaaaataggacgtacggacttcaaatggttcttcttctcattggcatctattctggagccaagacctcatcaaaactttctttaaatgattcnnnnnnnnnnnnnnnnnnnnnnnnnnnnnnncaggggcctcatgtgcaaaccattagctacgaaactatgtgcaacatatttttcttttgcacctcctaatctgcttcggagcttgaatccttcaccaccattgagaaggtttcacaaccatga

SEQ ID NO: 13508 - DNA, 735 bp, Arabidopsis thaliana landsberg
tcttaatgcaaaccatacttgagtggatccgatcatacttgcgtccatgaaggtcactaatggaggaaatatataagaaaagagggaattagtgactgcatgatgcaactgataaagcagttgctaaatgttgtgactggattgcgactctttagcagttgaatggtgactaaaataatatactcactaatgtgttctttacacaaactctgctcgggtggatatatagcaacaacaagagtaagcggatgataaatgacatacaatggccaattttgtttgctgcaacactatggtggggatggaaatggcggtgtgcgaatgtctttggtgaaaacaagaaatctcgagatagagtgagctttgttagaagattggcgagagattacaccgcaaggtagcctaagtgggtcaacgaggagagtagagagggtggaaaggttgatcgcttggagaccgccaggtgagggatggctgaaggtgaacacggatggggcgtctcgcggaaatcgggtctagcagctcgggcgggggggggggggtcataagggatcatcagggtaattggtgcggtggcttttcggtgagtattggtatatgttctgcacctcaagctgaattgtggggcgtgtattatgggctctacattgcttgggagaaaccggtccccagagtggagttggaagtggattaaaagataatggttgggtttctcaagaccggtattggagattc

SEQ ID NO: 13509 - DNA, 915 bp, Arabidopsis thaliana landsberg
ttattggctgtttttcttcctatagtctaaggctctaagcctgttgaatgttccattctcaataagtaaggctaatgttattcacttaatatatcagcgtattcttagtatcttaattaatgacgatgttaattagcacagtaacctaaacgacgtagttagagattcctcatttgagcccaaaacaataatacaatttcgtacactcaaatattggcccaaattccaagttttgttacataacatttgactgggccagtcattattaatctcagcccaaaacataaaaaatatttgtaccctatataataagatcgaaacggacggctgagattgcatcctatgttttgcagttttttgagtcggtcatcgaatccgaaaagcggaaaaggctttctcacgtaataaattaagcttgtagagggtagattcgtaactaagcagcgtgttttccttttttcgggttgagaatcggacccagaacagccaattttaattccgggtcgggttataaacctctatatatatggtaaagcccgcttctttgtcacccgcttcacgatttcttcttcttcgtcgtcttctctcccaatcgtccaattaagctctgctttcaatttctcctgcgaacggtaattatataactctcaatcaattagggtttcaaggaaaacccccaaactcacatcacctttgagtgaattgtatttatactctcaattaggttttctttgaatcgtatcaagatggtgttatcaacgagcgatacgagtagctcttacaactatgttatcgatgacgttatcaacaagtctcgatgcgatcttgtctacaatggagaacttgatgagagtgttcttagccaaattcaatcggttagtttgttagctcctttgtaagttagggttttgggat

SEQ ID NO: 13510 - DNA, 558 bp, Arabidopsis thaliana landsberg
tcatttttcttcatgactaaggcaagggatttttctacttcaacaaatttatcatgttcctcataaagcaaatcctcttgcttttcaagcatctatccttctaattatagcttcatttaattcattaattttatctactttggatctgtccaagcccttaaaaagatcactataatctacatcatcaccggaatcctcatcactagaagtgtacttggggtgacatgtgtacgtaccttcttctccttagccatgacacatgtgtggcgcttgttggggaagaggggagacttgttgaaagcggaggtcgcgagtccctcgtcattggagtcagaggatgagcaatccgagtcacattcctttccgatatgcgcctcacccttcctcttcttgtaaaacttcttatctttcttaccctttttgtcttggtcctggtcattttcattataaggacattgtgcaataaaattaccggacttaccgcacttgaagcacacacactttccccttgatttgttcttgttggggtacccttgtgccctttaatgcggtcttgaa

SEQ ID NO: 13511 - DNA, 683 bp, Arabidopsis thaliana landsberg
gctttgaaggtactaccattttatcatactctagtgtattttatcacactctagtgtttagtactttagaaattttaaagctagttttgggattattgaaaatgtgataggagtggaggatgtaactactgattgtaagactagtaaagttgtggtgaaaggagagaaggcagatccattaaaagtgttgcaaagattacagaggaagagccaccgtcaagtggagcttatctcgccgattccggagcctaaaccggtttctgatgaaccggagaaaaaggagaaggagaaacctaaacctgaggagaaaaaagaagaggtatgttgtataatatgtgtaagattttgggggcttgatttgtaatttatagaaaacttattggctttgtgtaattaacagtaagattttgtgggcactgagaaaaacaggtagtgacagtggtgctgagagttcacatgcattgtgaagcatgtgccatggagattcaaaagaggatcatgagaatgaaaggtttgtatcttttcattttattgttttacttttctcacttaaaatctaattttctgaattggggcacactattctattgattctgaattttagttactgaatttctgggacctcacttaaattgggaccatcaacgttggacttcttctctcggggtcataaaattgatttc

SEQ ID NO: 13512 - DNA, 847 bp, Arabidopsis thaliana landsberg
tagggaaaacatcatacgcctcatcttccatcaattgctctttaatatagatcaaaatatggtcggcgggggggttatcctccatggtaatttcttgggaatcaattgatagaggttgaggcataaccgattcaggcataacatagtcgaatttgatcatttttgaaccgtatgtaccattattaactgcataagctggagcttcacatgcatgttgtcccacataagtgtttctgtacactggaggattgtcttggatcttctgtacccgcttggtagcgtcgcagttttggtctttcgcataggcacatcggtagtaccacctgtaaattttactctacaattagtcatcacttaatacacactctagaaaatagctctgtatttgtgaaaagagagcagtagcgatgtctttctaatctacttacctttggtgcggagaggttttgatggtcttttgtccatatttcctccagatgaagccatcaatgtgggccggagtcggagaatcttctataccttgtattccacacatctttctgcaatgttgcatcagagcaatgctcactaggatacttgcatcgaacgtggtcgaagaaatagagtaacatagaccacaacaggtgtgtgttttctacttgatttagagcttttaataatttacttctttgatgatctttgagacacatgacgtggtatgttctgagaagacagagcaaacgagaaagaatcaagaatggagttgatgagtggctctgttgaaactgagcctgtttcatggtttttgaggagcgtcttgagattgcttgcgcatccttggccaaggaggagtgctgatacagccttc

SEQ ID NO: 13513 - DNA, 868 bp, Arabidopsis thaliana landsberg
aacgttgaagcgattatcggacataattaagatctccaacgatctaagcttgcatatccaatgaggaaatggtccttgaaatgaatttgaactaagatccaaccactgaacttgtgtttcatcaagaccttctgatgattctccaaaactgttgaaagaattgttagaaagtgccaccattgtcaatctccatagccaacttggtacttcacctaccatattattgtcttcaagacaaaaatattcaagtttggctaactttgatatagatcttgggattgtaccaatgaaattgttgaaactaagatgtagctcttcaagattgagatactgagatacagattcggggatcgagccattgaattcgttttgagcaaagtttagaaacttgagactagacgatgaagacatgtttccaaactctacaggtcccttgagatggtttccctctaagttaaccctttctaacgtgggaattgtgaacaagaacgtagggaaagatccagttagattgttgaaactaagatctaactctatgagattgagatattgggatagagtatcagggattgggccatcaaatttgttttgagaaagaaatagatattgaagcctagtagatggtgaatacatattcctaaactctataggtcccttgaacatgtttccctctaaattagcccaacgtaatgaaggaattgtgaacaaagatttaggcaaagtcccggaaaatgagttttcaccaacattaaaatagtccaagttttggaatccactcatgtcaagtgggagcatggattcgaaggaataaatatagagattggcaacgagcagttttgttaaattggagaatgtaacaggaatatgc

SEQ ID NO: 13514 - DNA, 650 bp, Arabidopsis thaliana landsberg
gctgcaatatttataccattttagctatgttgggggtttacaagaagactaatgtaaccgcaaatgaattgatcgtacataccctattgtcgtttccaccagatgctagctctctgttgtcataagaccacttgagtccgcatacctcagatttatgacctgccaatttactgacatgatcttcttgacaccttatgtctctctgaagaatactcttgtctctgctaccagatgacagaactgatgaaccccatgccagggctccaactcttagacgatgaccttccattgttcttgttctcttgcagcgtgacgcatcccatatctacaaaaatacaactaaagtgaatattccatagaaagaacatcataaattctttagatatatgaaaatcctatccaccaaggttttatatgcagctactttccatcttaaccacaaagtatttagcttcattcagggcaattccaaatacctacaagcccttgataatgctttattcgagcatatcttctcgataaagaaaaactctttgtaataatcataccactaatgatcaagatcataccagtaaaagataaggcaagaatcctacagtccacgataaggtctaaatctaatcatgttgtaactataaatagtttacctg

SEQ ID NO: 13515 - DNA, 1104 bp, Arabidopsis thaliana landsberg
gagctttagagttggagttttgcatgtttcggatcctctaaaaccgagtgctcgagaagccatctccattttaaaatccatgaatatcaaaagcatcatggtaactggtgacaactggggaacagcaaactcaattgctagagaagtcggtatcgactctgttatcgcagaagctaaacctgagcaaaaagcagagaaagtcaaggaattacaggtacttgagtaaaagctccacactaaatgttaaaaagttcacatatatggaattgatataagcaatgaatatatattgcaggctgcgggacatgttgtggcaatggtaggtgacggaatcaatgactcaccggctctcgtggcagcggatgtaggtatggcgataggtgcaggaacagacattgctatagaagcagcggatatagttctgatgaaaagcaacttagaagatgtgatcacagccattgatctttcaaggaaaacgttctcaagaatccgtctcaactacgtatgggctctcgggtataacctcatggggataccgatcgctgcgggagtgcttttcccagggacacgtttcaggttgcctccatggattgcaggtgctgcaatggctgcttcttctgttagtgttgtgtgttgctctctcttgcttaagaactacaagcgacctaagaagcttgatcatctggagattcgggagattcaggtggagcgagtttaaaaaattgaactaaaccgagtaccggttattgaatttgatgaaccaataaacaaaccgtacagtaagtttccactccttatctagaatttaagtccatgaactaataattgatttactttgcctccatattttcgttgcttccctttttcctatttggaaaaggaaaatatttgccttattataagacaagagcagagaggacacaaataaagataagaagattaggattatactttgaaacgtgataatgagaactagacatggcagcaaaaggacaaagatagagaaggagtctcgagtaagtcaagtaacgtcggagacaagaagagattgcctgtgaagtccgtagctaagtttctcgttgtatccaagttattggcaacaat

SEQ ID NO: 13516 - DNA, 941 bp, Arabidopsis thaliana landsberg
ttgtcaattgtttttgagttggaaattcatgattcctattattgccagttataaaaaaatagacagatagaaggactcaccagattcacaggttcatcgggatgtcttaacgcaagggttaattcctcgttccactcagggttgcagttattttccacaacacgagtcttcagcttctggtgcattttaaagaattctattagagtgcatgcaagatatgaacatcctaatatcgaaagacgattttctctatatcaaaaatcaaaatcatatactaaacctatctattgatttcatttctctgttgtttaaactctcttatttttccatacttaattgaaatttatcatgcttcttggaggacaatattttgataaaaagagatatatgtctcaaaaacagaagaaatccacaaagaccaaatcagattagaatcaaagacagagatagagagagaaaagacctgtgatcccatggttatgacaacaaaagggtcgctgcttagagtgtctcgctgagcaagattgatccctctcttcactcggattctcagaagccctacaagttcctccatctcaacctcttcctctgttttctctgttcttttcttctgaatttgtgatcgatttctctaggcggctctgactcttttaccttctttttttttaattctaaacaatgaccggctcaaattcaacgaggaccacttaaaaattggcttatcaatggacgatagagcgaataaagaaacaaaaaataaagaccatctatataataggtttcgttttccaggtgtttgtttctatattattctcatctacgcgttactctcacgaacatctttggtaataatatcttcttgattcttctttttttctgactatggacaaaaggtttaagccgttgacttttccaagaacatgtttaccaaaccaatataa

SEQ ID NO: 13517 - DNA, 899 bp, Arabidopsis thaliana landsberg
aataaaaggatctctgcagtgtggcttcgaacacctctgaaaatctagtcatcttgataattaagtcacagttgacgtgacatgaggtctttgctgaccaatatgtgattttaattggccaatatgtgattcgaacaaaatacgataaatctttcccatgagaatgtaattagatgcactaaactaccagatacaaagtaacaccattcaataagaccgaagtagaattgatcaaagaaacttttggcggaatgaaaaaatcaaaaactcattcggagacattcgaaatagcctctgaggatcttctgttttgtaggctacgactaatcacatctcctcacataatcctcatcgcaacctcttctatctttggccttaactctggattccttgcgacacaagccaacgctagctaaagcatctgaactatctcctcttctattttttgaaacttgaatagctctacatgaaaaacctctggagggcattattcactcgcagcagaccgaacccaccttagaacatcagtgaccacacactcatcctcaagaccaagctgagttaaagttgagttcccggttagcatttcatgaatcaccacaccaaagctataaatgtttgattttgattaactctcctcgtctaaataactcatgagaattgtagccaataattcgcagtagatatttcaaccataaacaacgtttttcttggaccaagagtcatttctccttcattgtgtcaagtttatcaaggttgggacttgctcgacttatctctgtttcttttcaactttttggaggatacagctgcgcatatgagtcttaattggctaacatcattattttcaaaacagataggccctatagtatgggagaggggtggacgtcttctcttct

SEQ ID NO: 13518 - DNA, 924 bp, Arabidopsis thaliana landsberg
  unsure (1)..(924): unsure at all n locations
tgctttgccttgtgaatgttgtgaatatatatagggaagaacgttgacggtaaccatccctgttccatcaatcataaacttaccaatcataactaggttcgttaactaaattaagttaaaccgaaatatatgtactgtgttaccgggagagtagcatagctaagagctatgttgataccagcagccaagataagcgacgcgagtaaattgaaaccgagtaaccggaaccctggtggaattcaaattcgtgtttatgtaaatatacacaaactagtaaaatgtataaaccggtatgtacataactatacatatgaagagattgaagagtttaccagagaaggtttcaaagggataaatgatgccattattgtccaaatcgaagaaagcgacatgttgctgaagaacactaaggccattatgtctatgatctggtgttccttgtgggtgttccatgtcaggtgcttgtagtgctctcggcaaatctaaataatcaagaattgttatctaacgtatgagtcacgcatcattaatatatttgaatatgtataagagaagtttaggaagaagtacaaggtttaggaagtgtgtcatccaagtcaccacgaacacggcggtgataagtcaccggagcgtatggagccaccgtctccattgcgtctctctccatcctctccatcgacgtcattgctctctgctgtctgctctctctcaacagtgagaatagaaattaacaaattaggaagaagagaagatcgaaacattttgatgctccgtggcggacatgcacacacgacaatgccaccgtttgccatctctagctcctactttcacctttacaacgagtcaaggacacttgtcggntaaaagttgatatagaaaccagaacgagaatttcgaaactgaaacgtacaatgttttacacta

SEQ ID NO: 13519 - DNA, 1023 bp, Arabidopsis thaliana landsberg
gggcacagttgcagggtactggaaagccacaggaaaagaccggaagataaaatccggtaagactaacatttttggtgtgaagagaactctagttttccacgcgggtagagctcctagggggacacgaaccaattggattattcatgagtatcgtgccacggaggatgatcttagtggtaccaatcctggccaggtaaataatgcatacttttagatgtgtaaccattggaaaactaaatttggctctgtagcttattgtgtgcttgtgttgatatatatatatgcagagtccgtttgttatatgcaaattgttcaagaaagaagaactggttttaggggaagaagattcgaagtcagatgaagttgaagaacctgctgtctcgtctccaactgtcgaagtgactaagtcagaagtatctgaggtaattaaaacagaagacgtgaagcgtcatgacatagcagaatcttctcttgtaatctctggagattctcatagtgatgcttgtgatgaggctacaaccgcagaggtgaggacattgaaaaattctcttagacagtttttagatgattgtctctagtgtctgtttgaatactaatgatgtttattttcggcatgcagcttgtagattttaaatggtatccggaattggagtccttagatttcacgctgttctctccattacactctcaagtccaatctgagcttggatcctcttacaacacattccagcctggctcgagtaatttttcagggaacaacaacaacagcttccaaatccagactcagtatggtacaaatgaagtagatacgtatatatctgattttcttgattcgattctcaagagcccagacgaggatccagagaagcacaagtatgttttgcaaagtggttttgatgttgtagcaccagatcaggtacatgaagtttcctcaaaactcattatatcatttgtatgtacttctaaaaaacaagaatcgtataactcttacaacttaacttgattgcagattgcgcaagtgta

SEQ ID NO: 13520 - DNA, 598 bp, Arabidopsis thaliana landsberg
gaaaaatactgtaaaataaataaatagtcataactagtgtattacaaaaaaaaaaaaagtaaataaaagtaatcactagctagtgactaaactaaaccccaattatgggtcgtgtacattttggtgtatcagcattctttgttttttgtttgttaggtttatcagctaatgcaaagatcttcaatattaattctcctccaggttctgatatcactaacgtcagttctaaaacctaacaacaatctcgtttatctatacattgttttcttgttctccaagtaatttttaatatctttgcgatgtaggcattgttgaaagcattcaatgaggcatgccaattcccgacaaagagcaccgttatgatcccaaaaggtgaatacaagcttggggagatcgtgatgatgggtccatgcaaagctcctataaggattgctcttctaggtaccgtgaaagctgacggtaacgctaatggaaaggagaaatgggtcgctttccgcaacataatggttttaagttgacggagtgggtgtttcgacggtgaaggaacgcacttggagggtcaacaactgccacaagactttaactgcaagagctccca

SEQ ID NO: 13521 - DNA, 572 bp, Arabidopsis thaliana landsberg
tatccagtgtataataaagttttttttcttaaaaaaaaaaaacagaaatttgtatgcaccatttaatcttttaaagaaagaaaattgggcctactccaaacacaacgctactgtggagtacattttatccattttaatggcccaataatttataatgggcttttagtatgggccattttgtccctcttttttatgttgtaagcgagatcttgagacaatgttagtaattttggtttaatccggttcaacaagtaaacatcacacttgtaaactaaaccgataatgccacgtcactactccaaatattcgccaaatcataacagacaaaatccaacaacaacgacgacactctcctctctcactctctctctcaatctcaatctcaatctcacgtcaacgaccgtcgccgtcaccggaaggaaacgatttcatcatcttctacaatgatcccatacgcaacaatcgaagaagcgtcgatcgcattatctcgaaacctcacatggctagagactctctggttcgattactccgccaccaaatctgattactacctctactgccacaacattctc

SEQ ID NO: 13522 - DNA, 623 bp, Arabidopsis thaliana landsberg
gatctacataccgtcgatatgaagttttagacaacagaccattcatttttcacgtaccatttgcttgttttagcgcctcaatccttgttctcttggtcgaaagatttaccatcgtttcattacatagaaaatgatctcaatttaccacatttttaatgtacttttcagcttgtgaatgctgcagtgatagttgatccttcagttaggcgaataatagctagtgaaactgatcaagtatatgcatcatctgctcctcgtgacatgactagcgcagagaccaggcccttcgaggaaacaggggaaatatgcttaaatgacacacttgaaaaacagaatggttcattgtctactgtttcttgtctgaatccctggcaatggagtttgcagccgcatgacactgaaaattgtagccagtggcatcctcttaggcatgcttccatggttgccattgaatcctcttctgccagagatagaaatctgtttcccaatccatccaagatttttgatcaggatcatgttccgccctcaaatacagattctctggctagaaagcagcaatcaagcagtcatagtccagacgtaagttcattccaaccaagttttttaatttcctgcacatagtt

SEQ ID NO: 13523 - DNA, 515 bp, Arabidopsis thaliana landsberg
  unsure (1)..(515): unsure at all n locations
caaagaaangcttgagtgatagctgatccttcttttaggcgaataatagcttgtttaactgatcttttctatgcatcatctgctccccgtgacatgactagcgcagagaccaggcccttcaaggaaacaggagatatatgcttaaatggcatacttgaaaagcggaatggttcattgtatgttgatgctatatccctaccaatagaatttgcagctgcatgacactgaaaagtgtgtagtcaatgcaaaggcattcttttaggcatgcttctattgttgctatggcgcttgtgcatcaaagaataaaacggattttatatgcttttccaaactccacgaagtttgaaccatcattatgcagtgttaagactttatagtgttgcattgttgaaggtgactaagtgttaaagaacagaggagacatgcatcgttgtataccacggatcatggtttattgcacatcggaaatgtcatactctagttcaattaggatataaaagtagatatcaaacctt

SEQ ID NO: 13524 - DNA, 1819 bp, Arabidopsis thaliana landsberg
cctttgaaataaattcaatcatcaaatctcaaacaaaattcaaattcgaagctaaagcaaatgtcaaactgtcgattgaatcaatatcacgaaacagtataacaaattcacataagcaacaacaaaatcgaataaaccaatttgaaatcgagatatttaagttaacattataatttcgaaattgattcgaaaaataaacctgggaaaaacaagagattgaatgaagactcatacggtgaaatcgaaaaaacaaagccgacaatctccgacggcgaaaatgggatgcaacggcgaaaaactaaactatttccgacggaagaagaacaagagagagagaaaatgaattaggtcgatgaagtgtacgtagttcagtaagggtattttgggaataaacctattagatggggtagaaatgaaaatgggaaaaaagggtagagttgaaaaggggcaataaaaaagggcattagagtgaattattcaaaaaaaaattcccgcctaaattttttccgtaacaattttttccccagccaaaaaaatgtatttaaaaatccttgtaaatttttaacgaaagaggatgtcggtacacttctgatgactcatcaacacatgttacggttgtaatctcaagatgacacgtaaatttgttagaacccaaatgataaaactcttttgctttcgatgtaattatgtggtgggctcttcttagtgataacacggttttttgggccgttttagctattgttttcttatgtttcagagagaatttggtgccattctagagccaagatgaggagaaacacgtattttaggtgtcaagaagatttttagagtttccgagaaaaaagtatcaaaaggcgatcaattccagtgcttcggatgtgtggcatccgtccaaggtcttcctaatcacggtatcaagatacattggtatggatggaaagctagaagagtcaagattaacgtcaaagtcgaatcgaagcaatccttgaagttgtttaggagttatggcccgaagagtagagacatgtcccccaagtataaatacttgttctaagtcctaactctaaggtgtgccttcatcacaagcaaaccctagctgccgccgtgagctgccaactcgccgccgccgcacccttgagctcggagatcaccttctctctctctttctctatcgttttgtataagattcgctaaggcggagctttgcctcttgtattcaacattcaaagaggtaatctttaaaccctttttaagtcttacttatccctttgttatggtttactcaacccaacttttgattagctcctttgccatgagcgaagtagatctctagttgggtttaagggggtttcaaaggggtattcatggggactaatagatcgaaaatctaggttggcggtttctatgactttgttcgatcatttacactattctttctagttgagttgaatcttaatgcttgtatgttcggaacgccacctagtacttaaccttagtgttggtgttggatcccgcacagaaagtccgggaccaaccaaagattgccatatggatagaggaggcccacaagaaatgaggcccactagtttccttagtcgaagagaagaatgcaggcgaagtggtcgtaccgtgaggtgaatataaagtcgaggtcagaagtagctggtctaaaaggttgttgggctgggaagtcgaagcccatgaagcttggagttaattcaaattcgaacatttgaacagtaaattcgacgaccgaaacggatacatttaagatagaataattatgtgtaattgagaattaagtgtaattcttgggtat

SEQ ID NO: 13525 - DNA, 1150 bp, Arabidopsis thaliana landsberg
  unsure (1)..(1150): unsure at all n locations
tctttgaagcgaacgtctcctagcaattggaagatctgagacaaacagggattaatagtccgtaactccgtagataatgcttacagtaaccgaatgaagcaattgcttaccagctacagttgagaaagaaagagctctgttcagtgctggattgataccggtcacattctttgtctctttagcagcagaagcgatgcgaatgatttcttgaacctattaagcattgatcaccaatacaattagaaactctgatgcaaccaacagcttctaaaagctagatggaccaaaccttttgtgcagggacaccatcgaagactctacaactcccaccaaagataatagtaagttgacttgaagcaactggctctgtggaccttgaaacaagagtttgaaattaaacctcttgagtttcccaaattgatctgctaatttaacaattcatatagatccaagtctcatcaattgctcacgctcctatagtgtactaagaactaacaaatcacagaactataggactaaaaaaaacttcaaacacaaagacagataaagagaaatgcgaatcgattccaattacaagtgatacaaacctagcttcgtgaatcgatctctcaacgagcaagtcaagtccggcggaaacagaaccggtcccgtcgacgaaactaggaaccgggaaatctccgtttacctcagccatgagcctctctgtgaataatatctgtcttctccgtttgattgggaattgggattcttttctttaataacccctttttggccccntctacgcaacgttcgttattcggtgtattcattattcaatcaattttgttttctttttgtttttctcagaaatattcccaaaaaacctcaactatttgattattttatatatctaactacttatctaataagtaataatgccttaccaaaaaaaaaactacttatctaataatacctatttatttttatttgttcttgtaatatagacaactatttaaaaaaataaaatagtggacaattttgttcgatgtgaaaaacttaatactctttacgcatcctttttagtacatgcataccgccgttatcgtattgctaaaataaattaataagatatattaacacaaagctaactatataattatgatgaaaagac

SEQ ID NO: 13526 - DNA, 448 bp, Arabidopsis thaliana landsberg
  unsure (1)..(448): unsure at all n locations
gtgaggcttgnccgggaccacgantcgaagtgtatggttgagatcttgcgcaaaacattggttccaaagangatgaagatgtaagtcgtgaccggtttacggtctacccctttagagttagaatgctatgctggatccatgaaggnttntttatgtgacatgcttaaangcagntctggtttatgcgganggcanagatgcaagcagntctaaacttgaagaacaaaggcgatcctcgctttagaagaacagantttagtcgcagcnctcgagttttanacgcggcacgtgttctgtttganacctgaatgagtaacaagcgctcggtcgatagttgatgatgnnctgtctatcaaaattgtccnagcttcttgatttgggaatgatctctgcaanagtcttgctgcggcgaagtcacagccaantaatgagtaccctggcgaaagac

SEQ ID NO: 13527 - DNA, 945 bp, Arabidopsis thaliana landsberg
tccattacgtgtactggagtcttctttatttttgtggtgaagaacaacttaattttgtttaggtaatggcaccagtttgtttcattacattgtgagagaaaaacttctgctgacaactttgagaaacaatctagagttaccaattattcaattcgggaataatacttttagcaattgattttgagttcaatttcctctttggacaggaactgcgtcctccattgaagatgttggttcccatttggaaagcattgtgtgctgctatcggtacagaccaccaaagtgaaacgatagctgaagaagaacatgatgtatctagttaactgcagttgtgattagagaacttgtagatttgttacttgttgttggcagttttgtttggaagatgatcacacaatatgttctgtaatgggagaattgacttgacacaaaaaaagaaaaaagaaaaaaaactctttgagtggtgaacatttggatatcatttgtcaatgaacttttcttttgtacatattaaatcgaatgcaaagagtacaatgagttatatcagcttacaaactctctagtgtagtactattaacctataaaagctttacactgtctacgggtactgtaagaaagtagttatttgctgagtaatacaactatacatccaagtagaagatttacagtatgactaaagagtatagcaacctgggaaggctatgatacagctgcaacttttttaacttttagcgttgtctaagcgtgattttgcacgatcaagtgtaatttctctgcgctgtaagccatgccacacttgtcttccactgagctttgctatctgtttgtgcaatgccttcaaatcgacaagaggaactgttgtatgtcgcccatgagcacactgtacacagacttaatgggttaatttgattaaagagatgaattcctttggtaggaattgatgtt

SEQ ID NO: 13528 - DNA, 491 bp, Arabidopsis thaliana landsberg
gtcttataaccaaacacactctcattttcgataagcaacatagctgcttcttctaaatttctctttcctacacaacgccttaaccacaatagcatacgtgtactcatttgcacacaaccctaactgcttaagttgcttaaacaaagtcatcagcataccaattttcccaaactcagtcatacgattcatcaagaaattacacgcctttatatcgacaacacaatccaaccgtttactctgaaacaaaacatcggtagcttcgtcgaacataccaagactaacataagctttaaccaaagcaccagagactcgaatcaaaacaaatgatcgtttcttttcctcagcttgttcaccaataacttcaatcaaatccattacagtgaaaccacgctcctcgttcttaattaggtcaactaaaacagaatctaacttgatgtccaaaccccaagtagtaagaattctgacaagagttgcgtaagcattgacattag

SEQ ID NO: 13529 - DNA, 1068 bp, Arabidopsis thaliana landsberg
tatgttatacgccactagttgagtttccttcgtccccaagagcggaaattcccgagtcaacagacattgaagatgttccattcatgaatctttatcagtcatatgctagtgttcctaaaattgattttgacttggatgcattgaagaaaagtgtagaagatgcacttgtaataagtggcaggatgagcagttctgatgaagaaatatcaaaagcattagtgattcccactcctgaaaatgcatgcattcctatcaaaccacctcggaaaatgaagtattataatcgactaagaactgaacatgtggtgtaagtatctttatgtaaatactcattataccatataatttatatgcattttttgggaatatataatctaatacttgttttttttgcagttatgtgcttcctgataatcatgagctgctacacgatgtaagtatacacatactttaagctacaaaaaaatgcaactcttttgtataattaattagaaaatgcttctggtttttttacatatattatatagtttgagagaagaaaacttgatgatccaagtccttaccttcttgcgatttggcaaccaggtataatacaagcataatttatcattgttcacataactataaactaaatttttcattcgaataatttttaggtgaaacatcatcctcgttcgttccaccaaagaaaaagtgtagttctgatggatcaaagctttgcaagataaagaattgttcgtattgttggactatacgagaacaaaactccaacatttttcgcggaacaattttggtaaacaaaatttacaatttgatattttaacattggtgacttgaaactcacataaattcaattgaccagattccatgtagaacagcaatgcgaggggcttttccacttaatggaacatacttccaaaccaatgaggcaagcattttttcttataattttttgtctgagtttttacttaatggttttaaagagaacacaatggtttatttttccaggtttttgctgatcatgagacaagcttaaaccccattgtctttcgtagagagttgtgtaag

SEQ ID NO: 13530 - DNA, 952 bp, Arabidopsis thaliana landsberg
caaatgactaagaatacaagaaaaacttcgagcatgatgacgatcagtcgtaagaaaacattacttatgtatccaattaatgtagtatccaacgaatgttatgtaagacatagtttcaagggtttaccatttttgcttaagttactaagttcatattttaaacattttctagctaacacccgtttggtagattaagacaatctagtttttgttggaaattaacatcattttaaaggtatttaaatatttaaggagagagatcatatacgtttcacctctcgaattcattttcatctttataatatggtattgtatttactatctatggtttctaaatttttttgaatatttaatcacttcggataagaaacgatcatacattagagtttggtataaaaaaccgtatgcaaatagttcatattgatttggcggttttctcgacatatttacacatataccttagccaaaatggtcttttcattttcaaacaaccttttcttttcaaatcctattaatcctcctacttcttcatcaccatatttgaatcaaaactatctaacttctaatgtaataattgctcaagaaaaatataaatataaacatttcacttttttgcattttattaatataatttaaaccattcatcgacattaaaaaaaaaaagaaaaaactaacacataacgagtttacaaatataatttatcaataaaagtctcatcgtcaatcccaccaaagacgaagaagggttatctccactcaaacatgtgtcatgcaattgaaaacgataaaatttcgtactgggggaataaagagatacgtttttccggcattttttggcacataacttcagctttagacattaagtttttttttggccaaaaaacaaaaataacatcattttttttatttgacgcaaaaaaaaaaaaaaagaccgtcaattctctattttttt

SEQ ID NO: 13531 - DNA, 574 bp, Arabidopsis thaliana landsberg
tcatgttttcttcttctatatgtgtaaaggttgcttgcaatcaatctatatgaagtcctttggaaatttgaattatattcttgactttatagctttcgataattatgtatcctctgacgtgggtcttgtttaaggattgcattacctattttgcatggatcattggaaatgattattctcttatgtagtaggcgaaatccacaaaatttaactcatggcaaacagatgatgctatttgcaaaactccaatggaactagacaaagaaaatgtagaaaataatcgaaacatcaataaaacgtcacgtttcgtatctatgtaataacattttaaacggttgggaagcttattatatactgatcaaactcaagacggcttcatataagctaagggaatttgttcattaccaaattgccagtcataataaataatactgatcaatttgaaatcctgacaaggacattacgaaaaagagaacaggagcgtgcttgcaatgagccccgtccttggccgaccatctttccttaacacgccccgagtctgtcattgatgatgcctcactatataataattact

SEQ ID NO: 13532 - DNA, 639 bp, Arabidopsis thaliana landsberg
acaagattcagtacctaaatcaaaccctaatccggaactaatcaatgaaaccccaaaggtctctctttacgaacaatgcagggaagagaggatcaaagagaatcttcagaggatgaacaatctgggtctcttaaatctctctcgcaaactcaaaccccagacccgacccgttaaaagatcttacggtaaccgtaattctgttcagaatccgactcctcctcttcagccttctcgccgatcttctcggtaatctcttcctttctctgtctccgtttctctcattccatcatattttggggttttggatttgaaagatgagtttgtggaattagggattatgattcgatttgtatcagtttaaaggagagatttttctggaggaattgggtttttgaggcaaaactagggtttaagaatttggattttaaagtaagaatttgggtttattattgattcttttcttctgtgattgttagattggagaacacaactccagttatctacactgatgggatcaatgagaagggcaagaaagcatctaaacgagagagtgttgtgattggtgaagggataagagctgagatttacacagaggaacatgagaagctttttgggatacagaaagaagctggacttgtt

SEQ ID NO: 13533 - DNA, 851 bp, Arabidopsis thaliana landsberg
aaactcgggacttggccacttattaggagtaacctcagtttttatacgttgttaaaaattgtttaaaatttttactttttattttgtgaaagtactttggataaaaggttaattgattgacatttaacacggtttcatgtacggaagaaatgttattaattgataaacacaagagtaaaatattatgaaataaaaatcaacagaaatacaatagttagagtttaacagaacttaattatgcagaaaattcttaaggtaatcaaaattccatctgtttaaatgaatatatttaacacatgtaacaaagctactcgttggaaaaaaacgaaaaaaaaataataataaatattgcaagtgtaatatcttctaaaatatattagcaaaacattatgatttttttgtactgcagattctcccatctatgttgtacagtctcaagtaacctattaattgacgtcgaaacgaataaattatgcacgtagaggtgtaagtttctaattctcaatcatgagattcgtacgtcatatgttatcatttatccacattattgaagtctgaagattttgtgtagcaataattcgaaaagattaaaatgatgggaaagacgaattaataattcacgtagatattatcaacgtagctattgtgtcgtcttcttcttacctactctatatatagagatatagttttatacattcgttataacttgtaattattaactttgctcttaaaaggaattgtgtggagaaagaaaagaaaagaaaagagaaaaaatgataaaaaaagccgcacgagtcctttcattggattcccttcggagatgttatagtcagctccgaccacttggccat

SEQ ID NO: 13534 - DNA, 895 bp, Arabidopsis thaliana landsberg
ttatcgatgattttcctcacaataaggagtatcagtttagcctgttgctgttggtctgattttattagtgagttcctttttctcatgaatgtttgttccctcattctgattctgattcagctctctactgcaacctttttactcttggcatcttgataataaaggtttagtatttgtttgtctacaggatctagtatttcttcttctaacctccgcgagagacccagggataataccacgtaatctgtatcctcctgaaccagagagtaatgaaggcaatggagaaccacgtcttgctcatactcctcagagtcggttgcctcggacaaaggatatgattgtaaatggaattactgtcaagatcaaatactgtgacacatgcatgctttacagaccgccccgtgcttctcattgttcgatctgcaacaactgcgtcgagaagtttgatcaccactgtccttggcttggtcagtgcattggattggtaatggatattttttttcctcatcaaaaaccaattacaattgcatatacctagacgattcaagagtaactaacagttatttgggggttttgattgcagagaaactataggttctacttcatgtttgtgttgtgctcaactcttctctgcatttatgtccatgtgttctgctggatctacgtcaagcggataatggatagtgagaacataaacatctggaaatcgtttctcaagactcctgcttccattgcactgataatctacactttcatttgcgtctggtttgttggtgggcttacctgtttccacttggacctaatgagtaccaatcaggtaaaaatcattactctctaaaagctccttgttttgaaactgttggataatttagctacttgttaacattgtttctct

SEQ ID NO: 13535 - DNA, 1171 bp, Arabidopsis thaliana landsberg
  unsure (1)..(1171): unsure at all n locations
ctcagaagagtcaaaggcggttcccgagtagatctcatcgctaaccatatggattttcttggttgatgtgaaggtcagaagaagatcaagctcttcacgggtggtagaggttccaagtgggtttgaagggttggttatgagaactcctttaacatttaggttatgtttgagagctcgttagtaggcatcttctaatgcatcctcggttatcttgtacccatttgagcttacgcaatggataggaacaatctctactcctgtcctccatttgagatctctatcaaaccttcatgatgacaaaaaacaaaaaacaaatttagtctctcttgtaaataacactaacatattcaaaaacgttagtgtaaaaaaatacacgtaccctggataataaggtgcagggataagaaaggcatctcctggattagcaagacagaacattagagtctcgttagccgaggttgatccagctgtaagaaccatcttgttcgtatcgaatttcactttgttctctctgattttccccatgaacttcgccatggcctgttgtgtaaaaccatagaatatttagtatcatagtttgactctactcctataatgtttactctcttttaatatatccgaaaaaccgaatccaaaaagaataataataataaataaataaaaataaccacacgcgaattttcgatcttttgaattcgaaatatcaaaaccctatcgattatttgtttcggttaaagttaaactaaactgaaactttgtttaaacactcccaatatgttacttacatccttgaaagctggcaagccatggtaatcttggaacagagctaattgtctaaacaccgactcatcatttttcttcaaacccaagacttctggatgctcttcaagccatttctctattaggtcaaaagaaagctgcaaaaagaacggaaacaacaaccgataaacaaaagtttggaaattgtgtacatactagttttgttctctatgagttaaaatagttagtagattcattgatacaaacctggttttcagcaagacccatttgaacaatcccactagtgttaaacgactcgtggaaaggattcttctcgtattcttgccatccaaggaagtaggatgagtcttgncatgagagtcgcaacaacttgcttgcaacatttttttaa

SEQ ID NO: 13536 - DNA, 524 bp, Arabidopsis thaliana landsberg
cttcaccaaatcggtgcacatatccatatgcaatatcttgagattagtggcatttccaatagaggaaggcaactccaccagacttgagcatccatagaggttcaaccatgagagattaatggcattaccgaaacatgaggggagctctactatacttttacattcagcaaggttcaatgtttggagactaagcgcactcccgatagaggaggggagctccaccaaacttatgcagtcaatgagaaacaattcttgaagtttagtggcggttgagagattaggtagctcctttaggttttttgagtaactcaaattcatccacttgaggttttcgagcggctgtacaatcaaacaaaggaaacataaataaacacattcattcgtaaagaaagattaaaaaaataaacttccaaaccactaagcttaaaatttaaataaaaacagagtattcagcccactcatatttaaagcctaaaagatgtaagaaaacaaacatattataaaagcggcccaaacaaaatcaa

SEQ ID NO: 13537 - DNA, 432 bp, Arabidopsis thaliana landsberg
  unsure (1)..(432): unsure at all n locations
tgagcttcgtncaatccaaaaaccttatcgaagtggtggtagttgcgcatggtattgtcttatcaacagcgtatactgcngcagcagcagcccattcgttcataagatttcnacgttcgagacacatggtgantgtacaaggtttntccaacgaanngttgctgaaggagactgcaatgtgccgttgaattcacaacaagcttcttacttnttacaagattattngcacacacctntggagatgtcgctnttcttngcttcctntttgtctnaaaancaaaactgnaagaagaagagagacgacatacgcagaagagcgagagagagagaaatgtanagttatgggatccacggctagatatgggacgtgagagaanacgactgttgaagttacnggtcagatctacggagantaaacgcggcagaggccag

SEQ ID NO: 13538 - DNA, 471 bp, Arabidopsis thaliana landsberg
  unsure (1)..(471): unsure at all n locations
ggaatctaacttctgttaacgatacgttttatctgcactcttcatcatagtactagtaatcacatatagacgagcgactctacagctcgattcgcagcatgaggacgagaagaagtaacaagaaaaaattcacctggagcaataccaatagcaggaggataagtcaagttacctctggtcatgagaagaagagcacgggttggtgctccttgtcgaaacgaaagtacgaaagaagctttattacgtgtagtcactacctgctcttttactactcctctgtgtactaatactctatcttcatcgtctactcaacaacgactcgtgattactctgcaataatcaattgatacgcgggaacatgacgcaantgtgagaagtacgtgacaacaagcgtncttagtgctgcgagagaggagactgtcgtatcctctttataaaggctaactctccatttctgccgctgaccagttt

SEQ ID NO: 13539 - DNA, 550 bp, Arabidopsis thaliana landsberg
cacacaacctcaattcccaatgaaagttccaaaaaaaaaggatttaatatgtctttttttttttgtttggacaaagatttaatacgtcctaagatgatgattcattcaagaagttgagaagaaacagcagaagattgagaccagagcctttgattaaactccagttgaagatgatcaggtataaactgtgtacgacaaagtggacacgtcatctgattataacccatcatccaacggtccaaacatccccgatgaaatatatgtcgacaattcgtcagccgtcggatctcgtcgtcgttctcgaaatcgtagagacacactgcgcaacactcggattccggtcggtttatatccgagaatcgaacaaccggtaacatctctccggctagtattgctgctgagtcaggtttggtcaacgtgggtggtgggtcgggccatgaggttgaaaccggttcaggttctaagaaatctggtagaccaatgatcttgaacattgtggagatgagtttacgtatcaaacctaagaaagataacaagtagaaaaagattt

SEQ ID NO: 13540 - DNA, 731 bp, Arabidopsis thaliana landsberg
ttgtacctcactttagaagagcttccattatagtgttcttggtcgggacaatgatgtatctgacgacaatcgttatggcttcctttggaattcttgtgttctatatagataatgatgcaggaaaagacattggtttccaactgccatgttaagacatcaaatctttggatcttaaacaccaaacaaggtcatcggtttcttctttttcttgtttttgcttcactatgatgctctgaattggcttctatgtaagaggcagatttggagcaagatggcattgtgatgtttatatgttttgtaaatgtaagtaatttggggaagtaactatatttaagaccttgactggaaactgtgttgcagttgagaaactgctagtgttttataaagttctgtaaggaaatgaaccaactctgatttcttttagaagaacaattggataataagacacttcctgtctgaaaaaatacatttaaacattgaatagcagaggattatgtttctcatacaacatagagaaagccacattgctaagacagcaagctgctctactatcataaagatccggaaaaaatgttagtaatgagtttaagaggttacaagataagagattgatgtgtcaaaacccacaagagaagagttgtgaatcaataattggcagatcttctgaacatttttagccaaagcttaagcgagagtcaaggagcttcgttgaagtttgtcgcctaggtatc

SEQ ID NO: 13541 - DNA, 1111 bp, Arabidopsis thaliana landsberg
  unsure (1)..(1111): unsure at all n locations
tggagcctgatcataataactggtgattacgaactgtgaagcatgtctcccgaagttggttcctccatgatactaaaataagatacaatgtcaaatcatcattattcttgcttctcttatacattagagatttttttagtgagactggaaaaggtaccatgtagtagtttacaaagcttccattcttagcgatgaaaagagcaacatgaaacgctatatcctcagctgaccttatcaatggttcctcaccatatgtttgataactatacaaaggggtcagctgaaagttagtagtttatatctggggattgggaagtacacaataatgtagtgaatttgagtgaagaccatacaaactcgtccagttctcagtccatattgcaggtttgttgggtgaattgggtcctttgaatgtttctccacattgcctcccattgcaagcattaacctgaggcaccatagaaacaataagaaaactaaaaaaaaacggattcagaagtggaaaattggcagatgagccacattgcaggacaaacataaaaaccaaccaaaggatcaggggcatcatcttgcttgcacataacccatggcactcctgtgtcaagctcaacagccaattttgctgtccatttgacatatgatttcccttcttgtcgaaaagctctaccaaccatcccatactcgttctcaatctgttttgcacataactttaagatcattaaaaaaaaaaaaaaacttcgaaggaaacatacatgaaaaaccataatgtaaacctgtgagagtatgataggtcctccttgggaagcatacaagttttccgatttcatcagcttaacaatcattttcgcatatctcttcatgtgatactgcaaataaaacgtaatcttctttagaccatagaagtaaggaagccatctgagttcagtaaattaattaccttgaatggctcattatctgtcctgaagacaatcccttggacattatgcaaccagaaaggcaaacccttgcaatgtgttattgaaaaccctaaaattccacgaacattgtgtnttaccatatcggaaaatctcaacgatctaaagaccggaagagtctacccatangaccattc

SEQ ID NO: 13542 - DNA, 850 bp, Arabidopsis thaliana landsberg
gttgagaagaccatacaatatctaattggttctggtatggtaagtatttcacatttatcgtgacaattgatcttattatttatttggttacattattttatttttttttgacaacgttacgctttaggattcgaaatttgagaacaatccatacaatggattcatctacacatcattccaagagcgagcaacattcatctctcacggcaacacggctaggctagccacaacatacggcgatgttaccctcgcgaagatctgcggcacaatcgctgccgacgagaagcgacacgagacggcgtacacgaagatagtggagaagctattcgagatcgaccctgacggatctgttcaggcgttagcgagtatgatgaagaaacggatcacaatgccggctcatcttatgcacgacggaagagataacgatttgtttgatcattacgccgccgtggcgcagcggattggagtttacacggcggcggattacgctgggatacttgagtttctgttgcggcggtggaaggtggagagtttgggattggggttatcaggggaaggaaggagagcacaggaatacttgtgcacattgccgcagaggatcaagaggttagaggaaagagctaatgatagggtcaaacttgtgtcaaaaccttctgtttcgtttagctgggtttttggtagagatgtgaaactatagatagatatttaaaataacaaacaaacaaaaaaaacccaaacaaacataaataaataaattatgtttgtgatcaggttgcaagttgtcacttgtgaatgtgagtaaccaaactatatagtattattgtaataatgttatatggacatcttacaa

SEQ ID NO: 13543 - DNA, 610 bp, Arabidopsis thaliana landsberg
actattacataatttattctaagccatccaatgcatgcctttggaatcaacatttgatccaccaaaatttagcgaccgcacttgtaagcttataagtcatggtttttggtagcctaaaacaagacataacataaggttgtaatgctgcacgtaccgattcaatcatcacttctttcccatcctttgataaaaatttggccgaccgtccattaattctagtctgtaatctatctataacaaaagaaaatatttgttagcttagatccacctagaccctctggtaatcctagataagaacccataccaccaatggtgttaatacccaatgtatatttgatttctaccttaatagaatcatcaatcttatggccaaactgtaccgacgattttgaaatatttatttgttgccctgagacggcttcatattgctttaaaatctccaaaattacactacattgttctttgttaactttacaaaaaataaattatcatccgcaaataaaaaatgtgacaccgacgggcttgctattgctattttaagacccgttatcagttttgccccgttctgcctttcgtatattcacaataagtacctttgtgcatagaataa

SEQ ID NO: 13544 - DNA, 778 bp, Arabidopsis thaliana landsberg
agttatatcagctgagattgggtagttggagattccccatggtaacgcccatttctctctctccaaactgcgtggattgtagcttggaagacatatctgattaaaaaaccatcgacttggttcagcgagttatcagagatataagccaaaatctgtggccataccgtagtgaatctggaacgccataacttcttagctacctcaacccaaattattgaaacataagtacaggagaagaacaaatgatccctagtttccatagtgttcgtgcagaagacacaaacccccgacgctcctctattacatttaaccatgcgttcccctgttgaaagcctatcatgaaccgcaagccaagtacaaaacgagtacttaggagtagcgtgattgaaccatacccctctaagccatggaactatgggagagagagctctgatatggctccatgtatgtttggtagagaaagaagttgtgtacgcatcatttttacctttccacttagctatatcatcaacgtccgttctgttctgcagagagattaacatctccttttcgatttcatttaggtgatctagacgatgtcttcttggttgtctttcagtccaagcctctgccaacgttgcctctttactaattcccatatcaataacacccctctcacctgcaacatccattaatctgccaagagccgaccagtcataaaaccaaaaagaaattagcgtccattccccaactccattttactaaacgtttgagccttgtctctgtactttagattttt

SEQ ID NO: 13545 - DNA, 401 bp, Arabidopsis thaliana landsberg
ctttcactgttgttctgtcaaagtaccaatcaccaacagattcagcaacggtctgcacaaacatcatggagcaagcaaacaaatttttagtagcttgtaacgaaatagaaaccattttacgagctgtgggggataaaagtttaccttgccatgaagagtaggagaatctggtgcataccaagtgtcctgtctttcagattggcagtgagcgaagcatgagtttatgaacacaccgttatgtgtcgatgtcgcgaaagactttacagcatctaccatatgagtcctgaagtctatttttgacataagataagggtaacaaccacatcgatgatatagtatagaaaatgtgggatagtgttaaaaaaataactcaccttggaagaactggatctgagatgaat

SEQ ID NO: 13546 - DNA, 204 bp, Arabidopsis thaliana landsberg
tgtgagatagaaaccatgtgagatagaaaaattgtggctaaagtccaaaagaggtgtcaaatactattgtagccttgtgttttaaaaacataaatttcgtctgggttcgaaaaaacaaagactaatgggtttaaaaacaaattcgaggcccatttactctattttgtttttagtgtagcccaattttgtagccgaatgaaacat

SEQ ID NO: 13547 - DNA, 776 bp, Arabidopsis thaliana landsberg
ctctcttagttctgagattcaaatgttggtccatttacactgtgaacaactgaacataaatctccattttgttgcagcccacagaacaaaacacttatgctgatatcgaggctgcttacaaatgtctggaagagaattatggggctaagcaggagaacattattctctatggtcaatctgttggtagtggtccaaccgtggacctagctgctcgtttgcctcgactaagagcttccattcttcatagtccaattctttctgggcttagagttatgtatcccgttaagcgaacttattggtttgacatatacaaggtgaacataatacccttttgatttctctacatgatgttgctgataaacattcctccttcttgacaccgttttgtttgatcttcttcagaacattgacaaaattacgctggtgaggtgtcctgtcctcgtgattcatgtaagtttccgtgatcaaagattattgattggaagaattgaagttaataaagttgaacagatttgcaagatccgttcattcttgtatgaatccttgtctaataatcctcagtgttagcttaaaggtgaaagcttttcgatttgcagggaacagcggatgatgtggttgacttctctcatgggaagcagctttgggaactctgccaagagaaatatgaaccgctatggctcaaaggtggaaaccattgtgatcttgaactctttcccgaatacataggccatctcaagaagtttgtgagcgctgtggagaaatctgcatcgaaaaga

SEQ ID NO: 13548 - DNA, 824 bp, Arabidopsis thaliana landsberg
tttaattacgtacatatatagtatttttattatcaaaacttagaatttatttcgtaagaaaaagaaaattggaagcattaatggctcgggcgtatggagaagatgggctgtttggaccaaacatagtaatgtatgcatagttgcatacacattattatacaaacaaattattactagtaaatcgtcgaccatagagaggaataaataagacgaaaaagaaagagtgttaagaaaaaaaaatgaatgtataatagagatggggcatagaagaaggtatccatgtgaaggcagcatattcagatgggctcgccagctttcatttatctttttttgggggtcatttgttttaataataagaagaagaataatttattctttattctgatatttattgcaatagttacatttttctataaatatcttaacttgcagttgtagtcatctccaaccttttgtccaataacaaaattatcaactttatattattattttttaattccagctgaagaatccatcaaactcatataaatttgatttaactggtaacaaatgaacaattttatatttcttgcaatattattaggtgttaatttgtgaaagtataatttttgatacaataagtacaactgcgttaccacatctgacatgttaaatcgaatcttagaatcttatatatagataagtctctctttttttgatggtaacgcgtgtattataaatattcaaacacaggtagcttaaagttgaaaacaaatctatacacaataaaattcatggtacatgaaaagaggaaaaatgttcgttaacttctttttctgatgcat

SEQ ID NO: 13549 - DNA, 819 bp, Arabidopsis thaliana landsberg
ttcacatcacctttctcttgtcctttcccttgagaaattgtcacatcttctcccaaaattcttgacgatgataatgccaatggcagaagattttctatcaatcccacattccctctttggaaataatcatggtagctcaataacctaataaccaaaatcacattaaaattcaaacattttgtaaatataattgttcttgacttcttggcttaacgagaatagtcaaataccttttctctgtccatccttgcatagaggccaatgttgagtttaatagtttcacataaattgcttcgcggtcaagcttcttagcgtcattagcaacttcagctaacatagcatgagaagcgccgagcaagtccggttccatttgtgatgtcacgacgtactgatgaaacaaaacccaagtgaaacacagattatgtatcggtcgtgtgatccctagtgttgaccaagtcttcttcattagctctagaagctcatcgatctcatcgagcaccaatgtctcgtctctcacatcgaatatcgactgcaacaaagcaacgtaaagatgaatgttgagcgggtaaccgtcagcccagtgacaaacatcagttgggtttccattagtgccacgccaagataaagacacgaccacgttggtgagtgttctcatcgtgtctgaggttttgcttgtgtcaatgggttttgtctcgctttgtctgacaacttctcttagacgcattgcaaagttgttggttttgtctagaggaatcgatggatgaagaagaagaccaacttcaagaactttgagttgccttttttgccaagctggtactc

SEQ ID NO: 13550 - DNA, 955 bp, Arabidopsis thaliana landsberg
tacttgaaaatataggatcaacattcatatcatgggcaagaccttgagctactttcaaagaagcactaaacccttcatctctatactttttaaaatataagattataccttcgaaatgttttacagcactatcaatgcatatagatttggattgtaaactcttgcttaccttgtttatgacaaacaaaatttcataccatatagtcataccaagtaaaaactcataattctcaagtgaattcactaaactttccgtttcacttttgttatggcatcaccacatgattcatatagatcaattaaagctaatctcacttgaggagcttgaaacctaatagctttgacactttttattcgactttcccatcgaatataagaaaatgatttcatagttaagtaaggaacatgatcaagcaaaattttccacctttttgtagagctagaaaataatacatatattattcgttgcaatgctccaaaaaagaaatagctttcacacaagaatgagccatatcacttactaaaagatttagactatgacaagcacaaggcatatataatgcttttgagttaatgtcaagcaatctcttttaaccctttgatgctttcctttcatattagactcattatcataactttgatctctcacatttctaacatcaagatctagagattttagcgcataaattattctttcaaaaagacctaatccggatgtatcatctacgagaagaaactctaaaaagtattcttctactttcacttttctatctaccattcttacacatcatactattaaagtcatttgttcttgcttacatccgggatacaatcaagaatgattgagaaatattttggcctcttttatgacattcttaatagaaaattgaactttatgagccaaaagagatatcaattcattttgaatattatgacccaatataatggatgatgt

SEQ ID NO: 13551 - DNA, 631 bp, Arabidopsis thaliana landsberg
tgtcgaccaaactcagtatatttcttttttgcctgattttgttctctgtctcaccatgggggggagactgtagaactctttcagggaaacatgagcattactcttcatcccttaacatgtttaattcccaagatacgatgcgtttcagttctgcttcttcttcaacaagcaacgattgcggtttctcctccaaggaacatgatccttccaaggaacataccagagaatcggtgaagcctcaatcaaggattaaacaagaaacaaagagaacaacacattcagttgttgatcttcaaatccaagacctcacaagaattcagacgcttcatgctcggttcaacaaatcgaagaaacagaaaaacgagaaggttaggaagaagattacctcggatatttctttggtgggagctccagaggtttcaccggggaagctgatagcaacacttgagtctggtatgacgctcggttctggtgaatacttcatggacgtgcttgtgggcacaccatccaaaacacttctcattgattcttgacacagggagtgacttaaactggctccaatgccttccttgctacgactgtttccatcaaaacggtatgttttatgatccaaaaacgtccgcttcattca

SEQ ID NO: 13552 - DNA, 745 bp, Arabidopsis thaliana landsberg
caatgtaattattaaatttaacattttactgtttaaatttatatataattttaaaaggatagggatctcaatgggcggcttagcttatggtgttatataagcaaagaacttggcatcaagcgaaaccaaaagcgacagaaaaaaacaaatatttagaaacaaaaaatgctataattcttcctttttcttgttctttcagagattttgatttctattcaatcgactaagagggtgtgtttttaatccctctctgttttaattttgtttcctagtctttaaagatccatggcagccatagatatgttcaatagcaacacagatccttttcaggaagagctcatgaaagcacttcaaccttataccaccaacattgattcttcttctcctacgtattcaaacacagtcttcggtttcaatcaaaccacatctctcggtctaaaccagctcacaccttaccaaatccaccaaatccaaaaccagcttaaccagagacgtaacataatctctccaaatctagccccaaagccagtcccaatgaagaacatgaccgctcagaaactctatagaggagttagacaaaggcactggggaaaatgggtagctgagatccgtttacccaagaaccggacccgactctggcttggaactttcgacacagctgaagaagcagccatggcttatgacctagctgcttacaagctaagaggcgagttcgcgagacttattttcccacattcagacacga

SEQ ID NO: 13553 - DNA, 324 bp, Arabidopsis thaliana landsberg
ccacaagctctaaaagctaaaccccaaccgttcatcgaacccgcttgctcaggcaagttcccaactttattccaaacacgtttctctttatcataccttctaaccgccataccagcatgatcagctgcataaagctggtcattcacaaccgctacaagcggtggagccatcgcagctgcagacattccgttcccctggttagaccgcggtggtgacatctcagggatctctgtccatttcctagtcttcaaatcaaactcttccccacaagtcaaaacctttggctcattctcttccccaacaccattcccaccattgacttaa

SEQ ID NO: 13554 - DNA, 551 bp, Arabidopsis thaliana landsberg
taaaaccgctaaggtaacattaatatatatcatagttcttctctgtttttgttgtgacatgatgtttttttttaagaagcaaagccaaaggtaatatgttttcttgtgttgtttgtggatgcagaacgaatgtgttatcagtcgtgtttttcataaacggacggatggtacgaaggtgcatatgtccggttgtttacctacgctgatggattcttcttcatatctaaagagtagaggacaagactctttagccggaaccacccttggtgggttgttgtctcacgtgacctacttctccgaccaaacaaccgacgacaagagtcttgtggacgagtttaaagatgattttaaaagtaccaggttcggttctgcatcgactaacttgataccaaacgttggttctctgatagactatagtcctctgtttctgcaagacaattcttcaatactgaaaatgttgcttgacaatgaagaaatccaatttaagaagaatcttcagaattctggttcatcggagagggaactaacaacgagttcttgggcaggtcaca

SEQ ID NO: 13555 - DNA, 1101 bp, Arabidopsis thaliana landsberg
agacatattgtagttgagacactgcccaagtccttcaggaggtccttgcctagctaatccaaaatccgatagtttttgcaccgaatttctcatcaagcaagatgtttgaagacttgaaatctcgaaatatcaactaaaagatcaacagaagcaaattcaaaaccaaaacacaaaacactcttaaatcatataaatggcaatgaaatgcttaacctgaaaatccatttcttcatgaagataagctaagccttgagcagcatcttgcgcaatcttcaacctcatcatccacggtagagataccgacacaactcggcctacgagatgatcctccaagctcttattacacataagttcatagactagaagcctttgcatccctctttcatcatcatcagcacaatacccaactaacttcacaagatttggatgattcactactcctagaaaattcacctcattgatccattccttatgcccctgaacactagaacaaagccacacacacaaaccaatcacaacacataattcaaaattcaatcacaaaccataaagtaaagtttctccttttaagttcaaatttggtagtagctcactaaacttgaaactttaacagagtcatacacacacataacaacagacccacttcgacagatcaatcacaaaccacaaagtaaagtttcttgaaccaaactggctcaaagttgaaacattttcgagactaattgaaagcagaacagagtaaacaaaaaaagattagagtcatgcctgtaaaccttgacgattaagctgtttaacagcaacattaatcttcgaatcaaaaccattagagtctgaaacatcaacaacacctctataaacgcaaccaaaccctccttcgccaatcaaaagacctctattgaaacctttagtagctattttcagctctttgaaagtaaacacctttagatcattctcaggaacaagtccaccgatccaacgttgacttaatggcttgggaaaagtaagtctttccggtgagaaactccagtctgagtcaaactcggaccggcgagttgggtctgaagtggtggatgatgctacgcttagagaacgagcccatga

SEQ ID NO: 13556 - DNA, 593 bp, Arabidopsis thaliana landsberg
gaaatgttcatggaaaatttaacttgcatgtgttcaaaagtcagaacacttccatgtctcctttattgatttctatcaatttcaaaatcaccttgcattctctttgccatgaaccagcagctccaggcacagccaaaccaacataacctctattggctgcaatgaaatctttatctacataccttaaaatcataaataaaccatcacttagttattatatagtgtaataacaaccacaagatgtgaaatatttgtggtatttaagtactaacattaaaaccaacggggttcacttagtaatttacctgtcttgaacgaggagtctgccaacaacattaccacgttgttctgttttcacataatcatccgaagctggaaaactgtaaggccagctctctgcttccgcattcatctgagaaagtaaaatatatcaaaggaatggaataatgtttgatttgtcttctaactatataaaacaagactctaagatgaacctgagatttagcatcttgccacagccaaagagggtcattatcatcatcagtagacgagtttaaatagacaaaaacaggtccaaacaccttctttcatgc

SEQ ID NO: 13557 - DNA, 775 bp, Arabidopsis thaliana landsberg
agaataccaacaaacatataatcaataaagtgataaattacctttaaaatttgtagaattatcggtagggttttcggcaatgtgtttcaaaaataagattccatacctgagaaacaacaaatttaacaagtgtcaatgaacaactgttggtttttgtaaagcagctgaaaataagagcataaatggctttaagtcgtcaatacttatttatctcgtcataggtcttcatgtataagggattaacaaactccttccaatcaaagtttccagctccatacctacaaaagttgttttgagacacttatgatatactatgatgctttgagagacgccaaaccacaatttagacaacattattagaaagaagatatacctcttaaacgtacgtaaaaatatatccctctcagtctcgttaaatcccagcaccatgagatatctcccttcgccttccatcaaaggtatttcctccgaattatcttacagcaaaatagattttcaaagttacttaacttgtaaacctctgaaaccaacaagatgtcatcttcaatgcaatatttggaaaagtatagtaccgcgagccctttttctgtaaggccttgtaaccgatctcggctttctctgacgagctgcttcgggttcatctgcttcctcctcctcatcagaggtcacttttaaatcatcaagacaatattcgtcctcctcatcagagatttcttctaaaccatcacgatcatcttcagcatacatcacctagtaatattaacaaaagcaggaa

SEQ ID NO: 13558 - DNA, 667 bp, Arabidopsis thaliana landsberg
gatcaagcattaatccattattattgttaccggtgacagtcttagtggcggtctcctccacattggtggtggttgcagtggaagcaagtaggttaaggtgatgattatcttgatgttctggtccttggtcatagagaatgcctttgaagatatggcctccaatgttcacagccgtttggtaagcatatgcttgatcatcttcatcctcttctattgagctcactctaacgcaccggaatatcgccggtgagttaacctccggtggtaagtgttgactcacctccaaccctaatttttttattaatgattataagatcaccaaaatataaacatgagatttgtttttatccccttttagtataacatgttgttgattataaagcgtagctcccatttcatatctacaaaaacgaatctttattgcattgtttttacatgaaatcgatcttggttagatccttttatgtcgtcaggtttactaaggaacagtaacttgtataaataaagcagcaatatccggcggacatcctcattcacacgcaaatgatgttgtacttctccacaaacattcataattaaaactttgacactttttcatgaaaatttaatcaatcttgaaagctaattcaatatcatcaagaattgtaccttgattagaattagcatt

SEQ ID NO: 13559 - DNA, 1099 bp, Arabidopsis thaliana landsberg
gcaatagtatggtgaaatcgtggattcttaaaccaacaaggattctttgattcatgttctctatcaataaccggtttaggggaggtgaagagttaactacagtattgtttttgtgttatactgcaaatacagtaccactgtcattgatacaatacccgtcgctgaaggtcaaagcataaaagagcgatgcaaaagaacccgagacgtcgtcacttttgttcaagagatatttgcagaccggttcagctgcatataccctctcaacttttccggtttgaccgttctcttctattacagtacggcattttaagaccgaatggctgacgagaaatcgaagcatacggtctagcaaagccggagcttccaggttgcatggtttggttgggagtcttagtgctatttcagaaggtgagagccacaaatcgccacctcctactgtggtgatggtgtcgatcacgccgagctccaaggcggctttgagaaccataggtaatgcggctgcattcgcgatccttctcgctagcaatcttgcctcttcttcaacctcttgttcttctttaactcgatccggtttggttaaggggacttggagatggtttgccattgttcttgtttgaaaaaataatattagaggagtgatgctaaatatgaggataggtttcaactttcatactttgtgccattttatagagtcatatctcaatatagtgttacatacatttgattagctgaccccaagatttgatatacatccaacattaggtctttcttttctcttcaacacactatgtctactgttttttttatttgttatggtggccatgcaagaacatgttcgttcaattagccagtttcattaaagttatatttaggtaaacatattagcaaaacatcaattgtagagactaggtgaacaaaatcgaccgcaccctaatcgttagaaaacatcaaaactaagtattcttacataatatagtagatgtcgattcaaagaaaatcatttcctaaaagcaaaaagaattacaagaagtgaagatgctaaatttagcacaaaggaactagtctacaacggaatttgcttgtctcgtggtcaaaaccg

SEQ ID NO: 13560 - DNA, 588 bp, Arabidopsis thaliana landsberg
aaagcaacgtactatctcaacactaaatataattaagaaacaataaccgactccaataatcaacgaaactatcttaacgtacgaaactattcatatatatactcttacgacctttaataaccacacctaggcggaatattccatttagtctcggacacggtcgtgtttagtgacacatatcgtttccaatcttcgagagctgccttaagattattcactttgttgtccaagccaatacaacaattagcatgcattgtgttgaccacattgatgtctcggctcggctgacaaaaccctccaaagtaaacggtatcgaaaaacctcatctttatcccaagtttctcgacgtgaagatcgttttttatgaagttgaacacatcttgatcgtgttttccaggaaatttccgactcgatctaatccaatatttgtaaaattttgaagttttgttgtttgccttgacgtatgtaaatccggagttcacgtgattctttttgtccgatggtcttccattgtaatcatcgcatgttatttgaaaatcagcatccggaaaaaaacgaggaaatgggtctcgaagccataatatatct

SEQ ID NO: 13561 - DNA, 939 bp, Arabidopsis thaliana landsberg
tatgatgttgtctagaaaaggaccagctgatttgaaaaggaatgtctcttctgcacaagcgaagagggaagcggcgattgtgcgttcggggttgagtaaagaagagggtttggaagagattgataagcttcagaaagggatcttggcgttgcagacagagaaggagtttgtgaggagctcatatgaagagtcttatgagagatattgggatttggagaatgaagtgactgagatgcagaagagtgtttgtaacttacaagatgagtttggtcttggtgcttctattgatgatagcgatgctaggacgttgatggcgagtaccgctttgagttcttgtaaggacacacttgctaagcttgaggagaaacagaagatatctgttgaagaagccgagattgagaaaggaaggattactactgcgaaagaaaggttttatgcattgaggaacaagtttgagaaaccggagagtgatgttcttgatgatgttattaggacagacgatgaagaagagaaagaggctgatgtggttcaagaatcgagctatgaatctgagagggaagattcaaatgagaatcttactgttgtgaagcttgcggagaagattgatgatcttgtgcatagggttgtttcattggagactaatgcttcgtctcatactgcattggtgaaaacattaagatcagagacagacgagttacatgaacatattcgtggtctagaggaggacaaagcagctcttgtttcggatgccacggttatgaaacagaggataacggttcttgaagacgagctgagaaatgttagaaaactatttcagaaagtggaagatcaaaacaagaatctacagaaccaattcaaggtagctaatacgactgttgatgatttatctggcaagatacaagatgtgaagatggatgaagatgttgaaggagctggaat

SEQ ID NO: 13562 - DNA, 896 bp, Arabidopsis thaliana landsberg
gcatatcacatttactggtctgaaaactctctcccttctcatctctcagacccataaacacagttaagagatccgatctttttgtagtttcgccctcaagagacagttctttcttcctcgtcctgataacttcatcagcgaaatcatccacaccctttattgattccttaagcttcttctctgttcctatatcaagatacctcatgaacttccacacgcaagtaggcatgacgaatctcacaaccgcagcttcagtcgcatcctcaaaggctttcgcaaaaggaatcactggttgatctggaccgagacatcctggatcgactccaaaagcaatcatacatacgttatcaaacgttagcctcaacaagacgtcttgtagatcgataggagatgagctcttaaccgatgtctcaagaacaggtaagagcctcttgtgcacgagctcaaacaaagattgagtggttaattgtctgaatttggctgaatgaaactcaatgctcgctgttttcctctgcctctgccaagtttcatcatccgcgttgaatattccatctcctaggaggtctcggagattgtctcgaaagtaagaacctttagggaagacagaaaaccggttcttaaggagatgctcaacgtttcttgggtcacaagtgatagtgctgttgaggctgctaaaccagggacctctgaattggaaagttccgttctggagacatagaacatcggatagccactcgtatatgtttcctctgaggccaaaagctagagaaggaagcatcccaagaaacggccacacgggaagaccttggtatttcttctgacgcaaggcatgtattgcgacaaagacgaacattggcataaggagctcaagaatctgaacatctctcaagagaaac

SEQ ID NO: 13563 - DNA, 824 bp, Arabidopsis thaliana landsberg
  unsure (1)..(824): unsure at all n locations
ttctatttgtggacaggtagtagaaagaagaatacatgagcatgagagaattctgagaatgaattcaagagactatggccactccagtcctaaaccaaagctcgtgagacctcctttcaagcttattcccaactgatcatgcatatcaccgatcgactatatatagatgccagactttctgagatgtataatatatgtaaacctaaatactaacactgcaataagtttgaatgataatcatatatataagtttcaagatatgttttctagtaaattaatgattagatagtgctctttgctatcatgcagaatgtaaatttggtgaatagtcatcattagatgaatattacaatttatctgatagaatccttatgatcaaaattaatattgaaatattcgattaattctgaaaacggatacagattgtatatgtgccagacaaaaaaaaagagaagagaattgggaacgttgcagtttcgtagatgtgataagataataagtctacagtgtaatgtccatctcttgcagatctcaaattgcatttaccatattctgtttggtcccaatgacctaacctcacttatattcttgtacaaaagaatgtttactttatacaaatatttctaaaactttttcttctgaccaactttcttccactacagaattgagactgatcataagttcatcacacctatgctntattcctctccattgcttacttcttcaagctacaaaatcatgtaccaattgtgaagactntatccggttcttgcgactttccgggtttacatactccatttcatctnccgggatggcattctcgt

SEQ ID NO: 13564 - DNA, 698 bp, Arabidopsis thaliana landsberg
tgaaatatattattgaaatattttaactttataaacattaataatatttaaacttataaaaagtaatatttcatgaaagttatatggtgggacgggtttggatcgatattaatacatatttataatatcatcaactaaaagtaataacacggtttaaatcttattttaatattttatcagcattagttttttttattgtacttatataaaattattaactttaatacaaaaaagatcgtaaaagctaacattattgcctatactaataaaaacaatttgcccgtcgtaccacatattaaattcaaaaaatacaaaataataggttatataataatgttaatcaattaagtatattacattttgattttttctaaaaattatagccccgcggtgtactgcgggttaaaatctagtatatatatattatactattctttacctaatactcacaatattgttttatagtcttccaaaacatgtatgtattagttacaagtactattaacccatgacaagcttcttcaggaaatgaacaaaaacttacaagtctgaattctcataaggtttttacgaggcccgattatggaggcccaattagtaagagacttcatacacaatgccaatcaaagaaatgactagttgtcccattcgttatgttatataaccaaagatgctatgatgactgcgtgtctgaatga

SEQ ID NO: 13565 - DNA, 506 bp, Arabidopsis thaliana landsberg
gcacactggctaaattcgtcttcattgccgaacttaccgagttcatatcccggcaacggaagacttttttattttgagttttgtaattgttctttttggttttgtatttcattgcttaatagaaggtgtgttcaaagcctaataatggtaaaatatgtttcatacttggtggaagtaagtaactttaatgaaaaagactctttaacctattatcaaaggaaacaatttttttcttttaaattttgtaattatccctttcgatgatgtatatattaataaatatttatattttaacaaaaatttcgttgtagcacactagctaaattcgtctttattgccaaatttaccgggctcaaagcctggcaactgaagacttttttattttgaattttgtaatttttctttttggttttctatttcattcttaaaagaagatgagttcaaagcccaaaaatggtaaaatatgttttatagtacgcggaagtaagtattcttaagaataagac

SEQ ID NO: 13566 - DNA, 819 bp, Arabidopsis thaliana landsberg
gaaccagagagtaagatcctctttatttaacccctcttaatctaaaaccattgctttctaacgcaagactcttttactcggataatttgtagttgactatgatggaagcaaacggtctggaaaaaccaaaggtggacgcaacaaaactcgggatggctctgcaaatagcatcaagacagatggaacaagactgagaatagctctgcagaagatgacgaagatgaattcaagcaggtcagaagtcgtaggaataagaaaaatgtgaaacccctaaggttcaagcacattgatgatactctctattacaaacaccaacacaagaacacttataatttggagatttcttagaatgcaaattgagattaattttcgacattacagattcaaaaatttttacttttttaggttgccgtcgctaatttcagtcgccagcaaaaaacaaacgaatatgatttaattattaaagaagtaaaaaaagatatttgattaaaaagtaaataaacaatgaatatcttacaagataacaaaagctacaaaacaaataatcttagtattttaaataaaatatcttacaagatttacttaaatatattgatttttatttactatttaggtatctctaactaaattaaacctagattttctttatcttcaaaatttattatcattaagtatatatatattcaagaattaaatatattgaattataatattaacataaatacacctaacattctagaaacttcttttttatatcaaatctagacaagagctatagttcataagtgtcacatggtccgaaacactccgaagcctagt

SEQ ID NO: 13567 - DNA, 534 bp, Arabidopsis thaliana landsberg
  unsure (1)..(534): unsure at all n locations
nnnnnnnnnnnnnnnnnnnnnnnnnnnnnnnnnnnnnnnnnnnnnnnnnnnnnnnnnnnncgtatttttatgggtttttcagagtgggtcgcttgagagattctctccactctctttcatattttttaattatattttattttttatattagacagtttttcaatgagaaaccgttgatagagatggtcttagttcttctatcctttgatctaagagttcgtatgcatttgttatttctacttcagtttaccgtattgtttttcagaggaaccttatcataactccattcaattcattatcacaagttgatcatttacgttgcaatacacaagataagttatttcctagcaaccgtattggtgtatatatcttccaagacccaatcataatcagtcttctaagatatatatagaacatattcatacaattttggtcaccatgattcaccagaatttggttcaaaatgaaaaccggtaaaataatcggtaaactttgcatgtgtcatactaattctaaattctaatacaccacct

SEQ ID NO: 13568 - DNA, 586 bp, Arabidopsis thaliana landsberg
tgtgtctgttagttagtatgccccgggagaaacgcaccgaagactcagaacccgccaagttttataagtttctcgagaagatgattgctgattcggatgaccacattctccataaccaggaatgatggatcgatatgcttaatcatcatcacattctccgtttattatatacgtttattgtttgtttgtaatttgtgttaatctcgtacctgatattactacttctttatatatataatcgaaaaaggtaccattacagaaatctgagggaaaagagttcctaaatcaaacgcaacagttctaaacctaagcctatttgtcttgagatcataatagacaacatgagtcataccgaatcttgcatcgcaatcgtaaggtacgaaaataatctcacccgtgtgaatatttcctgtaatgagaaatgcatcgtcgtcttgtccaaataaatgcatagaatgacgaatagagaaacgtatcttcgaccatttctccgcatcttccataacccacaattcaaatgtatgaagtgaagtttcaaaggctaaagttactttccctttgtattttatcatagatggagaatgcc

SEQ ID NO: 13569 - DNA, 789 bp, Arabidopsis thaliana landsberg
ttctctatgttacaagtaatcttctctaaatctccttctaatggagaaatcatacgaacgagttaacgtttctctgaatcttctcaagtcaagcttcacgttctgtccttgtagatagattttcttcgtatattcccatcctttgtcgtttagactatccggatctcggattacagggtcatctttcccatattcttcatacaaagagctctctttcggcgcaatcttgtaaccaacgtacttcaatcctagcttcttcgccggttctccataatatgtctctgccgcccagtccgtccctaatgggatgatctgaatgaaaacggttttcggtttcaagaaaaggaaatgagtcattgctgctccatgtacaccgatcattacatcgctcgtgttcaacgaacgataaatcttggccatttccgttgtcttttgtggtcttagaacctccacattgaaccctgttttctctgctagctccacgagaagattctcgtttaatatcgcccttgatgacccgtttcttgaaagaatcaccagttttggcttcttcttgaaatcgagtgcggtcacgttcgcctctgtttcctcctgagtcaagctttggatacgatgcgagtaacccctatcaaaacgtttctgaagtcaacaatggtttgattcccaatgaccaaagaagaattcacagttaactcgtcgtgaatacgtaatccaacgttgcttctttgaacaatgtgttctcgtatctccattgaatcaaccagaggatatccgagagctgcgaacgac

SEQ ID NO: 13570 - DNA, 561 bp, Arabidopsis thaliana landsberg
  unsure (1)..(561): unsure at all n locations
cggctatcaccgttcatgttagtagtcaccgtctttatcaagtctttagactttttcttgatattttgcttcgtcttcggcatccggacattgtcaagcttcttggctatttcgatgattcaggtactacttctgaaatctcatagattctgcaaatatttggtgtctggtcaattgtgttgttgtcttgattaagccaattttagtgattaagtttgtcttaatcaaagttttgatctttatttgttttatcaagttgtttgatatatttgcatatagacttatgttctgcttctttgtatttcagaggaaaatggtgctcttcttcttgagtatcttcctcaaggaaatctacaagagaagctccaaagcaatagcaagcaagtcttgcaatggaggaaccgtgtagcgattgcgttacagttagttcaagctattgaacatattcatgagaaatgtagcccgcagatagtgcacggngacatcaaatcttccaacgttcttctagacaaaaactttgattgcaagccttgcgatttcgggtcagctaaagtcgggttc

SEQ ID NO: 13571 - DNA, 998 bp, Arabidopsis thaliana landsberg
  unsure (1)..(998): unsure at all n locations
gagactattcaaatttagtgaatatggtgtgttttctaaccgaatggccgacactttcattgtatttggaagaacttcagaatgataaggaagaattttcaatttttttgttatctttaatgtttcgttgtgctaatataaaaacggatgatttcactcaaaaaattcgtaccgaaccgcattagatcccaaatataaataattcctcagtagaaaaccaatatgtctcaatttttatcctttttacaatatttgagataaaccttttttcttcttcttcttctatttattaattcagtttctcgttagactcaaaaacttgcaaaactctcgtccgagatatatcgactccgcgaccctccactactctgctgatctacacacacacacacaaaaaaaaaaaactcaatcgccagcaacaatggcgaagctcacacttctcttcttcctttcctttctcatcttctcctcatccatcgctttccaatcagacgagctcctcgttgacgacgacgaatttggtctagaaggagcaaagccccgctccaccgatctttacacatcttcttcttcttcgccacagcagcagcaacagactccaactatccggagaagatactcagatcctaccgatttggattcaaaagtccaatttactctcgaacatgccttcggtgactctgatttctcccccgccggtactttctccgctcgtctcaaaacctggagtcatggcggaaaggtatcgagattcggtttattgattttaggtttttggatcgaatcttttcatgttacttcgatcatattaagtttcatctgcaaattctggaattggcttgctctgaagtgaattgatctaattagagtagtagcatagtttaattcagtaattaagtagatttgatcttgtgtgtatgcagacattaacgaagctgcgattctctagaaatgattnttctgctgaagagaaagatacattcaaggaatgttctgat

SEQ ID NO: 13572 - DNA, 580 bp, Arabidopsis thaliana landsberg
tcaggaggattcttgacggggttatcatccactctccataaaaaatcatcatctgctcccccgtccccggtgctgtcacttgattctggccaaggtttgaaatacgggctcgatccatcatactcaacacaccatttccttagaggcagagggatgttagctactttgtcgaatccgtaacaaacccaatctttcggatgagcctccattcgcctcatttcctctctccatgtcttgcaacttaacgagtagttgggcgtgatgccttcgatacgctgcatgttgattatccacctgtccaacaatataaatgttactttctcgcttctaacaatcaatacaactaaaccctaaaccatcaatacaactaaaccctaaaccacattagcaaaaacaactacgaaacacattacatttaccttacaccaaaatatttgtcatgtctcccacatctcgctggatagaacctcataggcaaaaaacttttgcggatacacaacttctcccgggatgaaatctcttggttctgggacgaaatccagctcaatttctccttgtacaggagatctcatccacggta

SEQ ID NO: 13573 - DNA, 605 bp, Arabidopsis thaliana landsberg
  unsure (1)..(605): unsure at all n locations
cctttaaatcgatattcggatgataaacctaaacaagaaaaccaacaaagagcttctacatcacaaacgattttgaagtagaagctgtaaactatataaggcatgtaaaaggaggagaggcctaccttggttttgcatttaacttttggagcttcatgtggatacacaggagagacttggaatgtgaaaacaaacgtaccattgctgtttatttggtaagaaagaaacaaataagtttccaaaaagtttttaagagacaaaaacgcaggtttcagtgggaaaaaaagcactacttaactggtaatatccatcatcaggtttaatggatacttcaaagttcatcaaatcatctttgccatttggaaaagatattgaacaagagctaggaaggttcaactctgatatatctgcacagttcaaaatcggaaaaaacaccaaaaattgaaacttggagatgcaagaacaaaaaaaagatcaacaaggcatttatatacctttgtgaagacgaagttcgccagcagattgcttcttaacagaagctcctcctctagtagcattttgagcttgttctctttgcttttcctttactntaaacaacccaatca

SEQ ID NO: 13574 - DNA, 616 bp, Arabidopsis thaliana landsberg
aggatgttgttcgaactctattcttgccacattttccagctgcatctgcatttacaaggtcatcctctacaccaaatgatttttgtctctgttcagaccctgcagaatcattaagatgtacagttaaaagctatcagtttaagtattcaaaacactgaatttgatatgatttataagatcttgtaaatttataaactctcttgggtaactttctctatatattctgttaactcttctgctaaaactaacctgcagaaaccggttttggagggcttgtcaaggcttgtttcttgtctgatggaaacagctctttcttcctgccttttgattgacgttcatcacttttgatatcaataccacctgctatatgagctgaccgagagcgcgaatggcgataaggaaacatgactgatgattgtgccacattgtgggatttggaagcatagctctcgtcttctctcggcatggaattgccatcagtcatgaagtttcctggcttatcaatctggttttgagaatcatcagatatagtagaatagacatcatcatcgtcctttttgctgttctcttcaaactccttggggaatgtggcatcaggaatggacgaaggtgtact

SEQ ID NO: 13575 - DNA, 518 bp, Arabidopsis thaliana landsberg
agatcagattcattctgaattggacggtgtagatcagcttacaccattactaaacaatcctaaaactcaaaaacgaattctccatctcttaaaccctaagaaaaggctcatctttgcgactgctcccgtgttcttcgtctctctgtcaatggctcgcctcctcagatgtctgagaaaaagtttcatatttagttcatcgacttcgattgcgtacagaaaccctagaatatgtgttcagtcaaatcaaagctatattttcttaagcagccgcaagtttctcagctcgggaagttacgtttcagaaatgcggagaacagctttcgagggtaacattctcagattaattcgttcggagattcagtccgagctcgatcactcgcctattcttcaggtattctgaaactttcaatttgtaattgttaagcatttggtaatctgatactacaaaaagtcgacatctttcgaaactggaatctaggattgaatcatctcatacgcaaattgatgatccggaatta

SEQ ID NO: 13576 - DNA, 623 bp, Arabidopsis thaliana landsberg
agaagggatgacgaagagagagatacttgaggtgtcgctcaatgatggaaggaggacgtaggtggctgcggctgaagatgagtgtgccatcgacagagaggatgacagtagcggcccagaagtggacccgctcgccacatttggagtcaggctcgcggtgggcgagcggattttgacgtcaatggcttccctgcgacaaccgccgccacatccatggccgttccggatatagcagggagccgcgggatcctcgtcccttgcccccgcctgcgcgggatgccggcgaccgcaacgttggggagatatggctctctagtggcggcgggtgtgcaaaggttggatccgcggaaggaggctaggttagggttggcgaaggtgacatgataaagggatcccaatttgtaaactgatcaccggatgggacgaatgggaagggagggactgcgggttgattcatgtaaaaccgaggggtctttttataaaaaaaaatgacgcacgacaaccgttaaaactggtgctttaagtatagtagagaattgactgcaaagtgaatgcgcatggacaaggattatgacattgaagtacagcgtgtctcgtccacggagagacacttatccctggtg

SEQ ID NO: 13577 - DNA, 1050 bp, Arabidopsis thaliana landsberg
  unsure (1)..(1050): unsure at all n locations
gatgggattggcaaggaggaagagtttggcgttcggactcagagacacgagaggcatggaacttggcgatgaaggcagaagctttacggtcaatacctggctcagctacccaataacgcttgtcctcgtcgctggcccatgcctttcttgtgtaaatgacgtcgtcccatgatgcatcagcttcaactctatgatgagacgatcttcttgctttaaagaagctaaagagcgagaacttctttctgccttgacctcccatgagagacagaacaagaacagcaattaagaatgaagaaaaagaaatgtaaatttcgtagatagtgtgtaatttgatgtgtttatggagagatgggttttgggatgtatttataggatgcttgaggcaaaacagctttttgtaagggcacttttggatccggtttggttcgaatcttggttggtcctttttagaagttatcaaaaccgaaataaagtttggtttagtttgtgttatttcgtttaagttgtcccacatgcttttcatgtatcgcttgtaattatttgtacctattcttttatgagaatatgtttatatagctaacaaaatagctatctataaataaattaggtgaaagattatttaggtgaaaccgtgagcgtaaaccgtagacaagaaaaattaaaagttaacactacttttgtctctctctcattctaccctaacatgactntctagtcactgttcatgtaaaattataaattctaagtttatacaacattatatgatttttccccgaaaaaactataatattacatgttatatgaacaaaacgatgatcacaatacanattntaatattttatggtaagcaattcannataaatattttacggttgcatcttttaaccgtaatgtttggttgngttnttaaaaatatggtttacggttctattattaaaaaccaattgtatatatgtntatatagaggttgtgtctttcaccatgttttaagtcgtgtttttcatcaaagaataattattctaacagctgtgtctgttacaaacagttatg

SEQ ID NO: 13578 - DNA, 1077 bp, Arabidopsis thaliana landsberg
tacttattcaatcctcctttctcgtctattccgatagagaagctagtgaagagtgagaagcttaaacatggggttcgattcgccggaagtcttgttaaagccggagttgccatcgccgttaagggtcgccaccataataaggtacgtacaatgccattatacataaaacaaattaaatgttcccaaaaatttctaatattttgaaaaacttgaaatcaagcaaaataaaacttctaaaacatagtaggaaaaaaaaactgaatctatatatgtttagtacaaaacatcagttacaattagaaaactagtgaaaggtagaatataaatttcgaaaggagtgtatgactaagtttctatgggaaattgcaatggctctactctgaagttattggttcgaaccttacaagaaattgaatttaaatttatttacagggtcaagaagacgattcgttcatgaagttagcatcatggataccatatttgtatttgaatccgttagatacaatatgcttagaatacattggttacttcaagcacagaatttaaatgtttgagatcggagccggtaaaatggaaagaattgctacgaggaactcacttaccagtctgttgtcaggaggaggaggaggaggttcatcttcagattcttcttcagagcctcttcatcttttaccatcggcatatatgacgataaacgctagcaaatcgccgaattttaagagagctcatgggattcatcaatggtgggatcccatgtttaatggtgaatatgttttgcatcagtttaataactaacttctacttttgttgcttcaaatgctttgaaacctttttttttattttttgttttgtttataattgtaatctgtgaaagatgaaatttgctgcaggttttgatggaaaatataagtatgtaatatagagtcattaccaaaccattgtttccaaaagctaaggagattagttcaaagacagtgacacttatttatagttacggacactggatatacatctgttgacaatcacaaacagataggagcgaaagaacgatgaagacaatttcagttcaagcatact

SEQ ID NO: 13579 - DNA, 663 bp, Arabidopsis thaliana landsberg
aaatgcaatcacatcaagaggcgcttttgcatcattcagtatcgggaacaatttgtttcaaatctgttgaaacagtgtacgtgttaacgttttgtgaacacccgaaacattcaagtagtaatatgggaaagaatataacaagtacctggtcattttgggaacctgcgtatgaaattccaagacccatgatagcaccgattctgacagatgaatcctctttgtctatatagtctccaagaagtgccaatgcctgagaaataaggctgagtaagatggaagagtggctgcaaatattagcacaaatggttccagcaaaatcaaacacgacagcaactcacaggatcacaatcgttcttaatgccacaatttacaatcccaactcccagcagtgctccagcaatgataggattatcattactatggaaatatttgtcgagttgggaaagtcctgagtccacatcccacagatgaatcataccctatatgatagggaaacaaaaagatctggttacaattcttacttccatgatctgagcacagtaaataaattcatcaaataagaaaaagtataccagactagcagctgcactagtcttgccatgttctttatttttgaagagccagtttccagaagatccggtggttgagtctgaaggtactgtc

SEQ ID NO: 13580 - DNA, 679 bp, Arabidopsis thaliana landsberg
ttcagaaccacaacgcaaaaacaaaaacaaaagtagttaacatacatttctgttttttttttaaacaaaaaggtaaaattatactatgtgagttttgatctcgaacaaggcctccttcgtcaacacctctgttgtggttcaagaggattgacttcccaaagcatgaatggcattcacttcttaattgttctacatattatcatgcaacatggttttgaacattgtatcatgcttttcacttttctacttacttcatactcatcatcaaactcaataatccacttcttatggctattaatctcttttggagtcatcggagaccgagaaaacactttcttattttcactaaacacaaaaatctgcatgattcattaaccacatgattttccgaataataagaaggaaaatgtcaaacaaacatcaacttaccaaaagtggtgaaacaaaacaccaactttgcttgtggtgaataaatttatcaatttcagttgatttttctaactaatcatcaacttttgttgactttgccaaataaaacatatcgtaaagtcaactaatatacacatttccaacatattgtagtaaatccgagttttggtttacgtctcatacctttatagaattttatgttgtattgatgttctaattgaagtaattgtatttctagatttaattgatt

SEQ ID NO: 13581 - DNA, 684 bp, Arabidopsis thaliana landsberg
acacacaaatctgccctgagacgcatcaatatcaggaacttcataactagggggtaattccatgtagatttcttcatcgaattccccattcaagaaagcatttgacacatccagttgattaagatgccaattcaacttagctgcaaaagccaaaagaatcttcacaatggccatcttagctactggagaaaaagtatcaacaaaattgatgccttcttcttgtgtgtaaccttttgctaccaacctagccttatatctctcaatggaaccatctgcattatgtttagttttgaaaacatatttacaaccaatagccttcttaccagatggtagaggacaaaccaaccaagtaccagtctgttccatagctttcaactcttcaccaatagcatcacaccactctttcagttttatagcctcagaatatttacggagttcaagagtaagtgaaatattattaataaaaaagcttaaagaaaagctaagtttaatataagagatatagttagagataggataaggagtagaaaatgaagtattatatatgtagtaatcctgcaaatgagctgggagtttggtaggtcgtcgagaatctaatgcccaaggcaaagaattctcagaagatatcacatcagtatgaggaggtgtatctagagatgagtttacagagtgaaaatatgaatc

SEQ ID NO: 13582 - DNA, 558 bp, Arabidopsis thaliana landsberg
aattctcataatatggattataatgctattgcggtgagggatatagacaatgtagatgatggtattggtaacggaagcagaggtggacttgagaggtcacctctagttggaagtcccagtgcgtcagagcactcaacctcagtaggaaccagaggaaatatggaagacagagaaagtgttatggatgaagaaatgtctccactagttgagttgatgggttggggagataatagggaagaagcaagaggtttggaggagtcggataacgttgtggacatttcaaatagaggcataaaacttggtcttggagactttattttctacagtgttcttgttggtagggcagcaatgtatgatctgatgactgtgtacgcctgttaccttgcgatcatctccggacttgggtgcactcttattttgttatctgtgtacaaccgagctctgcctgcccttcccatatccatcatgttgggtgttggtttttacttcttgacgcgacttttgatggagccctttggtggtggggtgacaacaaacttgatgatgttctgattaacc

SEQ ID NO: 13583 - DNA, 733 bp, Arabidopsis thaliana landsberg
  unsure (1)..(733): unsure at all n locations
caagaaagagagagtgttttgctagagagaaatttggatttctatggtgctaatctcggcggttgtgcgggctgttctagtggcggcgccgataccagaagtaacagccaagaaattnnnnnnnnnnnnnnnnnnnnnntggaaccccaacattaactataccatatgggctcaaggcaaacatttctacgtcggagactggctttgtacgttctctctatctcttctttctcaatctacactctcagatctgtcatatttagatctgatttgaaattggtttagctttaaatcttgtaatagtttttttaacttttctttaagtccagatctagttagaacataactctttctttgttctgtcttttttttttggttaagttaagtcttggttctgtctttagacttatgttttatttatcactttcttgtcagattttgtgttctatagagaccaacacaacattcttgaggtaaacaaggctgattatgaaaaatgtatctccaaccgcccaatacgtaattatacacgtggagctgggagagatattgttcctctctatgagactagacgttattatctacttgatggaagaggtggttgcgttcaaggcatgaagctagatgttttagttgagactccttcttctgcttctccttttactccttctcctgcagcacaataagaaatcaattttatggggtatctctataagttgttttggattttttt

SEQ ID NO: 13584 - DNA, 1000 bp, Arabidopsis thaliana landsberg
  unsure (1)..(1000): unsure at all n locations
atgtctttctaattctaattagagaaattaatagggtttactcatgggtagccgtagatctataatccattacgcagatatatcttcccagagatttttgtgtaattagaatttcctttagacatgcattaaaagttaacacagaacttaaggttttcgttctttggttttgaatttaagcaaattcagattattagttaaaatatcttgtggtttcttttgttttataaactgtagagttggcagaaccattgagaggtactatcgctgtaaagacaatcttttggacaatgatacgcttgaagatactcaggtcaatcattttctttcttaagtatgttcattttatctttatatatatacggaatttgacctttgttcattctaagtgtatacatagtcaaactaactattatattataacgatgtataaaataaatagagctaagataaattgtagttaatcttctgctttttggtgcagggcttgcgtcaagaggtgacaaagctcaaatgcaaatacgaatctcttcttcgcactcataggtttaactaatcgtactcctcgtaatccattacttcctataattgtacatttcctaatttctgctactaataatcgttttgaatcgttgaaaaaggaatttggttggggaagatcttgaagggatgagtataaaggaattgcagacgctggagagacagcttgaaggagctctttccgcaacccgaaaacaaaaggcatgacatatttcatacgtagaccaatttttcttgcgcatcatttagacctgcaaaatacattattgaaatgtatatctttatatgcatgtatgtatatagacgcaggttatgatggaacaaatggaagagcttcngagaaaggcaagtactcgaaatgatgttctacaatatatgcatgcattgtatgtaaatgtactcatgtgtatatcattttgtattnggatggcaggagagggagctncgagatataaacaat

SEQ ID NO: 13585 - DNA, 1003 bp, Arabidopsis thaliana landsberg
  unsure (1)..(1003): unsure at all n locations
gaatgtatggccaggacaagtatttcacttctattcctgcttagcttacttatcatttgtgctttaggtatcaatgtattatacatacatcttttagttttatatatcctttttttttctttgaagatttatatatcctttacataccttccaattgatatgagtctattcattccatattttctcttacagcaaaaaaataatcaaattctacgatcagaataaacaaattttgatattgccaagagtccattgacatttttagtccaccgtaaatgaattaacatatacagtataggctcatgtaaaaaacaaattctctcattgctatattcaaaatttacttgtactttgtatcaatcaatatggcacaaataatcttattttttaagttaagtttactaacgtatataatgtttgtttcagttgtgaatcagataagagcacagacatgtgacgagaacctaagctcttgtgaaaattgcgaccaaaggtgcaaggccaaacacggaccatcgtccgtaagcaaatgtaacggtccggatgggacgtgcatatgcacctacggatgtgcctcatttaaaccagccaaactgtgcatcggtgcgactgatatgtgcactgataaatgtcctacaagttgttgtgatagacaatgcgctataaaatataagaatggaaaagggggttgtgtcgactatgctggttataggatgtgcatttgcgagtacacttgctaaaacatattgacaaaatttgtaaaacaaataatatggtgatacaattattgttattactaattcaataactaagataaattcgattcaatataaacatgactaaagagaatngttgtcaacgtttgagataactaaaacaaactacacttngaagatccaaccaaaccacaacacaaacttttacatgtttctatctttactaatctaaggcctggagacagataattnnaatacaaaactacttttttcttacaaaagatata

SEQ ID NO: 13586 - DNA, 780 bp, Arabidopsis thaliana landsberg
cttttggagagaaattcggtcacatgatgcccgcttgttgtaaggctttcatggattgcatattatgcatgccaaatattctatacagtgtacttttccctcctaatttgaaagaacaatgtaatcagggagggatccactaatttgaaagaacaatgttctgagggatccacgcctagtaaagaggtggtagttgtcaccacttaaaaaacagtttttaatataactttactaaatctaaataattgccaccgtaacaagttaactctttccatgatcccattttttaaaaaataaaaatatttaagatggccaaaagctcactttactagtattttataaataaaagcgtaatttgtaaactaaatctaacttaactaattaaaactaggcttgggcgtttaatctgaaaccgataatccacaccgaaaaatcggattaaaatccgaatcgcattcaatatccataggtaccagattatacttgatcagatgcaatattcgatatgtatccgaatttgtgtcttttgttgtaccagggacatgtcgaagtttgaaaatgtagctaataagaagcttgaggctggcttgttttcactatcttccaaaatttttttactactttcgattgaattctgctacttttttaatttttaggatgttatggtttaccttcgctttaaaactttgatatattggcatcgttttatgtctcactttggtttcccaactctatggtttgctaaggtttcatgttagttcaactagtcatttcagtttt

SEQ ID NO: 13587 - DNA, 920 bp, Arabidopsis thaliana landsberg
tctcatgactcatgattctatttcgccttccattcaattttctaacttcgtctagtttgttgcagcattcatgttctatgcgagtctggtaattggggctgctgtatttctcattatccgttttgtgccccaatatgggcaaacaaatgtaatggtttacattggtatttgttcgctcgtgggatcattatcggtatgtagtttttggtatttccagtttgtaatcctttatttctttagaagaatgttgattccactttgcctaaattgatattgtcaaacttgtgaacaggtaatgagtgtaaaagcacttggaatagcattaaagctgaccttttcaggaacaaatcagttattttatcctcaaacatggatattcaccttggtcgtacttacttgtgtggtaacccaactgaactacttaaacaaggtaactattaattaagtgattttcaggataatcgattggaagactttgacgtgggtaattagatgtctatctttgttacttaaagaattgcattttgtattgttttcacttgcaggctcttgatacattcaatacagctatagtatctcctatatactacgtgatgttcacatctctaactattttggctagtgtcatcatgtttaaggtatcctctgctcccacaaaatgtatctatggttgtatgagggtgttgtttcagactttcagtacatgattcaaatcgttgtggttttgaacaggactgggatcggcaaaacggtactcaaattgttacagaaatatgtggatttgttacaatactttcaggcacttttcttctccacagaacaaaggacatggtcgagggtgcgttccttaatttcatttatggcacttgatatgcatatatatgttctgacgggctagatctcgagtttttgcattcaat

SEQ ID NO: 13588 - DNA, 602 bp, Arabidopsis thaliana landsberg
aacttttttttcggggggatttgaatggagattagaaggttgaaaaaaagaaaaaaaaatgaattgagattagaagatgcttctaagtgatttataccaagtggccctgctttgacgcttagacatcatccagttcgaccaagtcattaggggttaaatattaagaggtcccaagggaaacataaaatgataaatttgccaaactgtatatgcaggtcttcgagtcataactaactccacatacttataatcacatgatagcccttgttcatgaaatttgcaataagtcgctctgttttgtatggtactaatttgattatttttttgtttgtcaaagctattgctgtatcccgagatcacaagcctgatcaaagtgacgagcgccaaagaattgaggatgcaggaggatttgtcatgtgggctggtaagaaaacatttaactgaaactctcttcttatttgtgcttatataatttgcttaattggaattatactaaaaggaacatggagagttggaggagttcttgctgtttctcgtgcattaggcgataggttgttgaagcagtatgttgttgctgatccggagatacaggtattgacttt

SEQ ID NO: 13589 - DNA, 515 bp, Arabidopsis thaliana landsberg
tctcaattcgaattccaaaaacggaactttacaaacaccggcgccggaaactcacactccggttgctaaaaacacaacctttgagtctccgatcgtaaacggaaccaacccagatgcaaagaacaacacttcatctcatcctctgctttcagacaaatcttcaacgacgggatcgaataatcagtcacggaccaccgccgatactgaaaccgtgaatagaaaccaaacaacatctccggcgccgtcgaaagcacccgtgtcggtagatctgaagaccaattccagttccaattcatcaactgcttcgtctacaccgaaaaagcagactaaaaccgttgatttggtttcgtcggtgaagcaagagatcgagaaatggagtgaatctttgaagaattgtgagttcttcgacggtgaatggatcaaagatgattcgtatccgctttataaacctggttcgtgtaatcttatcgatgaacagttcaattgtattaccaacgggagaccagacaaagatt

SEQ ID NO: 13590 - DNA, 649 bp, Arabidopsis thaliana landsberg
  unsure (1)..(649): unsure at all n locations
atttatctatatccttgaattcttaggatgtggtgaagtccaagatggtatctacggatgaagataactacaaagaagccattgaagccgctttcaaagtttttgctcctcgaggaatcagtaagtagatatcttgtttggtctaggtagaaacttgacttagaatgtttactgtttccatggttgagttaataggtgtagcgattgttgatattggagctaaactaacagaaagctctgtcacgggtcaaatcacagtattcttcatgttgaaccaaacctgttttctcttccaggctcagaggttcaaaaattaattaatgatagttgtgctgaagtgaattcaaactcctcagctttttgggtgatggtagcggctctgaaggtttgaaacttgaannnnnnnnnnnnnnnnnncataattttatgttcatttagaaagtgcaaactgcaactcattttgattgaaatcataatcgtacataaccacctgcaggagtttgttttaaatgaaggtggtggagaggcaccccttgaaggttctataccagatatgccctctttaacaaagttcccgcccttgcctctatggcactgaaattcacaaacagactatttttcacattggttatgtagctgtatggtttct

SEQ ID NO: 13591 - DNA, 454 bp, Arabidopsis thaliana landsberg
tacacgaatccatggacagtgggaagatcgtaccgctctcgggaaaagttttcgcagcagcaacgcagcgtaaagacacatggaatgggattcaacaagagatttcaggaagattcaggaggaagcgtgtgtatgaagtaacagcggtagttcgaatatttggcaacaatgtcacaagtgcaacagtacaagcgactctctgggtcttaaacgcaaacaaacgtgaacaatacatagtcattgccaagtaggtttcaccttttttcatcttctccattacataagtatcttgatataaattcattatactgatagagtttggtatgtcaatgaatcatattagtgttcaagcaacagataagaactgggtggagttgaagggtaaatttgtaatccatggttcgccatcgagagtaatactataccttgaaggtccacctccacgagctgacat

SEQ ID NO: 13592 - DNA, 751 bp, Arabidopsis thaliana landsberg
tgtctatgcctttgtacatgtcaatttcctttaaatgtacggtttgtacattttcatggagttctattttttgcacaagttgaacgggcaaatataacatcgtgctaacttgtttcctctaatgtccattgcatataaatctcaaaagcgttacacgtatttatacatgtcaatctcctttgtacggttgtaccaaagaaaaaaaatgaaaacacatcctcaagcacttctcttatgtgtgttattcttcatcacgtttggtcttttacatgtcgttgaagctggaaatcaagaaggtatatatctactagctacatacacatttttttgtttgtttttaatacatttaattacgttgttatgtacgttacaattcatatttcttactaggattcatcagtttagattgtgggttatcccccaatgaacctccttacgtcgatgctgcaaccgacttaacatacacaacggacaatgatttcgtgcagagcggtaaaactggtacaatcgataaggaattggagtcaacctacaacaaaccaattttacagcttaggtacttccccgaaggagtccgaaactgttataccttgaacgtcacgctcggcacaaactacctgatcagagctagtttcgtgtatggtaactacgatggtcttaataaagaactcgagtttgacctttacattggtcctaatctatgggcaaacgtgaacacagccgtatatttaatgaacggagtgaccacaga

SEQ ID NO: 13593 - DNA, 537 bp, Arabidopsis thaliana landsberg
cagcaaacaagacaagagacaaagaatgaaatctatgttacgtgggttattgacttattttatagcaaataccgtttaccaatggaattcaggatggccacaagcgttccactcacaagaaaatgtcaggacgtagttttaaatacacctgctctcgtaggtcgatcatcaccctgaaaaaagtgttttggtagactagtactctccagaacaagaaggccagaacttgtcttgtttactgaagccaaagcttcgccttgacttggttggaaatttttttgtgacaaagtggctcttactacctttaaagtagatttttttggtgaaaatatttaccggaatagccggatctgaagcacaatagaattgttgctccgagcactgtaagatagtatattggaatgttaaaaacagaattagattaaatgagaaatcaaagtccgaatttggtaggttggtggaagtccccttggcccaatagttgatcaaagattcattaatgtttctacactaagaggtatggggttcgagtctcag

SEQ ID NO: 13594 - DNA, 1271 bp, Arabidopsis thaliana landsberg
ctccacaaaagctttgtcaacctgataaagcaacaaaaatatcattttttgagagaatagacgatggaaacagggatgtgttatactatcatcaagtattttacctgctccagaaaacataaagcgcctagtcccgccaattgattgaaggagatatcgaaagcaacgtccctgatagagcactttatgactttgacctaccatcaaaaacatcatttgagcgggaaacagcataagcatggaatatgagtttttattgaacacacatatttaaaaacaaacaaggaaccaagcaaacctttgcttggacatactgaacaccagttacttggagatctgaatttcccatttcagcttcaagcacacaacacactgctctagcacagtcctcctccgaagcatgatgagttagaactgtcagatcaatatctccatctgggagataggtttttaatggcattgaaccaaataaatacacctggtaatatacaacaccgcattaaaactacattttgatcaagttagaaaactttagcattcctaatactttggagactgaaggaaagttcatccaacaaaagcaagaaagttctaacctcaattccaagacgttcccacagaagagtctggagattactgatgatcttattcctacttctttctgcaagatagttaggttggatggcacatagtatctcctgagcccttgcctcagcaatcaaccacacttccgcctctattggcgttgtttttggagacagagacaacgatgaagaggatgcagataaagagactggaacctttcctttatgatcagccatttgaacaaaaaacatagagaatcacccccaacgagtgcaagatctacaagtacaaaccatagaacaaagagaaaaaatcatggcttcattaaaagaaaaacatgacatcaaataaggaaaacaacttccaaccaaagaaatgaagccatacaaattgaatcaccacagaacagaacagagcaagaacaaaatcttgcttcaaaacaatacaagcaagacaagaaaatcaaaacagagtgataaatgaatagtaaatgcaaatgttaggtatccctatacagtctttagcttcctcaaagccaaacccaaaccaaagaataaaaaaaaaacaagactttggaaaatacccaaaaaaagaattgacaaaaagaattctgatccactcgcttttcccccagcttacacggcaatgattgcgacaacaactaaaaactaaagctttctaagact

SEQ ID NO: 13595 - DNA, 1067 bp, Arabidopsis thaliana landsberg
  unsure (1)..(1067): unsure at all n locations
ctcatggtactggaccatacgatcaattttttggatgatgcgtacatgttatgtatctatcatatcattatcttttggtccactctccaatttataaccctttcacatcactaaaattcaagtaaatttggtaacgaaaaccgatgggaatcaaaattcatactatcaataatcagattatgaaatgataaaataatacagcttatagttaaggattattgtgagatttactctaatcaaactcgcactttgcaataaaagaatcgaatatttttatttttttatacaaaaaacgtaaagaatgttaaattatttcgcattttaagcaaaagcatatgacaaaagttaggtcctaactaaaatattgcatacaaattattcacattaataaaataatcaaatccatagaacgcgcanatcacatgcagtctcgttataactcttaacccctatatatagacactcctcttctcactccaaatccaaaccaatagatctcatttctcataatacaacaaaaactaacattcaacttcactacatatactttcaaatcgatcaaaacccaccctcaaaacatatacttgctttcattcaaaaactcactcaagaaaatggagaatatgtttagactcatggcaagtgaagaatatttctcagagcggcgatgtgtttgggtcaacggtccggttatcgtaggagctggtccatccggtttagctacagcagcttgtctacatgatcaaggagtcccattcgttgtggtcgagagatcagattgcatagcgtcactgtggcaaaaacgaacctacgataggctcaagcttcacttgcccaagaaattctgccaattaccgaaaatgcccttcccggatcactaccctgaatacccaacgaaacgacagttcatcgattaccttgagtcatacgcaaaccggttcgatattaacncggagtttaataaagcgttgagttgctcggtttgatgaaactagcggctatgagggttagaacacctcagacgagaggagaggaaatattgccggtggtgtgttgcgacggagaaa

SEQ ID NO: 13596 - DNA, 825 bp, Arabidopsis thaliana landsberg
  unsure (1)..(825): unsure at all n locations
ggatcagatccagtttttctgcttccgggaaacctcggaaatcgaaatgctgggcgagctgtcagcgttgctcccttcgaacacaggcatctactatcttagttaaaggttcgtttttctccattgactctgttctagtggtgaatgtgattacagtttccagcggtttatctttcccttgagatctttattgaaaatcgaaaagtctacacatggctggaacagatgaatttgttgggtttcaaatgctggtagcgacagttttcggttttttattgcttcccggagctatcttttttttttgtgatcagagatcaggagtgccttctgttgaaatagcagcatgatgttgagaagccttgttttttggatgtgtatagcttgtctgatctcaggtttaggacagatgaatcaactacgtcctgtgttatagttgggttgtttcggaatgctcaatcttaaatgttctattatagaccttctccttctgttgtgaaggatacttctactatatatgtatgtgagcttacatacaatctacttttatcggttggaaaccgtctctgcggagattgaagtgaggatcaaggagcctctnnnnnnnnnnnnnnnnnnntagaaaaggagagtccttccttgttcttggttttcgttttggttttggttttggcgtttaaaaactagtaccttccactagggtcatcagatcaatctttcgggtttactttgattcggttaacatcctcagggaaactggaagcactacagagattagaagtagtagcccacagagattcagccctgcgaatctgacaagacgaactt

SEQ ID NO: 13597 - DNA, 869 bp, Arabidopsis thaliana landsberg
gatgcatattaatagagtaattgtgagtagcactaccaaaagttgaagtggaggtggacgcaacaagaaaagaaaaggagagaattgtacaagtatggaactacctctacgtggagagagagcttgtcaatttgttcactgtactgtggcaatgcttgaaccatcttctgcaaatctcttgtagaaagctcagctccatctctaagaaaaaagagtcaaacaaaattgatcaaaaggagagaagacctacttctctaaccaaataaagtataccacatagatcaacgtagagtaatgtaagagtattatcaatctgaatgactgaatgacaagaggaactaatccaacagtaaaatctggttccaccagttcaggagaagggtaatatatgctctcaagttatatttactacagaaataaaaagtaatacccacctcttaccctgaagctgagcagctttgtttttcgataagaaattggtcatcttgtcatgcaatctttcactagcctgatgaaaaacacaagtcaagaagtttaacttttttttttccgttaccaaagagaaataaatacctaggcatcagactcacatctgctatatgtgcatgtcgaagctctagccaaataggatcatgttcctctaagagcacatctttcttctctggttgtccgcctgatttgcttggaatctaaaaactaaatgaacatcacatggagtatccaggaagagaagccaccacaaatcacaataactaaaacggaaaagacttgaacttaccacatgtacatatttgtttccttcatgtcagtaaatcatggcacatagcatcatatgtccactcatgtttacaggggcaatctagacattc

SEQ ID NO: 13598 - DNA, 408 bp, Arabidopsis thaliana landsberg
ggactggtctgatattcgcacttgacattttgagatttcccattgttgtctgttctatttgattccagtttccatattcggtgaacatcctgatggctggctatgacaaagaagccggcgcatctctatactacattgactacattgcaaccctccacaaggttgataagggagcatttggatacggctcatacttctctctctctacaatggacagacactaccgcagcgacatgtctgttgaagaagccattgaattggtggacaaatgcatactcgagatcaggtcaaggctggtcattgcaccaccaaactttgttatcaagattgctgacaaggacggagcccgtgagtacggatggcgtatcagcactgctgatgcctaagttgttttcattgcgtttatta

SEQ ID NO: 13599 - DNA, 992 bp, Arabidopsis thaliana landsberg
catcctgtctatttcgacagcatgctttaacccataataacattacagattacaacatagggacatgattctcaggggaaggggtctccttcgctgccctatgctccactctattgccttctcgatgtataaacataactttccaatcctcataacatgaagaagctgtttgaaataatgaatgatcggccttaaatgattattttatgtttctcccctaatcaaagacatcagctgttgagaatcggtttcgaatataacttttcggaagtatagtcgggtcaaggataacactgcccatctaagaccttagatctcaacattcagcattttttctactcaaggtaaggaccttgcccccagccatagcattctcttatgatgatcccttaggacccaaccaataccataaattgtgctatctttattccaagcaccatcggtgtgacatttaacccattccggctgtggcggttgccaatttatccagggctgatcttaattgggtgcctgagatgattggcttcgtctttccttgcacaatctccattcctttgcctcctcatttgctcgtctcactacctcttgcgttgtgtagtctttccccttgaatatatagtcatttttgcatttccacagcctccataaaagctatgggcctatattccattcattatccaaatgggggtgcaccagatttacgttcattatatagtaaatagtttggtagatagaatctgtccactcacctccatgagaagctggaatggcgaaaatagcccatatgagccgagaaaaagcacacttaaaaagcagatgtttaaatgtctctacatgagctagacataagatacatgatccgtctcttgctaagtgcgtgtaggataagttgcctgccactgaaatacagttgctcacacatctccatagaaagtgttgtagttttggaggagaatctgttttccagacttggtggaatatcgggattatgc

SEQ ID NO: 13600 - DNA, 688 bp, Arabidopsis thaliana landsberg
aaaattgtttctaaatctacgtaaactcctccaaaatatctataaaattcgaatattttcaattttatttttagctagtcgtcgaatttgcttgagcagcaagtaagtaagtaactgcggtttttgacaatctccatgaatctccttcgttaatctcaaatcggaacattgtttaatttggatttcgattagtttgacaatcgtttatgcagaaaatcttgaatttttgagatgttggatcaatctgattaactgcgaaacctatatacacctttttcccctaatgaacaacttcacgtttagttacctttgggaaaagatttgacctaaagtgatccaagaatcgaaacttcttcgtgaagtgatttgcgacgcagagaccttgaccaaaaagtaagacaaggccagagcaagagcctagaacctgatagattcgtgcatcacatcatcgcaagagatatttgagatccaatctgaagagaatgtcgttgacgagatgtgagatttgcttcgtcttttgaggtgattactactttgtgatttggtgcttgtgatactgtttaagaacatttgtagtatatataggctcaaaaactattatatcagcaaagtctatatagattcaattttatgaaggtatagactattgtgatagcacttgaattctataatttcggtttattgactg

SEQ ID NO: 13601 - DNA, 1144 bp, Arabidopsis thaliana landsberg
gataaatcaacatcttaagtaatttctatgatggagggaaaataatactcaaactgaaattagaatttaacaaatttaaaaatcttaccatgtaaaataatatatatatatatatataatattaaaaccatatttttcctatatttatgaaaagtaaagatttttcttcctaacctaaagagtagtccatgaatatttattgaccatctagacgaaaatttctttccttttatcttttttgacctttattttattttattattctcttcgtatataaatattacacaacacccataatccataatcatacatttattttctttgttgaaatcaaatggacaaatctgaaaaaatcgcttacgcttcagttttgtctcttctctctctttctcttcttcttctcataatcttcctcttcttattatgcagaaaaaaaccaaaccggtccgacgacgaatatcttcttccagaaaccaaaccggctggtctttcttattcgttaaccgaattagactcagcaaccgacggatttaaccaacgacgaatcatcggttctggtcggttaggaacggtttacgctgcgattattccagatcataaaaatctcgtcgcggttaaaagaatacatcccggtttggttttgagtaaaccgggtttcggtttttccacggttattaaatcgctttcttcttctcatcatccaaacgtcgtttcgattttaggattctcagaagctcccggagaaagaatcgtcgtaacagaattcgtcggagaaggtaagagcttgagtgatcacttacacggagattccaattcagcgactgcggttgaatttggatggaaaacgcgttttaaaatcgcggcgggagcagcgagaggattggagtatttacacgaaatcgcagaccctagaatcgttcacggtagattcacatcatcgaatgttttggtagacgagaaatcaacggctaagatttgcgattacggatttgggtttttgattccgattgaaaaatctgggatttttgggtatatagaagaaggttattgcacagagagtgatgtgtatggatacggcgtcgttttaatggagattttgagtggaagaagaagtgaaaatggattgattgtgaaatgggcaact

SEQ ID NO: 13602 - DNA, 495 bp, Arabidopsis thaliana landsberg
atatctcactatcaagaatatatatatcacaaaaaaatctatcactaactaacactcatgataaactcatccaaaatcaatctctattcttatgttggctcaattttcattatgtccatagttgtgatatctttgatatgttcagaagctcttcaaattcaacaagctaaagaaccatttcgaggtcatcttacgagagtcacgattcaaaattataatgactatcttcttggaattcattgtaaatcaagagatgatgatttaggctttcacatacttgctaaaggtgaactatttggttggaagtttcatgttaattttcgttatttgatgatttatttttgtggttttagccaaggacaaataaataaaggtgtgtttataatgtatgtagcatctagagatttttatagatatgcaccctgtacatccaaagctgagaaagatggtcttaaaagatatggtaaaattcttactagagattatttattttat

SEQ ID NO: 13603 - DNA, 550 bp, Arabidopsis thaliana landsberg
cgggaaagtaccaagccaaagcctgctacctcgattaggctctctgatctcagcaacccatttaccccaaatcctttgcctaactcctctgaaactacatcggctattctctggtcctcctttacctttcatacaacccttcttcgaccctttcgcaggtactttcctcttcttggtagaaacttcttctacggtctggttatactctttccatctctttaatctctcagccacagtagtaccgtcacctctacttctagatttccttttcctcgatgtatcaatttgtgttctgtttatatctccactctgatcataaactgccatctccttcccagaaacaacacaatctacaatacaacaacacttcaatatcagaacacaagctgaaacataaggcaagagaacttaaacttggttcaaaatcacatcgatttacttatttgttatcaaattaggaacacctaaaatttcccaatttcacagctatacctaaaaggaaataatcgaaaacctaaagacgaagataaaccctataatcaccaattga

SEQ ID NO: 13604 - DNA, 710 bp, Arabidopsis thaliana landsberg
ttgaaatagacgaagttaccctcaacaatcatcattaattacttaatgtcggtcaaagctagtggagtgataaaaaatttgttgagaagtagtaagtaaatttgtttttattattagtatcaaataaactaaaaaggtaaaaaaaatttaaaaaacccgggaccgggtatcttgggggtcacgtgacatgaatcgcgaaattcgagactagaagccacgcgctgactcagcacatacaggaaggagccaaatatctaatatcgccacgtgtcaccatgcgacttgcgctcatgaatgcggcgtcccgtatttttaaacaactctcttatacccgaaactacccttggagttttgtagttaattacggaaaaatgccactgatggaggagcggaaagaaacagcttcgacaaggaaagaaatcaaatgatattaatatattatatattatatagttttcgaatttatgtttacttttgtaaaaatgaataaaataattacggctaaaaccccgaagagatcctataaattagcatttcaagagtgagctagagaaggtctccacttgcgaatcgctaaaaaaaatcactgtttcataacacgtttttctctctcacccaccaaaaaaaaatcttttggtcttgttaccaaaaaatctcgtgataaatctcttcaaactttggtttatcttcttcttgattctctcgaaatc

SEQ ID NO: 13605 - DNA, 436 bp, Arabidopsis thaliana landsberg
cggaaccgaccagtcacggtcttctctctgcttttctctgttcggttggtttcacggcactttcttttttttttttttctcttttctttttctttttttccactttataaaaaacaatttttttttctttcttggtttcttcgttttaaattgttctcgcgggtatttaaaaaaagatttgtttttatataatttcaaggtttcttgaatatctgaagaatctgaaatttgtttttttttgtttcagtaaaaaaaaaaactttgaggttcaatggtgggaggtggaacaaagagaagaagaaggagatttcaactaagtaaactatatacactaacatgtgctcaagcatgttttaagccagaccatttctaaatcggaggacctggttcctctcgtgttgttattgaaatgaccctgatccacctgaagctgatt

SEQ ID NO: 13606 - DNA, 478 bp, Arabidopsis thaliana landsberg
gacttcgtgtacagctttcaatcctacaccttttaccaccaccgtgcttgatgcagagcccagatttgccacgtgcagccttagcacatccctcagggaatccacaccgtcttccaccaccatgtgatatgcagagatcggttttgccttcagcactctttgtgcatcccaagtgttggcatctctttcctccgccatgggctttgcagaaagtagttttgctctcagcacctttgttgcaacctagcttttggcatctctggccacctccatggccaatgcagagccccgaagctcctctagctcctttaacacatcccataaacttgcacttcttcgggttgctcatcctttgctgagaagacgtggcagaggccgacctgtcagagaaagcgcttacagagaactctgactcatggctcagctgtgaattataagcatcagttccacaattagtactacattcttgcatccttga

SEQ ID NO: 13607 - DNA, 812 bp, Arabidopsis thaliana landsberg
ctgggtgggccattgcataggttcatctcttatggttaaaaaaacaaaaaaaagtaagatatgataaagtatagtgataagatagcaatgtgatacctgaagaggtataaagccacagagagcctcgaattgagtataggccaaagccatctctggtttgtgattgtcgtctttataaagattaggatgagctttgtgcattttctttgctaatttcttatctggatgtgcttgaatcgacaacggccttgccaccgacaacacctaccaaatattttacaaaatttaatcacatttctgcaacacacaacataaaagtacatattcaactccaaatcagacgaaatgatcaaaatcaattcattgaactatgtatagatgtttgtaccttgaacagaaaggggagatcgcaaccccatttctccaaaaccctatttccaagagatttagggttttcggtgatccaggatctaagggtcacgccattggatccatcagcatcctccaagtaactcggaccagactcgtgagtccccatccatagctcggcgtaaggtcgtgtaggatcaatctcgtaatctgaattcgccgcataaaccctgtaaacgagtgaatccgatccaattttgccccaatcgtaatccttaacagagcatctcaatcggcgaagccgtcgtcgatccgcttcacaaccgccattagcctttacgacagtagcgatctccattacaccaaaaaactcacgattacgaatctaaatccgtttctcggaggtaaaaacaaaatatctcaagcataagctaagcgccctc

SEQ ID NO: 13608 - DNA, 806 bp, Arabidopsis thaliana landsberg
gaaacaccaaacataaggttataattgtacgttatctactcattcttatttgcatttgtcaactgccaagtatcataagtcaaaattcactaagacaattggtctgtaattaggcattgtatgcatactcactgtgatgaatgttctggtgatggtgatgtttgtttgataaatgaggttgtggacatagatcaaaggttttggcgatgacatagctcgtgcccagtttctaacattggatacagatgtttggatccatagatataaggctgctgccccggcactacactagaaagctagatctcattctcaggcagtgaggtttgtgtgctgataattttgtcctcccgtcatggcacgctcaagtagcgattttgaaacactagaaaacagaatgtgaactgaatcagtgtaaaactgtaaaagaaaacatgaatctgtctttcttttgaaaggatgttttgttcaagaaacagatgataacttttgtcacaagcaaatcaagtttaatttaagcttcttggcttatgcaacacagatgctaatccttctaactagcttttagattcctcctctcttctcatctttaattaactgcaagctcgtaaaacagagaacacttctcttcctcttatgttctgcgcgtacactaccaccccacggagagagttacaagatgagtagcttgtcgaaggtgatactggcaacatcaatggtagtggtagtgagcttagttatggttttaagctcaataatcttagtcctaatagatgacactctactcaacatccgcatctccacacgcc

SEQ ID NO: 13609 - DNA, 382 bp, Arabidopsis thaliana landsberg
tacttggatcttatgtgaatagggatcagctttttttttgttgtcagggctcttaacttgggagatgggttatggtcgagctgtggagatgaacgcattgtaatcttcaccacaacccacaaggagaggctcgatccggcattgcttaggccaggacgtatggatatgcatattcacatgggacattgttgttttgatgtattcaagactttggcatctaactacttgggcttgtctcacgatgaccctcaccatctttacccggaaatcgagcgtttgataaaaggagaagtgttgactccagctcaagttgcagaggagctaatgaaaagtgaggatcctgatgtggcgctcgagggtatcgaaaggttctcaaacgaag

SEQ ID NO: 13610 - DNA, 675 bp, Arabidopsis thaliana landsberg
tatttctcgtgctatcaaatttttcttggcttttgttgtttagcttgttgctactataaccacgactatttttgagcttcagcgttttgttttaaccaaagctgagatggctgaagacaagaggagtgaggaccccacactggctaggttttacgaagctatggagaggaccaatgttgaaaaaattaaccgatgagattttagctgggctgtctgaagattctggagacaacgaagattttgatgttgacagtggtaatgatgatgccgaaggtcggtcgtggacggcgagtcacgtggtcttcggaaaatcaaccgtgaagaaagggcatgttgaggctatgaagggtagatattttcatgatgtatctatagtgagaatcggtagtgagaacattgttcctcttcctgagaaagattaggtagtgtttttttcgaagcttaatgaaagtggggctatggtccccttacataggatgttgattgaagtcctaaaaaagttttaaatctttcttcatcagctcattcctgacgcattgattaaggttggaatcttcatttgggcaataaggaaccaagggctggaactagatgttgattgcttttgccatattcatgagttgtccttcgagacgaagctactggaaaagagcaatacataatacattagatgta

SEQ ID NO: 13611 - DNA, 1013 bp, Arabidopsis thaliana landsberg
aaaaacatttccacaggttttttaatctaaaaaacttctaagctatcttttagcaatgaccaaattggagtaatgcgtgctctttcgtttgtcatgattatggtctccatcttttattgtactcttagtcgaaatctaattataagtaaacgtacgaacgtgtgatgtctaaaagcagaagaaaaaatttagttgtgaattggtgattcaatgattaaagaattccaatatggtagttttaactgcaattttacatattagttaagaatataaaagctaataccaaaattcttaaatctttagcagaaaaaataatagcaaaagttaaaatagaaatttccataaatagcaccatttcaagtttttggaaaaaaatagcactcaaacattttttggacaaaatagcattcaaataattattttatttttaattattaaaattaacaattaaaaaaattcaaaaagtacacaaattcatcatttgggtgaatgctctatgaatatgctaacacaaactttttttttattagcaatctgctacttctgcatagtaattgaccctattcaaaaaaaatgaactatataactcataaattgttaattctgcaaacgatatggttattgaaattatattggtttaagcatatactaacctataaatctgttaattctgtgaatcaaccgccgattttttccttgcgtttccaataatattttcctcaaggtttgaattactagcttacattgtatagcactccattatcttcatcatgtagatatcggactctttaatcttagcagtctaccaccaaaaattaaaagaatttttaaacatttaatttggaaattacttgaggaatagaggtcaacactatgatatattaaatttagaaattacctgaagaaaagaggtcaggactctgatactgaagggagtgacatctattgtcgggaatctgtcaaagaatcatttcctgaatttagaaagaatctatcaaattcaagagaagttt

SEQ ID NO: 13612 - DNA, 1181 bp, Arabidopsis thaliana landsberg
ggatggataagacaacaagaatagtcttctaatgtgtactcgacaaagactttctaggttgttgatatcttatgcttcgctgaatataggcgaaagaccttgggtgatgatatgacattcttaaaaaaaaatcaaatggttaagcacttaagcgaacgtatatcaattattaaaattccatatggactgaaattgctgcatttcaaaaaactcattcctatcgtgctgaccaaaaaattgaccgtataattcttcccagtcagcaacttccaaatcctgcatccaccccatcctctgcgagtctaatggagactcattaatcgcttgaatctgatccggagacaatcctactcgagaaagtccttgaccagactcgagagctggttcactcaacctacctggtttaaacataagtgctgcatcttgcgcaaccgcttgaatgtgctccgaactagagctttccggccgaggaaaactgttgacgagttccggaaagttgagattggtcccacgttctcggaggtgaagagccgcaacatcgtaggccgctgcagccatctcggccgtatcgtagcttccaagccaaatccttgtattcttaccgggttctcggatctccgatacccatttgccccatttcttccgacgaatgcctctgtaggacaactggttaacgttgaatctggtaatctcgttggccaacgtaagtgttttgcatcattaatacaaggttattttagtagcactatattgtgtgtgtgtgtgtttgtgagtgtatatagaactgtgcgaattagtttagaagttttgagttatagagtcagtggttaagtgaaattgtatatatagagaaataaagaagacaataaatgagggaatagaatttgtggatggcttgtttggtttcaggtgaagtgagcttcctacgtagttacttgtgaagtggaaatatgctgtcatgcatgcatgggtctctattacttacatggatattgaacattagcaaagctgtctttaagcgtgtacaaatagtgtgttgtgtgtatttgaaagaaaacgctgattgaatattatttttttgattgaagacaagtttgatatttatatgatttgggttctaaatttttttagaaatatttttttacacatcacatatggtttcagtaaaaactttgtacatg

SEQ ID NO: 13613 - DNA, 360 bp, Arabidopsis thaliana landsberg
tcgcttcttttcgctgtttgtcttcttcttacaggatataaaatggctccaatctatcacaagcttgccaattcttgtcaagggtgttattacagctgaggatggtaacacaaatatactaagaatgagaatatgcatcaaccttttgcttgacctattccttatgttttgagataatttctgtgatcattcagattattggcagctagacttgctgttgaatatggagctgcagggataatagtctctaaccacggagctcgtcagctagattatgttcctgcaactatagtggccttagaagaggtacacatttaaatggatcaagattaaaaactgtaaaaacaacaagtttcagtt

SEQ ID NO: 13614 - DNA, 1390 bp, Arabidopsis thaliana landsberg
  unsure (1)..(1390): unsure at all n locations
catatctaagtataacagaaaataaattaggtaaacagcaacatagaatttttttttttaagtaaatgatatttgcaaaaggtgcggttaattagaaaatagcaaaacgtatatcgacaaaattgattgtatgaaattcgacatgctattttacttcagaaaatatatttattatttttgttgatgaatatgtcaatatttgatgaattaataaaaaaaaatagaattattaaataatacatcacatattcatagaaaaattaatgtgtgatgtattatttaataattttccccataataaagctttcataatttttaataatacatcaaattcatcatgaatgtactatttaataattttcccataaaacattaagtaaatacaagtgtatagcaataaattcttttatctaaactattcatttcagatatattagatatctatttaaaaaaaaacactttaccaatatataaagcatccttttttttggagaacataataaagcatcttataacaatttagtcacataaataaaatcatccagaatgaagtgttgattttgtttgcgtcagtcaaaaatgatttttttttattttattaaatatcgatttttatttgtcaactcttccggaatatgatatattgatatggattaaacatctctttacgtctgaaaatttggtttttcaccgataaaaatgacaaacaatttcaagatataatatagatgtttggatataatattatgataaacgcatatttgtagaaagttttggtttgtgccaaaagtctaaacaatttatcgggtagtctagtaactggtaaactgggtatcataagtattagtcagaaaacattttaaatttgagatagacaatgtggtattcttttggtgagaagtcgactctaaaacattttgatgcatttctaccagaactaaccggatgaaccgatacaaaaaaaattcatgaataatataaaagtattcttttgtattcatgtataataagccgacagagaaatagtcttcagttaaaataaattcattagttaaaagtcaaaaactgtattcgttattatcatccacatgttaatgttggatctaaacccttccaataaccatctatttgacaatttactttccgagtgtccttccctaagatatcttttctattgttggttgtatcaaaaggtatgatcttcctttcaagccttacattcacttaagacttggttgataatgtcgggtgattcaattagactctattatatttttgatgtctaattttcagatccatgaaaaaacgtcatggtcactacttgagttatggtgatttgatcacntccatttaaaaaacaacaatcaatgaaactacatttctttgaaaa

SEQ ID NO: 13615 - DNA, 623 bp, Arabidopsis thaliana landsberg
tcactgctaattctccataaaacattttgtttgccttttcatgatgaatgatgtttcctcattttttttctgtaaaattgttcgaaatgctgatggctaaaggttgcctacttgacgatgagaaagccaaattatattccagtctagttaataagggttgtgctgcaagatttgctttcgcggctgcaatttttggagaaacttccgaggcacttttctggctacaactgccttctgccatgaaacatgtcgtcaacaaaacagcaagtaagtctgcgaagaagcaatttgaggagacagctacgctgagtaaaacgtcatcaaagggcccatcatctacaggatttgagaaaaatggttctatggtaagtcgtactatggaataaattagaaactgaatacctttttgactgaacccttatgaatattatgtggttgttgtacagagtgaaggtcagcttagactaatggcttttgaacaaaaagatttatgggtatgcgctaatgagcgaataccgtggcatgagaaactggaaggggaagaggccattcagaaccgagtacatgagttagtccttatcctgttccaactaacattatacttgaagattgaggctaacata

SEQ ID NO: 13616 - DNA, 1017 bp, Arabidopsis thaliana landsberg
ttctcgctcaatgggaagacccacttttgcttctcgtctcaggtaccgtgccatcactagtgcatatttccgtggagccgtgggtgcactcctagtatatgatgtaactcgccgtgcaacatttgagaacgtagatcggtggttaaaggagctcaagaaccacacagatccaaacattgtagtgatgctggttggtaacaaatctgatctccgccacttgctagctgttcctacagaagacgggaagtcctatgcggaacaagaatcgctctgcttcatggaaacatctgcccttgaagctaccaatgtggaggacgcatttgcagaggtgttgacacaaatttatcgcatcacaagcaagaagcaagtggaagctggtgaagatgggaacgcctctgtcccgaaaggtgagaaaatcgaagttaaaaacgatgtctctgcgctgaagaaactcgggtgctgctcaaattgaagcctttttttgttttcactgttgagagagaattataacccccatggtccattgtttgattatgtccttgttttgtaacactatcgacatttgtatgagttttagaccatacactacataatgtttatttaactttatttcaagaattgttggtgaaccaggctcaatatgcatcagttaagcagaggaatctggatctaaaatgccgacgttcatcttcgatagttggatcgtcgctctccttgtcctccagttttgattctaatttcctctgtctttgtaatcttcaaaatccaaaaccacaacttcagaaccgggtcgggttgcgttatgttgtcgggtttaggtctcattttgtcactaaactgcaagcgacgccgttcctttagagaagaagaagaagataggagcgagcgagcgagcgagcgattagaagaagaaatgatggaggaaggaccaacagctcccaagacgcttcgaatggtctacttcgtcggaaacgaaagtaagttcgctttatgctgcttcatatttttttctatttt

SEQ ID NO: 13617 - DNA, 735 bp, Arabidopsis thaliana landsberg
gtcactcctttagggatgaaaccgtattgaaagaaggattggactgcgatcacaaaatcctgcttcacaataggccatgtttccctgagaaattcaactgtatatccgtcggggcccggacttttatcccttggcatagagaataagacctctttgatttcttccggggttatgtctttttccagcaaatccccatctgcttccgaacacctgtactgcatcaactcacgaaggtcatccactggtatcccctgataatcagttggcttgtgagccaagaaatcatggaaaaaccgttctgcttcttttttaatctcttcttgagtatcaacgatagaaccatcttggcatttgatctctttgattgtgttacaaatttccctaaccgtagcagctttgtgaaacgccttgttgtttccatcgcccaccttaagccaatgaagttttgatttctgcttcaaatatctctcctccaggtctgacaaatgcaaccatctagtgtaagcggtagactctgtttgcattgttaaacttgatgggtttaacagcgtctccaattgagcctgacataggattgcatacgcgtcctttgtctttctcgttagatctcctagcttattcttactcatagttttgatgcttggttttagcatctttaacttctttgaaaaccggtacattaccgagttggagtggaaaataggcctctggcgagcccattaatcttggatcagt

SEQ ID NO: 13618 - DNA, 645 bp, Arabidopsis thaliana landsberg
caccaggaccaccaccagggcctccctgagctcgcctgaaaagcaagaagagtccatcaaaggtcataagcgggaaaatcaagtttccaatgacagtgaacaagtcattgcctgaggattctccttcagagacggatatatcaactccgttcatagccaagatatcaataaggtcagggtcgttagggacgatgactgaagcacggcgatttgtcgacggcagtaagctgaacaacagaaccatctttgctgaatctaactctctcgactttccctttcttcacagcgttaagaaactcgctgtatcgccactgtgatccttctgggagatccgatgatttaggactaggagccttaagtatctcgttctgaatgaacaatggcgatggcgtcgatggcttcacagcttgagattctataacgacagacggagaagctggttcgtcactacagctaaagctagcggcgaagatgaaattgaagatagtagaatagctgctaaggctacttgcgacgagaatggcgaattgggtttacatttggcgaattttcgcttgagacgatcgagtgatttggtagttacacgggagacgaggagaaagggaaaaaggtttctggtggtttaggggtgggagagagatatga

SEQ ID NO: 13619 - DNA, 868 bp, Arabidopsis thaliana landsberg
tgaagatcttcctagtcaatggcagcagatcggaactgaaaaattggattagttgttttgattgcagagaagaagaaaggggagattcttcttttataggttccaaggaaaaaggaactatatatacacgtggggtacgctaattggctcgttacttgacccagtaaaatcctacgtggaatttcatacaatgggttaattagttctgtggagaattaaagtggggccaataagctaactttggtggtggttataaacttataatcacaagttcatttataatggccaaacatttttatagaaatatatgagagaaattgagctaagatttcttctaaacctatcagacgtaatcctaaaattacatgatttttgtaacaaaacaacactaaaatcactaggcaggaacccaacaagaagaagcatagagagttcgacctttccagccttgtaacaaccatttactattttcatcaaccacaaagtctttatggtaacgccatttcttcagctttcctctaaacaactctaccagctcaggcttaatcgttttctgcttaaacccggctctaaccattctaacctgccattgcctgtaagtctcaggcctctccactcgatcagcttcctcgcacgctatcacgttcatagcctctctcccgtaaaactccctctcgaacctaatcctctctttgttatcccgaggcaacgtcgaatcaaacatgtcgaagagagcggagtaatggtaaaccgcttctttaaaccgcgagataaagaagggtgcgttgaatgaacagttgaaaatcgcgtggatgaaaacgtccgggttcatgtttcttattagcttcaagacagcatctctcgggca

SEQ ID NO: 13620 - DNA, 820 bp, Arabidopsis thaliana landsberg
ggtcttgttccccttctgcacaaaatgaaaagttttcagtatttaaaggactagcgtaaacaatgccgccacatagaagcatttggtttatagcaaaacaattctcaaactacaaagttctataagaaagaaaaaaaaaaagaggattagtgttacctgaatcaagaactcttccctccagttattaagattatcaaaagatttcataacattgacatcatacacaagaacacaacaatccgctcctcggtaaaacgcgactcccaaactttgaaatctttcttgtccagcagtatcccaaatgtatataatgtaccaagagattgtattagtaatagttctataaatctctatagacaaccaaaaaaaaactgtatcttcctaagaagcacacgaaattgaacctcacaaagcaaaattttgactttttctgcattataaacccaaaaaggtaggaacctaagatccaatcacattctaagaatcaaaatgtttgattcattcaaagaatacctgtaaagtgaagattctatcatctatttgaacctctttagtcaaaaaatctgctccaatcgtcgctttatactgattactaaactttcgattcacaaacctattaaaatagaatcaatcaaaatcaaatctcataaggaatttatcaatgtcctaagtaagagaaacatagatctggatttcagaaacatactgtttaatcaacgaaagcttccaacacttggcataaaaaagattaaaaatcttacatatcaaggaccaaaaaaaccacatcaaatttgaaatcctaagagatgaagaatctacc

SEQ ID NO: 13621 - DNA, 523 bp, Arabidopsis thaliana landsberg
taggaaaagagttagaagaaaagtattccggcataaggtaaatcccacgtactcttagtctaatcagaaaggttaagttgttagactagtaaaagagatagacccttaccttaaggacattatcctttcatgagagttatattaatgcatatcactatcaagtcaactcaaattagcatctagttttctttgtaacttcggtcacaaattcaaaatggtataaaatttcaatttttacattaaaaaaaaaaagtcacctcgacatttccattttacttttcttcttttgcttctgtaatgtgttattttcttccgtttgtttcttctatttgttttatttttcttggaaattttctactaaggtgacataatttttcattctctccactagagtctcaactctcgatcgacccacttgataacctaatttttgtcaggttcgtcttattttcttttcactgttttcgcatctctttcctttttgttcatgtatctatagtttcaagtcttgattaattaaatc

SEQ ID NO: 13622 - DNA, 605 bp, Arabidopsis thaliana landsberg
  unsure (1)..(605): unsure at all n locations
gagatatttattttatattttggtatatagtttaagattgttacaaaatccactttcaaacacacattacatggtttcgaaccttgttactgaaaataacaaggaggagctaaagccaccaccaccaccagactatgtcatctttggtgaaacatgaagtttaaaatggtgtagacccatgacttcaatgggcatatgttaagatataaacgagactagactatatatgatcgatttttttttcgtcgaaagactatatatgatctgtaattaaaaaaaattgataaatatatctctgatatactgtatatggatcggatccagatattcaaactttcaaatctaactaattgcatagaaaatgtgaccctacaagccataagccccaagtttcacgttccatctaatcaaactcatgcaattatttatcgtttgttcgcctactataattaattataagcaaaattaaaaaaaaaaaacattttcaaaaaccagaaaaatatatttgtaatgaaaagaatctcaggttcttacacagtgatagtacttgcggtttntggtcgagtcagaagatgggacagccatgtggtcgtacatttttgtcg

SEQ ID NO: 13623 - DNA, 1018 bp, Arabidopsis thaliana landsberg
gacagcactggtgacttgactattacgatgatcttcgtcgacaaattctttagaagattcttatgaaaacttttaactaaaaaagcaggttccaaaagtggagagtacatcgtcctcataaccatttctctttgaagtgaagaacaatagtcattataagtagaaattgtcacattcaattggaatccaattccaaataagaagtccagctctaacaagttcatctcctctgtggttattcctccaactttcgcatagaatgcattattgtaacacctatattttataaaaattcagataatatttgttagaaaattgtcaagaagaacaaaacaattctataaaaacttcaatttaaacaaagttttaacgttaattaatgaaatgaacaaaacgagaacaattttcactccaattaaaaagaatcataacttgtttttctaacaaagacgagaacttacaagtcatccatgaacttagcagagaccaagacgctggtgatgatgagtctatggacattaaaggaatcaatgggcaacaatggttgcttttgtatgaaccgatccaaatatatatacgcgactatgtaacacgagtcgctgcaatctgcgtacttgtatatcctctccatatagcttctgattgatatagaaggtttggtcactgcattgaatgctgagatcctctggtgctccctgaacggacggctcaaatcgtcgttcgtctccgacaccctttgtagaagagatgacatagccgttacgacatttggcatgatctcagccattggttcttgatcgtgaatcatcttccgatcaatctgataagccattggatttagagagagatgtgtaggttattacatagattccgtctgtgttggtgtctcctctttcgcctgtcgttttgcgtgtttatctcgcccccctcgtcggacatgtatgtgtcatgctgatgattctcgggttctcactgcagattctccagagattgtctctcttgattcatggttttcttg

SEQ ID NO: 13624 - DNA, 670 bp, Arabidopsis thaliana landsberg
ggggacaacacaaaagaaactgtcgatatttgttgacagaggacctaagtgtgagtggcttgagagcttacctcacttcattaatcttacttatcttcaaccccttgatccttgtatcttcttcctggacacactcctaaaaaccacacaaaattagttactaggtcgtcaagagattgtaaaacgaattaataccaaaatgaatgaaacctgaagctacggtcgtcagcagccttatgagttcggacaatgtgctcgagacggtacttagcatggcgaaagtcacgacgacggttagagagcataacggcagaacaacccatcctaaagaaacaattaggtataaccattgacttgtcacttcccacgtaccaattatacccaaccatctcagtactcacaacaacagcataactattagggttagactgaagcatgtcacgagcaagatcaatagctatgattccagccgaacatcccatccctccaaggttgtaactaagtatgttccctctcatcttgtaatggtttatcaccattgcggacaacgacggtgtcgggttgaaaatgctacagttaaccacaaggacaccaacgtctttaggttttacacgtgtcttctcgaagagttcgtctagtgctccaaagatcactgtagaggcttcttcac

SEQ ID NO: 13625 - DNA, 672 bp, Arabidopsis thaliana landsberg
  unsure (1)..(672): unsure at all n locations
agattgacgaagatattgctacagttgaggtctctgtggatgatgcaagggtcgtgagtgtggagataatccaagcccttgagaatctgtttggaccacttcttcaaagccctcatagagacgtgtctgtgcttcttccggtactctctcaggtttccggaggtacagatctcggtgatgaagttcaaggtgttgtttctctcgtctctccacactttatacagggtgatgatgttactgttcttaaggttcttaagcaacctgacctccgagtaaagcctctcggtcatggctggatcatccgaaaaacatctcagtttgacttggttccaagccacctcgatgccttcttcttggtcaaaggctctgtagactttttttacggcgcctgagccaagaagttcgccgtaccgaccgtatctacctgtcggatctacctccacgaaggactccgagtccttgtccttttcactctcattatcatcggagctcgcacaagtcatctgctagtaaaacagactcaaaattctgattacacgaatttcacaacaacaaagaagatttcagataaaaccagttggacattcagttntccatgtactagaatcacattgaagatggattactaacttaaaaaaaaactacgatcggtacatgtatataagaacccta

SEQ ID NO: 13626 - DNA, 700 bp, Arabidopsis thaliana landsberg
ggccaaaccgttgattttgtgaggaagatgagagaagaatacgagaagctaaatcgtacggagatgagcatttgggaatgttgcgagcttctgaatgagtttatcgacgagagtgatcctgatttggacgaacctcagatcgagcatctgcttcagacagctgaagccatcagaaaagattaccctgatgaagactggctccatctgaccggtcttatccacggtaaattatactccctgattcggtttgatcacgttaaaatatcgtttaccggtttaatgattttgtgtttggtgtgtatgtgaatcagatcttggaaaagttcttcttcactcttcatttggtgagctccctcagtgggctgtcgtcggtgatacatttccagtgggatgtgcttttgatgaatctattgttcaccacaaggtacataaggtccttaaacacaatttaaaaactttgtttgagtttcaaaacatatgaaaaattgattccattgcgggtttcttgatgtagtacttcaaggagaatcccaactatgataacccgagttacaactctaagtatgggaaatacactgaaggctgtgggctcgacaatgtgataatggtctggggacatgatgattacatgaaccttggaagtttattacaatctcaacatgtgtttatgattaaccgacatgtaagaataatctatatg

SEQ ID NO: 13627 - DNA, 695 bp, Arabidopsis thaliana landsberg
gaccaacataaatcatactaatatttgtatgatccaaaagtgacatttccttttacgttgtctgattatagacccattgccttatgcaacgtcctttataaagtcatttaaaatgtttagtgaatcacctaaaagctcacttacatccgaccgtatcagactcccaagctacttttagcccggggcgaatcattaatgacaacgtcatgatagcacatgaaataatgcattcgctaaaagtccgaaagcgagtatcaaaaacatacatggcagtgaaaacagatgttagcaaagaatacgatagagctggatgagatttcctagaaacaacaatgcgactatttggtttttgtaacaaatggataggatggattatggttgctgttaaatccgttcattattcggtttttatcaacgggtcccctcaaggctacattacaacaactcgaggtataagataaggagatactttgtcaccatatttgttcattttatgtggtgacatactgagccatctcatcaaagtagaagcttcaagcggcgatattcgtggagttcatattggaaatggtgccccggcgataacccatctacaatttacaaataatttattgttttctgccaagctaatgtgaggagttgtagggccctgtaagatgtttttgatgtgtatgaataatattcgagagccagaa

SEQ ID NO: 13628 - DNA, 727 bp, Arabidopsis thaliana landsberg
tgctagaaaattgataaaccatcgagtttgatcttaatatgattatgaaatgtgtttttggatctctatttttttgcaggcctttccattgggatctactttgatgccagagctttcaagacagatcttgaatataacggagggagagaccatgaaagctatagagaataaggggctcctcggagaaaaacattgtcttgactcaaccacatcggattctccaatccggctcgatcaccacagctttgaagctctatttacgatcgactttgttgatactatgcttctactcttagccatgttggtttgtagaagataccgccaagaaagcaaaagcggcgagatcaatgctaataattcgccaacagatggtaacatgagagctccacctaatcagccaacagatgataacatgagagctccgactagtccgccaattgatgatcaagtccttgagccacctggtccagcattaaatgaagccgatgatcaagatcagcttctgaatgatgaagttaatgttggagatcgaaatgaagtagatattattgtggaagtcgacccaactttggttcaccgtagaaatctgatcacttcaaaaacaatacccacccgaagagctgcactattctcgaggattaagtctgcataggctctgattgtagtctttctgaatgaacctaattattatgttcttttgtgtgttgttttttgagttttttctcat

SEQ ID NO: 13629 - DNA, 335 bp, Arabidopsis thaliana landsberg
tctcactcaatccatcagacctattcagtaggttgtctagtagcatagcctgttaaatcttctgtttgtaactcgatctgtcactcacacatacccagtgcgcggcagttagccgtgttggtcaactgcactacactgttctacttgaatctttgtttccggcatgggctattacgatgtgctgccttcacccttatatgccattgcatactctcactctcgtacagatctaagtgcagcttgcttcttagcatcaagtcaggtcgcacagtcattgtaccatacctgatatatctggaggatgctccaggcatgctgactgataacctagtatc

SEQ ID NO: 13630 - DNA, 606 bp, Arabidopsis thaliana landsberg
ctaaacaaaacaccaaaaacacttagttagctttcatatcctttatttctatggtcttttagcctctttggaccgtctcgaggaggcttactgctcaacaacttagctattttttatggtacacatatagtattagaataattagaacctagaaagatgaggacttgaatagtttgggggaatcagtatctcgccaatccttagtatcaccacataattttaatacaatgtcgtcgttaatcacagccaaaactcaacactattaatactaattattatacgtaaaagttttagaattcaccattttagcttgtaaaatacccgttaaaaccttgtgttacatgcatgtgaaaagacatcgaagaactgaaaatatgtttgttgagtataattttagagcaaaatggttttaaggaaatgaaaacgacaagtgattgtaaattataatcacttttattaactatagacaacagataaaggtaccaacaaggcaacatgtttgcttcaaatgcattggtggatatgatgagagctacacataacttcatgaatgagataaaaagagctactcaatacattatgagtgatataaaaaaccaaagagac

SEQ ID NO: 13631 - DNA, 947 bp, Arabidopsis thaliana landsberg
tacttttgacacggagacattccaatccattatgataatttttctataactcatgtgacataaaaaataatatataatataactctcatacatatctcacaaaaaaaatatggtcatatcttatagattatgatatctcgcatcctagaattacgatatcctatataatgtatcaaattattacaaaatttaaggtttaccgtatagtttttgattttgtaacattgaattgtgattctttaaaaatatagagtaaaatcgctggtcaagtttaatatcacattgaaaaaaaaaacaagaggttaatccatctattaaccacaaatttgtttggggtactgtaaaatgacgcatttttaaaaatgtttatagttatgagtacattttctcttttttataagactattttgtcttttcttcttccttttacctttgttttttcttcaagatttttgattataaacggtgggtggtgattgagctcttgtaacgatttcaatgacattgagatccaagggcggtgactcatgactcatgtctagtggtgaaacgagatggatgaaaaagacggcaatatctcggcttccgattaccattcatggtgagtagtttcagcgataatggtgacttgagcaacaatgaaaagcaaaagtggtagtttggatctttatatgcagtggtgatgaagatgatttaggatttattcgatattattgataattgaagaggttgattcaattgaatttctaaacatgtaattgattttatgtgtctaaaattggaatccttgggtttcctacacatcatccccttagggtttagatttttttttatcaaaaaccagttaattggatcgattggattcaaaaagtagaagaagatcaatgaattttttggaaaaaaaacagatgaacgaagacaagatgtgaagaagaaaggaagaaaga

SEQ ID NO: 13632 - DNA, 528 bp, Arabidopsis thaliana landsberg
tgtcaatgaagcatattcgtcaatacagaaaaagctttaccggtttgatcattaacaaaagtccagttcagcaaaggaatttgtaacaagtagaaaattaacatatgaaagccactgtttggttagctcactcattcaagttaaatttctttcagttcatccatgaaattcttgaatccactggttctcttaatcagtaaaaaaattttgtattccagagtaccacttaagcaaggaaaggcttaaatactgcaagcataactcaagttataagatcattattaggggtctaccttgcacgaggaattaacattcttgtggcatccaatagatcttgcaattggacggcagttttaagttttgtctgtaaaaaaggaaaaaaaaaatacacggtatcagaaaatccctataggcggggcaaagttgaaggtggaaaatcccaagcctctcacctcagctcttggttttcctccattgtacttcaacatcaggtttaacagtttctcctaaataacttaaagtttcact

SEQ ID NO: 13633 - DNA, 849 bp, Arabidopsis thaliana landsberg
tcagcaacgtacgttgatgtcggacttcaattgattaattgctgatatgacaaatgcttgctgcatttggtttggtctgggtaaattttaatttatcttcggtaccaatgtaaatcataaacagtgaccttccaatgaaatcgtcggtccaatttgatttcatacttctaaaattatcgacttgctgatttagtgtcatctacatacatatacgatttgtgataaaaatactaatacaaaaaatcgacaggaaataaattggacgatggctggcttacgtacggatgttgccggatagccaagaatagaagcatcggcgacgccaaaactggctccacgtaaaacatcaacggctgttttaaatactggtgggatctcttccggaatgcccatgaattcagctttatcatggatcacaaaataataaatttgcaataaaacgattgttagtaatcaatcataaactaccgtttccaatttgaattttatatcgtggatcggtcgatatgcatagtagattttagaagagaacgcataataagttggaaaaaagtgtattaagtacgtaggaatgtacaaatatgtaactgtaacgtaccgataaagtcagggactatgcggccgtcagaaaacttgccgttggggtcatcgcgggatttcccgtacggccaaaagctttggggaggatgttgaaatttgcttacaaattaaacattttgtttccaccgtcaaagtaagagtctccaaaagtgaacagtcctaccgccggattactctcaccgccgagggcagcgacaatgatcggatcatggaagagggttaataccaataaataccctagaagaatga

SEQ ID NO: 13634 - DNA, 619 bp, Arabidopsis thaliana landsberg
tatgtaaattttgcacacttttggacctaagtgcaaaaaccaaggaattagggtaccctaaagcatatggttcacagatgtgaggatttccaagtcaaaagatgtgaaatgggcttatttgccaaaagccactcaattcctctcatgtggctaagtctgaaaatcagtgaatatgacaaactttggagctttgtagatctaaaaatgcaaagaatttacctagggttaatacataaaaggtctagaactactataggagaacaacattgcttgagtaactaagctttgatcacatacaaagtttggagaaaaatctgttcaaagttgtgttgtcagttagccctatgtctgaattctcagtaacagtgaagttggatgaacttagagctcgattttgagtaagatcctgtgactatttgatggtggacattataacaaagttaaagctggtttgttaagctacaactttgatgcagagagtgggtcaggtcactacataaaatctgaagcaaatcgcgttgtgaaatgctctgtcagaacaactgacgaagcttctgatggtacaataaccagatcagatcgccagctcagtgactcaccgcagcgaccgtgcgcccgg

SEQ ID NO: 13635 - DNA, 569 bp, Arabidopsis thaliana landsberg
  unsure (1)..(569): unsure at all n locations
ctctaaagaattcctttgcatgcaactgatacttagtttctgaagactcaaccataagtaatccattgttaatttcccaaaaaaagagtttttgagaccccagaaagaaacaaaaatagaaaccaaggaaccttgaatctcaagttgaacatcagcatcttcaaacaaaggcttcacttccttaacaaaaatctctctcgccgatttcttcccgccaaacgggttcacaaacacaagcaatctctttggccgacctaatcgaaatttccagttttagctatttgagtgatacacaagttttcgactttttctcgaaacaacaaactaaccgagagaatcaaggtattgacgaagcttatagcaccatnnnnnnnnnnnnnnnnnnngctcaaagacgaaatctttcctcacgaagtctccaccaaattgtccgcagcagattcctcctgcctctttctcaaccacggcttttactctaatctgcttaccttcgacgatgaaaccaagaacatccttcttcatcgacaaatactgccggagtccgtactctgtccaccgtaactccccgt

SEQ ID NO: 13636 - DNA, 1060 bp, Arabidopsis thaliana landsberg
caacacaaatccagattctaacataacagcatgaacagtcatgatcacaatcgtcaattcacaagtgtcaccagattcctccatcaatatatttttcaacaagagaggctcgcttaacctttttacaccggagagattcatgctgccaccggaatctacgaacaatctcctgatgattcgtttccgatttctgatcaaacgcactaaaatcagacgaatcgagagagtaacagccgcgaggatatcaccgtcgttgtaatcaatcgacaaacgaacagaggaaggcgtcgattcattgatctttagccggagatcatggaggctagactcatcggcaaactcgaaagttggggtttcgttcgtctcgaggtttctcaactgataaaagagaaggcatagatgataaccagttattaattcccggttgaaccagttgctaaccggttatcggctcatttttaaatatctatgggccgaattaagctttgtactgggtccttatcgtaaagatccgacccgacccgggtttaaaacctcaccttcgtaaatgacagaaatgtcgccgaagttttttttgagagtttgagaaaagagtaaacatggcggccaacggcgtgagaagagctcttcaggcatcgtcatcctccgggaagatactctttggtcgttcatcagcggcaacttctgcttcgaagatcggaaaatcagccggaattgctttcgggaatggatcatcttcttcaactcgtccctcacttcgtagactcacattctccaggttagctatcgaatcctagaaccgagattctacaggcgatagatctgttttcaatcgagaaatagtttgattttgcgtctacaatgtatgagctttatgctgaagaattagggtttatctctgaaatgtaaatttgggttttgtgtttagggtactgtggaattgagtgcagggattcactaataccattacatagtgtactgcttcactttgctcactcattgctatctctgagcataaaactggagtgcttacagaaggtgattgttacttgtgtcatga

SEQ ID NO: 13637 - DNA, 588 bp, Arabidopsis thaliana landsberg
tttacccctggaatatctcattgtttccttcttctttcatcttcttcctactcttcttcctactcttctcgttctaatttttcccagaaaattaatctatttatcccaaaaaatcaagtcttatacaaatacctattgattcaatataactaaaccctaatgatgatagtatataggaaacccaagcaaaaaactcaaatagacttttgataaaaatttgattttgagatttcaaatttgaaatttgattggttcgttttctgggttttgaaatttgtttggggttttgcctaatttttctccttttgaaatttatattcgatttaatttgtttgtatgttgctgctgaattttgttgataatttatggattttttatttagaaaattcaacattaataagttagaaaatccaaaagcagaataaaaatatcgatttgagttctatattccaaaagaaaagatctgctactataataagtttgaatttgatatttgggaatggtagaacaaaagagaaaaaatttgcagatatggagaagatttgatggaacataagggtaaaatggtaaaatagaagtggaagaact

SEQ ID NO: 13638 - DNA, 590 bp, Arabidopsis thaliana landsberg
  unsure (1)..(590): unsure at all n locations
ggaaaaaccttaaatagacttttgataaaaatttgattttgatatttctaatttgaaatttgattggttcgttttctgggttttgatatttatttggggttttgcctaatttgtctcctttgaaagtttatattcgatttaatttgtttgtatgttgctgctgagttttgttggtaatttatggattttttatttagaaaactcaatatgaatcagttagaaaatccaaaatcataataaaaatatcgattttgagttctatattccaaaatgaaagaaccgatactacaaatcagtttgaatttgatctggcttaggaatggtagaaagatagagaaataatttgtaggtggaagaaatttggtggaacgtaagagtaaaaccgtaaaaaaaagtggaagaaatacctaaagttataagacacaaaaaagtgtcgctttatacaaagggataagcatttaagtgctattttcataattggtccatgatatatgatagtgcataatatatgacaatacgggatccagtagtgatgatcggatgtgatgctaggacatttatcttgnctctgattatgctaggacattatc

SEQ ID NO: 13639 - DNA, 1031 bp, Arabidopsis thaliana landsberg
ctcctattatggtgccattgtgagttaaagtggcacggtactttgtagagaactcggtagttctcatgaaacttgttgtgcatttgagtgactgttagaaagacttttaggtggtgctatgaccgagactagcactcctagagattggacttggattttgattttgttgaattctgttatcatgtctttgtatttatatatactttggacaaagctctcagggtcagatgatgatgttgaattccaaactatttttcatgcaaaaaattgctatacattaccgtaattttgccgggatttaggaaaagattcttcaggcaggtcttgtgatggggatggaccatcttccaagatgagcggtgttactcctttgtaggattctccacgtatggctccaataagtttctcgtctgtgcctcaatgttcagttgtcatccctcgagtttgtagagataaaaagcagattcaaggggaggcctgatgaagtggcaaaaggtactttgtagagaactcggtagttctcaagaaacttgttgttcatttgagcgattacatgcagaaacgaagtttggttcacttattaagggatctccttgcattcccaaggccgtctaactgtcaaatcgtatacgttgttgactgttagaaagacttttaggtggggctatctagctacgatcagaccgatattagcattcctagagattgaacttgcattttgattttgtggaattctgttatgatgtctttgtatggttttgttgaattccaaactatatcttatgcaaaaaattgctaaaaataacattaccgtaactttatcggggtttaagacaagattcttcaggcgggttttgtgatagggatggaccatcttccaagatgagcggtgtagtttgtgcaacggattactcctttgctactaggaccatccgggaaatctatgacactgatgctacctgcgtctaggtgaaacaacccgagcgcttatttagtgaggttaaggcattgtgctatgagtgaaatgtgag

SEQ ID NO: 13640 - DNA, 620 bp, Arabidopsis thaliana landsberg
cgatgcatgatgaatatactgcaaggattgagcaaaccctgcccccagcttcggcagacaaagctgccaaaccgactgatcctgaagctgacgttgtagccgaagaggaaaacctcacaaccactctgtccaaaattgatagacttatatcagatgtggttgcggagaaggaggtgaacgcagtagtttcagacaagggaaagaagattgacgaaacctcttcagaaggagcgaatttcgacctacgacacttgggtggccaacaactctctgaagaggacatatcggagttgaaagaatttgcgatctcctgtggctaccagccggggtcaatgctctttggcggggtcgacggagaagtcatgggatgtatccgcgaccgtgctggtgctaaaattataagtatcatgtctaggagtgttggattccgaagctcgaaaagaatatgagctgctataggcgtcacgatatcataggcagcctgttttattctaacttcaaagtaagaacctttttacaagttatctttgatatgtcataatatcttgagtatctaactttgagtttgtttcacagagtttgttactgagcaaagctttaaagatgcgacaagatgatga

SEQ ID NO: 13641 - DNA, 751 bp, Arabidopsis thaliana landsberg
tttttcggatattttaatattttaatattatttttaagagtatattttggattttttcggatacctgaaatattttggttcggtttagttcgattctaattattataattctacaatttagatccattcgagtattttactattttggttcggattcgagttcggttctttttactttggttccaattcgattctttcggttcgatttattatgtccacgcctagaatatcttgataataataccatttactcaaaccgcgttaagaaagaaaaacacgcgtaagaaatttacatttccttttaaattaaattgcgttaatttctcacttccctttacttcttcttcttcaccatcacaaacatcttcgtctcttgaagattccaaaaaaaacaaatcaaaagctatgcaagatccatcacgacccgctacaggttacccatacccatacccatacccgaatccacaacaacaacaaccacccaccaacgggtacccaaaccccgccgccggaaccgcttacccctaccaaaaccacaacccatactacgcgccacaaccaaacccacgcgccgtcataatccgccgtctcttcatcgtcttcacaacattcctcctactcctaggtctaatcctcttcatcttcttcctaatcgttcgtcctcaactacgagacgttaacctaaactcactctccgtctccaatttcaatgtctccaacaatcaagtctctggtaaatggaatcttcaac

SEQ ID NO: 13642 - DNA, 582 bp, Arabidopsis thaliana landsberg
aaaccgaagtacaaatgtaatatacatttttgtgacattatgttaatatgtaatatgagttataaacttgttctaacatgtgaaataatatgaataattaatataatattacattgtaatgttgtttctatgaattaataagacttgttcttcttgactttcgtccaagattcattatccagcgaagaggataatgcttcggaggacgaaggtccttaacgtttaacgattgtgtagccttgtttttggttcacagctatcaaaaacaagtgaccaacattagcgcccaccaccggtgaactcacttccacgaccacgacaatggcttcgcaaagtcatcaagcagcgtcacctttggcaacgaagctcgtgcttccgatcatatgcggttcaagcttcgaaccagcaaccaagaagcaaaagaaggaagcacaaagaagggtacaacatgtcggagtacaaggaacctacatcaagtctaaatggtctcatgtgccgatcacattctctcaagaggaccttcaccttaaggattatcccacaatgatgtcatggttatatctgtgtcattaaagggttttt

SEQ ID NO: 13643 - DNA, 619 bp, Arabidopsis thaliana landsberg
gtgcggtttattctacccttatcggcttctttggtaaaagttgggttccaggcggtgagaaagacagaaagagagctagcgaaggtacatttaaagtgagatggagagtgagaaaatctgttgctaaaagcggttcaccggagaagatacaaaagccggcagcaaaaaacttcaactttcagtcatgtcaaacccggaaatgaacaaacttctcaacaatcttgagctcaaaaaactcttgggaaaatctgaggtgtgctctttgcgattctctgtgtttgtttccatctgttttagaatcattttttcctatttagagcacaatgcgtaagtctatttttttatattgttaaatggatttatctaagattatgtagcttttgtttgtaggttatatctatctgcgacattgagctgatatgcaaacatcaacctgagcttatatctaagattattgatgttcttgtcgaatatctaaatactggtactttggttattttgggttgtttatccttaatttacttattctgctttcacaatttaactcatatgatcaaaatagagaaaccggtggagtgtgatgccgtgcaagaggtttttatggcgatggttcatgttg

SEQ ID NO: 13644 - DNA, 569 bp, Arabidopsis thaliana landsberg
ttgttgcaaactcctctgaaattctccgtcttcttcattcgttttcgactctgcgttctactacttctcgtctcctatcagtatcatcgcaattcatattcagtctagtgtgttaaaccggagaatttggagtctcgccggaattttcctctgtctatgtatgattgccggtgatcaaagcgcttcttaacgattctgttctcctttgagagatctgagtatctgatttcatctactacatatgttttctcgagagtgatagaaagtaggtctcatacatatttttcctctggagggaattttgatcctctgcttcgttaattaacttgtgatgaagcggataagagatgatgtatatgcctctgggtctcaatttagacgtcctcttggttcttctcgaggccaattgtgagtttctctaaattcacccttcaaatttcggttttgatcttggttctgttttgtggcgattaggttttctataattctgcatggagagtgacaaatatttgttatgaattgagtagttttaagtaatcgattagagatgatttggtgcagatgtggac

SEQ ID NO: 13645 - DNA, 562 bp, Arabidopsis thaliana landsberg
gtcagctcagtccattggcttatgtcacgagccataagccacatggcagcagcgggtctctgcttgagcgggaaggtagggcatggtctggacacgtgccggcactggacccctactcttgccggggtcctcctcgtatcgggatcttgccgaggcccgaaccttactcggagggacctggagcttacccgagggacctggcatgccctcttgggagctccggactcatacgtacaggggtccggtgtccctctgcggatgtccggacccatcgatgcaccctggggagtattatctttccttgccacgtggagcccctagacctgcccatgtggtggggtcgggtgctgctctccgtgtgacctggaggtgtcgtacgggtgaagcgtcttcatactgcagaagatggtacccctgtctcaaggtaccgacagtggcccccgagcccacctcaggggagggtgcgagcctgcatgtggggccaaacatgtattctgcgtaagaacaacgtgaccggggcatcttcttagcacgcgccgtactaacccagcgtgcacatgct

SEQ ID NO: 13646 - DNA, 575 bp, Arabidopsis thaliana landsberg
aaggtggcatacacaattattttttaggatatagtggcataagtgttaaaaaaatccctgattttctactctccaacatccttttcaatcatagcatacacacgcgtctccatcgtcaggttgccaatcttagattcacaagcattaaagcctttttgcgttgtaatcaaagttcattctaagttctcgaatttctttatcaagtcttcactctcctcaaccatacaagtatccatccatttgaacatctgagacctcttattctatcatatttataagcaactaaatgcatatcttttaagataaaaaaaaaaaacacaacgatatatataattgagccacttataatttctccaaaaggacaagcatgaaacagtctcccagggattttagcagtatttgacgtcttcatcactgtaggttctccacatcgacaattcttaaaaaattctcttaatcgatcacccatttcacaactacccaaattttttatcaattcagttccatatctttatcaaatcgaagctcaaggacgaatttttacaccgattaatgtattaatgtgttatgttcaa

SEQ ID NO: 13647 - DNA, 594 bp, Arabidopsis thaliana landsberg
aggtttagaaagaatttcttagttgttgatcttttgggtttcagtaaaagagaaaatagataagtaagtcacctttggatgaaagaacacgattcttgtgttgtccactgttgagaatctccacattaaactgtcttgggattgtgtcaaccgttgggatcttgtaagtccatgtgctgtctgttaccacgagaccgtctgagttcattaggaactcttcaagcatgaagaaaccaagtccttgaacaaaggctccttcaatctgtaaacaaaacaaaataaaataagagaatcatgaaacagaacaatataacataaaacggcacatagagtggtttcctggctctaacctgtcctaaatcaacagcgggattgagactcttcccacaatcatagataatatctgtacgcaggatcgttgtttctcccgtcaaaaagtttacttcaacctattgatgaacaaccaaagaagtgaattatttcacaatttgtaagtaagctaagaagagctattctttaatatatagagctttaccctcgctcgctggaattccatagttcaagtattcgccagtggagtcaggcatgtatttg

SEQ ID NO: 13648 - DNA, 949 bp, Arabidopsis thaliana landsberg
cgaattgtttggaccaaatcttcagattattcatcttagcctccagttcattggttagcctctctttttctctaaagatcctgtttattttctcccgcgataactcctgcattttttttgtttctggagaaaaaagtacagagacgacacaaacataaactcggatgcagccatggtgaaacacaagcaatcagttttcagtacaaaccttgtttataaactcggtccagctcgtctttctctatgagaaccctccgcagagagagcgttttctcattgttcatgtactggagcttgttcagatcctcatttgtcatagcaattttatttgctagatcatccaccacaatactcttattctgaatttcctccttggtgatatcagagaaacttctcagttttcctactttggacaggtactctgctatcgacccttgagagttgtagtcatctgcacgtgcgcaccaaccataagccttagacctccagtctcctcttttatcaatccagtcctttctgccgcagcccctaatctcatattccttctcaagctctgtgacactcttaaacccactccaaccactgttaaactgaggaatgacggcaactacggattcctggtcaagccaaagggttttcacctcaagaggattgaacctagcgagcttcttcaaccagtaggctgaatcaaggagcacattcttgttatcagttcttcttacagggttgatgacaatccccatccaaggccagacataaatgtcatccacaactgcctgagactgctccgttgaggaagaggggatttgtgggcgtgggacatcagcatcaccagcaagctcgttctccatgtatttagccaacgcaaagtgatttgctttttgcttagcacttctactcgcagatcctttggcaacaccagacgcatgagcaagtagctccttatact

SEQ ID NO: 13649 - DNA, 661 bp, Arabidopsis thaliana landsberg
ggttcttgacacatttttcaggctgtgccaaaatcaaagggtcaagcacttgctgacgaatatggaatcaagttctttgaaacagtaagtgaatcattgtctcaaatcttgaatcttatgcgaacaactcaaaccacattggtcgtattcattttgcttacatagctaataagtcacttcacatctcagagtgccaaaactaatctgaatgtggaagaagttttcttctccatagcaaaggacataaagcagagactcgctgatactgactctagagcagaggttattagttacttgttacattttcctaaagctcttctttcatttaacatttctttgtccaaagaacttaaaagaaacttttttgtaacaatttaatcgttcatctcagcctgcaacgatcaagatcagccaaacagaccaggctgctggagccggacaggccacacagaagtctgcatgctgtggaagttaatcagtcccaaaaggctccaaagttgaagtgaagtgaaaaacagatttatcttggggtgcttttgtatttttttttcttttgattatttgttcttatttgacttcttctagttggttcatgagggtaatagaatcttttaagaaattttccttctcagacagattcgatgtcacagaaagctgatct

SEQ ID NO: 13650 - DNA, 500 bp, Arabidopsis thaliana landsberg
tggcaatctcgcatgtgtaaaagcttctttcagtaaatcaaataccatagatattcccttgtcgctaattccacacatacattcagtggcggatctagaaaccaaatttatatggagcacatattatatttaaaaatattatttatataacaccaagatacaaaataaatatgatatttatccttaatgtgtttaactttgaaatctaaagacactaaatcaaaatgcatttaaatgtacttaggtacatatattattggatatgtttaatatatataaatatgtatatttatccctctatgttgaaaaatttgttaattaagaacgtattgttacaactcatgttagaaaatgtaaactattaataaaactatacattacagtagaaattgatgatttaaaatttgttaagagtttaattgaattagggagataaatatatctgatagaaaatggtttcatatgaagaagataataaagttcataaaagagtatgcagc

SEQ ID NO: 13651 - DNA, 539 bp, Arabidopsis thaliana landsberg
tcaaagccgcgtcaccgcctccttgcactccggcacgatatagcgctgcggctgctcggcgcgggtcggacggcggcctgccggcgtcattatgcctgttttccccagatggcgcgctgcacgtcccggtaatgactggcgaagtggacggtcatgccttttctgagatggtcgggcagttcgttgtaatcccgctcgcaggcggctggcatgatgatctcgcggatgccgacccggcgggcggcgatgatcttctcgcgaatgccgcccaccgccagcacctgaccggtcagggtcagctcgccggtcatcgccagcttgcgtggcaactgcttgccggtggccagcgaaatcagcgccgtggccatggtgacgccggcgctggggccgtccttcggcgtcgcgccttccggcacgtgcaggtgcacgaaggattcgttgaaccagtcggcgtccccaccgtattcgcgcaggtggctgcccacgtagcttgtggcgaatttcgcggtttctttattaccttgccgagctgcccggtc

SEQ ID NO: 13652 - DNA, 737 bp, Arabidopsis thaliana landsberg
gatcttttcgcggataccacccacggccagtacctggccggtcagggtcagctctccggtcattgccagcttgcgcggcaagcatttgccggtggccagtgaaatcagcgccgtggccatggtaacgccggcactggggccatctttgggggtcgcgccttccggcacatgcaggtgcacgaaggattcgttgaaccagttggcgtctccaccgtactcgcgtaggtggctggccacatagctgtaggcgatttccgcggattccttcatcacatcgccgagctggccggtttgcttgaagccacgacgttgtgtgtgcacctggctggcttcgatggacagggtggccccgcccatggcggtccacgccaggccggttaccacaccgacaccccgttcggtcttttccttctggaagtagggcgcgccgaggaagtccgagaggttcttgccggtcacgctgattttctgctgcccggaaagcaacttcaccacggctttgcgaatgatcttgttcagctgtttttcgagattgcgcacgcctgcctcacgggcatagccttccgcgatctggtgcagggcgctgttgctgatcttcagctggctggctttcacaccggcacgttgcagggctcgtggccacagatggttgcgtgcaatttcgaccttttcttcagtgatataaccgctcagacggatgatcttcatgcgggccaacagcggagcgggcacggaat

SEQ ID NO: 13653 - DNA, 923 bp, Arabidopsis thaliana landsberg
gctctccgtgtggtgtcagacaataaaaaagaaagaaaagattctttgtgattgagatctgagcatgtggtttccatgaagcaaggtgttttgcaaatactttaagcagatcattaaatgatacatatcaggtttaaagaggtagttttaccgggtttgagatcacggtgaatgatcccatgggaatgcaagcattccataccacgagcaatatcaagcgcaaaaccgattgccagcacgagtctccaaacatgcgggtctcaagtttaatagatatttacgcaatgtaccgccttgaagaagttctgtaactatcaccattacaggctccttgcaagcaccaatgaactgatccagagacaaaacacaatcatgaactcatgaaaccctttaagctagtaacaacaaaaacagccatagatctcaagaaacaagaaccttgaccaaattcttgtgttgaacacgtgagagcatttctacttctctaaggaatcttgaatctcttttagcaatctcttctggtgtttctcctctgtgaactatctttatagcaactgtctgattcttgtatctgtctcagatcataacgaccaaacacagtagagatccattaaaaactccaactttacaatttcaataattcaactagacaaatcaagatagatgagtgtaccaaacaagcattttattcatacccttatagaacaaatactagacttcacttacccacaaatcaaaatccaaactttcccaataatctcataagcaaatcaaatccagaaagttaacaaagaagaagaaaggagcttactttccctcatagactttagcatgagctccttcaccaatctttggaccaacaaagagaagctgaggatcaatttgccatttgggttccattctaaatccagtcaaagaatccg

SEQ ID NO: 13654 - DNA, 1251 bp, Arabidopsis thaliana landsberg
  unsure (1)..(1251): unsure at all n locations
gtaatgttgtagtaacagttttgtgagttatgttttagtgtacttgtggacgaggtaatgaaaacaataatggtgggtggggttttagtttgttgagagagagtgcaattattttttgtaagtagtactactctgtgagatctgcaggaaagagattaaaataaaagttggggccatgagtgagttgttgtgttttggagtaatgtgtgtcaaagagttaagagagagcatcttcgtcatctacatgacccatttgtggtttgtcttattaacatttggtgattgaaactgcatcttttaagtcttatctaattgtctttttgttagtattattatcatatatgctttattgttaaatatctctatctattatttgggatttttcttcacacttcataaccatattacatcaactcgttgttgagaagaagaaccccaccatgagttatgtatggtttttgtttcctttagttaaaatatctattcttgattaacacaacatatcatacttttagttgctcttatatataccaaatttacttgtcattatcaaaatcaattcatatggttggatgtccctagttcaaagttatgattcgcattactacattatcttgaaatgtggtgaaattctaactaataattacgagtgacgggaataagaacggtgtcgttttctggctgccacagctgcgacaaaaaaaagtgtcgttgaaaataaaacaagaataaagaaatgacgtgcacgtatagcgactttaaagatccaccgcacatcagagaaaacatttagctgtcttatctatctgaaatatacgattcaacccacatgaacttgtctccgtttgggcccaaatttttatttaagtagtctccctgattacatttgtgaaattttagaaaacaaaagaaaaaaggccacgtgagttgtcgtaagggactagtagtaaaaacagaggaggaggtccataccttaacatgacccactactctgaaaagagaaaatctcacttttctttctttcttctccatatgattctcaataagagtaataatttgagacagattacattaaagtcagtcatgtcatgggaccttaatacattntaaggagacttgntcttatttgttatttaactcatatcagaataaaataatgagttctacaaaactacttttgtatgatacaagaccgtattggaaagtgaaacactataatcattcataggaccggtctaacatcatactagc

SEQ ID NO: 13655 - DNA, 1056 bp, Arabidopsis thaliana landsberg
ttggctccgtaatctctaattcaacttcagaatatgttacttccggatgtgattgtcgccctgattttgacaatgatcagaattatttcacaagatagtgattaaaagccgcaattacgaaaaagattactgatgagttttacgttactaaccaagcctgtctgcacctaatagcttcttctcgaactttccgtttcggatcatcgagtgacttttctattgcttgtaaaaccttgaaataaattccaaaggcattagacacatttcttactctacactaaaaacatgtgggttagatcttttaactaacctctcttctgaaaggataaatccttctatgcggcaattccaacaacgcaacaagacactgaattgatgtttctctaacaacctgcataccatttaacgtggacatattatcattagaagattcaagaatcaattccgttggaaaaaacgaagatgctatagaaaagaaaatgatttgtcaccattagatgcggatatgatgtaagcttgatcaggcattcgatgattatatgtgcattatcactggcagattgttgtcctgcaaacagatcaaatggttaattctcggcaaaattgaatataaaatgtctttttgaggcttatcaactattgcattaactcaaccatatacacaatccctattatcagtgggcgcaaacgaatttgaatcatataagaattgtttgatcttcaacaaatgaagcaagattttatataatgcaataagcttttgtatcccagcatctaacttacccttagtatcagtaagcgttccagataaaaccagtaatagactgaaaagagtttctttctccacagagtccaagcttaagacagacaagccttccagtatcaacggttgtagctgcacagaccaatgtctaataagaaactgtttaaaaaggtacaaaagacgaagtctaaattaaggctcacctttttggtattgtccaatatgactgttaccggaacattggatataacatgagcgagagctacatgcaacattgttctgaaaaaaaatga

SEQ ID NO: 13656 - DNA, 1006 bp, Arabidopsis thaliana landsberg
cattatccctctatatatatcgtgatatattacaggatggtgtcaaggacttggtcctctatcttttttttgtgtcacaaaactaaaactgaaatttgattgataaatttggtgtggaaccaagaaattacatagagcccaaataagagaagcaaaaaccgacggaagaagttaaagttttcggaaacaaagccggacgaaaacgaagatatccctgaaaacacagccctatataagagaaacaaaaaaaacactaaaaacacaaagcagcaaaaattgaaccctagatgtaagagaacgaatccaaatacatatacaaaagcaacaaaggtaaaaaccaaaaaaatgataggcacaagcggcagagaagacttggtccttcaatcttctgaatttttattttttttagtaaaaattatttttaaaattagaatataaagttgaacatttgacaaaagaaagttatgggtcaaatatctgaaacattcacggtttatcgggaaaaaaatcggtgtagttcattgttgcaaatcattggttcggtgtaagattcttttttgttgagtacgtcagattagtggtgttttattttaaataatttgtaaagtagtcgagagtccttttaattactaggcaacagagatcccgcgagcattatagtttgcttataagttataagtgatgaccacatgcttccttttattttctgttggaaattatattattatactacaatatgaacgtctcttaaacactgatcatgaggacgacaaattagaaaaagcactgatgacatgttagatttaacatattcggattaacgtaaggaacaaaatctcataattatgcttcttttttcaacttcataattatgcattttgaaacaaattatgaagtggtgttccaaaaggattagacaagttctattttagacatatcgttagatatctgtcaataaaaagatgacatagtgaatttttggtagcgttgaaagaatacataaact

SEQ ID NO: 13657 - DNA, 562 bp, Arabidopsis thaliana landsberg
tttaagcttcttgtacacctttctgagccaccttccatggaaaacaatttatcttttgaaagagaaactcgactttcatatacgccacattatccaaaaacgcagaagaccattagaaaggggaagatattgttgtttttggagctgcagagaaactgaatattatcctcacggttgtcagagaaagttgcttggctgcttccaagtatatttgcacttctccacacaacctacaaatgacaagtggaaagtaaatgattaatcgtctcttcctcataacagcatcttagactgatcggatccgccataatatttcttgttcttagcgaagttgttgtggataaagccccctaataaacatcgccataagaaatgttggatctttggagatattttaagtcaccatatatcttttttaagttctaggtctcccgcaggtggttgaataacttcgtcctctagaaggtctacattagtggcgacccaatatcccaatcttactgtgtgttgaattttgcgagtataggcccactcataagagtccctttccttttggagagct

SEQ ID NO: 13658 - DNA, 543 bp, Arabidopsis thaliana landsberg
catgtacagagaaaaggtatcatttttttttattacagattcatttccatttcttgtctctgatcatgttagagtttcgatgacataacaataacaacatttttgcagaaattctcggctcttctacttctgcagctttcatttcagagtcttggtgttgtttatggtgatttagggacatctcctctatatgttttctacaatacatttcctcatgggatcaaagatccagaagatatcattggagctctatctctcattatttattcactcacactcatccctctcctcaaatacgttttcgttgtatgtaaagcaaatgataatggtcaaggtagtgtttcctcaattcacaagctttatttcctctgttttttataatcggtgttactgacttgattgtctttgtaggtgggacgtttgctttgtattcattactctgtagacatgccaaagtcaaaacaattcagaaccaacaccgtactgatgaagagcttactacttacagccgcactacgttccatgagcattcctttgctgcta

SEQ ID NO: 13659 - DNA, 967 bp, Arabidopsis thaliana landsberg
gacgtcttttaagttgtttagattcgtttttgtaaagtctatccatgtggcatcctagtcagctacattaacggtttaactaacggcatctattgatttgttggtttcagccatattttgattgtttatgtagtaaattcaaattataagttagttcatatagttaaaagcatacttcaaagttctatgtatggatacgataaagtaactaagtttggagtggaatagaccgttctcccgctcttttgcagcctactttgagatgaatataaaccacagcatgatgatgaaaaccatcgccatccacaagcttgcggtgtcttgaaggccggccggaacataaaacccagcaaatagatgctttttttttttttttttttttttgtaaacagcaaatagatgctttagacagcaaattttatatgtattttaaagaacatcaaattttatggaacgtcttataatctattggttttctgtgctttgaaggtagaaagtgattggttcgatccttggtaatcgaaaatattaaaacagttttctatttttatttgttgtaaatggacatcaaattttgttgagctttaaacatgattagtctttggaccgactctgaccacgaatgacaaattcaaaaatcataatcaagtaggctatgtgtcaagcaactacaattaccccgcatgtcaaaacccatttccataaacaagccgtcacaacaaaaacgccaactatcaagattgcttccaaagcgatcaaaagattcctccatgccgattgaaaagttattctttaatcttatttatcagaactgaaatatagatataaccggtttggatcctttatttgtacgctcacaaataacacatattagtaaaagttttgcctttcattttgatgacaagctattaattaaagggatgaacatgaaattaatagtgcaaaggcaccgaaccatgcttttggt

SEQ ID NO: 13660 - DNA, 796 bp, Arabidopsis thaliana landsberg
  unsure (1)..(796): unsure at all n locations
tgtgtgagaattgctgcccgaaaactttctttttctctggtacattgtgaaacacaatgcacaaaataaaacagctgctactcctccagcagaaccaatgacaaaagctgtgattcttttgtcaccttgaaagtcctttttaacatcttcattagcttgcataggtgatggcttagggtttggaccggcaaggttcttcattgtgtcaatcttgaaaatctctagcccattaagctgtgaatcgtaatattccggttgaccaaatgtcgaaggcgtcatttgaagcgatatctcttcccctcctcctccggtattagcatcaacatatatcgcgtaatctttgtaagtagggatacctttcccacctgtccacccgagtatatctgcggggtttgtatccccttgcgcggttctgttgttgatgaaaatgttgaatactttctggttgattttagcaagctggaattcacagaagtggagcctcatgatataggtgaaattagtgtcaacttgaaacatccatgtgagatttgacttcatgttgatatctccgtttggtccttgtgatcgagctgttttgtaannnnnnnnnnnnnnnnnnnnnnnnnnnnnnttctgataatcaattctaaaattgttgcttgcttgtaaagtaacaccaagacctgcgctgaatatataaggcgcgtcattgtaccaagttctcgttaatccaccagagtcttgacttccgggaatatcctgcccaccgacattgagcctaaacatcgtttgaagattcgcggtgttagtatcc

SEQ ID NO: 13661 - DNA, 915 bp, Arabidopsis thaliana landsberg
tcactgtaaataaccttctttcagttatatcaatgctgcatttttttctagctcagtattagatagtttgatgaaaagtatcagtaagtcattagtaaatcagaatttatatactaacagaattaagcttagatttgggaattaacaataagctgcatctgtagacataagcagaacatgtttatgtatgaatgtgggaaggaactgttgcaattttcctttcgatttcttgaagttagatgcttaacgtttctaatagttgtttcagagagaagcaaggaaacttctttatttcctctctatatgaatttgttgtatgctctcttgtttgatgcaccaggaagtcagagaattgttctcatcatcactaagttcctgaccaatctagtcttagcaggaactatcttaggacatttttgaaaaattccattttacatttgtctgaactttcgaaatgtgatttatttcagtatgattattaacttgcagaaggtttcactgactttttctatacattccatcacattgttcgtattccttctttcactttggaacaactcctagctcacactcactctattactacgtccattactataaggatgatatttaacagtgatttgagactctcattcttagacatgagactatcattaatgacatcttgacgccaatgattattttcttgttgttttcactgttgctcttaggtctatgtagaagcatacacatgcccttgcatcaaacgtcacccgcaagacccagtcttcatcgcgcaatcacacgggaactacacagcaatcttctcaacaaacccacctttcaaacacaacaaatacaagagattcgaaggtcactgggttgcaggtttcccaatcaaatgcaacttcagccaggatggagctgtagagaacg

SEQ ID NO: 13662 - DNA, 759 bp, Arabidopsis thaliana landsberg
acaccttctagttgcatagatgaatcgggttttctacaatcctcagaaaacctcggttccgagaacccacaatctaacacctttgtgaaggtaaagttttatttcttttccctacccaaaatgttcttcttgtttgcatgcatagcgatgattccggaaatgtttttgtaggtgtacaagtcagggtcttttggaagatcgttagatatatcaaagtttagcagctaccacgagctgcgaagcgagcttgctcgcatgtttggcctcgaaggccaattagaagaccctgtgagatcaggctggcagcttgtatttgttgaccgagagaatgacgttcttctcctcggcgatgacccatggccgtgagtatattaacttatccctcatttccgcatttggttttgtccatttccatgtttattttacctgcatttaccgattatcgacagggagtttgtgagcagcgtgtggtgcattaagatactgtcaccacaagaagtgcaacaaatgggaaaaagaggccttgagcttctcaactccgcgccatcttccaacaatgtcgataagctcccgagcaacgggaactgtgacgactatgggaaccggtcagacccgaggaatctcggtaacggtatcgcatcagttgggggttcattcaacctactagaagtagatggaaacctccctttttattcaagttaagtttcaatcttataaattagtagtgagatcatcttagtttaattactagcaaaaatc

SEQ ID NO: 13663 - DNA, 501 bp, Arabidopsis thaliana landsberg
aagttttcgtccataattaataagagagagaaagggattttttttgaaactaataattacttaaaagtatttttttaatatataaatttgtgattactattttattattaatgaattaattcaaaaatactcaaaaccaatggtttttatgtaatattttacctttcttaaggtatatatataagttattgtttgacgacaaaaaaaatatatatataagttattgttttcgtgtggtagaaacaaaaacaataaatcctaaatcgtctagtgttgtgtgatgcaaaagaaacaaattaacaacaaaagagacattctcaggataatacattaatatggtaattcttgacgggataacgaagacggagaaataagaatcgaaccggaaatcaacgacacagacattgaactagtgcttgattggtttcgattgtcctgtaaaagacgactgggataaatttgaaagaaataataaatcatggccgtttctcaaaacacaaa

SEQ ID NO: 13664 - DNA, 998 bp, Arabidopsis thaliana landsberg
  unsure (1)..(998): unsure at all n locations
ttacaaatattatgataagtttccacaagggcattttcgtcattctgtggtcagcaaagtcaaaagctaaactaagatcttctccgtccgacaagatacaaagacacgaaacacaaatgccctatttaatgcaaagatcacacacacacttagcctcattcactaagatccttaattggattgccttcatcagaatctttctcccttgagagttctaggagatcttcaacaggttcgacaatacatttatatacacacatgcaaatatttatgcacgtatgtttctgctcatacacacgttaacaagttcatttataatcatgaatctaattatggatcaaaagtgtgtttgatttatacattatctttagattgatgaacttttttttggtcaaagattgaagcaattctatatgcttaattctctaggttatttttattttttcaataatactttctacgtacataacaatattcgtgttatagctagtaataatggggcgatcaccatgttgcgatgagaatggtctaaagaaagggccatggacacaagaggaggatgataaactgatagatcacattcaaaaacatggccatggcagctggagagctcttccaaagcaagccggtttaaaccgatgcggaaagagttgtagattaagatggaccaactacttgagacctgannnnnnnnnnnnnnnnnnnnntgaagaggaagaacaaactattatcaacctccattcccttcttggaaacaagtaatcaattactttttcactttataattccttgctttgttttaaaaaccatcgaatgttaattctttctagtcaaatcattaattatatctcataaaaagttagtgtgaaacgatctaggatgaagtttataactagaattaagagtagtgtgatatatgaaatatataataacatatatattagtatatagtttatggatgaaagaatataattgacatatatacctactacactggt

SEQ ID NO: 13665 - DNA, 633 bp, Arabidopsis thaliana landsberg
  unsure (1)..(633): unsure at all n locations
ctgacatttgtatgggtatggaagaatggaagggacgaaagggnnnnnnnnnnnnnnnnnnnnnnnnnnnnnnnnnnnnnnnnnnnnnnnnnnnnttacctagctaactgatgtcattgcggacaaaagtcacataatacaccaataatcatttcaaagaagcaaatcaaacatgaacacaaaggacaatgaactcaagcataccagcacaacataatccaattctactcattcaacaaaaggtgagacaaggtttgaaataagaaagattttataatatcaaggagtcagtaagaattatcaaggagttagacaagacatatttgtcggtggccaatagtgaaataagataatcatgaactattaaagtcaggataaatgatacaaccaaggagataaagtgagttagggagaaagcattatcaaggggaaaagtagagaggcaaaggtttaatatataacaaggtagatattgcacaaaggggacaatacaatggcacgaaagcaaaagtgtaagaatttaatagggagaaatcattatcaaggagaaaagtagagaggcaaaagtttaatatatatcaaggtagatattgcgcaaggatggcaatcaatggcaagaaacaaaagtataag

SEQ ID NO: 13666 - DNA, 430 bp, Arabidopsis thaliana landsberg
cattttggttgagattcaagaggctgttgaaatttgcggcggctataagctgcgggagagctgctaaaacgtttagatggtcggttcttggcctatgggtcaccggatcaatccccatttggagaagtttctttctcaaatgtgtgttccaatagttttttatttcattgtccgttcttccaggaagattaccggctatcgacgaccaccttccaaaacatatacgaaataattaaacattaatcaaattgatattatggcagtggattagtctaagactaatatatacctaatattgtcttgctttagtcgtaacaagatttacttttcaagattgaaaaacggctacagacgtatgcacctagagaaaaccagtgtagtaggtatatatgtcaattatatactttcatccataaactatatactaata

SEQ ID NO: 13667 - DNA, 833 bp, Arabidopsis thaliana landsberg
cttgtatatctaaatcgaatcaactctagttacattttttcctaatgtccgaattgctcatctttggctttctgtttatgttctagagtctagatcggtcgacatattttctaaagatagctaagtcttttagcttcatacatgaagtatgttggtttcatatacctgaataattaatttttcctggtatttagggctttaaaactcaacttatccaaatatcgcgctgttagttttaaaagactttttttaaccaaaaaatcaaagcattcggaagaacaatagagcattgccaaaggaatcttgtgattattgaaatcttattaaatctacataaaccgtcaattctcaactaaattataaagacaaggtgttttcatattcatattagttgagtcaacaaagttgactactaagaaaagaaacgaaaagcaaaaaaaaaagaagtggtctcatattccggcagatcggagagcatactcttgaaccaatgcagcaaacaacgactgtctctccagtaaacggactggactatcatactctttcgctttacctgcagatttcacaaaccgttacaaactccactaatcaaccaaaaaggtaaacaacttgtatgttctgttttgttacctgcgtctatgacaagaacgcgatcacagtccataactgttggaatcctatgagcaatgctgataatggtacagtccgagaaatcctccctgatgatcttttggatcatagcatcagtctgcgaatcaaccgacgcagttgcttcgtatagaaacagaatcctgcttcgtttcagcataacccttcctaaacacagtaattgt

SEQ ID NO: 13668 - DNA, 725 bp, Arabidopsis thaliana landsberg
gtctgtctactgtacatggatttcatgattccgtagtctgggaaagatggatgcagcgattgacttttacaagattttggtgaatgatggaataagtcgtgatctgtttacatatacaacaatgatcgacgggttgttaaaagatggaaatataaatcttgcctctgatttgtactcggagttgcttgatttaggtattgtccctgatgaaatcttgcacatggtacttgtcaacggtcttagtatgaatggactgtttttgaaagctagcaagatgttacaggagatgaagaataaagatgtgaatcctcatgaactagtattcagctctgctattggctgacatcatatataaggaaatctcaatgaggctcatagacttcatgatgagatgcttgagaaaggtatgggacatgatgatactgtattcaatttactcgtgagtggaagagttgagaaacctcctgctgcatccaagattagtagcttggcttctcctgagatgagatcgagctactaaacaatcaatgttgctcaagccttctgagctttggaagacatacaaaaggagattgacatcacccttttcagctaaatctatttatgggagcacgattatgtcctctggtattgataacacttccggacgccgacttgatgatctgattgctctctgttcttatgaatgattccagtgccatacaccgcaagcgctttgtagatgt

SEQ ID NO: 13669 - DNA, 818 bp, Arabidopsis thaliana landsberg
  unsure (1)..(818): unsure at all n locations
gtttctgcttctctacattttgcgtcggagtagtaataagaatatgaagaattttggactcgtcgtttcccaaaacgacgccgtatccaaaaatcttgaaacggaggtccgattctggcactgatgtgatcatcgtcggagctggtgtcgccggttccgctcttgctcatactctcggcaaggcaagtctataatctcaatttttgatttttgcatttctccaaatttattcatgaaaatttatttttctaaattcatttcaataaattttaacatttattttgtaatataatttgtttttgattatattttttgtaataagatcacaaaaatgatgtgatattagttcccggaacattggagatatatacttgtctgatttttatgtgttggagacgtaagttcttgtctgaaattttggcctttgtgtggttattgaaggaaggaagaagagtgcacgttatagaaagagatttgtctgagcaagacagaatcgttggtgaattgcttcaacctggtggttatttgaagttaatagaacttggacttgaaggtagagactaactatgagcttaatctgttatatatatatatatacttggaatcgatttttgttctatagtttcgttgtgtgattgtagattgtgtgaagaagattgatgcgcaacgagttcttgggtatgttctctttaaagatgggaagcagactaaacttgcttaccccttggcaacgtttgaaaagaatgcacccgggagtagtttccatgatcggagatnttatctgagaatgcgagaaaaagacctatctctttcaaagt

SEQ ID NO: 13670 - DNA, 465 bp, Arabidopsis thaliana landsberg
ttccttatcaatagacttcccacaccactactgaagaataagtctccttatgaagttcttacttcaaagaaaccaaattatacaagcttacgtgtctttggctgtctttgttacagttcaacttcgtcgaagaacagacacaaatttcagccaagagccaaagcttgtatctttctgggatatcctagtggttacaaaggatacaagttattggatttggaaaccaagtccattcatatttcaaggaatgttgttttccatgaaaccatatttcccttcagttcacgtgattctgctggtcctttctctgatatttttggcagcatcaatgaatctcttattgagaatgatacaaaaaatgttgacagtaacattcctgtagttgtgagagaggctcctattttgagtgaacctcctacagttgtgaatgattctgtcaatgattcacatgaagattcagcttcg

SEQ ID NO: 13671 - DNA, 587 bp, Arabidopsis thaliana landsberg
  unsure (1)..(587): unsure at all n locations
aaatcaacaactcctccatgtaaccaattgcaagaaagtagacgccatcctttatcttctttaaccacttttttaacatctaatccagccattgtttgtaacctgttgcaagtaaaatgtaaccaaaatcaatctctaaatctatacatcaagacagttcaaggaagtggagaaaaacacacactatctctttactctactccttctacatcgttaaccatcattaaaccaatcagctactaaagaaatttcagttttttcattgaaatcctaacaaagttcggatttttctgcttcacttgactcagtaaagatcagacctttatttgaaacaaagtaaaactcttacttacgtgagagaggaaggacccagaagaggattttctctggtgttctgaaacgagaaacgacccaagaaatcagcaaaacaatctccagatttcttaggacaattgttgacatacatggtgatcacgaagacggcaacgttagcaacaacgaaacaaggaatgagccaaggaaaccaactccgaaactctttaactcctctnacctcgtcttcataagaacttcgactctgagtcaac

SEQ ID NO: 13672 - DNA, 728 bp, Arabidopsis thaliana landsberg
gtagtacacttctgcactcatcagtcactgttttttacagtctggccaataaatttcactacttcccacaaaaataattaaaaacacataactatatccttttattctataaacatatcggactaatatttttttatgggtttgtgcaggtgctacggtgaaactagtgtgtaagagcaagaagaacataacagcggagacgacgacagacaagaacggatacttcttgttgttggctcctaagacggtgacgaacttcggtttcagaggatgtcgtgtgtatttggtgaaatcaaaggactacaaatgcagcaaagtctcaaagctcttcggtggagatgtcggcgctgaacttaagcctgagaaaaagctgggaaaatctacggtggtcgtcaacaagctcgtatacggtctctttaacgttggtccatttgcctttaacccgtcttgccccaaatgaagatgatttgatgctctggttactatcttgattgtttcatgtttaaaagattgagagagagtgttgttatgcgtctactgtacggttgaattttaatcaatgtttgttagctagtctttaagttaaatgcttgggtattatgttgtatctctttaagtgacgtcgtttgagtttcgtttgaataaaaatagcagctttcaagatgattccattacattacaaaacgaatgaacaaaatgaatgttaactatagaattttacaattaga

SEQ ID NO: 13673 - DNA, 761 bp, Arabidopsis thaliana landsberg
cggtgttaagagaatgattatagagatatttctcgatttataaaaatatatgtcatatgagttcatgtatttattaccgcatctacttgatcgttgcccacacaaaacaaaagagaacaaccataaaaatattgcggaaaatttaatgcgacgaaaaacagagaagaaaaaatatttttaattatgataatgaaatcttgttaatgtttaattatctgataacaaaatcgagctttaatgaccgttttatattatcaataagaaacatgttattgggttctgagtaatagtgtgataatatatttgttagagattgggatagaacaagattattggaaacacaataaacaacaagttaaaaaaacagctttagtcgttaagaagtttgtttatcaagaaaaaggtcataacaaaatattagtactaaaacaaatggttaataacttatgtattaaaaactaatgtatgtgatgtaagtgagtttaattgtaagaatgatatctgatataatattttagttatccgatagagttgcaataagaaacatgcttttgagttatcattaataatgtgataataactttggagtagcaataagaaccatgtttttgagttataactaatagtgtgataacaactttgttacagcttaggttagcacaagaatataaaaaaccgagcaacaactagttgttacgaaaacagtagtaggcggtaagatgtttattagtgaataacaagatcttagtaagttaacgtag

SEQ ID NO: 13674 - DNA, 587 bp, Arabidopsis thaliana landsberg
ggagagacagcggaatatgggcacgaaataatagtgctggaacccttaagttcacgtataaatgggatataaataccaatatatcaccttcttattaattttatatttacttaaaatatataattattattataccaatatctcatgttacattaagaaattaaacaataagagtgagtcaccaaatgttgggtattttgtttaattctgacgtttttccttacaacttgtttaagttggggactaaatccaatgtaagcaattaatgtggaacaaaactaaaacattacagtattttgctttcaagtaacgtgcaacaaaacatgggcatcgagaattggggaaaaaaaattgaaacctgtaaatgaaaaggtccatttagaggcaaactagctagattctgttataaacttgaaattctcagcatagactacaaaggtgtaaactctagtaggtttttcaaacgcttcaaaaccttggactcttaactctttcaagagtcttcctttcaggattgaaatagaaaacaaagaaaggtttagatatatatagtccatggacaaaataatttcatgagtagcagtcac

SEQ ID NO: 13675 - DNA, 433 bp, Arabidopsis thaliana landsberg
actcgatgccattgatttcgcatcgtttttctcttaccccgacttatggtagatacaatgataaactcacattttcgtactaactttttcttttttgaacacatcagcttattaaaatcattaattttgcaacatgttcgttatcatcccaaacttttcgactttgcaggtttccaaacttggatgagaaatctcgattaaacttcttaagaaaatggctcgaatgtcaccttgaagatgcacaaaacattcttaaaaaacctctaatcctaggagaattcgggaaaccaacgaacacaccaggctacactcaggctcagagagacgcagtgttcaacgcaacgtttgacaccatttacgagtctgctgaaaaaggcggtccagctttaggagcattgttttggcacgttattagcgatggcatgaacaactt

SEQ ID NO: 13676 - DNA, 636 bp, Arabidopsis thaliana landsberg
catcggatcagagatcagcggcccagattagatcgcgccgacgcacggacgcggctgacatgcggggccagggcgtcacgggaccagggcgggctgaccagccgggcccagaggcagagacgcgggggagggggaagatagagaggcgattggatctagatcagagggctaggattagatccgctcgggttaagtctaaaccgctcgatctcggacggacacccgagatctaacggccaggggcggacatgggcgcggtggcggcatcggtcctgcggcgagactcgccgaagacgaggaggctggccacggtggggctcccggggcttgaaagctagccttggcgcgatcaggggtggtctggcgggctcaaccatggccttcacgctagcgcaggggcactagaggccgcagaccacggcgaggcgggttaacggcagtgcggtatagctccggcgagcaatcacgcgagcaacagagcaggaacgaccaaattaagggtacgggcgggttgctcacttgaggggaacactggagtacgaacaacggcggaggacaaggacgcgacgagcgacgcggcggggctgggctgcgaaagatcgtcggtgacgcggactgacgaacagagagggaagg

SEQ ID NO: 13677 - DNA, 963 bp, Arabidopsis thaliana landsberg
ttcctcaatgatattcgtaagactttcgacgacaaaggccatggtaggtctttctttatcgatcttgttcacacaatgatcagccaatttagccactctcctgaccatagcaattggatacttattgcatagcttggagtcaacgatcattttgaatcttttgctattaataggatattttttgacccattctagaagcttttgttcagctaaaggtttcattcgttccaatgtgcgacgaccagtgataatttcgtacaaaacaactccaaagctatatacatcgcaatgtgtcttgaggtgaccggttattacatactcgggagcggcatagccgtctgttccaactctcttttaatagaatcaagaaacaagaaaaaaaactgttacttgcggatgaagaaactaattaaacttcaaaatttctaagggaggaaggaaaaaaatgttacttactgcggttgtaacgtgagtattgtctccttcgggaccttctctagcgagaccaaaatcggataattttcggatggaattcttcatttaatagcacatttgatgatttgaagtctctgtatattacctacccccaaaaagtgacacatgatgtctctagttagtgctaattcagttttggttcattccagcttgtttgatacggtatagaaaaaagatccgtgatctgcttatatataaagtttctttaggcctagttacggataaaaccatcaaaaggtttttaagattcaaaatcacctggatttcgtgcaaataagccaatccttgagctgcaccaagcatgatctcgagcctttgtttccacgacaacgttaaggttcttagagtgaagagatgatcctccaagctgcgattagacatcaactcgtaaaccaaaagtctctctctgtcctctgagcaataccctaagagcctcacaacgttagggtgattcaccactcccaaaaa

SEQ ID NO: 13678 - DNA, 1191 bp, Arabidopsis thaliana landsberg
  unsure (1)..(1191): unsure at all n locations
ctagtggagatattacactgtcttctgacaaaagaagttgtatcaactagcattttgtctaaacgatgggagttcctttggttgtgggtacctaaactcacgttcgtgatgaatcactacgaatcagatcttcctattcaggattttatcaccaagaatctgcgattacttaaacctcaggttatagaaagctttcatctccaatgttttagttcatcatttaaacctgaggatattaagcattgggttggtactactatctctcgccgcgtgcgtgagctgattatcaactattgtgatttgtcttggcttgacaaacctgttgtgttattagatttaccaaacagcttgtatacttgcacatcgctcgtcactttgaaacttataggccattccattattgttgatgttcctcaaacggtttctcttccttgtttgaaaactttggagcttgattctgtggcatactctaacgaagaatctcttcgactacttctatcgtattgtcctgttcttgaagatttgactattcatcgagatatgcatgacaatgtcaaaactcttgtgattattgttccgtctttgcttagactaaacttaccgatagacggggcttattcgtgtgatggttatgtgatagttactcctgctttgaagtatttaaaagttcctggcctttatagagaagatttctcgtacttgcttacgcatatgcctaacgtggaagaagcagatcttagtgttgagcaagatgttgagaggctttttgaatcaatcacatctgttaaacgcctttcgttattcgtattactcgacattgaagacgaggtatacttcttataactatcacttacaacggctaaattgttttttcttttcttgagactgaatcataatttttttttggttatgtttttgtgtgcagtctatgtatcataatggtatttacttcaatcagcttgaacatctgaacctacatatataccgcgataactggtccaaattacttgttcggttgctcgtagattctcctaaactacgagtcctcaagattgttgtcgatgtaagtttcttcattggcaatctaaaggcactagtcttattaattatctcttttctcacaaaaatttaatctcagggtgaaccatcctttgatgaggagttngaacatgttagctggatatataatga

SEQ ID NO: 13679 - DNA, 553 bp, Arabidopsis thaliana landsberg
tcccatgatgatttcttgtgcaacgatacttctccttcgactgtagaactatagaccatgacatgaccaccattatacaagccatccaactaccaatgtatgatggtcattcagattcgaagcaatttttgatgagttatgacgccacaatatcatcataaagtggcaacacagcagtaatggcaaagtcatttgtcatggtggtccaaagtgttggtcaaacatggtattcttgccttcggccagacacaatgacttcatggcaaaagcttaaggatatattctcacaagtttttagggtttttagacgaagcccaccaccgctcaaaccctgttccaatgcaccaagatcatgatgagtatctccaggattttgtccgaagaatccttcagtttcgggcgcaagctcaacaggcccaaatgaaatctttattgaggcaatgatcaagggtttcgtcctggactagctacgcgatactttgccagaaatcatcctcaatacttagaaaaggtgcctcagaagatgtatgcatatatttggggtcacaagaat

SEQ ID NO: 13680 - DNA, 565 bp, Arabidopsis thaliana landsberg
gttgttctactttgattcactgtgttgagttgaatcatatgaagcttttaagattttctgtgtggagtttgatcagatccatcttatagctgactttgcttgtagagtagttttcattgcaagagttttttgtggttttggcagggggaatacttcactgctcattgattattgccaaagtgatggcaaacataaatacattcaaatcgatgttggcaagactttcagagaacaagtccttcgttggtttactcttcacaagattcctcaagttgattctgtaagccgtcatcaatatcgtattgctctacattattcccattgagatattctttttatgaatgctgtattcacatactcgagatatgtagaaagcaaattttaaatctttgggtcactatttgagttttcctatctgtatctgaagctctcagtgcatatgaggattaaagtttttgcatgaattgcagataattttgactcatgaacatgctgatgcagtacttggcctggatgatatacgttcagggcaacccattaaccctactaatgaatattgtcctac

SEQ ID NO: 13681 - DNA, 780 bp, Arabidopsis thaliana landsberg
agtgtggaggactcacatcatcacccgctacttgcacaatgcgtgaccttccctgtggcctatttcttgttcaatctcttctaaagtttcaaatacacctcgaaagacgatttttacatagcttggtagcttttctatgtccccaagatcccacctggacaaaaaaatttgcatgtcattttacctatttttcaatttaatcatggaaataggagttaggagtgaaaaacaacacctttggaattaatcaacgaggcttgtaacttcaggaagagtaccatatgcatcacatgtatcattaaaaacagtcacaatcatggtaattttagtgactataattctccctagtgaataccgtggctcaaaatacaatgcgagtgccccaaagtagacctctacaattctgtccctgatgtaaggcagcttagatgcaagatctagctccttccaccatctgcaattaatgaacataaacattttaaataaagcaagacatacaaatataaagattgacgacatgaactaacacaacctacttggtcagatcttttagctcttggatataatgtagctggcaatagttgaagttgagttttgcaaacttgagcagcgtctcgtcatgatcttcttcttgttcgtagaaagagatatattctcttgcgactaatatcttcaagttatgatatcgagctctatatagtgctttctgatattgttagagagatggggactagcagttgctgtgtgattacttgtcacgactctagcgatccgagtgaa

SEQ ID NO: 13682 - DNA, 727 bp, Arabidopsis thaliana landsberg
cttgtaccgtcaaggtaacccaatagcttacatttctctcgataatcttcgattttatgctcttttcgtggaatttttctgattaatcgtggtattgtagctgttcaaacccttggatgtccgttggaaccttgatttcgtgcagaagagtgctacaattggattatatatcaaactgctgcggaaattccaggactcaattgtttgtgacctatgatgataagaactactttcttcagagaaaactttttggaaacaagaaaatgagttcacggaggactacccagccttttctccttgcatctgctgaagatggagtggctgttaatgggtcaagagctagcgatgatgttcaggagatgagggccaaactcagtggatcactacaagatgaatatagctgtggtgaacttattcagtctttgcatgatgctgccaggacttttgaactggctcttaaagagaagatatcttcttcgagattaccatggttttcagcagcctggctcggagttgatagaaatgcatgggttaagacgttttcttatcaggtctgtaccattctaacatcagtcctccttcatagtgcttacattagttggtttctttgcactttcatggtaccatgattaggaaatctgggccagaacaaaaagttcccttcccattgcacatttagcttacactaaggatttcttctgtttatcattactcaggcttccgtgta

SEQ ID NO: 13683 - DNA, 565 bp, Arabidopsis thaliana landsberg
  unsure (1)..(565): unsure at all n locations
tccagttttcttgaaattcttgcccgttgaagtgttggtcgtgttcccctttccttgatttgagttcnnnnnnnnnnnnnnnnnnnnnnnnnnnnnnnnnnnnnatatgggcagtccttgatgaaatgtctgactttccaaagttgaagcacccactggaagtactaggaagggcagggaaacgagtaccaggggcactcagctgattggtaggagcaggggcagtggtgggacgaataaagacgagctgcttgaatggatctgaaggtgggcgaggcgaannnnnnnnnnnnnnnnnnnnnnnnnnnnnnnnnnnggttctcttctcaggtccttgatttgacctttcacctccaaatccctttgattttccatgcccagcatttttggcttccactgccagtgatgtattgacagccttactgtaggtgaggtctaagcatgttgccattttctgctgaagcctatcattgagccccctcataaaacaattctttttcttcaagtcggtatcccctggtcaatggcatactgagagaggtggttaacttgttgagatctgcat

SEQ ID NO: 13684 - DNA, 696 bp, Arabidopsis thaliana landsberg
agtacagctatggtctgtgtccctgttacctgtgaccaaggtgtcagtttggattgtcaagggatttatgacagcaaagtatcaggaatggagtctgttgaatccatgaaaagcgtttctgttgtaatcaacaataactcggacagtaccggggtgtcatgtgaggatgcttatgaaaatgttgtcggagcctcccataacaacaaggcaaaagacagtgagatttccagcatatctgtttccgcagaggatgattcttctgacagattatttgatgttccactaaccggagaagaaaaccactcagaaggtataagtggttaaacctctcttaagtctttgtttatgttttggctgctctagtttcatgaatctgcatatctcctcttcttggaagtaaaaggaccaaaagcttgttaatggttacatgatagattaaagaggttcaatcgaccattttctagagttcttcctaacgtttgacttgttttatagctaaatagcattctttatatttttggccttgacttgttttatcactaaattgcttctgcattcaaaatctgctattattgtgctttctccaccttcttaggatctgaaggtatggatctcttagatctaatttagctgctggctctaatggtataatcgattgcctgtggcacggattgtgaacactgccatttatgctga

SEQ ID NO: 13685 - DNA, 493 bp, Arabidopsis thaliana landsberg
ccccaattagattacctggtagtcagaaatgcaggtgacttgactatcccctaccattaatcggaaagcattccaaattcggaatagacagtatggtagtcctaaagggagaaatccactctgttctatagagattgaccggatcaatcgataaaatttataataataaaaaatcattaaaaaaacgatgaacatacaatccgtttaggtttctaggattatgggcataagctggttttagttttcaacctattatttaaatcgttacataataatacgtgacgaaaaaggagattgatttgatcatcattatacatgttcatataccatagcaaaatataaattaatatgaagggattggatttgtgggaagctcttgctacgaaacaagcagcaacgactttaactggaaacaagttctgccacacggcccacaccacacgccacctctattctcttctaccacattgttttattcctttccaatacttta

SEQ ID NO: 13686 - DNA, 447 bp, Arabidopsis thaliana landsberg
tggagtttttgaaatctctgtagtcccgcaggtgatgccgcatgtccttgtgataaagacactgggagtcaaggatctcgtccagcgttcgtacccctctgcggggtgcgccgtgggctcgagcggtagttggcctagcggtgtgcacctcttctcggggtcttttctcctagcgtttgtctagctgctagttcgtgtcccactgtggtgccggcaacacgagttttgtacctccgatgaggtcctgggcctgctcattcgtggtgatgcagacgtccgcctccctgaatagttgttcggaggtggcaggtgccttttgaagtatggcccagacaaaggctgggtcgttggatcccgatagaaatcttcaatctcagccgcctcagcgacttcgggaatttgattcctcatcaattgaaatcttttgaagaatgatcagagaggttc

SEQ ID NO: 13687 - DNA, 640 bp, Arabidopsis thaliana landsberg
aaggccatgctaagttgtggcataactcattgtgtttaagcattgagagtttgagagcttaggttttaaggtattttcctaagttaataaaagagagttattcttttatattttgagttcttattcacaatcttatatccttaaattctatagaaggaactaaggaagagaaatgtatagatcgtcatggatgagcatatacatgtaatttttgcctcctcttagaattttctaatgacaactccaaaatagaatgatttcatatattttaaaaaaaaaagaatgatgatgactattattactctagttatagcaataagccaacactattcatcacaacatttatttttaaaaatttatcgacaaattgatatcacactattatgagacaaaactaatacatcaaaatgcaaagctaacgatagatataaatagtagttaattaaaacttgaaaatacaaaaatgacattgtattaattgaataatataaaatatagtgatgtaactaacgttcaaatttcaaagtacataatcaatatggaaactaaagataaacaaagtcgtcctaaaaaacaaaatcctttcagactttggatctgaattatatgtagctcaaagaatcagaggaaaaaggcaaat

SEQ ID NO: 13688 - DNA, 679 bp, Arabidopsis thaliana landsberg
atatatgacttccactgcgcaattttgtatttagagatttttggctcaaatcaagttttgttttactttacttgtagcagtattgatggcaaatctgagattggagatggaacatctgtcaatcctcgatgtttatgttgttttcattgccacagaccatttgttatgcacgaggtctaaaaccatacatacaacttgcaaactcctttgtcttgttgttttctgatgtatataactccttagattttgaagaagggaaaatttcacatagattgctacaaggagtactaccgtaatcgcaactgctatgtttgccaacaaaaggtaaataaattctcattaattagtttggttttacagattgtagtaaagtgaacagaattggtttatttatgacttaatgaatgtgaaatacaactctttcagattcctgtaaatgcggaaggtataagaaagttcagtgagcatccgttctggaaggagaaatactgtcctattcatgatgaggatggaactgccaagtgttgcagctgtgaaagattagaggtactaatataatatttgatcgagtttagttataaacagagaagaaaaagccttgtggcttatgactagtgatttgcagcctaggggaacgaactatgtaatgcttggtgatttccggtggctatgtatagag

SEQ ID NO: 13689 - DNA, 445 bp, Arabidopsis thaliana landsberg
actctagaggaagccacaagaccgtaaaccaaccgaaaaaggagccaacaagagattgttatctacacagacgtgacgtgagcatcagatgagatgagatggcaatgcccatcgatcagctccggaaaacgcccacgcaacgcaaccgaccgaccgacccagagagcagacaccctggcgcggaaacatcccatggaatggaaacatagcaaaaggacataggctatgtctatatgtatagtaagaaactaaaacggagctgcctagtgccctgtgaacggagggagcagcaaaaacttttgagagagcatctccaagagtttagctaaatagtttgtcaagctaaattttagctaattaatagcataatagctctccaacagaatagccatttaacttgctaaactacccggctctctaaattaactccctcgttagccaaatt

SEQ ID NO: 13690 - DNA, 795 bp, Arabidopsis thaliana landsberg
catgaaactttttactattattttgaccttatatattccaccagattctcgatggtgaaagggtcaatatttctaaacatagaagacttaacatgactataaaagcagccaaagaattccattattattcattcattcattcttcagtctctcttcctcaaaacaaaaacaaaacaaaaaagtttaaaccaaaaactaaaaaaatataataatggcaagagttcaactattgttatgcttcaccattctatttgcatctgtgtcccttctggacctagtatcagcacacctgaaatttaagccatctttgcctcaaatcgaagatccaaagacggtgaaggatgtagagccttacaccgttaaagtagtaatggtctttgtagcggacctcgagaaggaatgtcccaagacaaacaagttcaaagccttctttgagaaacttagaggattcgccaagtatgtttgcccaataagaaggattggccaagtagattacgaccgggacatgaaggccaaagccgggggtatcttcaaggctatatcttcttttgctattggaaaggtaactttttcttcaaggtagaaaatttatggctagttgatagactaatttatttactacatcatgcaaaatatatctaacagattagggaggaaattcaagaggaaaaacaggaggctattgatacctttaggttcatgaaatctgtggcggctaacattatgggaggtcgtaagacagaggagaatgaagaaaccatgacacttacagcagaacaacataaggaaatcaaa

SEQ ID NO: 13691 - DNA, 848 bp, Arabidopsis thaliana landsberg
  unsure (1)..(848): unsure at all n locations
acattggccatacctaaatcgataagaaagagtattttattgtgtttatttatttatagagtatttctaatttattaaagccttttgacaaaaacaaaataacgtaaaacacgtaaataaaaacaagtcattatggccctccaaatgctatatagaaattaagtcatccgcctctagttattcttttcacaatatatcagaatttgctagatatgttctaactactcaaatctcctatgttgcttcaagatcaatttttagtattagtggttaagtattagatccatataaaagttctttaactccttatctggttgaaatatgttatgcattcaacaatgattgtggtgttcttttaaaccacaaacaaaagttacaaactttgcattctttgattctcttggtaaacggtgtagaacctctcttgtataagttattggtaaacacttattttaagtctaacaccgacatgatatgacagctgaagacgaatcaacattcaacaaaccaaaaacgaaaaatgtctcttgtttgccttcttcttcatcttctcatctacctttctgtttatcttctcgactttttgaaccttctcctcgagttcatcctccatttcgaccaccaacttgataacttgtgcaagtttcttctgatcaactagactcaatctattattactatttactagcgatcagagctttttcagctnttcgtgattcatctaccatagcaattttcatggatgcttttgctttttgagctacttccgctaaaatcttcgtctagttccctgatttgcttttaaagaatttttcaagagatgaatccaacaaactctttatatccct

SEQ ID NO: 13692 - DNA, 576 bp, Arabidopsis thaliana landsberg
tcggttggggcggtgtacgatgttgtctacattatcccggtaatgctctagaaaagcaccaaagccatgcacaagaagaacggcaggcccttcattaccaaccactgtgtactgaaacaaggaagtgacttctattaaaattccatagcaaatataaaaagatcaagcagtgggattacaaaaatggccaatgtaggccattggacttggagaaatatgagtaataacagaaacctgaataagatatcccttccatctccaaatccttatagcgtgccttttttcatcaatcctctctctacttagagccaggagataataccactgccaaaacaaatccaacatcttcaaatattttcgaaaagaaagtaggagcatagatatatcatgtctatgagttattgtacctccatagagcatacagcatcagttgcagcagacactgtggcagctgaatatccaaaaggagaaataaatccagcattcctttctttttcatactcgattgattcatagtgaacacttcttctggatacgataccaagacagaggacaggtccaaaaagtttaaaaata

SEQ ID NO: 13693 - DNA, 511 bp, Arabidopsis thaliana landsberg
tgttgtctggtacagagtctccagagaggcaagtaattaagattattttgaatctctccatgaatcttttacacttacactgatcttatatcgtccctttttttttaaacagatgaaactcacgaacatgttgttccatagcgcccgggattaactgcttagcttggtctccaaacagcactatggttgcgacaggatcgctagacacctgtgtgattgtcgtatgaagtggacaaacctgctgcttcacgcatgaccataaaaggagctcacttaggtggagtctatggtctgggttttgctgatgattcccatgtagtgagttctggtgaagatgcttgtatccgcgtctggagctttactcctcgataagacttgacgtaaattataaagatctctggaaaagtcctatcttgtctctttggaaagcttctactacttttgaaggctttttgtgaatcttccgtttggccgtggctgtgttgatgtgtgtgtctgttttttttttgtc

SEQ ID NO: 13694 - DNA, 609 bp, Arabidopsis thaliana landsberg
attcactctctcttcttattagcctttcgtctccttcttctcttctctatctctctttagcttctctacgcaagcttattatctctttctcttaaagctttttctatatacaaacagaagcgtttgatactgtaaaaaagatttagaaatggagactctgagtcgtttattggttttcatgtctctgttttccggtttagtttctggatttgctctgcaaaatcttccaatcacatcttttgaagaaagttacactcaactttttggtgacaagaacttatttgttcatcaagatggcaaatctgtccggttaacgctcgatgaaagaaccggtacggtttaatcttcctctgttttttaatttccttctcgttttctcggtttagtaatgattttgtttttgcaggttccggttttgtttcaaatgattattacttgcatggattcttcagtgcttctatcaaattaccttctgattatacagctggagttgttgttgccttttatgtaagtcaaatccctaatctagctttagaactaaccaattatgattagtttcactatttgatttggttaatatattcataatgattttttatattggtgtat

SEQ ID NO: 13695 - DNA, 570 bp, Arabidopsis thaliana landsberg
  unsure (1)..(570): unsure at all n locations
ctaatcgaagaagctgattcaaggtcagatctcgtggagaatcaacagagatccannnnnnnnnnnnnnnnnnnnaagctacgaccttttcttcatgaatttctattagaagccaacaagcgtttcatcatgcacgtataaacaatgggtgattctagttacgctcagaccgtgttgaagtggattgatccggaaaaaaatatactttggagatcgagtcctagccagagaacaaagtccttatgagaagacactcgatcttcttgctgttgatgagcgtagagtggtaattgtcgatgatgcgattgatatttggcctcatcacaatagaaacttgttacaaatcagcaaatacatttatttcagcgtcggtattgaactattgataaacatcacagaagataagatagacgagagtcgaagcaacggatcattggcgcacaaaagattcaaaaaggtaagttttaaaagacctgagactgttgatcctgatccttaattatcatcacaatactgcttctgactgtgcaatctccaatgctcaacactcttactttgagatttaggatg

SEQ ID NO: 13696 - DNA, 1043 bp, Arabidopsis thaliana landsberg
  unsure (1)..(1043): unsure at all n locations
agatacaaaaatcagggacgaaatagcatcatagaaaatattttggttaaatgcaacaatttagtttaataataaactattatatttcatttaataaaatatttctaataaactaaattcttgaaatgatatttcatttagcaaatatatatatataatccattttaccgtgaggatatttataattggtttcaaaaaaaaattaaaacagatatatgtactacattaattacaatactataaattactgtatattcaaggaaaaatattacgttcatttgcgggtagccacttggaacaagcaaacataaaagatttagatcagtccgctaacttttactaaaatccaaagttcgtgtcatctttttcttcataaaatccctacggtccaattattattattattattatttcccaattaattaattaaataaactataattcctttgatcgttaaaaaacctccactcgttttggttttaatttctttttatataaaacatcttgacctccattattttcattacaccattcttgatctcttccgtaatccaccacctaatattaatcatctagggttcctctaaccaaccaagaaaaaaaggaagaagaaaggtttattctagggtttgtatcgtcaacttctgatcaatattgtcatatacaatggagaaacctggtggcttctggatccccaagaaaagcaacaaagagtcatcttgggaagagctggcctttgcagaagacgatgccgccggatctttgtggccgccaagatcttatacgtgtagcttctgccggagagaatttaaatcggctcaagccctcggtggccatatgaacgttcaccgaagagacagagcacggcttaagcaagccgacgaccaatacttattccccaaatcttcttcgtcttcagagtatccatcttataaagatagcgataatattcatgaaacctcttgctatactttggttttaacaccaaaccctattattttaagactcaacactctngnngtattganccttcttcttcttct

SEQ ID NO: 13697 - DNA, 625 bp, Arabidopsis thaliana landsberg
cagattaattctactgtttggccatggagttttgcagctttggaaatctccatccactcagggagaagcgacccatcaggcgtgctacagaagaggccccaaggttagagataacattcaatatatttggctttggagcttacatgttatcttctctgatgagtttgttgacaggttctacgcgtctgaagtgctattggctttggagtatctacacatgctgggggttgtgtacagagacttaaagccagagaacatccttgttcgagatgaaggccacataatgctctcagacttcgacctctccctccgttgcacctttaatccgaccctcgttaaatcctcctcagtctgcagcgggggaggtgctatcctcaatgaggagtttgctgtcaatggctgcatgcatccatccgcctttcttccccgcctactcccttccaagaaaacccgtaaagcgaaatcagactctggtctcggtggcctctctatgccagagctcatggcagagccaacagatgtgcggtcaatgtcctttgtgggcacacacgagtacctagctccagagatcaaacgtggcgagggacatggcagcgctgtggactggtggacattcgggatcttc

SEQ ID NO: 13698 - DNA, 678 bp, Arabidopsis thaliana landsberg
gttccagaccgcagaggaggcagcaagagcatacgacgaggccgccgttttaatgagcggccgcgacgccaaaaccaactttcccctcaacaacaacaacaccggagaaacttccgagggccaaaccgagatgtcagcttcgggcacaatgtcatgctcaacatcatcttcatcgctctcttccatcctcagcgccaaactgaggaaatgctgcaagtctccttccccatccctcacctgcctccgtcttgacacagccagctcccatatcggcgtctggcagaaacgggccggttcaaagtctgactccagctgggtcatgacggtggagctaggtcccgcaagctcctcccaagagactactagtaaagcttcacaagacgctattcttgctccgaccactgaagttgaaattggtggcagcagagaagaagtattggatgaggaagaaaaggttgctttgcaaatgatagaggagcttctcaatacaaactaaatcttatttgcttatatatatgtacctattttcattgctgatttacagccaaaataatcaattataccgtgtattttatagatgttttatattaaaaggttgttagctatatattgtttctctttttccacatttgtatctaataaagtattggtgtttgtaactaaaatccagaagtgacc

SEQ ID NO: 13699 - DNA, 578 bp, Arabidopsis thaliana landsberg
ctccgcgcggctcgatccaccgcgtcctccgggatcggtggtagagaaggcttgtgaaaccccacctcctggagacggatataaatctcagttgtgagaacctagggacaatcttacacaagaaggaagaaggagcggacactcaccagggatatgcacccgcgctcgaggcgcatcgagggctgggtaagagcaccgacgtccagctttcctaccgtgccggctacccgcctgtagatgtcatcggcggggagggggaccgaggacatctgcgaaccctccaagtcgacccccgacgtcatctccgaaagcggcagcgcccgtccgccaaggtgagcaccctccggcgatggatggcggcaaccacccccgcggcggtgagcctccatctcgcagctcctgcaaagcctccagaaggggctggagattcttctatctctcgcgcggggcccatagcgccacgtggtgccggcgacggtcaccactcgttgagaaaacgatgggagcctccgtcatcgtttcgaaggtaaaaccatcggtgctgccactcttgtatgaagcacaaggatgccgggatg

SEQ ID NO: 13700 - DNA, 621 bp, Arabidopsis thaliana landsberg
  unsure (1)..(621): unsure at all n locations
tgactgccattttcgagagtaaaaaaatgagtatggaagcattaagatctactgaactagttatagacttctggttcctagttcagtccagaaggaactacaagagaacatgatgaaacgtgtgcagaactcaaccccaaggcctcagcatggatctttcaaacgaaaacagaaaatgtatctgaatttgaggagatgagtaggaattctaacaagatgtggtatggaacagttatttcttcacaacttgcagaactgcaaataatttagagtgcatgttcatagtagcacaccatcatttagaatagtgtagaagtattgatcaagcaagcaaagcctaattaggatagaaagaaaaagagactgagaaaagattctattgtttacttgataatggaaacaggctccaaagtcatgaggcacaacaaagaagtggtctgctccttctgtgcgattccagtatggccaattggaagcaataagctgaatggcacttctcatcattcgtggagatttaaaaggaagaagaagcccattangcgtgagatcacaagtgggtgtacaacaggttaccgttagaaccaatcaagcttcctcgggatttaaaatggtttcgaaact

SEQ ID NO: 13701 - DNA, 2169 bp, Arabidopsis thaliana landsberg
cctgtcggatacattccatcttggaagcatcaaatacgcccagttgtgtctcgtggactaccagaatacgcactggatccacatgaaactgaacccgcgtgtctccattgacggcttttcctgcaggcatttgtattgcaacggatttcctcttctcccatgtgtcaatgctccaaaagcagatctaagagaaggcaacaggaagaataagtatcctcctagattagataagtctaacggtagaaaatccagcaaggaaacaatacaaaataatcaagcatttttcccttcagttgagatatatttactacaggacaacaacaacaacaacaacaacaagacgcagcataacacacctgtgcatcagcaccagatgaaaccaagatgttgagggctgtagaaaatgctaggcctgtgatgcgtttctggtgaccctttagctttgatttgacctgatggaacacaatatgcaagtttcagatcgttgatagagttttaaggcaacattagcagtgaggggaaaattaaactgtaaaacatatgtgaagctatgagaaccatttcttcaaaaaacgtaaggttcacaagtttttccttgtcatagatcaaaaagactacataagtggcaatggttagtactagaaactacttacctcatccactcggacattatagatgtgaatcgtagagtcttccattccaatggcgatgacgttattgtcctgaggatggaacgccaaaaacgttgatgctggtggaggcggcatgaatgttgtcatcacctataaggccaatagtttttttgtggaaattagaacaaccaaaagagtttactagattagtgtgagaacattttcagttagaaatcttgtggctttttttaagttcatatagataatatataccttaaaagtcatcatgttgaacaacgagacttttcctccagcagcagacatgacatatgagtcgttcttagagagagcgatgcatggggcagcgttttcaaggtttacaccagacacatcattggtcataagaagaccactgtttggttgccaatgctgaggaacaacagtagcagttgcctgcataataaacagtacttaaataaaaccgcacacagcatgcattaagctatctctaactctttaaaaccgcagacagcatgcattaagctctctcaaactctttttttcgattacctttccactagggttctgctcattgggaacccacttccagagtctctggataccattggaacctagtgccaagattccagcaccggaattcgtatacagaagctgaacaacctgctttcccacgcagcatgagaaaattaagcctcaatttcaaaacatttatagaaatccaacaactttctgagaaagataactgcacaaacctttgtggaagaaccagcggtatcgggtaaagtagcttggaaacactgggaagggtccaagatttcagctaattgccaagattttggtttgtctgttgagtcatcgattctcgactttgagggatcaactccattcttgaggatattcagaaaaaaaagattagtaaatattttttttaaacatgacaaaaaaatcggaaacagtcaactactatagtcagagaatagtaaactacaatttcgacaaatggaagttcacttcatttacaaccgaaaatccagaacagaataataaattatagaaatggctagaaacatagcatttaatgagtgattttaccagcatttgtgagtgtctaacaggagagcctcgttcaactttacaattgacagacgcaacaggagcaccaggaacctaacagaatataccaaagtgtgtaaaccgagacagcttgtaatgacagtggatgtaaaaaagggaaaaaatgtaatacaaagttgagaaacattacagctttgaaatcaactggagtcctcatcgtttcagaagctggagtttccatcgctcgaagagatcggaaaccagctggattagctaggatcttaaatccgttatctgccgtagtaacggctagaagattgccgtccttgttaaatctcaaatggggaagagcctgaagtctgggcccagttatatgcaaacctaaaaagacgaaaatccaagcaacaagccatgggaaaaagaatctttgggacgttccgga

SEQ ID NO: 13702 - DNA, 1621 bp, Arabidopsis thaliana landsberg
agtttcagaggtagatcttgtggtaattgttatatacagatttccatgactatatgcataggtatgacattaatttctccacttatctaccgcttaactctattgtagcctatgtttcatgataatggaccaaaggatgttgttgaacctggcttagttggtacccatacaggggccgatgaaatagctgatgctgacacagagatggtagacaatccatcaagtttaccttcaacatctgcacaggtatgtgttagtcacttgttctttttccatatgtgtacgcccataagactttgaaacttatttttgtttcaggaagaagcaagagatgcttgtgctacgactgaagctaatggcagcgagtccgaagaaacttatgagccttctgatggagatacagctcacatacctggcacaagtgtacgtacatttttgtcactatggtctgtgtacatatatattgtttcaaacattactaaaaagttgctttcctttgataaattctacaggttgaggcggcaagagaatccaaattagtgacagggatggaagttgaaatacctgagaagacccacattgatcccccgtcaccatttcaagtagttaacaatgtaagccaactcttgctgaaaataaaatgtactattaactgttcaaatgtataaaatttatattatgcaggtcacacgagagttggataccaaagtcgttggtgatttgggtgcagccactgatgtggaggtaacaatttgtgtgtttcaattcctattttcggaatagcatacataggattatatgtgtacattatatatacttgtgtacgttaacttgcacaggtagtcatggaagagccgtgtattgtcgaggggtctgtagaaactgaggatcctaacccagggtcagatgaagcagacaagaccgatattcctaaaaataatgtatgtacctattttaaccatagaaaaacgtatgaaactgttgttgacaatcatatttgttaacaggatgaatcagacaatgctgctgctgtcgaagcaaaagaagaaaaaaaatcgtccccaaaggtcccaaagaaagtgaagaaacaacttgtctatgaacaggatgatgcccatcctcatggttttaaggcaaaaacagtattggtgcccgatgtaccagctcaacagatagaggttgttatcagggctggaaatgtctcatacaaccccctggacatggttgacccttcaaaagtagaggaattcagcaatatcattaaaggaccctctgtgtaagtacattatagtaaaatggattagttaatatctcaatcatcatttttaaggttgttatcaaatatttttctggattttacaggattcacactcttttcgggtttcgaaaagtgcccaacgacttttttgcgaaccttctaacacctggtgaatgggtcgaaagtacggtacgttgcatttatatacgtacattccttgttataaattgtacatagatgattaaatttttcgtggaagtgtacgtacactgatatattttttgaacatttcagcatttagaaatgatggcaatgttgatgtggcacaagagcggggaacagatgatagcaaacagatgtatt

SEQ ID NO: 13703 - DNA, 708 bp, Arabidopsis thaliana landsberg
gccgatttggaagatggcttaatctctaagcacggtccaaaaaaataatgaaaataaatgcagtgatttggtgaacgggaacatgacaagaaaaaaagcaggttttaatttgttggagtgaaaaaactaaaatgaaaatggaggacttttttgttcgtgaccaaatacttcaagaaccatgcatgaccagatttcattggatttcgaatgtctcggtccaatcatcattcatctaatgtttttgtctatgggccatctgatttttgatcgtgtgagcttggaaccgccgaccgcttcacccatccacatgtactcacaaatcaactaaaaacattcgaaatgaaggtatgtgtatcagaacatatacgataatgtatatttatatatacatttttgcagacattttagcaaataaatcatagagttgaacttatttacaattaaatgccattagcattaaaaaatttttctaaaataattaattttacattaaatttttaatttaaattgttaatcctattatcaattaaatttaatccaaacaaacttcacatcaatcccctaaaattagcataaacttcacattaattatttagacataaaaatatttatttaaagatttaaatcttctaaatttttgcttttagagttattatatcattatctaaaaggcaaaaaatattaactttagagcacatgtaagagcat

SEQ ID NO: 13704 - DNA, 443 bp, Arabidopsis thaliana landsberg
ggtagcacctggttctcatgcaacagaagatgcatgtatgtcatttttcaatatctatccattttttttggtatgcatgttttgctttacatcgagtgtacttctttaacatgatgtctggtttcttggtgtttaaaatgcagtgaataaacaactaaacgataaagaacgtgtggcggctgcactagagaatccaaacctcgtggagatggttgatgaatgcctgccatcagaagagtgaattgcttttattttcttgtgagcaagtaatttacacaagcctggtggtctcagtttacactatcaatacatgtctctgttttatttgcaaagattttgatccatcacatcgactaggacttgcattgtaatacttactctgatttcaagtttgctctcaatcatttcaataaagtctcaaacacaagttctttttaataaaa

SEQ ID NO: 13705 - DNA, 1202 bp, Arabidopsis thaliana landsberg
  unsure (1)..(1202): unsure at all n locations
gaagatctttagcaaactctgctgttttccacacgacaaaagctgttccttcttcgttccatgaaacgacgtcgtctgtgctatgatcatcaactagctgatacgttttgcttaaaaacggcgccggaactgatctttgcgccgccgtcaccgccgtcatctccggcgaactttttttattttaccacagaaaaataaaactaaaaataatctaatacacaaagagaagaagaaagattggaaatagaaagtcgaaggaaaaagaatcagcaactaaaaagcaagagagcggtgagaaattcccaatcccagcaataaaagcccgagaggaaaacacgagaacggagaagatcggagtttcgtttggtttcttccatttaaggaaaaatctgatgatggaggaagaagatgaagactacgaccatacttcgccggagctaatccgtgtgattaaaaagtaaataaatataaagtcttttttatttttgtgtgtatgtgcaaaacaagtaaaacaaatatataaacgagttaagtgttatgtcgaagggtctctatataacgtagtaggaagatttatagatcacaaatgttggtcctacctttgtaagaaaattaaattataaaaacggatgctgtttctagaaattctcagaaacatcttttcttcttactttcttctcttttgaataatttttatccatcaaaaatattgttaaaaaagtctaaaaagtcttatcttttgaattatgttctactttttctctcccttgaatatttatattcgtaatttataaatctcatattttatattattgttaaaattattagatgtcaaattatattttaatctatagttgagtttataaatcatttaatatatgcagaaatatgtaaatgctaaaatatgttgagtcgccaatcaaaacaatgttatttaaaaacaaacacgcacgaaaagagaaaattatatacttgtgtttttctagaaagttttaaaattaacagatttgtaattttttttttttcaaatatgacgggagacggaaagatattttatacaatacaaattgcgactntgttaattagttttggttctattatatttctttntgtactattaaatgtgttcacctaacacatttcggcttcatttcacatttaggcaccaatgagcttcatttaccttttctttttcaatatat

SEQ ID NO: 13706 - DNA, 495 bp, Arabidopsis thaliana landsberg
actggatcataggagactgagatttggtattttcaggagcattatctaaaagaactttactcacaacttcattttgatcagcagtatactttaagagttccacaaaatttcctctattagcagattttcagacttatcatgcccacggaaagctaatccttgtcacaataagtaactagaagcatcaacagaagcactcaaccgaattcgatactcatttcttgtaatatcatcttgtttatgcaaagcatgatcaatagactaccttggttcatcaagttttcacacttcataactacattgatgggaaaactatcaacagctgctacatgggctggaaaactcttaaaattattccacctacagaatccatctgcgataaatgcatcacttcttacacatttaccagcattatctctgaacaactaacaacacaggcaaaaaactatttcttttttcacactatactctaaccagatgttgtacccatcaaac

SEQ ID NO: 13707 - DNA, 639 bp, Arabidopsis thaliana landsberg
  unsure (1)..(639): unsure at all n locations
ggttccaatgaatgcgagaccgattcaacagactcttgcatcgataaaaccaaagccttacctctcaatattgtagcaatcgttgccatcctcgtgacaagcatgatcggagtcgcagctcctctctttagccgatnnnnnnnnnnnnnnnnnnnnnnnnntaaaatctttatgatcattaagtgttttgcatccgggatcatcctaggaaccggcttcatgcatgttttgcccgattctttcgagatgttgtcctctccatgtcttgaagacaatccatggcacaagtttcccttcactggctttgtcgctatgttgtccggtcttgtaactcttgctattgactctatcgctacaagtctctacaccaagaaagctgtcgctgatgacagcgaagaaaggactactcctatgataattcaaatcgatcatttgcctctaacaactaaagaacgtagctctacatgctcaaaacaactattgcggtaccgagttatcgccacggttagttgagtctttattacaatctcatttagttgtttctttaacatatgtatacacatacttccgaaaacactatcaatattaaatgatttattcacatattcaaaaatctatgtgtaaaataggtcttggagc

SEQ ID NO: 13708 - DNA, 416 bp, Arabidopsis thaliana landsberg
  unsure (1)..(416): unsure at all n locations
ctgatccccttccgtgaagatatcaagtgaagccatagatgccatagcaagctggcctatgtacccttcaaaaagttcgctgccaaatagcattgcaaatattgcagcaggatcgatgattgcatcactgacaggatgaacaaaaacaagtcagcactgagacccnnnnnnnnnnnnnnnnnnnnnnnnnnnnnnctagagtccacaagaaaaagagactaacgttgagattcctgacttgccacatgcatcataagcttggcgttgtcctgaatcacttagcacttgataggcctctcccaagacctgaataagaaaatgagataaccctaaaaatccaagaatcttgcagaaaaacttggtactaatgattgcagtcaggcaacatcaacataagcttatgacctaattcagtt

SEQ ID NO: 13709 - DNA, 622 bp, Arabidopsis thaliana landsberg
ttaagacagagacacaggcaattcacgcatagtctctatcatgggtacggcagaatcataaaggaatgatcgtggtatcctcccaaaatcaatcaagattcaagagagagagagaaggaggcattcatggaatgatatgtcctctgtgatcacctggtttaagggatggtcaaagtcaaagcttaagcagtgagatctgataaaacggaaaagtcacatgacatctgcaccctgagacttaccaccatctaaagcaatcactcaataacacatgtgtaatcatctcctgaacctgatctcgaggatactgaatagttatgattatatgagcaactagaaggaaatgcaggttatatcaaagacagcaagatccagcaagagatctaacatgaacaaaccataggcctcggaatcttaaaaatttattgtgactgtacgtccatgactcatagtttactgcttttaagaagattggtattcaaagttatgagctaaaagacaattagagaaacaatagatatgcttattttctaaggcactcatcatttgtaaaaacacagtaacttttcaatgaaattacaaatcataactcatacgagttcgtctgattaaatgatcatgc

SEQ ID NO: 13710 - DNA, 557 bp, Arabidopsis thaliana landsberg
agtcttgttgcggacgtactgaagcaaatgagaacaccggtaaccctcttgaacgttagcggtttatctcagttcagaattgacgcccatccttctatttacggaacaaaacccgaaaaccggcgttcaagagctgtccaagattgcagccattggtgtctccctggtgttcctgatacttggaaccacttcctttacctccatttgctccataaacgataaatacagttacaaactaatcaaagctccagttacgtgttcaaaagtttgtttaatgtaggcattgctcgatccgatttaaccaaccaaaccaaaaccattttggaaaacccactatgacaactgaactgaaaatacaaaaccaaattttcgttttcctgtgactcacgctggtcccgtgaatgtcaatctcttggttcattgtttaggaaaataactaaataaagttacttggaccatctcttggttcattgtctacaattgtgtgtgtaaacaaatctgatggtcaaaaaaagaatatacgaccatttagaataattagtaaacaaatagtctta

SEQ ID NO: 13711 - DNA, 894 bp, Arabidopsis thaliana landsberg
  unsure (1)..(894): unsure at all n locations
tccgaaaagctcttgtcgtttgcttaactgctcaggttcacctgttgagagaccagcattgggacatgccttgagcttacttgaaagaccatcaacaccaccatggaacttgagcttcttcacatcatgaccttccactattgatcctaactcgtctgcacaaatgtcaaagcatgctgctttaacttcctcaggcaccttgtagtcacttggagaaacacctaaaaaaaaaaaacccacattttttgaaatcaagaacagaacactttcttacagaaatgcaaaacttaagatttgaagtttcctttttctcagattaataactcaccagagataaattgaaatgcggcttttgacacgagaactgcaatccttaatttctcctatatatacattgaaaattttcaaataatttgggagggaaaatattaggtaaacggctttagaagttagattgctatacaaggtaggtgctgatcaagagacataaaaagaaggaggacctggttggtgcggcgcatggcagcagcttcgtaacgtttggagagattggcagtgaatcgaaaccgacgtttcgggttcttgacgacactgcaaagatcccgccatttttctagcacttcctccgacgaatgcttcgcctgaacgtcgaaattcgagttgaggtaactctccatttctccttcccaacttcaatgatagttttctttctttttctgtaacactttctattattggttctttttattgctttgggacaaaaatgtgagagagaaagaagagcaaaagaatcgtaacttaaatggaggacgaagacgaaagcgagttttaagatctgagctttttattttaagctntagaattgaccgagtccttcatttcgtgagcacaaca

SEQ ID NO: 13712 - DNA, 564 bp, Arabidopsis thaliana landsberg
gggttgtttgttacctttcttatgaaatgcatttatgtaccatagcaaacattcatctacatgtaatttacttgtagtacacctagaagaagtggtgtctgaagaaagagttcacttcagtgcctgctaatctagtggtggagtttcatctaactgcttaccagagtagaagggtgttagatcttctcctacaataaggcaagccccggtgcatttgccactttccttgtattacaaaattttatcacttatatgatgcattaggtaatagcagttgattgattaaacacttgttgcattaccatccttgaaagattaattactggaccttgttacttgtttaataaaagctagtgatgtttagtcatgcttatagattaagaaaaatgtttttgatctatgattcatgatttttcaaaagaaaaagggcttgggataatgaaggcatcctccgcggggatgaattcatcattcaagtagggtacctctgccatgtccaaattttagatttgtttaaatgagccagacgttgagctggagaggcgcccgtctgtgtcgattaag

SEQ ID NO: 13713 - DNA, 601 bp, Arabidopsis thaliana landsberg
  unsure (1)..(601): unsure at all n locations
ttgattatggtaagatcaagatcattcatgttatttcatccctatatcattactaacactcctccagtacacactacagtgtggcaaaagattgcctgaacaattagacgtgctctcatcttatccaaaagatttccaaagaaacaacaaggtttgtttctaataataaaaaacttcacttatagaaaatctaatcttctatgcattgaaattgtaagtcaatttaatcttattttacaggtgaattgtctacgacaccccaaccattatccagacaagcatgaaaggaacttaaaagttattcaccacaccaaaatcctaaatttatttaaataagaaattcaaataattaaaactaatgcacccaatgtttacttataacacttcagcatccatggccaaataaaacccaatactacaatgcactaattgcaatgcattaatatggtattcaaaaaacacaggggttgatagcaaaactggagaactgatctacccaatatgttgccagcaaggacgtgttaaacttccctcaatcagaanaactccagcttttctcgacacattcctacaaaagagtctcacatttcgtattaatact

SEQ ID NO: 13714 - DNA, 834 bp, Arabidopsis thaliana landsberg
  unsure (1)..(834): unsure at all n locations
ttttatctttcacatcttgacgacttccaaggagttcagccaaaacttggtttacttttctttagcgactctatgtcttgtttctcttcaccactttcttcacctttgtctttagtgactagaattgagtactcggcattttcaccgtaaagcccacttaggatcaagaatagcgacattacaaaaattgtgattccaacaaagaaccaactaaactcgatgttgactagcgacttggccctgtgtatagctttatcgctggaacatttaatcacttggtgtccttcttcttcgtgaagaaaacatcccttgggaatcaagctaggtgtccaaagcatgtaacccatcactacgaaccacactccttggaaagttatgcttgatgacctcacaaagcttaccaagaaacttttaggcaaagtgataccgattagagtggtgaggaaagaaacgaagataatgagctggaggagcttatnnnnnnnnnnnnnnnnnnnnnnnnnntcggcagagtgaagatggaaaaggaagagctgttgagcaaaggcagaagatgcaacgagcatagtcagtccatgcgaaatatttgatctacgcctttcttgatcaagaactactgcgaaaatcgcgtagactaagaatgacatggagatagaggagtgttcaaagttgtggaggtggtttgaagggatggtaccatcagagtcaaagggttgatgtttcttgggtccaatgaagagctctgaggctatggagattgacgaacaaaccatgattatgtagagctctaaatgtctaagcttggaagttggaaaccatggtgatgaagtaaag

SEQ ID NO: 13715 - DNA, 675 bp, Arabidopsis thaliana landsberg
atggttaacctcgcactctctataatggctggagatgttttttttaaagctgaatgaatttctttgggtggggcttaaagaaataggggctaagtgtttcttgtgttaataagttcttctttatttggtatggattttgtttttctggtgttttattgttatatgttacatgtaaatggatcacaaatcttctcatgcatctaacgtaaattgacatcccttgggctcattgactgtcctccaaacacttgtctactgaatcaacagaattggcaatataagcaaacttatgatcagggtaagagttgacattgacagaatagataaacacaatgagatgaactaaagattcttaatgagacaaggaacagagttgatgatagtttcgttggttgtgatctgaaacagtttccaagtcttatgttcctttttcatgtaagaaagttgttttcaaaattcaaaagaacaattgagatcaaactcaaatggaaaataaaaagtaaagaaacaaacttagtatcaccctcaaagatctttactctgggtgcatcaaactcattgctcccatcacagagagattcatcgtcgtattccaacacttgctctgttctggattaatagcttccatagctgcttatgtttcaacaaaaacaaatgttattatttggtgccaca

SEQ ID NO: 13716 - DNA, 858 bp, Arabidopsis thaliana landsberg
ccctttgtgtttaccttcttgggattctgtctttaattttcgataactatactattcatatataatctcgtttttactgtcatgttttataacgtaatatcgtcatctcgaatgtcgtttttcttaacggtactgtcattcctagttctctggatctacaaccttgttgatatgcaggttttggagcgataccgcatgttaacgaaaatgagcaacatcgttgaccacttaactcggccttataattgctgtatttaatattaggatgctaagataataaaacatatttcaatttaataaacatatttcttttaaagtaattttacagaaaatttaatgctctgtttactgttattttaaattcttcgtataagatggatctaaatcttgtatatttctttgaatgtgtacagcctggaaacaggtcttgagataaaaaaataaaataaaattaatgagcatttattaaagtaaacgaaagtataaaatagtattacagaaattttgttgctctgttaatctgttatttaaatcctagaactaatcttgatcttaatcttcatcttagtattttattttataatgtgcattactgccttgcacagcgtggaaagaggtcttgcgaaaatttaatgatgattccttctattacaaaagtaaacgatgaccgaagtgtattttttctggtcattcttaattataaaaacagcaagttggtcattgtctattaggacatatggagatgtttgtttattaatatgaatactcccatttactctactccacgataagtggaagagaataaattagcagaaacatacattgatcataaccaaaggatcaaaaagatgccgaaag

SEQ ID NO: 13717 - DNA, 357 bp, Arabidopsis thaliana landsberg
gactttttatagctggaactctacttacaattatatgtagccctctcttattacaggcttacagcatcttatttaatgggtttgtacaagaatattgaaaagcactaagacagtaagaccatcctaaatgctaaaagcctaaaacccttactgtgaatggtctacaagcacgaacttggtctgaaacatattcatgagagccatctggttgctatggtcggccttggctgaatattgcggcccttccttctggtccattgacggctgagatccgttcttttcagttaatcccaccggtaacatggaatcgtccccttctttagagagagaagagtgcgttcttttatacacaaaaag

SEQ ID NO: 13718 - DNA, 704 bp, Arabidopsis thaliana landsberg
aatggattgacctcgtatcttagtattataattgccaacaaacataaactaatgttttgacgaccaaaaactagtttatattactatataacatagtaagcaaattattttattattactttcttactcctctagtctcattcttttttgaataggatctcctctcaatgtcgctagagacaaatccagaagcggttccatacattgttcaaagcttcgaactcaaggttctaattttattaatattacttataagtttaatgttttcaagtctaagtttatccctttttatataagaagctaaaaattatatgatttttgtgtgtgtgtgtgtgtctagaatacattaattctcaagaggttcaacatgatttgcctctaatacatgagtggcaacagcttcaaggagaagatgctcctcaggtgatttttagaataaaatttcttgtcaattataattacaaaaatccatattataatactttaattttcctacattcttccctattcttcttaccgtgatataaacatttttccccggattctatactttacattccatcaaaaaatagttcttatgttttacaccgaaaggtaacacgactatatttatattccatgcatgaaattatacatatgcatggtttaattcaaaccttttcatgattgcatgtgctgctgattaattctttgcattttaatca

SEQ ID NO: 13719 - DNA, 946 bp, Arabidopsis thaliana landsberg
ttttaatgcaataaaaaaaattagcgatgaacttcaaaaagattctaactttaagaaaagacaatataactaaagtcatattatattagattatctttaaaagtatctttaagattagtaattattaatttatgatattattgggaccatattttgacatagagattttttaaaaaatattatcttattatcttttcgattttggttaatttttatattgacccgacttgggaccgacatattttattaatttatcatgtttattaatttatcgaatattaatttatagagtttctattgtatatcttttggcaatattacgtgatcacaacacatagtttgccaaaacaattatgaaataattcgaaaattgatatagaggataaaaaaataaaccctactcaccctctttcctctttcttgcagtaagggagcatcgacaattcgggcaggttagattctgattgagccaaggatctaatacaaaatcgataaaaaacatgtctacacatatttatacgaattatctcatggccatcttcaaactcttcaagacatattggacaaaaaatcttattggatccttcttctatatctttaaactctaaaattgtcgtttcatggatccatgtcatatatccgagtgcaatgttttgttgaggctgaggcagcgttacatgtccagtctcaatgtcttgttgaagctgatcaggtggtggatgagaattttggtgtgtctcacgagctatttccgtaggaggttgctgaataagatctatgcaaagtttataaataaagattactgtaatggcaattggaaataccatatatataaataaaaacaatcctgtcgaaaaaaaatccagattatctgacggtggagactccatcatcgctatattactctcttacgagagagatcaaatctggagcttcagttgaagca

SEQ ID NO: 13720 - DNA, 441 bp, Arabidopsis thaliana landsberg
agcctcttagcatgagccatagccattgctaatggcatcagaaacgccgacaataactccaatgatgttaatgatcagatgtgttgtctgtggaatcaacaaagttgtccacttgaagatgtaaagctcagagaaagctccatcggctgctgctcttgaagtgactgcgaaattcgtgttaactcctgctggaactttgagcaaaccttgaaacagagcatatatatgcgaggcggcccctccgattacccacaactgctcggttttccaccaatcattgattgcgacacctccccattgcatttcgaggatcccagttactgctatggattttaacatgagcatgaagagtatacctgcgtagttgcttatctgtcaaagcaaaacacataacatttataacatcttcaaactgagtgatctaaaccgaaaatgcagaga

SEQ ID NO: 13721 - DNA, 615 bp, Arabidopsis thaliana landsberg
acggaaccatccgttcaaaccctcccacagtccaaaaaaaagtcctctccttccatcttcatccgctttaaaatactttttccttgtcgcttacttgcctgcatgtaccacattaattttttgattagcacgtcatttttctttttaaatcagaatatacacttacttttatcgatcacctagattctttatacaccatggataaagagttgctaccggctgctttttcaaaaaatgataaggagctatatatatagatagcaaaccaaagaaagttgccctaactacacacctgagacttaaatgctctatgtttctatcttctttcaatatttatcgtttgcagtggtttatgtgttagttgtttcagttcttgttgttgtagtaatgtcgatatggagataataaataggcaaacatctatcttccatatctgcacaatcgattatgtatcatatgtaatcattactttttacgtttttttattagtttgaccaggggggcgcaatatcttggaagatttacagagcatttaatgctcgtgatcttgcggaaggaggctactgatcctctgcttgtataggaacaattatgtcatatttaatttgcaagaaa

SEQ ID NO: 13722 - DNA, 418 bp, Arabidopsis thaliana landsberg
tattacaatcgccatgattttgatcaatttatatttgttttttccaaattaatcaagaggtacaatactatttttttcaatacaaccttccccattgaagatgatcttagacaatccttaatggtgggatattaatcaaggttttttaaccatatttaatgaataagttttgaaaaaaacctaatttaaaaataaaatattttaattttttaattttaaaaaacttaatcattatttaattaataatattttatacacagatgacataatatttttaaaacataaatgaaaacataaagtttaacaattgatttatgctaaattttttccatatatgttcaaccaaatcatatttcaattgttgatgtgcacgtttatcacgaattcgagtttgagtgtgcaacatgttctcgagatt

SEQ ID NO: 13723 - DNA, 999 bp, Arabidopsis thaliana landsberg
aagtccaacatgttgtctagggttataaacaaactcattcgtcacgtattcatcatataatgataaattggtaactcattatacgtgaaagtgactggatagtggatatatatcacacaaaaccctttctacgtaaaaacctataataaccaatttcacatattcagtcaatgcatgaatatagagtgatcattgaaaaatgaatccctacaacgttcgatgaattaatgtcttatatatggtaaacaatataggagtatcgaaaaggcaagatacataccagagagaactggttgaatactgttcaagagaatggagaaggccaagagtggagaaagatcggctacttgtgtggcaacagcttcacttgttgtaaaaatgtatgaaaccctttctcttaaaaacaggaagataaagaagaagatgattcctatcgaaagtgatgtcgaaaccacaaccattgttgcaaatttggctccattagaattcccactcccgatctcgtttgaaactcttacactattacaaaacattattacaaaataaaataaaaatatgaagatgattataagatatttaaataaagcatgtgtaatcaaatatttagaatgacttaatcaagaagaatataatcaaatatatctagtatatacaatatatacgcaccttgctgctgccatgaagccgaaggctaccatcatctccagtgcatttatattgatgctgcgaaaattataacatataatattgaatctaagtgcctatgatcaatcgcaaaagcattatgctattccgcggctaccaattagctagagagtataagtacaattggtaacctaaacctatcattttctctagcatcaatgtatattgttatgtagacaataaaaccaattctttctgttttcctacgaacaatgttcgtcagtagtgttccgtatgaagtcaaaaatggtaaaatgtcagtagcattcagacgaatgatctaaagataatgtc

SEQ ID NO: 13724 - DNA, 579 bp, Arabidopsis thaliana landsberg
ctctaaactccactcttgtagtagctgctcttcccatcagggccaagcgactgccgctcgccatgagcaaccaactttcgctccaccagactggtgtttgccttcttcaggtcgtacgcgaggcctatcttggcgaagaagttgatgaaggcggtggcggggttgaagacgtccagtggacctagctcagaagctgaaaagtcccaggggaaggcgtggtggaagttgtggaaacctgagaagtggtaagattaagcattttcagtataacaaaagaattttttccctgtttagcttaccttcacccatcaccagatggcgaattgaggactccaccggagcaatgcgcctgtcatacggtcgccagccgtacatgtgtgcccagcctaaaaaatgatgatgagtcatgaagtcaaatgtcaaagaagttatctctctctctcatactgttgacaagccacgtcacattgagcgagtagacgtgccgaaagacaactgccagaagataagttttccaaatcggctcgccaaagaagtacaccggaatgaacgttggtatgaggaaccagaagatgaaga

SEQ ID NO: 13725 - DNA, 560 bp, Arabidopsis thaliana landsberg
agatgtatcgctggcggccgtacgaccggcggatcgcccccgtcgaggcctccattcgccacctgttgatgggcgaaggtaagctaaacagggaaaaaacgttttgttatactgaaaatgcttaatcttaccacttctcaggtttccacaacttccaccacgccttcccttgggactacagtgcgagcgaactgggccccctggacgtcttcaaccccgccaccgccttcatcgacctttttgccaagatgggcctcgcatacgacctgaagaaggcgaacaccagtctggtggagcggaagttagtggttcatggcgagcgaaaatcgcttggccccgatgggaagagcagctactacaagaatcgagtggacatggccacggagtggattggcgggctgatttccattctcagtccaatgttgatgatccggtggctgatggcggctatctgcagttgaactgcaagaaatacttgataatgattagtggggataagaagaagaagaagaggtgcttcaagaagatacatactttttctcagctacaagcatgttttt

SEQ ID NO: 13726 - DNA, 829 bp, Arabidopsis thaliana landsberg
  unsure (1)..(829): unsure at all n locations
taatcagggtatatataattaacacattattaaagtttttatatatgttttacttaaaaggtggtcagtcatagcgagacatttgcccaaaagaactgataacgagattaagaactactgaaacacgcatctcaaaaaactcctgatcgataagggaatcgatcccgtgacccacaagccacttgcctatgactcaaacccggatgagcaatcgcaatcgggttccatctctccaaagtctcttcctccttcaagctccaaaaatgtaccggagataaccagcagtgacgagacaccgaaatatgatgcttccttgagctccaagaaacgttgttttaagagatcgagttctacatcaaaactgttaaacaaagttgcagctagnnnnnnnnnnnnnnnnnnnatactagccgcctccatcgaaggaaccttgatcagctctacaccgttgtcttcatgtctaaatgatgacttttctgaaacaagtcaatttcagatggaagaatttgatccattctatcagtcatctgaacacataattgatcatatgaaagaagatatcagcatcaacaattccgaatacgatttctcccagtttctcgagcagtttagtaacaacgaaggggaagaagctgacaatactggaggaggatataaccaagatcttattatgactgatgtctcatcaacaagcgttgatggagacgagatgatgcacaacataaccgatcggccaaaatatcttcttgaccattccgattttaattatgacacgaaccatgattacgacgacaagaactttatatgatccgttgattgcttaccggac

SEQ ID NO: 13727 - DNA, 839 bp, Arabidopsis thaliana landsberg
taaggtatgattattagttttcacatatggctatgcatatgtaagatatgtgtgtgatatgttggaacaattaaataatttggagaaaactattgattgtaggaacatacagagagatatgttaaggtggtacttgacatgatgaaggaggagaagctttttgcttcacaaggaggccccattatattaggacaggtaacattgacaaaaagataaagattaataaaaacaacaaacacatttttaagatatgaatcataaaagttttgaaagatttttttaaaattggcgtttggattcagattgagaatgagtatagtgcggttcaacgagcatataaagaagatggattaaactacattaagtgggcatttaaactggtacactcgatggatttggggatcccatgggttatgtgtaagcaaaatgatgctcctgatcctatggtaagtcatattttataacacgttcattataaaaacataatcataaaaggttaaatcaagaacttaatttgttttgatacagatcaacgcttgtaacggaagacattgcggtgatacattccctggtccaaacaaagacaacaagccatctttatggacagagaactggactactcagtgagcttttcacttgaacaccttaattagtatgttcttgatgaaacaaacgacaatgacttataatttgattctaggttccgcgtttttggcgatcccccagccaaagatctgtagaagatatagcatattctgttgcccgggtttttctccaagaatggaacccatgttaactactatatggtcagtgatcgaataccgaataaaaaagagatt

SEQ ID NO: 13728 - DNA, 710 bp, Arabidopsis thaliana landsberg
cgagaggagcctcttggttgcactctaattgctctgaatatatacgcatgttcaatgattttaatttcttttccatttcttttgagcagggacttctaatgctgtcggcgagacactatctttaggactgctagggagtttagaggttacacagttgactttttctatcaaggttataggtttagtattgttaatatatagaaatggaagccaagatcgtcaaggggttggatagtagtaggtgtgaagatggattctgaaaaaagaggaagcgcgcagcaagctatgctgaatatgtgactggagtttcgggtgcaacgctgataaatgtgcccccaccgaacgggcagtgccaaattcctgacaaaagaagaaggctggaaggcgaaaacaagcttagcgcttacgagaatctctctgggaaggcgctggtcatatattacacttattttaagaagactgggatcgcttaacgtgctatgatgtatgagaatggcgaatggaatgatttgcctgagcacgttatatgcgccctccagattgaaatagaacaactgagcgccggacttgagttcaagttatgcggtcacagttttattttggacttgctgcacatgcggagactagacatggatacaggagcgacaacccctcttgcatggattgacaatgcatgaaagtgcttatacctgaatctatggagtgatgaa

SEQ ID NO: 13729 - DNA, 728 bp, Arabidopsis thaliana landsberg
  unsure (1)..(728): unsure at all n locations
aatctataatccatagccgagacttagtgatctaagagtatggatcattcaaactacaatatacataacaagttcaccgcagattattcaagatacaacatactgaaacttcgtaagcttaaatcgataatttgtaataacttggaacttagatatggaattttgaatcatgcatatatagaacttctgatactaaaagaaggcaagtgtaaagtatattgcatgaaaacggaaacgtgaaaattattttctttttagttagaaaatagctatgtatataaatactattgaaacgccaaacatcaaaactatatttagaaaagaaaaaaaatatttaataccaaattaattaggtttttaaagttactaaagtgatgcaaaataaaataggggcaaaatgtcaaaaatgctttaactttcaaatttaagacgaaaaaacttgaactttccaaaatgtcatataaatcacaaagtttagtttgactttaatttttcccaataaaaagtgagtttctatcgcgtttcaaataaagatttctagaaatcgcattttagtggtgtctatatttagtgtatgtttctaagacattctgttttcgaaacgaaaaacanaccttagagactttcatgcagtctaacctcatcggctatgaaggaaaataaggcgtcaagacaactttattagaataannnnaaagccacaatttgtacaatcatatttttttttg

SEQ ID NO: 13730 - DNA, 710 bp, Arabidopsis thaliana landsberg
ggagaaagtatctgatggtggttgtctctggtgggttgaatcagcagaagtttcagattgttgatgcagttgtgattgcgaggattctaggtgctgttcttgttgtcccaatattgcaaatcaatctcatttggggtgacgagaggtatttttgattttttagagcagaattttagagagtaatggatcatcaaaaatgttcatggttttttgtgttcaacatgtttttatttgcagcgagttttcagatatatttgatttagagcaattcaagagtgttttagcaaatgatgtgaagattgtttcgttgcttcccgcaagtaaagtaatgactagaccatcggaagatggtagtatgccctttaatgcctcccctcaatggatccgttcgcactatccaaagcgtgtaagatcatacaatatcccttgaagcaatttgtgatgaacaacatatgagaaagaatgttcaatggtctttgttgtatcctgcagttcaatagggaaggtgttctgcttttaaggagattggattcaagattgtctaaagacttaccctctgatctccagaagctggggtgtaaggtatatatgtctctaactgggaagctaaacgtgttcgattttgtttttatcatttgactagaaaatgtgttgcaggtagcattttgaagctctaaagttttcgccacgagttatggaaatggggacga

SEQ ID NO: 13731 - DNA, 610 bp, Arabidopsis thaliana landsberg
  unsure (1)..(610): unsure at all n locations
ccaatcaaatttggctgctaaaaactgaatttgagcacttcacttcaattgagatgaagacaagctcaaaccaaaatcatatcaacaaaccagtgatctcatgatttcaaaattttcctaatacacacacgagactagaaaaacaaatggatcgcaaatcgaacactgaaaagtctgaatcggtccaaaaccgtgtcacagacaactgtcgatttcagcagcacgaaattatattcttggatgcgaaactaaaccaaataaactccgattaaaatgaatttttcacacacctagacaaatatgtttccaaggtctccacaaagtttaagctcaatcggacttatgaatcaaccgcagatctgaaaatacgaattaaattggggttttattagggttttctagaacgagctcaaaacgagatttgctaagatcacaaccacaagctgcaccaacagggcataataagtgaccctaggaatatatctcactaccaacaagtccaacaacatccgaattacaagaactcgaaggttcccacaaatcctcaagacaagagaagggaagactcaagacacgagacttcaaaaatcagcaagnggataactgagat

SEQ ID NO: 13732 - DNA, 981 bp, Arabidopsis thaliana landsberg
ttgtaagtatattacaatatgatttagataatgacagtggtgtaacgttacccaacaaaacgttaaaaacacatctcaatatggagatatgacatgagaataccataaatatcacaatcctcaaataagagtaaataggcagggagacgaggtaagttattcaagttcaacaagaagctaattttttattcatatctctttttatggttaacatgtcccctcttatataaaatccacttctaagaacccggttcttcaaatgagtcccataatatacatgtagcaagacatcgaataaaaaacagttgagacaaacaaatctgctttgcgttttgctgattaataccgaccagaaaaagcagatttgtttgtagtaaccatttttttatttgatgttctcgtttgtaggtattgtatggaactgatttgtaaaatcgagtctttggaagcggattttacaaaggagtagaaataaaacttgtaagaagtgatatagataatacatagtttatggttggaattttgaacaacctaactagtctacttggctcgttattctcgtttgaagattgtaagatcttcggtgttctcatgccatggctctatgtgggaatatatttttcatcgttttcttcggtaaagttatactctcaatatcaaatcattttgtaattttgttggctaattctcaccaaaatattttatattttgctaaaagagccactatcactaaggatttacagcttgctaaaaagtctctagataatctactttgaaatcacgatattgtatcttttaaattttggggttattattctcatttcaatgcattcattagattatcttaaagaactaaaatttgcttggttgatattttcttctcttgattgacaatattttatttaaagtcaaactagattgaaccatgatctaaacgtttatatcttacactgtttactttcagtccagttttagaaaata

SEQ ID NO: 13733 - DNA, 618 bp, Arabidopsis thaliana landsberg
gaggcgaggggagatatttttcccaagacgatactctgggttatcttcaatgttttttcccatctaaaatctaagtattttagttatgcaaagcctatgaaatatttaaaagtacaatttgtatgcattttgtttggtcgattatatgatatttaaataagaatatatttctacctagataatcatgagttttgtcaacaaattggtaattaacttgtaaggtttctgtctcattcattaacttatacaaaaaaataatccgtttagaaattaaccaaattgggctgaaatagttttagttaccagagccgaagccacgaggaccaggcttgcttgatgctgactctacaaatttcttccttgagtctgcctttctcttcctccttgcagttccaggtggagccttaagatacatttacaagaccccattaaactctggtacatgttaaagatgaagaagaagaagaagaagaaatggaagaaaccttttgttctgctttcaatgcgtcctcgaggccgcttaatgctggaattgatccaccaaccatcactcccgtcaggttcttcgttttcactctcatttggaagatttgtgctacaagtgcgctcacctgaacc

SEQ ID NO: 13734 - DNA, 513 bp, Arabidopsis thaliana landsberg
cagattgattatgagaaactattcaccataacgatgtgtaaaagatgtaacattcacaactgttgaaggcacagggctgtttctcaggagcggtaagagaagtttggtcaaagagaaagcgccgacataatttgtagcaatcatcctgaaaacgatggagactgaaagtgtaaccaatagagttcaaaattctgaaaccatagtgaaaagtgaaaaccttacctgtcaaagccttcaacagttggacgactagatgttgccagtattccagcattgttcaccaaaagctggactgaagaatgcaaatctgactcaaaaagccattgctctagagagcttctgaactttaaaactaattgaaaagacgacatgtcaacttcaaaagctttgagtttggcatcctcgttctgcctcttaatatcactcaaggtctgtcaacagaaagtggcaatcacaaagattctagcgtcaaggaaaaagcggaggttcttctatctatcggtacaaggaaaa

SEQ ID NO: 13735 - DNA, 427 bp, Arabidopsis thaliana landsberg
tccctggattgtcttctcttgttctttgcaagttcttagaagttttgtaacagatttatgtaactccttgcattgcatgtctttctcttcaaagtttcttcttacgtaatcaagatcatcggtactaccagtgtaactctcttgtaacttggagagattttgcataagaaacaaattttcttcacgcatttcctctgctgttgcactcaactccgtaactgtttcatccaaatgtcttatcatatcgatacgctcagtttccttttcatgaaaggtcgatatttctctctggagtgagacattatgctcagcaagctctctgacacgttccctcagccttttctcctccaccttgaaactctcgaccttcgaagtccactcacttgaccttctatcaagctctgtctctaactgaacttgtaactca

SEQ ID NO: 13736 - DNA, 662 bp, Arabidopsis thaliana landsberg
tttcattttgagaatcctcctctgctgcaacctggagtccggtaaacccttttctcttttgtctccacctcaaaactgccttctccaatactcctaccgaccacaatatcttcttgtactgcctccttgcttgtaatcccctgaaagcagcctgcaaaataggaggaaatacactcatgtgttgcaaaattcagacagacgatatgataaaggtgtgaactttcagtctcctatagtttgtggaatttagacaaaagtgatgattatgaatagccaagttcagagcaaacttataatcttggctgctgaatcttgtgtggttcacttcatacctggatcctaattgcttggcgccgcatgttcagatactctcttcgtattttccaagtttggaacctgcattgaatccggtaagcggcttctatcttcctacgtgtatcatatttccggaacgcattctgaatcttcatcgccgcgattatgctcttggcctcttcttctttgttagcaaactgaatcacgcttgaccgtgctgcctttagcgctttttccctaaacgcaccttgaatccgagccgctgcttctgcagctgttctgtatgctgcaagagcatccttgagaaactgctcatcttcaggtagagtgccttggttcaacatctc

SEQ ID NO: 13737 - DNA, 616 bp, Arabidopsis thaliana landsberg
tttcgtctacattaccaaataaatcctcatttttcctaaacttctactgtaaatttctgtaatttatgtaacttttacaataatctctatttgaaaacgaaaaatcaaagaatctctaaagaacaaaaaaagaaagaagtaagaattaggacagaaaactctagaaagaatagtgctaagtcttgacgtcgttagttttcttgctgggtccagaccccggacgactccctttcggaagagcattcaacaccaaggacccgaactttccggcgacaacttcaggaacaaaagaagaatattccgtcttggtctcctgctcgcctccgcaaccaaccaccgccgacttagaaacaggagggatctctccggagaagatgactggaacaaactctccgggtaagatcctcgccgtcgatagagaaacagagatgaaaagaagaatcaaaagtaaagatctgttaatcgccatctgtaaaaatcttttcgtggactatttttttgttggattagtcttgcttggtttgtaaaatgatgaagtgggtgaagatcaaagagagagtgtatccattatatatatacggagttttgtgaaagtgcgaaaggtcaatggggggag

SEQ ID NO: 13738 - DNA, 512 bp, Arabidopsis thaliana landsberg
aatgtcatacatgcaataattatcttcgattgtttctcaagcgaaaatgaagggagacttaatagaattctccacttcattttgagcaccccaaatgatcgctcaataacatttcgtagcgatgagtgtgcatagttgaatacttctttgctcccaataggttgcctcgcattttgccattccgtaatgtggtacttctgacccttataaggtgcaaggtacccctttctatttggataacccgaatcgacaagatagtatttacctgcacaaacattaaatacaaatgttacatacatatgacataaaatagtactgtattctacaaatgtacaaaatatttatataccttccggtggatgggggacctgtccgcataagttattaaagtatcttgtaatactcttgtgtcatgtacggaacctggccatcctgtgacaccaaatgtgaacctcatatcgacgtccaaacggccattacattctgcgacgggtaacgtgccgggcaatata

SEQ ID NO: 13739 - DNA, 734 bp, Arabidopsis thaliana landsberg
gttgttgttgcgcaggtatggtaattcatggaaagatataaagaatggaacccttgcagtatttgcggagaggcccgaggtgaacatttccttattaacattcatactcaccatttacttgaacaagatatatgccaagtgtgagtgatgtaaatgttgtaacttggtaggtggatttgaaagataaatggaggaacttagtcggtgggtagaggtaacatcttttgtgaatcttgtgctatatgttttaaaatgctgtagagttatttacctttgtgaattgtgatatatcaactgtggagaacatggtggagaaagggccattccacatgttgtgtggtgaatgataatgatgaatgagcagaatataattatatgcttgtgggaaaaattctggctgcaacctctgtagtcagtcagtgtcaaacttatacggcttttcttgttttagatatattccatccttatcttcatttcctaattcctaccatgcttccctctctccttttccacgtgtcaactaacatctaaaccagaacaaaacagtagtcaaaaaatgcataaccattttgatctatgatattgcctgtcaaacattcggaccctccttagatattgcctgttaacattcagaccctccttagataaaaagcaaagtaatatgatgggagctctcatgcacatactttattggtgaatgcatatttgttacgtgttattagtttattacagaa

SEQ ID NO: 13740 - DNA, 589 bp, Arabidopsis thaliana landsberg
gggactggtcgggctggtataagtttccttaaagatctcgacataacttcctacgatgttcaggttgtgtctccccagaacttctttgcctttacgccattgttacctagcgtcacttgtggaactgttgaagctagaagcattgtggagtctgtccgtaatataaccaagaaggtaacaaaggcctctctttcaaactgtatgcaggcatcatcaccatctgctaagttcttacttaaatagtatctgttgttgttgttatcagaaaaatggggaaattgaattgtgggaagcagattgttttaagattgatcatgttaatcagaaggttcactgtcgaccagttttcaaggatgatcctgaagcaagccaagaattttcccttggatatgactacttgatcgtagcagtgggagctcaagttaacacatttggcactcctggtgtacttgagaattgccattttctcaaggtaactttcatggtttcaacttgtgaagattataattctcccagtttcataattcctttcttcaaaaatactgcaggaagtagaggatgcacagaggattcgtagaggagtgattga

SEQ ID NO: 13741 - DNA, 882 bp, Arabidopsis thaliana landsberg
ttggtttgtcaaatattttttgttttaaatagtttccaaaatctagtttaaattttggagaaatttgcgtgatatatgggattagaatatatttggtatattttttgtttgttaatcaatttattgccaaaagaaaaccaataattaaaagccagtggcaggcattgtaactaagttcgaactttaggatttatttcacaaaatggctgcaaaaatgtatatatagatgtatttattcaaaaaaaaattactcaaaatggtccgtaaaaatagagaaaaaaatacgaacaactatgtcaactaaatatttcgagagaaaaaattatgttgttatcattttccaaaaaaaaaaaaaaacggaaacatcaacaaataaaatgagcagatttctttaaaatgagatgataaacacgtaataatcttttagaatttatttttttgaatttaatgcaaaattatattcaaaagaaaaaaatactgtttggtacatagaaatgcatacttttttatggaaatcaagtaaagattatctatccttgacttttttatttttatctttgatttctacttgttcgtttaatatagtgaacctatataaaagtttgcgttgtttagaattctgatgaattggtaaagataacaaactacacgggcatgttcacctcttttcacaatgcattttgatgagcatgcaaacattaattatacatatatatatacatattttaataagatatcttttattatcatttaatgaaaacattaaatatgtacttgggttatcgtttcttttataattcaggggctttgaacaattaattggatcattttcccccataaaggttttcctattgtcccatataatcaatcatactttggtaa

SEQ ID NO: 13742 - DNA, 735 bp, Arabidopsis thaliana landsberg
tactacacaaagcacctccaattctctctaccatacaaaaaaccaaacccacaaagtctctctctctttctctctcggtgattcgattttcagaaccgaaactccggcgaaaagattatggcgggacagtcacgaaaatggatgatactggtggcgacgatatggattcaagctttcaccgggacgaatttcgatttctcagcttactcgtcagatttgaaatcggttctagggatttcacaggtgcagctaaactacctcgccgtggcttcggatctcggaaaagtattcggatggtcgtcgggactagcgcttatgtatttcccgctttggacggtgcttttcgcggcggcgtttatgggattcgtcggttatggagttcagtggcttgtcatcactcatttcatctctttgccttatatcatggtaacgtaaccaacttttctactttttctataaacaatatatatatatatatatatttgttgagaatcactaatttggaataaaattgaataaaaattcagagaatggaataatctacaagttatcttcatttttgagatattgaaatataattcaagaaatccttcaaaaattaaaattgtcttcaaaatcaaaattagtttatttaagattgagtcttttttattataaggatttgatgcaattttatttctgttagttaacagcttatatatgttgaaattgtgaccaatgagacgaaaaataatg

SEQ ID NO: 13743 - DNA, 421 bp, Arabidopsis thaliana landsberg
actctctaacttgggttctaattttatgggcaggagcctggatgatgtgaaaatgaatattgacgttttcaagaactgtgctacagttctgttcctggtattttcacaccttcagttttccgtgaattaggtcccgtttgaatgcattagggctaatagttagctggctaaaaagttgctagtgggaattagctaactaaacgggtgtttagatgtctccggctaattttagccgctaacaattagctctaatgcattcaaagtttcaaacatcctcctagcctaatgctactaactccaacagcttcccgtgaattagcccattcatatatatatataacgatatatatcaatgtagtggagaattgacaccatgcatgcagtcccttaaacagtcggtgccttactggccgctatcgcg

SEQ ID NO: 13744 - DNA, 717 bp, Arabidopsis thaliana landsberg
tgatatatgctctctgtgaatcatcagcattctcaatcatcactatatcaacacctttccagaccttaccaaccatgtatgtatcattgcttccagacaaattgtcattctcaatacacacaagtagctgaaaggttttcccaaccaagtttttgatagaaggaggcattctttcaggatcctgcagctgtgttatcaatgatagtctataagaatcgatagatcattagtgaaaaaccaaccaatcagatatatttttccattgtcattactcacatcatcatcataaaccccatcaagaaggtcaaaagctgaatgaccaatcatctttgatgcagcactatcaaacatgatacatttgatatctcctgtttgatcaatgactccaacatgcaacttaaacctaggagcaaaagaaatcatcttaatgagtgatccacatagactacatatacaataatataattatataaaaaggaatgaaatggtataccttggaaccacttgtgtgatgttaaggttgcattttggacaccagtatgtagtctttgttggtttatcggcaatggcggtcttgtccttattgttcatctcaactttcttgctacacttcttgcaggcaacataaaaccacccaaaatcaccttttatagtatgtatcttgcacatgaccttgcatttttgaacctgaaatatactaaattttttcaaacaact

SEQ ID NO: 13745 - DNA, 634 bp, Arabidopsis thaliana landsberg
  unsure (1)..(634): unsure at all n locations
ctccaatgttgaagctggacaaactgtggttgagggtgatagtggtaacgagagcgaggaggactacaacattctaaactcgacaaagcctagttatcttgaatttgaaaaatctactgtatcagaaggtgacatgactatgatgaaaaaactaggctacttcggagagtctgagagcaagcttgttcgatttgttggggaagagataattccggagccgagggatgatgaagttaccatctttaagagcttcttcagagcagggctttggttcccgctaaatgacatgataggggaggttctaaagaactttgaaatataccttcatcagatgacccccaatgccattgttagacttagtgtatacatatgggctctccgaagccagggaatggatgcgaatgcaaagctttctgtcgggtgcacgaacttcactaccagacgaaggctagagcagatggccttcacaagaactttggctactacaattttgcgtatcggaaggatacaaaggccccggttattggctatcgtaccaagtggccgagtggatggactaatgaatggttctacatgaaacnggatgagaaaaaagaggagcagctaatgagcatggctatgagtccgtagagtt

SEQ ID NO: 13746 - DNA, 782 bp, Arabidopsis thaliana landsberg
  unsure (1)..(782): unsure at all n locations
gttctctcagttgattgtgtgcttttaaatattatatcttgaatcatcttattatgatattatcagtttgataagagtccaatgattcaaatccttgactaggtcattcttcttcaagatataaaccaaaacacttaacaagaaacagaaggaggaatattcccacaagatccataaactatgttcatattaacatagaattaagccagaggcaaagatacatttagaccaaaccgataacaaatttgagccgaaccatggaacatcataccttactaaaccaatgcagcagatgaaaaccgaataaggggagacaaattgcacacaacacacaaagcacaagaggaagattggagactaggcccaaaaccataatatttatttactttatttcatttaagaaattagagtatgttcgtcaactttcacccacgatccaacgtctgcatcggttatccataatgcaactcgatttatcttaaaattcaatccgtcgagactcgaatcaagcgtgtaagctttctctaacgctttcttcttctccccctccgttaaatcgccgtagagtatgctcatgtgtggcacgtaaactgcaacaatccaacgtttcaaatacacgtacacagaaagagaaagaaacaaaaaaacacgtttcttggaataatatgattttagtgttttacaatataacgttaatactccaaccaaattaaatcgatatcagatagatctcatntcgtgaggttgagtgcctgaatgcgacatcatactgaactaacaac

SEQ ID NO: 13747 - DNA, 815 bp, Arabidopsis thaliana landsberg
  unsure (1)..(815): unsure at all n locations
ttctagggttgatctccatcttcatcgatttcgtatagcttaatattctaacctagtcatgaataggatcgacgagggtacataaaaagctctgctttcaaaagccctaaattctctgttattattatttttctaacgattcgactctgtttttgagacagagccccagattcatgaagatccagtggagaaccgtgaggaagatgatgaagaagaagatgatcagtatgagtttgacgatgggtttttagtgaatggttctgatgatggagaagaagaagaagagcagagacattgtagtgagaaaaagagtagaagtcgaaggaagaaagacgaatcctttactcttcacgaagatgattatctacttcttaaagataacaacgacaatttccaaagaaacaagtataaacgtttgaagaaatcttcagaggaagaggataagatcaataatgatgatgatgatgatggtttgagtcacttcattgtagatgannnnnnnnnnnnnnnnnaaggaatgaggaggaagaaaatgaaatataagcaaggaactgattcgaacgctttacgatacgctaatgatgtatttggtgatcctgaagaattgttgaaacttcggaaaaaggatttgatgtataacgaaaagatcgaaagaaagttagaagatgagtttgaaccaatggttctcactgagaagtatatgacggagaaagatgatgaaattaggaagctcgatgtttctgagagaatgcagatatttgaagaagccattggaactgtttcctagatgactgagcattcagaagagagcactg

SEQ ID NO: 13748 - DNA, 588 bp, Arabidopsis thaliana landsberg
gaattcgttcattagtgatggagacagggaaggttccccgtgggcatgtaaacaggaaaaaatcctcccccgacgggtccttgttgcccgcgagaacccattaaacttatatatacgatgatgttttcatgtaatatataatgataaaaataaataattatattgttaagagataactcgttgtacaaatatgtttattttgatgtacacataatgattttaacatctgataatgtgtataagtgacaatgttttatattaataacgaagaaagtatgtcatgattataatttaagtgaggatggagatcctcgacggtgatttatccccgcgggggtcggaggtgaagaagaaataccacccgcaaaagttcatgtggatcctgtggtgaaattttttgtcgcaggaacgggtatgaggagccaaaactcgacaggaacgggtacgaggagccaaaactcgacggaaaattcccgtttccatccctaaatttactaatggaagggaagtaggagtaagttgcgtacgtgcttgtcaacacacaacaatccatccacccacccgccccgacggtacccagatgtatac

SEQ ID NO: 13749 - DNA, 372 bp, Arabidopsis thaliana landsberg
agcttggagagagatggccacatggaggacagcgtggaggaaccggatggattggcagtgagcgagctgcaagcacatatgaccttgttgagcaaatgttttatctctatgttcgggtcgtcaaagccaaggatcttcctccaaaccctgtcacgagcaattgtgatccttatgtggaagtgaaaattggaaactacaaaggaaagactaaacattttgagaaaagaaccaaccctgagtggaatcaagttttcgccttttcaaaagacaaggtccaatcctctactgttgaagtattcgtgcgcgataaggagatggttacaagagatgaatacatcgggaaggttgtgtatgatatgcgtgaagttccta

SEQ ID NO: 13750 - DNA, 691 bp, Arabidopsis thaliana landsberg
accgaaaactctgtagagagacaggcaggtaagaaaaaaagacattttacagtttaataaaaacaaaacacgtgtcatgtgggggggtcaccaacacctacaacatgtaatagtttaaaaaggaaccacgtggcttttggcttataaaagggtccccaaagaagctcagatctaactcacaccactccattgcccattgctctgtgtactttgcttctttaggagaaagaaagcacaaggggcaaaatcggaaagattatcatggccgacggtagtactagttcttcggagtccactaccgcctgcggtggaagcggcacaagaagagagattatgctgttcggagtcagggttgtgcttgacccgatgagaaagtgcgtgagtttgaacaatctgtctgactatgaacagacggcggagactccaaagatcgacggcgaagatagagatgaacaagatatgaacaaaaccccggccggttacgcctcggcgagatgaagctcttcccatgtcttcttctaacggcaaaatcgagaggaaacgaggtattactcttcgattgaaactttttttttatcattccataaatttgatcactttaaacttagggatttgttagatatggtttgagaaatggacgtatgacaactttatgttcatttggatttagaaagatggctaatttattggg

SEQ ID NO: 13751 - DNA, 334 bp, Arabidopsis thaliana landsberg
aacaacgacgctttgtcgtctggattgatgaagaaggtgaaaacgtcgtcgcatccttgtcccatatgtggagtggagtttccgatgggacaagctttgggaggacacatgaggagacacaggaacgagagtggggctgctggtggcgcgttggttacacgcgctttgttgccggaacccacggtgactacgttgaagaaatctagcagtgggaagagagtggctagcttggatctgagtctagggatggtggacactttgaatctcaagttgtgacttgtgaagacagtttaatgaatttatttaatttccctaaattttctgaataaaattg

SEQ ID NO: 13752 - DNA, 1272 bp, Arabidopsis thaliana landsberg
ctgcccaagactaggactaagtcgaggaattttagtcgacgatttagcaagccgtacatcggaatgatcggaagaagtccttacgagacaagtattgtttggtgggaccaatggtctgacagttttggagatagtcatgagcaagtggtcggaaaaccagatgggtgagtcaagaggaacgaggatttgggtgactgtgactaatgggttgatgcgttgagggaatgcgtaaactcatcgtggttatggttctacgagatgatcaccgttggtaatggtaatgtccccgaatgcgtgggatttgtttcacttgatactgaggcccttagtaatatctcatcctttactaggcgctgcttatgttctattttccaaacaagccgctacgtctttgttgagctttacttgtgccaggcgatcggcatatggatcatgtagatcatgcttgatgatcggtgattttaattgatcggactgagcgtatgatcgagagtgttctgttgtgtaagcaggtaggtagaatgagtgccctagaattgtcatgggtggataggtattactatagataagagcagaatcggatagagataaaattttggatacgtatagttgtgaataagaacgagaatggatagggacggatgtggataggatcgacattacagataagaacgagtattgataagttcgttcatgcctatacattccgtatggataagatcgtccaagtttatcccggacggataaagtcgatcaagtctatccgcatgttgtggatagagttgcgaataagctcgtttgagcctatcttgccacctcgtgcttccctaaccgacctaccacccctataaataatccttctgcctcattattgctcattcacaaaaaaacgcacgaaaatctctctgaaaagtccgtgagcgagcgttgacagtcaggtacgactagttcgtcccgaggagcttccgggtaatgtccaggatctgccgagtagattagttaggctatcgcaaactgagtttggattaggagtagatctagtctaaaccgttcagctgaaacaaggtaagtttctagttatgcttgattgcgtattgcatgtggttctgtgtagtttgagtactcatggtaaccagctagattgtttattttattgattgcttgaggttatgctttcaatattagtatacttctgcatgctacttgttatattgggttttgagttggggatttattttttgttagagggagctaggactcatagggcgagta

SEQ ID NO: 13753 - DNA, 1728 bp, Arabidopsis thaliana landsberg
aactcttttacatactaaaaaacgggtgaatttgggaataaatatataatatttttaaacaataataaagtagtattcatatataaaaagctaaaatattaaaaagtaagaacagggtatgtgaggattagaccgcttttgagttgttctttgtctaaacttagaactctcaactcactctttagttcactcgtttgtaattgcagaaacttgaaagtaaagaacacacaggaattttacgagttcaggattcagacttgaatgcctacgtctcgtcgagatattctcggaaatccactaagaacttactctaaacttgagcctttagggttctacaactttctctctctgttacaaacttctctcacaccttaactacaaaacatgaaccactatgttcttatagagacagagagaaggatctagaatggttacccgtcagctcgtgctaacatcttacacaagtctgctcttcttccttcaattacggtcctcaattgtaactgaatccatgtcgagggcgccttgattgacacagattctgagagcttccttcttcgtctgcttgtacgaactcgacaaagtgacgacagagagagagcaagaagacatgccttttgtttctcaaacttggcgcataaagtgaaccctctaagcgacccataactcttatctcttccttgctttcatttgaacttcgaaccctctataccgaatagagtctttcccatacttggtgaatttagaccaaaactcacagggtacaatatataccatatactagcaattcctaatatcaaacttgttctctcatcttaccagtccgatatttgtaaaacaaaaaaatcaacatctttgagtttctttatgtgaaattgtctaaatctaaagtgacaacaagaattgattagtaaaaaactaagagagaagagagaaagaaggcatatcctcaattctgaaaacatcatccatcatcagctctctctcaagctgcccccttgtacatcttagcacatcctacacaaataccatttatcatcacatcacatcaccatcaccataaccaagcaatataaaccgaaagatgatcgactcacgttgaattccatgtaggtggcgttcttgtccagccattgcttgtccattaccacaaaggccacacagtaaagcaaatcaaaggcccattcgctttctagatattccaaaaacttagttaaaaatcaagtaaaccagagagccatgatcatcataaccaaatgtttccatattttacctgacaacatttgtaagaataccaaccgtataaaactcctaggttttgctgcacatgtagtaaatattaaaacaagttttcttgcttcacaaacaaagagcaagatattagggacactcacatgcttctaggtcaagcatttgcatgatcatgaaggttatgttgacgcccgctacagcgaatggatattcccaagctgctcttttgcctccctgtttcttcaagagacgctgaaacgaagtctacaccaatgccacccgaaaaaacatcaaaaaggttatgaatctctcaaagtagaaagttatgacagttaagtttaccgagaaagtctttgcaaagaatcgaagattctccaatgaaatgaatccagctcctctgatcacaacagtcgcaagaaaaccaaactaagcaagtcactcctccggaaagtcgcagctcaagcttcggtctttttc

SEQ ID NO: 13754 - DNA, 652 bp, Arabidopsis thaliana landsberg
tttctaccaattatggagagcttgatttacaggctcagagtagattagactggaggaggtggtctactagttataggagtcaagatggtttggaggctgtagcgttagatggagaaggagaagaaggaagtacaccggaaacaatccgaagcttcagccaaaagtacagaccaatgttttttgaggaattgattggacagagtatagtggttcaatcgttaatgaacgctgttaaaaggagtaggatcgctcctgtttatcttttccagggtcctagaggaactggtaaaacatcaaccgcaaggattttttcagccgccctgaattgtgtggccactgaaaaaatgaagccttgtgggtactgtaaagagtgcaatgatttcatgtctgggaaaagtaacgatttttgggaacttgatggagctaataaaaagggagctgataaggttaggtaccttttaaaaaacctaccgacgatacttccaaggaattcctcaatgtacaaggtttttgtgatagacgagtgtcattttctgccatccaagacgtggctgtcttttcttaaatttcttgaaaaccctctgccaaaagttgtctttcatatttataactactgacccttaaaaattttccccccaaccaattcaattca

SEQ ID NO: 13755 - DNA, 648 bp, Arabidopsis thaliana landsberg
ccaaggcctaacgtcaaaccgttacctagggtcgagtgtgattcaatgaacatattgtgagacctatgtagaaaactatccattgaaaaccctattgtagcgtatggtctaatgaacaccatcgaactaatccaattcttaatttacctctctaaaacctctctataggccatcggctccatcaccattggtctaatgctccactatacactagggtccaacatagcatagtgaaagcatctaggcctctagttgattttgatgattaatgacaatacaagattattgtgactaacatgtattttgcagctatatggtaagttaggtcacaatactggaaattgggcttcaacaagtgaaaacaccccgaatgatgaatatagatgagatggctaaagacgggtgcttaaaatgtcacgggttgctagttctaagtgtcgaaagagttgttgggcatttagtttataattagggcttttatttatttgtagttgtactataaagggggttttagatgaataacttgaccgtaggcttgcgcgctgaagtgtggtggtgccacttgcatacacatagtgcaaggtactcacatagaccacaaaaagttttgagtggaaccaaataaaaatcacttaaacagttattggg

SEQ ID NO: 13756 - DNA, 633 bp, Arabidopsis thaliana landsberg
tgcttttgcagttttttttttgtttagtggagcaattttgtaagtttgagtaatatttttatgtgatacgaatattagttgtgacattgagtggtcattggttttggtatgtaggttaagtactgctcagagaacaacaagcgtctgattcacttttccacttgtgaagtgtatggaaaaactataggaagctttcttccaaaggatcatcctctgcgtcaagtcagtatttttttcactttttcactctgatcatattattttgtcttgtgcattactttctgcttaatgtcgttgtcaagaggatcaggaaactatgttaattatgtacattggcacactcacttaagattgatacggaaatttatatacttatgctgttattgttgttatatgaagtcttgtttactgatctaaagagtaacgtaaacctgttataagcctatgactacccatctttaatagtgtttgtaatatcgagaaaatgtagtttgtttcctgcaattcctgagtatggctttgaccctaactactgcatgagagcttttggtttgcttttgcttactttcttatgcaagtagatatctgtcgtgctcgtgggtcttattctacttttgtcccggtgttggtatt

SEQ ID NO: 13757 - DNA, 1130 bp, Arabidopsis thaliana landsberg
cattgtcataaaagttaatggaactagcaagaaaattggctatagagcgatatactttgcctcagtgaaggagtgagcaatatgtttttttgctacttaaagaccaaaatattggatactttccgaggtcaacaatgtatgcaccaacgaggctgccactaaacatctgagtatggatacagtgagcgaagaattatgaggccatgattaaacggtgcaagcaagggaccaaaacacacgtttgatatatagcgtcccaatgtgtatttgtcggttagtgaataaattgggagagtttagttcactaaccacaaaatactatatctaatagtgtaatagcaaaattctgaagactctcaattgcggctcgatattctattgcatcatggagggccaaactcatgtaccatatggatgtcagttcggccttgcattgatcagctgggtgcaagctaaggaggtacttatttttttgtgaggtaaacactagcagaggtgcaagtgaactctatttcaagaatgtacaagaaatcgccaagatcctttataaagaagataatgcttgtgatttcttttgttttttacttcgtaaatgatcatacataagatataaggatatgatgtttacaggagttaagccatacaatttcgagagaaaagcatattagattacatactagcattaacaccgtaacatgttatcttaggtaagcttcaaattatattgcttttaatacatagcagaccccaacacttggtagtgaccttattttaagtagcaaacacatatgtcttggtttgcacatttcccgaaggcagaaataaatactatatcatacataattagcttcttataattaattgcattttcaacataaattgcattttatcccccttaattacgaaattcctttataagaacccctccatagagctgaaccgccttatcgcagttaatagcccgttcttttggcctctcaaagcggtcaacatggccaataaaaggacgagcaccactgaagtattgaatacgatccgtgggatgataaaccaccggttttacaatagttgactcatatgaaaactgagaaatgactccgcgagcagtaatagtactagttgcctcttta

SEQ ID NO: 13758 - DNA, 638 bp, Arabidopsis thaliana landsberg
  unsure (1)..(638): unsure at all n locations
taccatgactatgaacgattaagcaagggtgccgaaggccaaagcgaaaaagagttgtcagtgttatgaagagacaagctgctagaatgatagaagaagatgagaaagatttaaagaagaaaaaatccagccctgagccgaaggtggctgttccgaagaaaagaaaagttgccgctgcgaacgcaagaacaactgatatagaggaaaaagttccttcaacgcctcctgctgctgacgtggaggaaacattaaaggtaatgaccgaatctttacctctcaagctaagtccactagggccacaactaatgaaggttttacagaagaaggtggagcctacggcaatcaagaagcctgctgaaaaaaggcgaaggattattactgttattgatgctattgaagaaacgccaccatcggcttcagcgtcaagaacaccggttgccgacagcgtgcagctaccgaggctgccccatcgaagctgcaactgccgaagctgagatgaccgaagatacaaatgtggagagcactttttctgatattgataagatgctttnnnnnnnnnnnnnnnnnnnnnnnnnnnnnnnnnnnnnnnagactctggctccagcgcccgggaaagagaaggggacagagaaggggat

SEQ ID NO: 13759 - DNA, 1098 bp, Arabidopsis thaliana landsberg
gaactaataattttcttctgctaattaaattgcttttgtgctttttattttatatatataaatctataaattggggtttggagatttacattttcttgtctccacacttataggaaatttctattaataatgaaggtagcaaatcagtgtattggaattttggctaatccaaaactgtgtatcgtccatatattttaccaaaaactgcagtattttctttttgacatgtggcataagttttattttttatgttttgctttatttttttttctactcacgataaaaactattgccaatactattgcaaatttgagaattcaaaatcgggttttttatatctcataattacattatgttatctaaaatatcttgttgtatctaaacacatttcgagtagtaaaaaacttaaactttatatttatatttacgtgcagatactttttgaaaaatcattatttctactatcgaaacttcatgagcttcttcatcttaggtgttcatcgctatggagtttcaattaatttgaaatcaatttctaattggattcaaggtcagaagtggaaaaggtttgatctaaaaatcaatttcagtgtatctagcttttgttatggggtgagaaatttaggatatcttacacgatgcttggtaatttagggttacagttgtctcacataactcttaccataagtttttgattcgcatgtgtgttcaaaggatttggttttccagttcagccaaaaaagactatgggagcaactttgctactgttttttattggcgtacctttagtattgtagtctttttgagatcctttttaatgtactttatgcaacaggttttggcgacaagctcattgcttctttgctggcttttaccaaatccagagaacaaccttaagcttcaactctacaattttgagaattctaatctaacttgtatatttgtcttgtgtttaactggctacacaagatatgcaatgggtgggaaaatgaagccaaagaccacctttcaagcatttaatattgaatcactaccatttttttgcataacattgatatatgaattctccgacgactttgtaatctaaaattagttcag

SEQ ID NO: 13760 - DNA, 741 bp, Arabidopsis thaliana landsberg
cactttaaaacgtgattcctgtaagggattccatgttaccgcataaaaggttataacccatcaagatcaagaccaagaatgggaacaaacccagttcctactttgatggctacctataaaaagagactaatagtgagctttctcattctctaatggcttccacaagaaaatctgtagtttctcaagaatcatcattgcattgtttctacttttctcgagagtaagggtattagcttagagtaacctagtgtctatgacaatcactcagaaactgttaagtgtaaccacagagttattaacacagatgtatcaagtaaagctccaaatgctccaccaataacttggcatttacatattcattactcagtagtagaaaaaaatgtgataatttctcaaaagttttctatgagagaccaagagcagctccaaaattgtcataaagcataagtgacaataacgattcgatatatcttgatcgatcgatgatagaattttaaaatttagataccttgtcctaaaacttcaactgacttataaaaaaaaaatgaatcacgagctcgtagatcagtaattagagcgataaaaaaccaacctttgatagaacgcattctctgagagattgcaaaaatcggacgcatttctcttgatcgaaaggagactccgcgacgcaattgagaagttggagagcctcttggccgcaaattggttgagtactctgtttctccattgaaggtataaacc

SEQ ID NO: 13761 - DNA, 391 bp, Arabidopsis thaliana landsberg
gaaagaggaaaagatctgtcttgtgctctgatactgttactttttaggtttagtacggagaagacaatgataaatggaggtggaagaaaaggtccaaattataccttttaccttactcgaaggttagtatttggtttagtactttaataattactattgagtaaacattattaaacattctgtggaggctcaagtcttatttgttctctgttaggatttgccggtgcgtcacaacattgatgtcatgcatgttgagaagaatgtgtctgacgctatgttgtccactgtgatgcaaaatgctaaatccaaagatggcttgaaggccagaaaaaacttagaagatatgggaatacgtaggcacttgcatacagaatcacgagggaagaaaacg

SEQ ID NO: 13762 - DNA, 540 bp, Arabidopsis thaliana landsberg
ctattccctctaggaacaatgaaccctccagcaagaagaggaggaggataactagagctcctcccgaatttgcaattttcatcgatctgcaagttgccgcgatgaacctaaatataccaccagccatttgctgtgtcagaaatatcaccaacaaatgcttcaagaacctgccaaacaaaaataaccaattgagctaacattacttttactaggtggttaatattatctatatggacaatgttaacacgttgcgggttcaagaatcatcttcacctgctgagttctggagcaaatccgatcatgtaataagtaatggtgacccaaacaacagattcgaagatggagataggaatacccaagagaaatgttggaagagtgaaggtccaaggaggatgaaacaaaaggtctcgttgcttgtagaacacgggaagtctctgaatcatcaaagcaagctctgcaaatccattaaacatgttaacgatcatggagaacatcaacgcaccgatgtagacggctccatcactctcgtctttgttccca

SEQ ID NO: 13763 - DNA, 826 bp, Arabidopsis thaliana landsberg
aaaagctttgggtttggtaaggtttgagaaggtttagaaaggggaaacaaaagaattgacaaaattggatatactagagaaattataaagatgaagagaagagtgaataaaggaaagctcccgacgccggtgaatcggagctccaccgacatcgcagatcgtcgtcaaaatgatggtcttgatactagtgcctaggagcttctcggtttctcaatggtaatgatctcttctctttattctccatccaccattaaatcacttcaaggtaatttagtatttttcttattctctagattagcaatgtgaaaaactttattagatataacattagtttttatgcttattaaactaagtagacttttttaattagtgtattaagatataacattggtaataatgattgagaaatgtttaatttgtagctgaaatgttaaattttgtagaaatatttagtgattaaagaatttggacaactgaaatcactgggtacaactgtgttaatggacttctacgaaaatgtataattaaagaccgttttcttttctctttcatttttaggtgataatcaaaagaaatccagtcagactatttgtttatagtgaatactataaattttcataacgtatctatacaaattaagttttttttttatcatggtacaattaagtacaacccgtaaaactaaagtctattgccttgactagttttcaaaattatataaaatatgaaatgccaaattgaaaaaattgttaaaatacatacatgggtggtaatgaaactaaacaacacatttttgacaaaaaacatatatttataggtataaaat

SEQ ID NO: 13764 - DNA, 720 bp, Arabidopsis thaliana landsberg
ttcattaattataatccgcagtaatccgcaccgaaaaaaataaaagaaaaccgtagcagatcatctatagatcctgtttacatacaaataaatttggtacgcaaccgtttattatccgcctaaaaataaaatagactaaaccgcagacaaattaaaccgttttatctgcaagcaaatccattcaaagcctttatgattataattaaaggcgagatctgcaagctcagttacacgtgtcaaatggacggtcaagattcgagagcacaatccactattccgtccgttgctcttctttcccatacgtgtcaaattatttcgctccttcacgaaaaaatcccgccacagtgcaaaatttcaagtcgcctttattttaaaaaataaatattattttattattataatatcgcatctaaagcccccccccaaaaaaaaaactattactcactcatacgctctctcgtcaaaccaaaaaaaaaacctaaaggtaaaaactcgctcctaccgttttccccaaactcagtccgagtcaaacaattctctaacgatcttcttcttcttcttcgtttctttgtcattcttcaattgcagaaacttcgaaatgaaaggcggcgaatccaaagctgaagcaacgagcactgatcagaggtttggtttcttctctgactctgagatccagatttgttttcgtatttttcaaatctgatttcttcgtttttcgat

SEQ ID NO: 13765 - DNA, 731 bp, Arabidopsis thaliana landsberg
taaattctaatatcatcttatttaatttttttatactttaaaaaaatcaaaaatttaataaatattccgttgattttatgtttatacaacttattaaaccaaatttaaacaagttaatttatatatgagtttgatatactttgtaactaattacattgaaactatttaattaataagttaaaacatatcaaattattatataagcagtaattaatgcatgatttaaattcataattaaattaaactaaataataataaatataatatgttgatgcgataatttgcacccaatgatcaaaatttaggaaaaccaattaagtaaagaataagtttttttggtccaaaaggacaagagtgagttttgagcattttggataattttatccttttcattaaattgtctcacctatatataattataactaatatgtttgtaaacacatctcagttgtctataattgatatgctagactccgtttttaatatgtttggttggatgtccaaattccatttaagtataattccgttcataaagatgattttcttagaaaagaaagaatgtatggttgatttgtttttttataagaaaattacattgtggttctactattgtactttaattagtacttatctagtaattgggttagtgtactagttacagtcttacagacaaataggttcacaataatagtagtaatctaaacatgttaacataccaatattgcttatgc

SEQ ID NO: 13766 - DNA, 1187 bp, Arabidopsis thaliana landsberg
  unsure (1)..(1187): unsure at all n locations
ggttatgtcgtagaccatactttcttattactttgttagtcgccaatatcactaccttttatgtattatataaatattttgtcattttatgggttagatcgaccgatgatggactctatttaaattgtatatcgttcgactaaaattatttaaaactttaacttgttgtaaaacagctttttgtaaatgtagattttataattatacactaaaaatgtcttaaacaattgatttcgatgtcttcaaagacaaaannnnnnggagtgtaatagactaactaaaataacttgtctcgnnnnnnnnnnnnnnnnnngccagtaatatatttatgttttacgatttcaaaatttcttgcggagtatattcttcttttaactcaagtaggatgaccatacacattgctcgagtttgaacaaaataacatagtgatgggatttattgtattgtgctttgagtctcttatacagattatcaaaaaacaatatgaaaacttgttacattattgatataggaaatacatatattggattatattattttgtcaaacaacaacatacgtctttcgaaccgtcattaatacatttaccgtatagtaaaccgcttttagctacacaaaacctctcacattcgtcattacctcccttacgacatggatctggtgtatagcattgtttatactcttgctttattccaaaacctattttacaataacaatttaacaaatacacgttcataaaaagagtaaaccaagtctatgatttaaaaaatggagtgtgtgtgaataaactagtaccttgggtatcatcagaacaatgaacagaagatatgacaaagaggatagtgagaacaaatgggagaagaattttcttggtgatagccatttttatgtagtactttagatgggaacaaatatatatagtattccaaatatatataaaaggtattatttttagtcaagattgcaattaaaagataataaagatggtgattttattacttaatatacaataaaatctctataaattaataatgttgggactatattattatttttaatttgtatttatattaatttctatttaataatttataatgaaaattaaaaatttggtgtaactggtaaattgttttaaaaaatatgagggaacaatatatttaagatgagttaaaccatgtgatctaaataa

SEQ ID NO: 13767 - DNA, 910 bp, Arabidopsis thaliana landsberg
atctttcaattagatatttacatttttttttaactaattagaaattttttaatacaagaaattgtataaattaagttttcttattaaaccctataaagaatgagtatagttgtttaattttaaaatagtaaaattctatgaatcgataaatttatttatcaattgttgattggagtatatataacccttttttctttactaaagaattgtataatttaatttttaatattacaatcctaaaaagaatgagtatatctattttaattttaaaaaaataaagttcgatgaattgatagattatttatcaattgttgattggaatatatatataacccttttctttttttcttttttctaaatattattttgtcgaacaaagagcgattatatatttactattaaactattgttgcaagttgcaaccattgcgaatttttttttctttctagtaagtgttatcctttttattaccaatcaacagtgaaaccatctactttcaggacttcacactcatatgtaatatacaacatcagattatcttcagaaagagtcatctatgttgcaaaccaaactacaagggaaactaaagtagaacattataccctattacaaaaagctgcaggtatgtcattattcaaaaaggaataccaatattataccctattattcaaaacttgtgactgctttcatggatcttaagcagcatataaaaccaaaaaaaattgacaaaattttcagagtgttcagcgtttttttggaggtttcagaatctctccactcacaagtcaatatttgacaagaactcaaaagcaagatttacctcccatctctgagccgtgacaaaccaactgttatataaccacggttccctttttagcacatacaaatgatcaacctcagactgagagag

SEQ ID NO: 13768 - DNA, 608 bp, Arabidopsis thaliana landsberg
ggttatttgtctattcgggctacctcacatggttccactagccatgtcaagaaacaactcgctcaagggtaacattatcaaattctttctttacattattattttcattagtccttgttaattttcattagttaattttcacacttgattactgaatttttaacattagtttccatagaaaatattgagataatataaactattataaaattttgcatagttatgtattcatcatttaatttcaggtatccacagaagacgatatttgattcgcttcatagcaacgacatcgacttcggaatatactttcagaatattccgaccacattattctaccgtaatctccgacagctaaagtacattttcaatttgcatcaatacgatttgaaattcaagaaagacgcggccaaaggaaagttaccgagcttaaccgtaatcgaaccgaggtatttcgatctcaaaggtttaccggctaacgatgatcacccgtcgcatgacgtggctaacggtcaaaagctggttaaagaagtgtacgaggcacttaggtcgagtccacagtggaacgagacgctcctagtcataacctatgatgagcatggtgggttcta

SEQ ID NO: 13769 - DNA, 557 bp, Arabidopsis thaliana landsberg
ttaacaattgttgttatctctagttaccaaaccaaattagagaaaacacccagagttattatattatactttcaccttaaacatgatgacactagctaggatggtcaatgatgtgaacataacatagtatataggtgaaactacagccgtgttgaaagtgtcaagcgcctgtaatcaagaaaacaaaaagagaagccgaatgaaatttcatgatatgttaacagatatcaacatgaaactgatgctacctctataccttgtttagatagttcatttgggttatcacgcaggtgagaactatcagcgtgaagacccatgtctgagggtaaattaactgattcattcctgaaaacgtaagctttaatgctatcccgagcgctttgacgctcatgacctgctcaaatcgttcaagttattaggactcaaaacaaagctaatgaataaaaatgttaaatcataagttttgggtacttaccgacaatgatccaacaagagaacaaaccccgatatataccatgacatgtgactgaccgtactgtggtacaaactgaactatg

SEQ ID NO: 13770 - DNA, 461 bp, Arabidopsis thaliana landsberg
ttgtaaggctattgctagagtattggcattggcgctcaacgtggatggagattactttgatacaccggaaatgcttggaaatcccctcacatttatgcgcttgcttcactatgaaggtgatgtttttactttatcacattaatcttaatgtcaatgctctactcatcccaattaattttcttccttcttatgttaccttttagggatgtctgatccctcaaaaggaatatatggctgcgggccacattctgattttggtatgatgactctcttaggaacggatagtgtaatggggctccaggtattacacgattttcactatagtcattaatcatataacttttgatgtaaccaggtttggttataaacattgtctgatggcagatatgcaaggatagagacgtgaaacctatgaagtgggaatatatactcacggtaaaagggtataattgagagttttt

SEQ ID NO: 13771 - DNA, 620 bp, Arabidopsis thaliana landsberg
  unsure (1)..(620): unsure at all n locations
tgaagatgtacataacacctccttcgactgtgaaggttgagtggttgacaaagtaagctctttttgcttgttgattgtatggaggaaggttcttgctgtgtggactttgtcctcaccacaaaataaataaaatggattccatgggggtgcattaaacttgtctccaaagctttggcctccccttctccctctcaaagctggcggtcagaatgtgctatgagaagattgttgttgagagcttgtttgttnnnnnnnnnnnnnnnnnnnnnnnnnnnnnnnnnnnnnnnnnnnnnnnnnnnnnnnnnnnnnnnnnnnnacatgccttggatgaaatcttccgccaaagcacctagtggcttcggtgtacttgtgtaactcctccattctttggcaaaagtagttgtcagcccttatgtactcatccatcttctgcaacaacttctcaagagaatacagaggttatcgatctcttgatcaagctcctcatcttgcggtttgtgctgatggcattcctctactagtttcttgctccctggagaaaacttggcccattgattagggtcaagggtctaaggcagagcgattgttgtacctctgcgatggcagatgtgagttgtgtg

SEQ ID NO: 13772 - DNA, 1004 bp, Arabidopsis thaliana landsberg
  unsure (1)..(1004): unsure at all n locations
gatccctccttccataccatgattctcactaacagtgaccacaacactcttcttcttttcnctcaacctttttaaacaaggaaacaaaggtgcattcttctccttgaaatcattgtaacccatacccatattcttcggtctcaattgtacttcaataggagctacaattccctgctgattctttccaagccctcttcctttatatcccattttttcaagcaatttcataccaatccctccactaaacttttcaaagttttcctttttattattcttctctctcacatgtgccttgtcagctattttcttacccaatgcaataggtaaaatagtatcatcattctcatcaattttacagtttccccgattctgtttcagtacttgatcaatgttaccagcagaagaaaatttgacaggtttggttttacgcctcttcttcctccgagagccgccggaatcatcagagttcgaatcactttcgaagacgaatccataaacagcgtcctccttagtctgtctcctcttctccttcttcccttcgtcacccatgataaagccacgaaagctttcaatttagggttcctgcaaaaactgaaacaattaggaatattatttcaattggtaaagaccttggtaaaaggcaggagtagggatcacgaaaaaaaaaattgatcacaaaggaaaatttgaagaagcgtacctgcgaatttgagacggagcaaagatgaacaaagcgttttttactctttgaccaattcaaatgaagacggtttattctgatttacttaaaaaggactaacagcgtttcggaattaaaagcgagcaaatagtagctttgcccgtttgccgtacggggtcaatatgacctcgttttatcaaaaacactctccgaatgtttcaccgtctttacgcaatacccaactaaatattaatgggctttactattttggcccagagacactatgtcatgtcttcgaaatcgtgagacttcttaagaaatgtac

SEQ ID NO: 13773 - DNA, 490 bp, Arabidopsis thaliana landsberg
tgagcttttgactttcatgatctctaacatgcaagattgcaaagttaaaaagatctgattcacctgtttgcgggatattcgtcaaatgatgtctttgccgccgacacaagttcttccaccattgttggacatacattgtgttgtactgattggatagcactaaaaaatccaagatccaatatattcaaatccggtgaattcagtggttgacacatcaagcgtatatcaaacccaaactgtgaagcaattgcttaaaattctgcatctctcgtatccacatgcgttcttgcattatcttgttgaatgaaaatagttttcccaaaatcttctcttgaccacttttcgcgaatttttgaaatcactttttcaatcaagcatctctttatatcctctctcttgatggagaccatcggtttcaattccaacattaccgcttctctatttatgcttcgtcgcttagctgcttgtatagtaaaaaatggaaacactc

SEQ ID NO: 13774 - DNA, 708 bp, Arabidopsis thaliana landsberg
cgaaattcgaatcggtgagttctaaaactgttccgtcgacggtgaattgatcatctgacgatacagagattgagattgataacgtaagaaatgagatccaacaaaggagtaactttaacgaacgcatctcgatctgattttcagaccaaactttaagaaggtttctgatactacaagactgtgtaacaaactataactagtttctgactttcttctgataagtcttacgttactttaggagaaatctcaaaaaccagtttggattagtttctttgaaattataaaaagatccttgataaacctaaatctttgttatttgatcacaatttcaccgccgtaaataattagattttcacaaataaattaaaaagttatttacttttagttttttatttgaaatattagttttttctcaaaaatattttattgatcatttacatacataaagtcggcgagaatcgaaactcttccggacgcaagccgacaaaaattaagaaatccttctggacacaaagccaacaaggatcgagagatccctttggacgcaagcctacaatttgaaaaacaacccttagaactaaaacctgggaaaacaaagatataaactccgaatacaaaaaagacaattttaaacacaataaagaaaaatttattgctagacattcaacatcttcaaatttgctaagcataacgaaatagaggaaaaac

SEQ ID NO: 13775 - DNA, 1381 bp, Arabidopsis thaliana landsberg
tcaaattcgcgaagaatctaaacaacaattaattttaaattgataagaaaaggcaaatgcgtatgcggccatcgaacatgttgttttaaaaattttagccatggtacaaaactacaaatagttagtcttggagctactaattgtttgtttttttttgttaaaaattaaattatagatagttgagagctactttgaggggatgaaataaaagaacaatcgaatctttagggaatagatttttaaaagtgagaaagatcctctactacgttcatacatgctacgtgtaactatgaaactgtttttctcgtgaatactttaaaaaatacgattatatcttaacaaacactaaaataaagagcttagctatatgtcgagagaatgtcgacataaattgtacggaactatctaaaacacaatttcccttctctctttacttaagcacatgtgaagtcaaccgactcaaacgtctgattatgtcgatattatgactctattttcccaatttccctttcctcgatttggactttaacatgtatgtcttacgtattatttaataattctatctaaatctctatcctgttacctttaggtctacgcatagatattttgctttttttgaaaagatgcaagtcttaataaaccagagctaaaatcatctaaaatggcatcgatgtcatcttgattattgaccatgatatgttttatttcagaatcgtgtgacattactacatagtacatatgtttactgcatccggacttcgtacaaattaaaattgaatgttttgtagttgctgcataccatgcggcatggtcatacatatgcgacgcaatacacaaaaatatagcacaaaaattcacaagagactacagtactatatatctcgtccaacctggaagagctttaaaaatcacgagttttgttttccccaaaactcaggaatttctaacttctttaattattgcttttttttagcgaaatttaattattgcttttttgttttttggcaaagaattattgctttatgatgtgtagatatttgtttttgtggatctcatctaatatgctgaaaaccttttacaagaaaagaaatactgctgatttgatttgagggatattatctaccaacaaaaatgaaaatatccactcagtatatatatacttcccataattcctcttttaacgatttgatcattaatttgtgcctcaaaataaaaacatactaagataattttatttgtgtcaacggcacacaaataccttcagagtttaatatagtaatttgtctatactttggtagtacatgaattatttattattattatggcaatagtacgaattcaattactatatcataagcttcggtaatgaagtttttgatcc

SEQ ID NO: 13776 - DNA, 435 bp, Arabidopsis thaliana landsberg
aacaactctctaggaggagttttgttcccttggttttggttatcatcaatgctttatgaaagttcacttagttagtgtaagcttatattctcctttgtttgcagcgtgttccaatcaaattcattaagggtaaccgaatggaaaacctaggaatgaagaagataactctgttggacaagcatggagtagagtggccagtgaatttagtcatgtacaagggaaatacacagacgcgattcggttcagggttgaaagagtttttcaaggctaatggcatcgaggcatgcaaatcttttgtgttggagttggtttgggaagacaaaacaactcttcctatgctcaagttctgctccaaggccaagaatcccctctcctttgcttccaacttgttctcaagagaaatcaattatattgaattcatcacctatgtggtat

SEQ ID NO: 13777 - DNA, 1064 bp, Arabidopsis thaliana landsberg
gatctaattgttgtagatgcaaataactgtttaaaagtatggttgtatctttaaaaccaccaatttttgatgccatattcggagtccatgatctatacatttttgagttaacttattgtcttggattctgacaagtagttccattagaccgacactgtcgacaaaacgctagtccatgaatcttaaaactgaaaattataaacagataaaccattcacatgcattacgaagtgtaaaattacgatagcagctatctttgtcaacaaatgaaactactttgagatgttcggtcacatgtatttagaataataaatatatataagctttacgaatgtgtgtttgtgagagcgagactttccaaaggatattttaacacttttgtagctcaccacatttacctggaaattctatataattcgttttcttttgaataccttactttttacgtttttccaaacagttcatttaccgaccatctttcgcttttgagtatgttgctttttccatttgttcctttccggattgagcatcttactttcttttttttaacaacaacttttaccacataatagctatggactttacgtgactattttaagcagacatcacgagccctttgttttgtaccgccaatgaccgacactgttcgaaccaagagatgggatgaaaggtatgaccaaagagactatcaccaagaatgagccaagagatcatgcatggaccattgtcgagaaccctttttctcgttttagacggttgtaacttttcgattcgtagaggatacgcaacttctcggtgagattaacaccaacatcatcaaagaaatgtagagtgtatggttggtacataccgggacagagtgtggtgaagccgatgaagaaggatgtgaagagaggtgtgagtatgaagaatcctttgaataatttgaattcgatagttaagcttaatcctatgctaagaccgtgaagaggatgtcattgttggctgaagctcagagagtgaaagctaagaaggagaagcttgagaagaagagcaaaacccatctctaaggtattgttatgctc

SEQ ID NO: 13778 - DNA, 871 bp, Arabidopsis thaliana landsberg
tgcagttggttttggtgttagtcttttggggagagagatggggagagggaagatagttatacgaaggatcgataactctacaagtagacaagtgactttctccaagagaaggagtggtttgcttaagaaggctaaagagttatcgatcctttgtgatgcagaagttggtgttatcatattctctagcaccggaaagctctacgactacgcaagcaattcaaggttagcttctttacttccttagtacaagttaatgaagttattttgcattttccttgcctgttagattcctcacttctcttgatcccatgacatgtgtgtgtatatacaattgtcactaatgataatgtctcatcgttacatagtttttgtctctctttttctttttgggtctaaatattagtttctcgatcgatagggttatagcacatgttcaagtatgaagagctattttgaacaatggtttttgatgtttgtttcttcgttttttcaaatcaaacttaatctcttatctttagataggctttagtttatcttacacatattgatttgaatacagacgatatatccatgtaaaacttgcatagcaaattatgatttgaacactcttaacttaaaattattttatttccctcatagctttcgataagtatatgcacgtgtttctatgtttgttgcaagtgcatcaagataaatggttactgatttatgtcttgctaagtgttcaattatagaaagaacatgaaccagtactatatacagatcaaaaaaattatttctacttcttcactttgtgatgtatacagactatattgatagaaatgtttgaatttactctatctacattttaaccttttataataattgattt

SEQ ID NO: 13779 - DNA, 505 bp, Arabidopsis thaliana landsberg
tcagcgaatccttcagtaagtcctttagcgagtctatcaggaagtttgtcagttatatagtaaaacctctttaaattaatactcgataaattaataacctctataaattaataaattcttccggtttcgagttgggaccagtgtaaaaagtgatacaaatcgataaattaataagataataatttttttaaaaatcctatgtaaacatatggttccattaatatcataaattaataattgtataaaaatatcaactatatatatatattatacttacacataaggggtttcaatgaaatatgattttagtattgtgtctctttacttaaatttgcttaagtctgttgactcaatcttaatattttaccatatcggaaagatttcctactgttatgtagacatgataattatttctatctgtaattggttctataaatatatagtagacaatgaaatgaatcttacaattacacagaaattatctgcagttaccatatttggaaaa

SEQ ID NO: 13780 - DNA, 602 bp, Arabidopsis thaliana landsberg
  unsure (1)..(602): unsure at all n locations
actccttataactttttataaatgttcaaagaggtattggatggaggaacaaagacgcaataagttgtaagagcttttgatcaggatgcccaaatccatcggcttctttgtaatacaaatccatcacacgcgcaatgttgacgggtcgnnnnnnnnnnnnnnnnngcatagctttggacgtcatgaactcctcaatcattatcttataattctctctttccatcttcctcagttcttcaaccgctgcttctttggtgacaccatgttgcttcatgtaacaattgacaccatttgccacctctcctctgctcatctcttgctgtttattgtactacttacattagagatcttccaatagtacctaggaaagaagataataattaaaacttgtgtacgtacctcgaacgtgacaatgtcatttctgatacgaaacagagcattcaaggcatgaaagattttaggtttggagtaaaaccactccttcaatttcttctgatcacaatcgtccattgctataaagccgtatgatgctaagtcatccaatgcagacaagggggtcccaatctccatgtaatcctcaaagcttggcacttgatctgagc

SEQ ID NO: 13781 - DNA, 543 bp, Arabidopsis thaliana landsberg
gctcgtttatgtgaggactataccggatcagatatttttgaactctgcaaaaaagcagcttacttcccaatccgagatatcctagaggcagagaaagagggcaaccgagtttctgtaagtgataaaccgttttttaggaaatgtcaatgttcccttcatccacctgatttttaagtaatgacatctttgagttacctacatttcacaggttcctagaccattgacacaactggacttggagaaggttcttgctacctcaaagaagacacaagttgctgcaagcgagtacactggtttaagctctcaatcttctgtctggggaagtccaagcaatgccgatgaggtccaagcagctataaacggcatctccaagctttttgtctcgcagcttagaaacattcagccagattctcaggattcatatcaacaacatccttcagaaggagattcggaatagaagcaaactcttcactagagctttgtatagtccaaaaagagtacaacccaagaatatacactttttgtaaacctcatctgagtgca

SEQ ID NO: 13782 - DNA, 624 bp, Arabidopsis thaliana landsberg
ttatttgggtgtgttcttcgaaaatgttaatttgatagacatattctctcttcaatgtataattaattgtcgtcgacatgcatgttgttatttaactaatgttttttcaccaaccaaaattacttgatgtttatgttttcataaaagatgagttaaagtcttgtggatttgtattttcggttattgagaaaatatatattcggactctatttatattatgtaaaattttaaagttttttgtttttgttttataagaatgtaaaacttttaagttttaaaagactaccatatgatctcgaatcatgtgttcaagtctcttcccttgggaccatttctaagaactttttttgctaatcaggtttctcattcatttttcacataaacaaaagacttgcaactttatagagaaattgcttaagatccaattgccttaattatatgatggcccttcccttaggcacacattgtcacaagtgtcttctaactaatttggacgtgaatgtggcagacgtgtggagcacacgatattacacatacaattttgatatatttgggtttgtgttttaagtattaaaaagcccatatttcaccagcatactttcaagttttctttacaaaacccac

SEQ ID NO: 13783 - DNA, 609 bp, Arabidopsis thaliana landsberg
gtcgctgtgaccaagaagcatgacttttttatggtgagttaagaagttgttcgatatagttattcctgtggaacccattaccgcatctatcagaccgtccttgcatctcgatagagaacaatggtcgatccaaatgtcctttgatccgaatatagagataccatcaccgtccgatttcgttctgaacccatagtgcgttggacttgaccgcacgttagtattccctaacgaaagcgtgaacaaacatattttcagaatacttttatgaataatcaatcaatgctatttcaggaaggacgaaagatttagtttttactttgtttttcttgcttaccatacttttatgaataaatcaataaatgcatataaattcaaacaaaacatgttttctttgtttgcgtgtgaaaacaccaatcaatgagaaggaaaatatgtacaccaacaaaagggacctactaaattattagggcaagaaaaaaaaaaggttaaaaagttagaagactaacaattattggccgtaaaaaagaagagataattgatttttggagtatacataatttgagataagagaaagtgtaaaagagctaaaactaataccggattgtacaa

SEQ ID NO: 13784 - DNA, 901 bp, Arabidopsis thaliana landsberg
caacgttgtaaacggggactagccgtgtccactcattacaatctttatattcactactctagctcacaattaaaccttattgtcaccattatttccagcgaccattatggaagttgagagagatcaacacatttctccaccatctcttatggccaagacgatccctatcatcgatctaagcaatcttgacgaagagctagtggcacatgcggtggtgaaagggagtgaagagtggggcatttttcacgtggttaatcacggaatcccgatggatttgatacagcggttgaaggacgttggtacacagttcttcgagctcccggagacggagaagaaagccgtagcaaaacaagatggctccaaagacttcgaaggtttacacgacgaatctcaagtatgtaaaaggtgaggtttggaccgagaatctttttcacagaatctggccaccgacgtgtatcaattttgattactggcccaagaatcctcctcaatacaggtactactaatctttggctacaaatggttgtcttctgtctagttaattaggggaaaaataccaaagaatgaatcgtttatttatctaactatttacgttgaatatgaaaggaacaaacgtaccgaaaataagcaaatttagtggaaataaaatgagtcggataaatttcggtttgagtggtttgtcaatgattgattataggaatagttgaatgatttagtaatagtaatatttgagctaaataaaattgttaggataagaagttaagaactctaacaccttaattatattaagaggctgctttagcagatttgtgttttttgttttggttcagttataatataaacacgttaaatatgtatagcagaaacttttaatactatgaaaattgtgaaaaaatgatga

SEQ ID NO: 13785 - DNA, 1021 bp, Arabidopsis thaliana landsberg
ctagggttcaatagagcgaagcaagtggaagcttacgatgtttctcgatgtggtggcttccttgaagaagagaaccaacgcgagcttgggcttgggcagttccacgaatccgattacccacagtgtgaatcgctcgtcctagggctcccatttttctgatttttccgattaccgagacagagagggacagagagagcttgttttgaagaaaagaaccaacgcgatcgctttattcagtttgttgattttgttgttggtgacctccaaaccatatcaaattgaaccaaaccgaaactttttaatctaagcttgaaccaaataaatagggctggctgaaaataaccgaaatacatacagaacggttcggttgtcgttttttttcttaaggttccgattgctaaaactgcattatagcataatgacataaattgcagaataaaattttcgaaaaatttgcaaaataaaaaatcgaataatgaaactaattttaaaatatgttaatgggatacattttgtaaaatgacaaaataaaattatattaacaatatatatatatatatatatttgaacttaataaaaactaatgttttaaaaaaatagtatattttgagtaatattcgatactaaaaatgtaagataattaaaatttattaaaaagttgtaaaaatgtttatttatattattaatgatataattttttgtgtaaactatgatatttttttcttttataattgctaatatttgtatgcatagaataataagattatattatgcaaataaacaattatatacacactttttggcataataaatttttacttgtaattttagacaaaactacaaatcttatgtttttgcgttttctaatacaattatgcagatttttttgattggccaattttctgtattatgtgtgttaccaataagagcctaaattgttttggattatcgtataagagttgggatcaatgtaaaaataacacaaatcgataaattaattaaaatatattttttgaaattt

SEQ ID NO: 13786 - DNA, 787 bp, Arabidopsis thaliana landsberg
ccccgccttccggtcgacttttaattccggaggcggcggaggtagaaccggtcgtgttcttttcggtatcggacggaagagactgaggattgttgtcaccggtggagctggtttcgtcggtagtcatcttgttgataagcttatcggtaggggagatgaagtgatcgtgattgataacttcttcactggtaggaaggagaatttggttcatctattctcgaatcctaggtttgagctaattcgacacgatgttgttgagccaatcctccttgaggtcgatcagatttaccatttagcttgtccagcttcacctgttcattacaagtataatccagtcaagactatcatatccttttgattacggatcgtgatttgcaagttctgattctaaatccgttatacaaatttaggcaacattaggttggtgatcattgttattagcatcctgttgataggcatttgacaattgacgtgcagcttagtagaatctcttacaattattgtgatatttcgtgatgaaatgtttccattgggaatgtgtttttctctattgttgatatgatgattctggttgatccttaaccatagttttacaagacaaatgtaatgggcactctcaatatgttgggtcttgcaaagagagttggggcaaggtttctgctcaccagcacaagtgaagtctatggagatccccttgagcatccacagaaagagacttactggggaaacgtgaatccaatcggtgagttggagaattctgtatctgctcctgattttgtgagagatc

SEQ ID NO: 13787 - DNA, 636 bp, Arabidopsis thaliana landsberg
ctagaaattgtaatgctggatcatttgactttgatgaggaattgagtaattcacaggatctgaggaaggtcactggtgcgtctcctttgcttttgaagcttaagcagaagaactggtcacgttcttcgtcaagattgttgagagctaataatagaaaagaggattcttcatgtacttataatagtacaccggctttatccactagttcgtacaatatgtatgctgttcgtaatcccagcactgttggatcttgggatggtaccacgacttcggggaatgatggtgatgatgagatggatgataacttatatttaccagggaggcaaggatgtggtattccatgttattggacgaagaaggcgatgaaacatagaggcggatgcaaaagctgtagctctacatcgttttcggatactttgagaagaaccggacgttgcattttgtgtgggagtcaatctgtgtatcgtaaacatagtagacattcttctggaggctatagttaacaaaaaattgcttgtagaagtgcacaaggtgttctacctttacttagttacggtggtgatggtagaggagggtcttctttatgaaccgggcttagtgatgaggagctttcaaccattttggagagcttgattt

SEQ ID NO: 13788 - DNA, 861 bp, Arabidopsis thaliana landsberg
aataaaaaatgaatattttgctctgtcctatccaccatgcaaaatcataaaagataagtggtgtggtaaaaccaaagaaaataaatattatgatatgaagtttgttaaacgtaaaagacaaagaatgatttaagcaaaaacttccatttaacccaactctcttttagagaattaaattaattgttagagtttcgttctttcgtattaagaagaagagaccttatgtaggacacgatccattgtgtaagaaaaaacatcaaatcctaatgctaaaaggaaaactcccaaaacccaatttatactgattagaaaaccattaaaccaaattaaacccaaacacctaaactcttatgacgtatcatattaacccacaattctatgggccatgaaactttgaaccataatctatgttttatgttgcttatgctataggccgaccccagatgtagccactttcacagtgaaagctaacccgtagcgaagtaggtttagtgaaaaatgctttgaagatgatacagagcatgccgcttaaccctcacaaaatggtgatttgatgaagtaaaatgctacgtgatgttatgtatgtgattctctctaatatgcgagtagctgatggaacttgtgtttcatcctatggagattccttggagagacaccttacctattaggctattattgattcttttatatcctgttcaactaactattcagcaagaacttgagcaaatatgtaaaaatgagatacaattttataacaacaaacgttctttcttttacaagagtttttttctactttaaacccgttccaacttttttttcttgatgtcgaaactaactatcttcttttctattttttttttt

SEQ ID NO: 13789 - DNA, 502 bp, Arabidopsis thaliana landsberg
agatagaaatcatgtgtcaaggatatattattcgtatataaataataattcttataaaaaatatgtataatttttcaatgaatatatccattcgcggtgtaccgcggcttaatatcttatacgttaacattttggggttaaaactaaacttcaaagttatttttggtgggagaagaatttgaaagtgattggcaaattgaggattttagcgacatttttttcctccatcttaaaggattttgatcgaaaggttgatgtcgactagtattcaacatggaaatgaattgccaccataagaagaaacactatatgtccagccttgccaaaagctcaaacagaagactcacagacggatttacaagactcatgaaaccaatctggttccctcaaaaaaacactcggattaaccagttcttcttatccttaggcaatgaacttaagaacctataatctatttctacatatttttttctaagcttttaagcaactgaatatcccctgt

SEQ ID NO: 13790 - DNA, 468 bp, Arabidopsis thaliana landsberg
  unsure (1)..(468): unsure at all n locations
gagaagaccgtcaaggagatttttcttacttgcagctgaaggaagcttgatggatgatatggaagttcctcggatttggattgggcgaaacttttatggtttcgataaaggaaactacgaaatcgatggacttgtcatgccaggctctgcaccttccgttttattaccaagaagaaacccatttgaccttccttacgatccgttggaagagaaaccaaacctaacaggagatagttttcaacaagagtttgctgagactaaccctaaagatatcttcttttgccnnnnnnnnnnnnnnnnnnnnnnnnnnnnnncatcagaatctcaaaatgattctaaatttacgtctttgtggagaaatgtagttgatggtaggcctaggccactacaaggtatgacatcttacagttttgttagtgacctaatcaggatcatgattaggctttctataattcttagtggattttc

SEQ ID NO: 13791 - DNA, 220 bp, Arabidopsis thaliana landsberg
aaacaaaaggtgcgaaactcttgggcttgcataagaaattcgaagaccttagacttttccttctctctcggcctttctaatttgagctatgagtgcttccgtacacaaaataaaaggatacggagaaataggatctccttgccgaatgcctcgtgacggtctaatacgtccttttggatccccattaatcagaatacggtatgaaactgaggtatgcgtg

SEQ ID NO: 13792 - DNA, 858 bp, Arabidopsis thaliana landsberg
tttacatttacttgaaacttcaaatattaaattgactagaacatgatatagcattgtttactaattttttagtttttattatcatttttaattaaaatgtaggtatactttacaatagttatgacttcaaatttgttaaagttaaactagaattacaaaaataaaaatagaactgaaaaagaatacttttatttttgtttattttcagccgaacatagttttactttaaaaaacaataacaatgaataagaaaaatgcatctaattacatgaagacgctaaacaagaatgtggaaaacaaatataaaataaagagaataaaagccaaaaacattgtacacaggggtatcgaacactgcatctaagatgttgcatagggcacttattgctaaatgatgtaaaagatataaccaatcaattgttactagctaaagtttaagaagtagtatggggaacgtgccctatctcatgctaatgtagatccgcccctgattcagacacaaggattccaagtcatatagatcaaatcaagaatcaaactaaatttcaaatagatataaagttgaattattatttttatagttagattatggaaactgatgtaaaattcaaatgttatatgaagaaaatgaaaggtagttagaaaaggtgatgccagtaaatttttcacacttggtgtcagtatggattagttactcaatttcatttgatgacatcttttcctgaaaagaatctcttgatttggtacaattaagctatcattgaattacactggcaaatttgaattttttatttggactagcctatcattttatcaatagttgttggcaatcttatgtgtattaatatacaagatttg

SEQ ID NO: 13793 - DNA, 565 bp, Arabidopsis thaliana landsberg
  unsure (1)..(565): unsure at all n locations
aaaagccgagagagatcctaagctgaaagtcagatagccgatttatttactacttacttactgagccaagtagggctggtcaggtaacagaagaacatggagttggcgacgttgtctttgagtcttgggagctgtgcaacagagattggtcctggagctgtgataccaccatggcttgatgatgtctcagactgatcttcaaacttcatgaacgtcccaagctgagcagctgccaagtgagcatagcacatcggcgcaactgcacaaaaaattaaaatgtcagttattaagagaacaaatgaagacgactttaaatcgatggagtagagaaaacagttatggtaattaccaacagaaatggcactgttgcttctttggtacctgaaattttgccaaagaaagaaatcagataatttctgttatcatcacaatcgaagttgtcacaaaaaatgtaatgaaggttgaataagagactactacatacacataggagagcgagtggacaagttcctgaagttcgtcagctganaaaccaatctcatcatacaggacgtggtagtgagtt

SEQ ID NO: 13794 - DNA, 820 bp, Arabidopsis thaliana landsberg
cgcattaataaaaatgaactcaccagtatcatgatttcacctgtcagcatcactctacattcaaaggtggggggaatttcaggagagattggaaaaggcaaaatatagtttttgagcgaccattcttgtttgtctccatcatctaaaacccaaaaccttatagaagaataatcggagcaaaaccatgctaattttccttggtagttgagcatgaagtttcgaagtgtaggatcagctggtttttttattgtgttgaacttttcgtacctcacatcgaagctcataaggatattttcaaaattaaaaatatcatctactttaaaacgtatctgcgcttcatagtacacgtgcccgttgatgcatgtacctactcgtgatcctccggttggtagagggatatctaaagggctattttggatcactctccatgattcttgaggtcccaatgtaaaaacgagaggatcgtggttgccattgtggtagcctgagatggacaatactttatacttatcctcgaccggatcgtatcctaaacagctacgtataaagtacctgacagtactgtgtggtttaggttcgggtaatgtaacatgttgtctcattgaaggattccaaactacgatattgtaaaagtctccgaaacacaccaaaccgttgacagattcggaactcggattgtaataatcatgtttaggggattttatctcacaacggtccacatgagcgtaagatccgtcatcatgttggtgcagtgagataaatgcacgcatgtatatagattagacgcaggccataagacaaagccgagttgaagaaggaa

SEQ ID NO: 13795 - DNA, 705 bp, Arabidopsis thaliana landsberg
actttcaatacaccccctttaaagtttgcttaaatttctagggctaaaagacgtgggttggagtactcctcttagcaattcttttgatttttttttcttccttagtcttcatcccttgttaacggctgttagcttccggatttgatatcaccaatagtctatattcgaagtattttgaggctacaaataattagatgagatatttttatttcaacaaaaaatattaggtattaaacgctcattttattatactggttttagtacatcctgtactgttgcgatacatggttagtgatcagaatagtaaacttgaattggtcggattagtaactgcttagtgcttaccattgttaccagttttttttgtgccgatttgataaaacattaagctaaagcagtacaaatccttagcgctttctcttatccataaaaacaatacctctaaaagattcatgtcctaggattcctataaaacaagaactaaccaacatataaagtaactatggcattgattttcacaatttttgaacaactgaagatcatgagagtaacaaagctctaaagtacaaacaaaaaacccagagatggagcaaagtgaatgcaatacagatgaagaagccgtaaagcgatgagctagacgacgacgattattaatcaatatagttgtaaaatcagctaaaaatgaagagaagttagaaaacaact

SEQ ID NO: 13796 - DNA, 677 bp, Arabidopsis thaliana landsberg
ggggtggaccataaaaaacatatcccctggtggaataacctgttcgtccaacacatgtaaccgtccttgtaacggtcactgtcccactgagatatggaattgaaattgacgggtaatttaggttataaccgggagggattctacttggacatttgaatgtcgggtcaagattggttaaaccaactgaacaacagtagagaaggtaagattggtatgatgcatcgtagactaaaccgggagatgcagctttcgttggtctaaaatgtcttgacccaagtgcaaatgggtttgcgggtgaaccatcatagtcttggattggttcattgtcctcgttggtcatcgaagctacaaaaaaacaaaggttcattggtttagtgataatctgtgcgagaccgaaataaaaaaatctgatgaccattggtttagttattttaaaccaactcaataaccgaaagtttttgttaccagtggtcatgagggcagatcttatagcagcactactccatgtgggatgcatgcttttgagaagggcaattgcaccagcaacatgagggcaagacatagaagttcctgagtcgagattataatctaaaactcgtcggtctatcgaatctttgcttgccgaatccgccccgctccatgcggctaatatattcagtcctggcgcgatatatccg

SEQ ID NO: 13797 - DNA, 899 bp, Arabidopsis thaliana landsberg
  unsure (1)..(899): unsure at all n locations
ttttcaacacgaagatcaccatttcctttccagaaagttccagaaaaatatgcttgatttgagacatcagaattcatttccctgtcttcaggagaaagcaatgagtttgaatcactaacaacaatctctgtcatgtgttctgactccatatcatttacttctcctcttgttagatcttttcctttcattacaggatgtttctccccaaccaatccatcattgctacctacatgagcaaggatcagaattgtagaacttagaatcatttactttgtaagctacaacatttttcagaatgacaagagaatgtaccttgttgtggtattgacttctttttccacggttcccatttcgtgtcaagctgattgtccaatggaaagactctgcgacaaaagctttcatggcggcagaagaagatatcattagggttggctgcaaactcttgctgaaaactatctcctgagaggttaggcttctcttcttgtggatcataaggaatatcaaaagggtttttagttggtaataacacagaaggtgcagattcaggcatttgaagaccatcaactatatagttttcttgatccaaaccgaaatagttccgtccaacacagactggaggaacttccatatccattaagctactctcagcggcaagtcggactaatctcctcattcttcttctagtaatcaaatgctctaacctcttgttacgttccatctcagagtttcctaaatccatcaaattcttttgatcatcctctgtccaagctacaatctttttgtcttcacgtgtagnttcttcttcttcttctccttctgatgacgatgaaccactcgatctcgtttcgccaccaccactagtcaacctctccgatggatccacaacngaaacattcccg

SEQ ID NO: 13798 - DNA, 223 bp, Arabidopsis thaliana landsberg
aatactggagttgaagaatagtgatgacccgttttccgttgagggatataacacttcgctttatgcctatactctcaaactcgcattgagaaaacacttctctttcatgcggaaagatcaaacatatttatgttccaagagactttgaaaagggtaccatcaagagtgtttccttcatgaggattgagggagaaggtgctgaagagaaagcattggaacttag

SEQ ID NO: 13799 - DNA, 964 bp, Arabidopsis thaliana landsberg
tcaactatagtgaaaataatttctgaaaaaaaaatctatttaaaattgaatttgtttaaatttatctatgaaagaattactttttctgagatgcatactgaatgatttattatgtaaagtattttgttttccgtccattacatcatcatcacagatacttgatataatcatattacaaaatacaaatgacgatcaacccatcgatcaatctagaaaaacggcgaaattgaagaatgctaaattatgttggattggatcaaaggataaacttttgggcttaaataaagttttgctgaaaatatttcgggcttatatagggctggccctattagactacaacttttttttcttcttctttgacagtaaacgacgacgtctccctttttttctttcttcgatctccttctgccaaacactctcttcttcttcttcttcaatcttctttcttcgatctcttcttttttaaaatctcttctttgattgtgagaagccataagaaaaggttcgatatctctctctatgtctttcatctttctcatttttatattctcatagattgatagattctctatctttggaatctgattcataggattgggttttaatggttttcgaagaaatctgggttaaagtgtgttcgtgtgttctataaatttgattcactaaacgtgggtttgaaaaaattgaattctgtgtagctatgatcttgtggcataaggcaaactgattcctgaagttggaacatcgttctctggttcagtagagaacagacgtacacccttccccatttcagccgaccataccctcgatacagtagctgctccgctcatcaacgtccatttcgccgcctttagccgtcaacgttctctggttgtgttcccgtacaaaattattaaagatcgcgtttttatataagcgtagggtttagttgtcgtcccgctctttttaattagactttattaat

SEQ ID NO: 13800 - DNA, 588 bp, Arabidopsis thaliana landsberg
cacaaatttccgtatttttggacagtagcttttcgaagttccttgagcaattcatgctctcttggatacgctgacgtttccatgatgtactgtgacgaacacgaccaaaacaaaacacagatttatacatcaaagttcctttttaaaactagacaaaaccaaagttttaaagatcagcaaactttataacagagaaaattttacctgttttagagcttcgctcttgagaatccctttggtaggaatttcattggccatgtctcttgagtctcgtggttgtgtgcaaattgttcgttgttataaacgagagatgtatgtcaatatatatattggcttctggtcaaactaattgagctactaataagacccaaattaaggactaacacaccaattgatcttatccatgacttttcaaccatgggactagaaaatcaattatctagacagtacttgatgcgaatatattaacgtttatgtttcttaaggatttttttttctcttaaggttgcatacaaatgttgaaatatgcaagcaggcgaacagtttgcaatggtcgtttattgactaatatattggtatgtgagattt

SEQ ID NO: 13801 - DNA, 552 bp, Arabidopsis thaliana landsberg
gtcacaagtggcaaggtttaaaaggtattggagggttttctaggggaaaatggctttggttaacatgcctcggttacatgaacacaagcaacctcacacgagcatactgaactaaggattataagggatatcaaaggcacactcctcagccctagtgtttatcgcaagggagagagaagcaattttcactttttcttctgcttgctttactagatgtggcccaaagaaatatcattcactgagttatgaccagtccagtggagttctgcaccgctgaccatataaagcttcaaacggtgccatctttatactctcttggtaactattgttgtatgaaaactcagccaattgcaagcactcatcccagttccctgaataggctagcacacgatgctcttaacatgtcttctaagatttgttttccctttcggtttgctcgctggtttggggatgataggctgagctatgaatttatttggtacgaagagatttgtggaattcttccaaaatctagagatgaattgaggtcatcgatcagacactatggacttg

SEQ ID NO: 13802 - DNA, 788 bp, Arabidopsis thaliana landsberg
  unsure (1)..(788): unsure at all n locations
cgacaaagaaaaataatctggttcttttttattcatgcacacacatagtataagttaaaaaatgaccatattaatttgtaaactgaccaatcgtgtatataaaaggacaccttctctacctacttatatattatacatcatttctctacattgttcaccagctctctccatctctctactccaagcataagaggtaatctctcaatagtttgaaacaaccttttgtaaaacgtattgtaacttacttaaaattgtagaacgtgagaaatatcttaaatgtttaaagtcttcctttttcacccaagaactgaaaatgattttgcatatatattttctcaagtgggtataatggatataaagaaattatacaatgactaaggaacaaaataaaatctcttttattgaataatgatttgaatcagttctcgatggcccaaaggttggaggcaaaaggcggaaagggagggaatcaatgggatgatggagccgaccatgaaaatgtaacaaagatacatgtacgaggtggtcttgaaggaatccaattcatcaagtttgagtatgtcaaagctggacaaacagttgttggaccaattcatggtgtctcgggtaaaggtttcacannnnnnnnnnnnnnnnnaaatatagaactacctgaactctttttttttgaagatataaggttgtatcctggattgaatgtttagaaaatttgaacacagaaactaactcggtgtgaaggtgatatgatgttaatagctagatgtacatgtatatccttactatatata

SEQ ID NO: 13803 - DNA, 523 bp, Arabidopsis thaliana landsberg
  unsure (1)..(523): unsure at all n locations
cagtcgaattgctgtatcttggtcctcctggataagatagaattcagaacttttagatggctaaacttaagttaagtcgaatttctgatatccataacatttatatgttcatatatagctaacttacaatacactaatgatatcaggactcaataatattcaaagctaaaactgcagcgcactcacaaatatgaatcatnnnnnnnnnnnnnnnnnnnnnnnnnnnnnnnnaccctcaatactcagaagggaaatacaaagttctacagtcacaaccaggcaataccaggaagaaactaagatagccaatataaaagttagaaatagagaaattaactgaaatggaggattatacagtatgtatactaaggattcacattctgttatgatttagataaaaattaccggaatgcttttctttccaaaccaacaactcaagaaatattcgtctttcctttccccagaatgataggtataaaggaccaaatagcagtccccagaatagagctttccaatatcttct

SEQ ID NO: 13804 - DNA, 546 bp, Arabidopsis thaliana landsberg
agaaccaccacatgatgatgatgatctcttcgtaccaaggaattgacctaaagcttgtaacggtttaacaatgccttcaacaacaagacgaaatatagccgagaacgaaccagcggaagaaccggagcgagatttgatagatgacaaagatgacgaatcgtcgtcggagattacgcaatcgacacgaacaacgacgttatcgacttgaggaacgagagaatggaatcttctggaaacgacacagcatcttccgagagctttgacgtcgccgattttgttgaaaacgaggaggaggattgagtcaggaagatgatcgaaatggtcgatttctagggtttgtggtggttccggatggattcgtgaaggtggatctgaacgagggataattacggccatggatcttagaagattttgtgggatatgaatttttctaggttttttttcaggatgattcagaatcagaatcagagcttttggagaagataacgcatgaaagatgtttctagagagaagagagggagaaatcaaaatggatcggaggaggcg

SEQ ID NO: 13805 - DNA, 822 bp, Arabidopsis thaliana landsberg
  unsure (1)..(822): unsure at all n locations
atccccaaaacatttttattttcattttatttatccaattagaacacagaattaaaaatagaaagaaaagaaccggaaataataaagtagtggtgattattagttctttctcattgtgacctccaatacttggccatttcgaagccattcttaccatagtgataatcttcaatggtcatatcaatctcagcttgagtattcatcacgaacggaccgtattgaaccaccggttcaccaatcggttctccagcaatcaacacaaaccnnnnnnnnnnnnnnnnnnnnnnnnnnnnnnnnnnnnnnnnntcattccctggtccgaacaccacaacactgtgtgctggaataggcgaagagttcgaggaactgaaaacgccgccgccttcaccgctctctagaatgtaagcaaatgcgttccaagattctggaacattctggtggatttgagctcctggttggagagtgaaatcgaggaacatagtaggtgttcttgtgtaaacaggtgattgaattcccattgattctcctgcaatgactttgacttcaacaccgttttgttctgcttttggtatgtctgaatgcgacagttcttggtagtttgggtctatcctgtcaaaatgaaaatgaagagtcaacttccggtttaaaaagagtccaaaatgtcgaatttgcaggtgggtttaattacattttctcgttggaggaaagattgatccaaagttgtaaacctttgttgacttcttcttcaagcatttcagaatgaatgatgtcttttcctgcagccattcactgtgaaaatgtccaggaactctttaagttttt

SEQ ID NO: 13806 - DNA, 662 bp, Arabidopsis thaliana landsberg
cctaaaatttaaatatacgaaaatataaatgaatcggaataagcatggacattggctttttacggcttaacttgttctggttattgaacttcgtttttttcggatgttagaaaatagactgaaaacaaatgtattttgataagtctagttaaaaataaaatttcttatgaatttgtggtttaattctgtttgtttgcatagaattttattttgtttgagtaataaataaaatttggttcggaattagattgacatatttcggtttggtttggattttcccaccccaaaatgggaatataatgtaggaatgaaacttacggtagctccaacggaaagagcaaatgtaccaaacatctctaacacatacacttgacctccctaaaaaaaatcaaaattttcacttttggaaattaggacaaatagtatcgaattttcgatatttatttatttattataatttaccttcatttgccaagaaaatcggtaataaacagccattatagccatagaagtgataccaaagctcgacatcacagctgctattaaataagtgaacctgtctgatttcttcttctacgctttcttgagaagccgcgacgtcatcaagatctcacatgagcttgacgagctttctggtttgctgacatcgaccatgggagagc

SEQ ID NO: 13807 - DNA, 724 bp, Arabidopsis thaliana landsberg
gttaattcgtatttgggtttacagacatttaaaagggttctcgcgaaatctgaaagacggggtcatctcgagtatttgattacgttgatgcttccttttctgaataagttatccatattccagaagctagagattgaatttgaggcaactgttcaaggtatgaatcttgcgctactaagacagggtttctgttgctaaatgtgagttaacatgacgtcttttctgtaggaaaactgccttctgaagttgaaataactgcggctataagctacactgatgaacgtgtatactggtaagtaagaactaagttaggatatttttaatttctcgaggatcttactgaaaatattcatatgtgttgcagtgatcattgtgcaacttcaattgttgacttgcatcgaagctgtccaaagtgctcttatgaactttgtttgaagtgctgtcaagagattcgtgaaggatcgctttctgaacgccctgaaatgaagttccattatgttgatagaggacatcgatatatgcatggtttagatgctgcggaaccgagcttgtcttccacttttgaagacgaagaagctaacccatctgacgctaagtggagccttggtgaaaatggaagcatcacttgtgcaccagaaaagctaggtggttgaagtgaacggatgctagagcttaggcggatcctaccactcacgtggatgtcagatttaaagaacaaagcaga

SEQ ID NO: 13808 - DNA, 644 bp, Arabidopsis thaliana landsberg
gattcacagagaaaaaaaaaacgattacttattaattactcgcttcatagtcgttacttgactttttcccggtactaaagaaaaaacaaagtggataccaagtatcaaaatatcaataccagcaaatacaagtcaagtagtataaatcaaaaagaatataattacttgatctgttttacctattatacatttttctagaacaataatacaacattatgttgtcccatatctattcttaaagaagctatgggtgattggctacgcgcttccaacactttaaaaacagtctaaagtctttacaattatcaattaggtttttcttacttaactttttttttaagttctcaaaactttttttttaacctcataaacgaggctttcaaacaaataattcttaaaaagtttttttttctttttctttttgatatgtactatcaaaaagtctacacatttgaattataaaatcctttttgttttaggaaaaattccaaaacactttatttatttattttgtaaatatttgataactgaatcttttggttaaaagaaaagaaaagaaaaatgggtacaaaccctctcattctttctaaaaatataaagagtgaagtagccaaccgagtagctctgcaagcattaaaaaatct

SEQ ID NO: 13809 - DNA, 329 bp, Arabidopsis thaliana landsberg
aggcgtgtttacttttataatgtgcactttgactgatcaatgtttgtatttgtaaatcaatgattctctcttattgactccgtgaaaagccgagacaaacttaagtggaattggacttcaagagatattgggaagagttccgttcatcaagctccgaacaggttcgtgtatccattcatgcttttagcttatgtacctttgtgttacgtacaatcatttattgtgttctgataaaaactacactggaaaatcactactgctaatcattcatatatgtcacaacaggagaaagaagccgccttgaatctgagtgtgaatacgttttgtag

SEQ ID NO: 13810 - DNA, 611 bp, Arabidopsis thaliana landsberg
taaggcaagattatttctatatgtataaatttagtcaaacttattattcttctaattaaaatccagttggaaaaagtgttagaaaattaataatttcaatgaaatttcatgttaattatattcttttacaataaaaaaataaaagttgttgaggtggcactctagtcagagagtcatcttttttggcactctatgagattattttttcactaaatctctaaattgaaaataaaaatcactaatatctttgttgatcaaaatatgaaatcagtacgaaagactctcaagctacctaaccaagcacggaggttactcaatacctagcgtcgatgccttacctgatctccatggtccatcaacctatgggtcaacctccaataatcgtcctgcttcatatggttcctcttctaaccatcttccccaacaatcaagcttattaagaagaccatttactcgtgaactcatcaacaccaccccactgcctaaaccagtactactgcagcatttccaacagctatctcaactggagaaaaataagatgtttgaaatagcgaaaaacgcggtggcagaggctatgagtctcatttaaatggaacactccttgtggatta

SEQ ID NO: 13811 - DNA, 148 bp, Arabidopsis thaliana landsberg
tccttcaacagagcctatcacagtgctctctacagctcagctcgcctctgagacgatcgcagagcgacggatgtcgattcgcataccgcacctcctgccgatcgtgaccatcgcgaattaccggcagatgtcgctgtacacgctccat

SEQ ID NO: 13812 - DNA, 844 bp, Arabidopsis thaliana landsberg
gacgaagctaaggccagtgtggatagtccagtattggagaaagcagaggagtttgcttttgaggaagagaagatagaaatggggggccatgggcaggagagatcagaagaggttttacaagaggatgagaaagaagagacagaagtaagagaagaagtgagagacgacatttcattacaaaatgatactatggatgcaaatgaaacgacgaagaaggtggtgaagaaagagaaaaagcctaatctaatcaagaagaatgatggaaatgtgcggattaatcctacgagaggctctcttaaggtaaagttttcaaattcttcagatgtgtttaaaatagagataaagagcgtagttcttgtatgtaattgtgtcttcattttggtctattgctttcttgtctacagcctaatcaggtggggggaaaaccggaaactaacaaaactgtaacgagtaggaaaactccaccgagcaaggagatgaaaaacatgatgaaagcaacaaagaaaccagcagcaccaatgtcaaaatccccacaagggtttgcaactccaagagtgtacaagccagctccaacaaaaacttcattgtctacatctcactcttcgttgaagaaggaaaaggtctcgcctttactgagtaaaaaacaaaccgctccaaagtcattgcatatctctatgaatctggatccacctgcttccgatcctactgctcttccaagcactagaaaatcattgatcatggagcgaatgggagataaagacattgtcaaacgtgcattcaaatcatttcaaaagagtttcgacttcaagtcttctgtcgacgggctaaacacagcagtaaagca

SEQ ID NO: 13813 - DNA, 517 bp, Arabidopsis thaliana landsberg
cgaagagattatgtttctgattttttgtttgttatgtttccttgtaggaagtgtatgataaagatacgttcacttcccatgacccgatgggagatgcggaaatagacatcaagccgtttttcgaggttcaaggaacggatattcaagaactcactaatggaaccgagatccgtagagtgaagccgagtggagataactgtttggctgaagagagtaggatcatcttcagtaatggaaagattcttcaagacatgattctccagctgagaaatgtagagagtggtgaggttgagatccaaatcgagtggatcaatgttactggttcaagcgatttttgaaggagaaatgtatatagaagttttttatatttgtttcttctgatttgtaataaggcagcgacgatgtcatatactcatatctaactcaaaatgttacaacttccatatgcacacacaaatagggatttcgttgaactcattggatattgatttatttttcaggaagggtgttacacacc

SEQ ID NO: 13814 - DNA, 863 bp, Arabidopsis thaliana landsberg
tctttcttcgcttcgattattttctttccataaatccttttggtctgaatttaaaaataagatttgattcttagaatatttgaaaaagtttatgtatgcatatatctgtatatgagattaatcagaaaaatatgaaatatttcactttatcgctgaaaacttcttatctttaaaataatacatatggcagtttatttgttgaatatggtcagatatctataatctttgacctaattttctctcgggttatagtctagtccaaactaacaaatcaggtttcaaaaattttaatcttattgacttataagaatactacggtctcgaaataactttgtgaataaggtaagaaaataaagagattgaatagggaaaataatttttttaccgaagcatcatgtggagatcatcgagtttggatggcaaaagctcgtcaaggataagagcttgacgaaaagcatcaagagcttgaagatcttctgcgtcaatgtcgtcctcaatcggaacggacatgactctgctgctgcttctccgaccttttttcttgaaggagttcttgaatctgttggatgcatttatcgctttcttcttcagcgagcttatcttcactatcttcctctcttcctccgacatctctatttctgattaacaatttgtaatttgcattagacttaagaaatatctctgtgaataaaggcaggaaatgtatgaaaatactaaccaggtttggtctcagccatggttagatgagttttaagcactctgtttcacacggcgataatacctaccaagacaacattgtaaagatcacttaagaaaaagctagatccgaatcgcatgagaaatgattagatgaatctaaagaa

SEQ ID NO: 13815 - DNA, 724 bp, Arabidopsis thaliana landsberg
atgagcgtcatgtagaaaaagttaaactctacatacatatgttttcatgccccttctatgtggtgattagcagagtgttaattttttaattttaggcttaagtaatcagttttattgaaaatccacgtcatggtatcctactgtctaaaattcgtgaaacacgcggttgctaaattatttgcaataggtccaaatagtttcagtagttttccagttttggccagtaactttcaaagctttattttatgaccctttggctttgtccaaccggcctcgctagaaacccttccatttccatagttgcattatatgggccaataatgggccatatatctcgattatgaaaacataagtttcggaccaaatagttttaatcactgaatgttgtaatgttgtaatcactgaactcggtaagtaactcagtcatcagcagatcttaaagagagaaaaaaaagagtctttgtgattgttgacttgattgacataaaaatggcgctgtcgatcaatcagatattgttcaaacaaggcacaaagatcgtcggcgttggactcaataacgcttctcacgccaaagaacttggcaatgccctcccaaaggtaccgacttaacttcaatcttcttcacattcttttgttttcgaaagttgcagcgtcaaatgaatcaggatcgttgatttgtaagaacacaaatgggtctcgatttaaaccctctgtctgggtttgt

SEQ ID NO: 13816 - DNA, 637 bp, Arabidopsis thaliana landsberg
tgaaccttaagacgaaaaaaccagttcagaactaaatccctagatcctagctttcgttcttgtcaatttataaccatggacgaatccggcatcaaagtaatgggtcttcctcttatggattttcttcttactcactctttgcttaacctctgtttctctattaatgctgctttctttcttcacaagtaagaagaaaaatatatgaagtacgcgtagtagaatctctgattagatcttttgtcgtaccttagggtctgaaattgctgcaattgaacgagattggtgcatactctcgaaagccccggtaattatattatcttgggaatttttttgtggtacgtgctgaatgatcatattataatatcaactctccacctgcaatcaaaattgttgctagtatcccttggacgaagatttccgtggagggatatgacactaggctccgtgagtatacagtcaagctcgtgttggaaaaacatttcgcttcatgcggaaagatcacacatatttatgttcccagagactttgaaaggggtatcctcaagaggtaccgtactttgtggcttcgattttccccaaaaaaatatataaactttgtatccttggttttacagtgtcgccttcatgtgtataaaag

SEQ ID NO: 13817 - DNA, 487 bp, Arabidopsis thaliana landsberg
gatgcctttaatatgaggatacttggaagtcacttgacctatgattgttccaattcctcctcccacatccaccaaagtatttacatcttcgaatcctttgtaaacttctaaaaccttcttcataatcaatgtggaagcttccgacattgcccggttaaacatttcagcgaattgttcgttcgaaccaatgagttcgaaaaacctcatgccatgagcagaggtgaatgcatcttttccttctaatatcatgtctttgagatgttccctagtaaaaataaattagaatcagttttagttaacgttacgtgtatatatgtagaacattttgtgaataatgaactaggatcgtaccaaggcttcatacagacttccccttggagtaccatgaacaaagtggcgagagagcccaagccatctccgcggttcaagaaaaacgtgcaaactggttcagctgcatagaccctctcggtctttctacttccaatgt

SEQ ID NO: 13818 - DNA, 523 bp, Arabidopsis thaliana landsberg
tgaccaagtcaacgagatatatacataaacactattgcattattatttgttgtatacatatattatgaatacacacttgtgagagtgtattcaatgcataacctattgtggatggcttaaaaactaactatggttaccaatacaactacccatgatcaagatgaaagacatttcctttttttggtgtttgaaatgtctcgggaagacatttttgacattgaaaaaggggaatgtctttaattttaactatggctagtctttaagacacatataagaagttatgcaatgtctaattagatagacaccatcagaatatatatactgttacttattcttcttgtcaacaccataagaaattatgctagaatcaactttaatttagaactaactgtctctttttttcttaaagaatgactatctcccttataataatctttcatactaatcataacgatattcctttcaacacactgaatcaagctttatcaactcatagacagtgagaagagagactgcatttgaa

SEQ ID NO: 13819 - DNA, 512 bp, Arabidopsis thaliana landsberg
acgggcatcaaacttgcccacttggaacttaacttttgcaaaagttaaatgatgctcccttgggcaatggtgaatctcaataaactgaggcggctggaaatgcaaggatgcaaaaatctaaaagttcttccaaccgacgttaacttggaatctctagagtacacctcgatctcaggggatgctcaagtttgagatgtttccctcgaatttcaaagaacatttcagagctccatctaaacgaaactgcaatcagagaagacaaagattgtttctttattgggaatatctttggtctcgctgaactcgtttggattgattgtccaataaaatatttaccgtctaaatttcatgcagaatgtgtcgcagaacttacaatgccaggtagcaagtttgagaagttatgggaagtaatccaggtaacattctcgttaaacttactcattaatgatgttcctaagatattttcttgacctttcttttgcttctaatgtaatttgcttggcctgcaagct

SEQ ID NO: 13820 - DNA, 2387 bp, Arabidopsis thaliana landsberg
  unsure (1)..(2387): unsure at all n locations
aatcctttcttcttttggcagtgtgaaccaattgtctattttaacgtcttgataataataagctaagtggtaacctcccacttgaagtaatcaatcgtacaaagttgtcagagatatcactctctcacaatcagttcacaggcacgcttcctcctaacatcacttcactctccatcttggagtccttttcggcaagtggaaacaatttcgttggaactatcccttcctctctcttcaccattccttctataactcttatttttttggacaataaccaactcagcggcactcttgagtttgggaatatatcttcaccgtctaatttactagtgttacaacttggcggtaacaacttgagaggtccaatccctacatctatttccagattagtcaaccttaggacacttgacctttcccatttcaacatccaaggccaagttgactttaatatcttctcgcatctcaagttgctaggaaacctttacctatcccattccaacaccaccactacaattgacttgaatgcagtcttatcatgtttcaagatgctcatttcattggatctctcaggcaaccatgttttagtcacaaacaaaagttcagtttctgaccctcctttgggattgataggctctttgaacttatcaggatgcggtatcaccgagtttccagatatcctaagaacgcaacgccaaatgaggacgctagacatttgcaacaacaaaatcaaaggccaagtgcctagctggttactattacagttggagtacatgcatatctccaacaacaatttcatcggtttcgaaagatcaacgaaacttgaaaaaaccgtagtcccaaaaccatctatgaagcacttttttggctccaataacaatttcagtggaaagattccatctttcatatgctcgttgcgctctctaatcattctcgatttatctaacaacaacttcagtggtgcaatccctccttgtgtgggaaaattcaagagtactctttcagatcttaacctacgtcggaatcgtcttagtggaagtcttccaaagactataataaaaagtttaaggtctcttgatgtgagtcataacgaactggagggaaagcttccaagatctttgatccacttctctactcttgaagttttgaacgtggaaagcaacagaatcaacgacacgtttccgttctggttgacttctcaaccanagcgacaagttctagtccttcgctccaatgcattccatggaccaatacatgaagcctcgttccttaagttacgaatcatcgacatatcgcataatcatttcaatggaactttgccatcagattattttgtgaagtggagtgctatgtcatcacttgggacagacgaagatcggtcgaatgcaaactacatgggatcaggctattaccaagattcaatggttttgatgaataaaggtgtagagtcggagctgatacgtatcctcacaatctacacagcactcgacttttcgggaaacaaatttgaaggagagattccaaagtccatcggtctattgaaagagcttctcgtgctcaacttgtcaaacaatgctttcaccggccacatcccttcatcaatggggaacctgacagctctcgagtcactggatgtatcccgaaacaagctttcaggagaaattccacaagaactagggaacctctcgtaccttgcgtacatgaacttttctcataaccagcttgtcggtcaagtaccaggaggcacccagtttcgaacgcaatccgcttcgtcttttgaagaaaaccttggactttgtggtcgtcctctcgaagaatgtagagttgtccatgagccgacgccttcaggggaatcagaaacattggaatcagaacaagtcttgagttggattgcagctgccatagggttcacacctggtatcgtgcttggattgaccattgggcacatcgtgctttcctccaaaccgcgttggttcttcaaggtgttgtacatcaacaacagtcgtagacgcagacgaactcgttctgaggtaccttttcccttaacgttttgttctctataacttgaaacctttcaatagaatcaatcgttgcactatcagaattgaattttgatcatccttcttaactttgatttgcaaataagaaatcctaaatcacggaattgaagacgttcgttcgagaagaagaagatggaggaataaagcaggaggatcgttatgtgaattcgaaattgggctgataaaatgggcttgcttacataatttaggcccattaatgaaagacgtcggcgaagaaagcaacgttgtacggagaaagtaataattacaagaagaaaacgaagacattcatggacattaatcatggaaggtagcgactagcgagcgcat

SEQ ID NO: 13821 - DNA, 458 bp, Arabidopsis thaliana landsberg
  unsure (1)..(458): unsure at all n locations
agacaccaggttgaagaggagtaatttttggagaacacgaccaccgcgattctggactccctaattgcatgtgtaagctcgggacttagattctggcttctctcgctctcgttgtctttgaaagcaatgatcgatttccgttctagctctttgaaaaagtggttgaggaaagttccacggacgtcttcccactgaaatttagaaaaacatcatatatcattgttgaagaagaagaacanaaagtatttggcaattgagattggtagaagaaaatcagagaagatcattttatgaacacagtagcaggtaatcacggccacacaaatcagaaccatatctgatccattacattagtatctgactttttgttttcgatataaattcctagctgcgtctaaagtataaacaatggtggacctagacaatagtttgacctagttataagtggtcattatgtg

SEQ ID NO: 13822 - DNA, 518 bp, Arabidopsis thaliana landsberg
ttggatgctacaggcattagcacaacctactcaagcctgcagataaacctttatacgggtttggaggcaaaggcacctttcccatcgacaaaatagaaatgccgctgtctttcggcactgtgcccaacgcgcgaagtgaacaagtcaccttcaacatcgtcgatatggtctatccttacaacgccataatggggcgaggatccatcaacaagtttgaggcatcaatacatggactctatctatgcatgaaaataccaggccctcaaggtgtaattacaatatatggagatcaacaagcagtcaggaacacataaagacacttcatcccaggacagtgcaacgtgcattgcctaacgacagaatgcgaagacaacaacagtcctcacacaaccaaacacaaaaaagttaacgcacaattgcagagtaacgagggaaccaagacagtccccatcgaccctgcaaccccaagcaaacagttttaattagcgagacatccttaccaagcgaagatgcaagac

SEQ ID NO: 13823 - DNA, 489 bp, Arabidopsis thaliana landsberg
  unsure (1)..(489): unsure at all n locations
gacacgctcgtggacggagtgtaggtcgatctccacgtgcttnnnnnnnnnnnnnnnnnnnnnnnnnnnnnnnnnnnnnnnnnnnntgacgttgtcgcagtagatgagggttgcacgctgaagagggccgtggagctcgtgtagtagctggcgcatctaggaggcctctgccaacgccgttggccacagcgtggtactcggcctctgcgctggagcgggagacaacggtctgccgcttggcgcctaggagacgaggttggcgccaggaacatggcataaccggagtggaccgacacgtgtcgtgatagtcaacccagtcagtgtcggtgtagaccatgagttctgacgttgggatggttggagtaggaggtcgtagtcgagggagccgcggaggtacagcaggatccgcttgagagcggtgagaaggggctccgctgggtgtgcatatgtgctggatgacgtaggcgatgtcgggcctggagaaggtga

SEQ ID NO: 13824 - DNA, 672 bp, Arabidopsis thaliana landsberg
taaaaaaatattatgtgatacggtataggtagaccaatttacgcgcatgtgtatcactgtcaaagttttacctgcatacgccaaaggagatcggcacaagccttgtattgtgacctattgtttaaaaattatgtcgagcctgatcaacctcagagagttccgctggagagcctgcgttggcatcaaactcccatatctgccttcccaagaagttgttggtggtgcacaagtgagggtcatctcctgccttagctccgatcctcagcctccacattttgtaataactctcctagaaagaacaaacatattttgtgttaataatgtctatttccttgcagttatgtataccaggttatattccctaccacacacggggagagaaatttgattgttaaaaatacttcattgtgaaagtgatccatatccataatagttaaatgaacaaactgttttccataaaaatattcttaaattcagtatatctttagatgtacaattagttttatttttacttttaagatgataacttaacgcatattgatttaagaatttacaaagaactctcaatgatttttaaaagaatgattttattacattaacttgtgttgaattgtttttaagaaactattataactagtgtttggttgattgaacagtaaaaaatatttttgg

SEQ ID NO: 13825 - DNA, 553 bp, Arabidopsis thaliana landsberg
agtgcaagctgtcaataatcctgatcagaagagtttcattaaagatacaaacggatgttgttgcacaaaggtcattacaagaaatcagcttggaatgttgggagaggaacatcctctatctttgctcttatgcagatcagatttctggctttactatatagcctatttttgcggcggcacgattggactggtttacagcaacaacctgggacagattgcacaatctttaggacaaagctctgagacaacaactcttgtcacgctttattcgtctttctcattcttcggtagattactttcagcaacaccagactatatcagagcgtaagtcccttacacaagcctttgtactcctctggttctagcattatgagaaaattatgatgttattgaaatgtaaattgtgcaggaaggtttattttgctagaaccgggtggttagccgttgctcttttaccaaccactattgctcttttcttgttggcatcatcaggaagcttggcagcgttacaagcaggaactgctctaatcggtctaagttcgggtttcatatt

SEQ ID NO: 13826 - DNA, 535 bp, Arabidopsis thaliana landsberg
taatgtaaaagacaaaaagctcaaataagaaaacaaagaagaaattaaaagaaaagagtactgacaaaaagcccagaaatatccttattacgaatctcttctctcactcacgcctccccaaataaagagagttttttgattttaaataatctaaacaataaacaaataaaacaaataataaatgaatgaaataaaaaaggaattaaattgctcaccacaacttcgaattctgtaacatcccatttccaaaaacattccgtttcagcttcaatcgaagaagacgaactagaagaagaataagaatcacaatcactctttttgaggaagttagttagattctcaatctcttcggaaacaatcatggctctgcattcgtcggcgtctgcaacaacggcaattagactggaagattactctcacagtccagttcattacgccgtcgttttgggagatcacggtgcactgactcgtcttctctcttccttgccgaagctaggagatcctgaacagatccgaacagaatccgactcactga

SEQ ID NO: 13827 - DNA, 686 bp, Arabidopsis thaliana landsberg
gatgtgctgttgcgttctgactttgcttttaatggctttggtactcgtgtttagtcaagtatgaagctcggcttgagggtggggggattgttggaaagtctgatggtgtacagcttactgtcaaggagggttagtatttttttttctcaaccggatattattagctattcgaggatctaaatacttctcgtgtaataggccatttctgtcctgcgctttctaaggctgtcaaaaccatgaaaagaggggagaaggttctcctgactgtgaagccacaatgtgagtattttatttggtgtttgtccttatttagcggtgaatcagtgaatttagattgatgtgtgacactctgacttgtacagatggatttggggaatttggaagaccagcttctgatggtcttcaagctgcaatcccaccaaatgcaacccttcagattgaccttgagttggtttcttggaagactgtggtggaagtaactgatgacaggaaggttattaagaaaatactcaaggaaggagaaggatatgagcgtcccaatgaaggagcgattgtcaaatgttagcatctatctttaagggtcttatctgaagacctcctctacgctatggttaagctatgtgatctgacaacgagttttttgttgctgtgaagttgattggtaaaccttatgatggatacaaccg

SEQ ID NO: 13828 - DNA, 734 bp, Arabidopsis thaliana landsberg
aacctccggtaatcaaaatctctccgtgtgaatcgtttgtgaatggtggtatctaatccgatcggtggtaagtttacgctctccctgtccatcaaaagggcgagcttttctcttcctctctcgacatcctctgttttcgctttcggatcttgcaaagaaggctggtactttcgctgccttggcctcgacccgtgaacgattcgcccctaaaattcacaacccggaaccctaatttcctaaaaagtggttcttttttgattgattctgttacttgtgagatttgctctgttttttgttctctcgatttcgaagatgttgctctacaacaagcagaagaagaaccaaaacgctaaagggaataggattctcattagcgttacggttttgggtagtgccggtccgatccggtttgttgcttatgaggatgatcttgttgcctctgttatcgatactgctcttaaaggttacgctcgtgaaggtctacaatcacttcttggatctgatttcaatgattttcttctctattgtcctatggatggacctgaaggtaaactaaactcaattccaatgtcttttcgctttatgtgtgaatgatctgtttaaagaattggttgactgatgttgtgctttgatgacagctttaagcacatgggatgcaattggctctcttgcagcgaggaactttatgctctggagcacaccacatgagaagaaggttgaggaaagccccggac

SEQ ID NO: 13829 - DNA, 683 bp, Arabidopsis thaliana landsberg
tacaaaaggtaaaagtcgtacgcgtttctgtttcaaacacagttttggttttttctctcgtacactatagatcaaacgttttttccatgtaatagataacctctaaagttgttgtgcaacattaatctaatcaaaacttttttttctggacgttactgatgtctacgtgatgttacaatctaaaaatcacgataatttataatatgaatataatttataaaatgaatataattttgttaatcattttatgagttatgaatataacacctcactagagatcttccccatcaagtggtagaaagccatgagctcagagagtcgctcaaagttcatgttcttcattatgttcatagccttcctctacttctccttatcaagcctaaggtttttcgtaaatgatctcccgttcctcatcattactcccatctcctttagcctcatctcttgctgtgcacttagagtagtatttaattgtaaccacatcaaagaaaaccaaacatgtgtccatggtcattaaactaaatgtgcaagactgtcccgtcctatttccatatgcattttcaaatccaggttcgacccgattcacttcagacctgagtaatctcctaattttaattaaccactacactcgacttttacatgtatctttaatacttttaatcataaaatgctctttgatgttc

SEQ ID NO: 13830 - DNA, 567 bp, Arabidopsis thaliana landsberg
  unsure (1)..(567): unsure at all n locations
atcccatgtgttaatacaatttttggtgatttcatttcatcttatttgtaaattctagaggaatcagaatcatctgatgcaaattatcgttgggtttcgtaaccggagatggcgcttttctttctttgaatccagtttcacaagtacttggtgcatccattgcagcactcagaaccgttttaacggttgggtaattacgcgatttaacgctcgctaaagcttcgtttaaagaagcaatagcatcggtataaagctgaaggcaatcacgtaacggcattgcagtcatcttgttaactttcttccccttgataatcttgtcaacagttcctttcaaggtcgtcgctttggtcacggcgtttttcgtcgatgnnnnnnnnnnnnnnnnnnnntcttttgcggttttggcctgcggattggtttcgagagacgtgacacatagattgtatntgaacttcgggcttgtagctgcagctttcttgcaagaatttccaaatcacagtttgtccgtttgccaaaccgtttgagagaacaaagaacgttacaaggtaaagcaaaatttcattttct

SEQ ID NO: 13831 - DNA, 777 bp, Arabidopsis thaliana landsberg
catgcaactgtaactttgcgcgtccacttctcatttttctttcttttaatgaaactatggtcttgtacttgagcttctcaaccaaaatggttcttctagctagtgacattagctcactctagatcaatcaatcatcttcgtttaaaatccaaagttgctgagacagattcatttgggtgacctgtttgtaattgattgatttaaatattttatttgcatgccaactttttaaattaatagaatactctttcaataatggcatgtgataatacgatagtttattaagtaatcataaatgaagtgaacataactacacatgactcataattttaaaatctaaaactttcataagagggaccaaacccgcattattattcagtgatatagtttgaacccaaacttttaagtttctctttgatgttcaagcatcttcaacccacttatacttttatctctatattatattttagaataaaattcttttcaacccacttctattataacctctaaaataaagatctctatttatttcttttatatatagaaaatctctattttttcctcaataatttagttaaactcttttagaaaaaaaaaaaagaggaatccatttgagtaaaactcacctctgttattgatgcaaaaaataaggaaaaccattggaaatgatctttagatcgattcgaccgattgatttctccaattcaggaatcatatgattcttcaagtcaccaatttcatcaactattgatagcatgcaagagaatgatatcatac

SEQ ID NO: 13832 - DNA, 778 bp, Arabidopsis thaliana landsberg
  unsure (1)..(778): unsure at all n locations
tagcaaaatgttaactttttcttaatcctgttttttggtggtttcatatacaaaaggtttcaaattttgatacctatggaattaagaacttccgtgtcggttttaatcatgaaattattatcagatttgagtagtacaaaatatactagtttctttgtaagaaaactggaatcaattttaaacatttcaaacatctatattaacaagaaggaaattgagcggtttaataagttggtggattgaagtgtgaatacttgagaaataaaagactaaaacagtaaaaagtaataaaatatgatccaccaatgagcagctttgaacttgatagcaagcagagcacttattctgcctctttcctttctttttggctgtctccggcgagaagagattttccgggggaaaatagcaaaagctcggttttagtttctgtttagaaagaggatacagaatagtgattactaacatcttctccgatggcggttgcgccggcaagagctcgttcagactatgattatctcatcaagcttctcctcatcggtgatagcggtaagtctctgcctttctatctcttaagaagtactgaacaaacgaggttcagagactattgcatttttatccgagaatcttctctcctgcctgttttgcgatctgaattangtttatgattttgaacttttttgcgttttttgtttttctttcgtgtttgatccacaaagttgatggagctccactctcttttaattgaaggatcaacggtagttcccttttggaagttttg

SEQ ID NO: 13833 - DNA, 913 bp, Arabidopsis thaliana landsberg
  unsure (1)..(913): unsure at all n locations
ttgtatgatagtttattgatacaaaacatttcttatgttcttactttctaaaacaaagtaactaccgaacggaactgcaagtgttgaatcttttcagtctgaatgttgcagattgagcatgctacttctcacatggcatgtatttaggctcggtgtttttgatttcataagtgtgacttcttgctttttgcaatgtctgatcaagtacacttatgcaggagatttgtagcatcaaatgtgggaagtctttttatcggaatcgtggatcgatagaatatcgacaagtggcgtcatttatgaaggctaacttgaagtatgtaaggaccatacagagtgtaggagctggcaatatggtatcagcaagacatttaaagaggtttgtccccattgtcctttacatcatttgcagccaatatgattttcttctttgatccatgagctctcttcctctctcttcttcttcaactttcatattcacatttattcattttattaaaaactgatttctttttgtgtttatttgtacaattctttatgattttgtcttatcgttctctgattcgatgaagatacttcttacttaccccacaaagcttggaggcccacctcaataaatccatcttttgccttcatggaacacatttagctactctaccttgtttggtcttgtaaaatctctttaatgtcaccgtttgccttcataaatcatctacctttcttggcaggataatttaccttgatgataacatttgtacacctgcaaggtaccacaaccatataagatcacaagatgagggttaacncggtttccgtaccattgatttaaacatcaatctaagtagatttgggttctggtgactgagtataagctcatngntctcatatattctagttntttaaaaatcaatttgag

SEQ ID NO: 13834 - DNA, 724 bp, Arabidopsis thaliana landsberg
tatattccttaccttaacattggtcatatcaacattgttttctttcaggaaacttatgaattcattgaagttggctggtgttgggaggtagtgtccactgtatggccatatagcctgagaaaatatgtgttttgattagatcctcgacataaaggctaagagaaccaaactagaaagcaaaactgaatcggaacacacctcgaggatcccctcgcgagcaaccaatcttcctgcagcagttgtggcacctccagacaagaaactcgaatgttggaaacgacctttcttcttctgccctacgtataaggttctagttgtgctaagtacaaaaattgacttggaatcctctgttgaattgatcagagtcatgctttgtttattcattagctttccatcttctactatcacttcgtatgcttctctctccagctgcaggttgaataacacaaacgtgtatgagcaaaaagaagataagtacgctgaactaattttttagcaggtgaaaccgaaaaaagacttactggtcctagatatttaatgcactgtttttgcagaacacttcttgggtggtgttcaagattcacatcttttccatcgccaatgtccaaccttcagtttcaaataggtggaaacaaagttcagaacagattcatacaacagaaaaagataacgatagttacgggactcaccagtagaagaatggttgtgcgctcatgcttgctga

SEQ ID NO: 13835 - DNA, 821 bp, Arabidopsis thaliana landsberg
atctttctgcggttttcaccgccatggctgctccgtttttctctactccatttcagccttatgtctatcaggtttgtctgctatcttcgttctcttctcgcctcttagattcgtattcttgtctgtcactatcgagaaggctagtgttcgaatatacttcttcgcgagtattttaggatcctttctcatgtaggtgttgagtaatgtgatgtgtacttacatctaattcagtgataatgctaataagctatttcctgggtgagaaattgatctcttgaatgtgtctgtgggagtatgaatctcacaagtggttatatgatgcagagtcaagaagatacgatcacacctttccaaattttgggtggtgaagcacaggttgttcaggtaggtcgacattttattttgtagtctgggcattttgtgtttatgtgattgacatatatactcaagcatttgattgttttttttgacagataatgttaaaaccacaagagaaggtcattgctaagcctggtaatttccatattatgattgctcattaagttttgtaagatctgttgggttggattgtatatgttaactgattatatatggttctttaggttcaatgtgctacatgtctgggtccattgagatggataatacttatacccctgaacaagaagttggagttgtacaatggactttaggaaagagtgttagtagtatagttcttcgtaacactgggcaaaacgatggatttgttggtatcgctgcaccttctttggcaagattttccagttagtggtcttacttgccatgatttccttccgtagatttag

SEQ ID NO: 13836 - DNA, 613 bp, Arabidopsis thaliana landsberg
  unsure (1)..(613): unsure at all n locations
cacatcatcatgttagaatttcactaatcacgtcaattaatatggcgtgtagctatgaaattattacacacttaatcaattggcagatgttaatgataaattgtggtacatatgttaattttcccttgaataaaccttctaaaagttcatattctaaatttaaataaaattatggagaaatgttttttatatagaaactgtcgaatattaccttaagcccctagaaatgtaggaacggcactacatgtaccatgtcaacaagatgcatccacaaatgagtaagtaagaaaaaaaagtaagtgaaagattatgcacatttttaattagtttttctcctttatttatttttttcttttttagaagagcctttgcttatatcatcgaaatttccaaaacaattagaagaatgcataagaaggaaaaggaaaagagaaagaacaaaagttgtaatttcttcttcacacgcttttcataaagtggagaaatttgttttcaagattttgttttatgcccatatattcatcgcgtattcgtgtcagtgcttctattgttttcaagcacattaacaactacatgctccttaattntaatatcgncaagcatcatatctact

SEQ ID NO: 13837 - DNA, 735 bp, Arabidopsis thaliana landsberg
tttcccgccaaaccaaattcactaaattaccatatttattattttttgtaattattaatttaaaaaaatatattttatttgagtgttatttttgtccaaaaaaattttgagtgttatatttgttcaaaaacttagtatgcggcaatattagatataaaaaaaaaatatttacttacactaaaaacaatatcttatacttaccttaaccaaatttaataatatggatatttcctaatagaaagatactcaataccttgggatgaataatgtagattatatctatattatttaggcgagacacttgcattgttagttaatcatatgttcagattttggtgaatgattatttggctataaaaggtgatagtctaaattttgtatttacgtgattcatggttgattatcttcccatgaaaattctagttattgggtttctttaattgatttaaaggagcaaatgaactctataaagtaaaattttaatacaatcttctaagaaacaaaatgtcaactatgaactatgacaataaattcaaacaaagcgtagaaagttcatttaaaaataaatatattcttaaaaacaaagagctttagatctcactctagagatatacccagtaaattcgaccactaacaacttgtaaggcgcaccgccatacactcgttctcgagctctctaaccgttcggtaatctttgtaagctggaacatcatgaaaaagtgattcgttgatgtc

SEQ ID NO: 13838 - DNA, 685 bp, Arabidopsis thaliana landsberg
ggattcattattatcggggggggcaagattataaaataaaccattagagtctcctcaagtctatgtaaaggaggagacttttttgataatgtataagacaatggtgtctctggtaggttaaaaagccaactgtttttttttttgtttcttgagttcttttgggacaatggctcatgagttatgttgtgtttgcaggaaggagagaatcagtggcctatatggctcaaacctttactaaaccaacacttttttgctcaatgcaagtttcatggacacttacctagaaccgaatgcaaaatgtattgcttagactgtaccaatgactcgttttgttctctctgtctttctgaacacgagaatcatcgtaccattcaggtgtgtttcatctctgaatccaaagttctcgtattgtttaattcaggttttgaatgttaagaagttgttggtttgctgcagataaggatatcatcttatcataatgtgacaaaggtcgatgagatacagaaatacttagacatatcaagcattcagacatatgtgatcaatagctcaaaggttttgttcttgaatgagaggcctcagtctaagcctggtaaaggttttactaatgcctgcatggtctgttatcgaaaccttaccgaaaactgcttccgcttctgctctattggctgcaaggtgcatttac

SEQ ID NO: 13839 - DNA, 574 bp, Arabidopsis thaliana landsberg
tcgagatctaccttcatcagcttactcttgaagccatcattaagatgggaatctatatttgtgccatgaggagccaaggagtagaacccaatgcaaaatgcttctacaatatgcatgaattatcttatgagacaaaggccaccggaaaagaacaatatcacaacaactttggttgctatggcttcgtaacccgctctaaagtaagcaatccagtgccaacgtttcacaagaggtggccaggggctagatgcaggaatggttttatgtgaagaatgatctagttgaaagggaagacatcaaggggattatccaacgtcccatatggtctcacttcagcattagaagaccatcccttgcccttggaaacgacttgcaagtatgccaagctgcttttaacacagtgcacctacataggcaccaaggacttagtccaagagcatattgcctacaaagtgtggccactcggaagtcggtgggagatgccgaaggaggctgctgctgggtctagtaaaggtggccaagtttgaagtatacatgctaatattgaagcgaatttgatgagcgaaccatgact

SEQ ID NO: 13840 - DNA, 660 bp, Arabidopsis thaliana landsberg
tcgctgggcccggtcggtcagctccgccccaccccgagccgctgaccgccttggccacctttcagtcacgcgtccatccctgtgcgctcacccgcgagatctattcttggccattgatctgagatcttatggccgagggagcctgatacccctttgcttggtaatttttttaaatagacccccaacatctcagtaatcaacccgccgtcccgatttcttttgcctaagcgcctgttttcttgcagagagacccctggactttagtttaatcataagaatgtgtttaaaatagtgtttttgaattctaaaactttcaaaattcataactttgtcatatgaactccaaattggatggttccaattgcaaaatgttcaatatgttattgtctatctattaaaattatgttcatccactgttttcatgtctcaatttatagttgatgtctaggttaaagttgatgctatagaaactttattaggaataaaatgaagataggaaccctgatgaatgttcaagtgcctaacactatagaccaactctagttaatgtataatcccaccctgaaataactttatttgagtaggtaattgactaagacagacttagttagagacaatagacacttggcatagtgcttacccaacctggaatgcccttgt

SEQ ID NO: 13841 - DNA, 906 bp, Arabidopsis thaliana landsberg
gtttggtgcactatctgttcttacaaacccttaatcgttgacttcatcgctaagtttaactaattgaagtttcagttttacctttcaaataatcctttccaaaatcttaccacaaatgttatcaaaattgagtagggatgcaagaaatttgactttaatcgatgtaattcttaaatcgtgaacttctaaggcccttaccaaagatttcatcgctatagtgtaattagcaaaaaaagaattaaaaatatatattgtctttttagtggctttgaactcataaacatatatattcgtttgacttataactcaaaagaattataaatttcacttccaagctattactctccttatttatttgtctctgtaatttctttgcctatttaatcttcagaaactttttagtagtaattctcaacttcgctctagtcgagtttaaaagtagcaattttgctgagtttagctaaaaactttgttctccttgattcatgatacaacaacatagtgttatgtcccattatgatcattgcattttaacacatatgaccatgctgccacaattttcatcattgcattttaaggtgtgtggttcttcttttctagccatttttctatatgaaaacaaattgtaatatccgctagttcgttaccagcggtgctcacatcttaaggtcctgaaacaaaacaaacatttccttcattacttatatgtaatgttattcacctaatcaaattttaaagaaaaaactctaaaactttgacaacattgttatatgtggatttcacaacgtaatatctaaataaagaatcttgattgaataacaactgattctacccgacattttaagtcactaaaactcttttaaaataaaaaaccaataacaccccctaagacctttttttatttta

SEQ ID NO: 13842 - DNA, 810 bp, Arabidopsis thaliana landsberg
  unsure (1)..(810): unsure at all n locations
cctaaacccgttgtggtcacatcaatcttgcttacatcgataagtatccgattcctaaatctgtttccaactcataacgcaagcaaatcaattaaaagacagagaaaggataaaaacacattttgagtccttgttgtgaatagtttcacttacagaatcctggagaaagcgtttcgattctcttgaagagaccattgatcttcagcaccagatgcatagtaatcataaaccatctttggtaatttctcctttgcgatcttctcatattccatcacgtttgttatctccatttttatttactcaacactcaaaaaaattcctgtgacagataaatacacattttcatcatcaaaatcactttttaaaacccttgaattcaagaatgaagaatcaggaacaagaaacgacactgacactaaaaaaagtcaattagcagactaataaaatctgccccggctcagattctataatcacaggatcgtcactcgttgagtttgatattgatgaaaatctaacaatcagataaacaagcatcgacgagaaaagtaacagagagcttcttacctagaggcctagagagacttggtcttctcgggaaggtggcgaagaataagaatataagaacaaaacaaaatgttgatcgagtactcttaatataatatagacactcataactaagtcacaaagaaacatacgtctctgtgactgtgtaaataattgtcagtgattgtcacgtgatggatcacgtgaaacacaagctcaccagacaccagggcttntcattngttacaacaacatgcatagtttaag

SEQ ID NO: 13843 - DNA, 584 bp, Arabidopsis thaliana landsberg
tctccacgacagcagaatcggtgtcctcttggaggttaattgtgagactgattttgtctcacgtggcgacattttcaaggaacttgttgatgatctggcgatgcaggtaactccaagtttctagctgaaacattttcttcgttttgctataactgagaacataatttgacctgacatgtaggtggctgcgtgtcctcaagtagagtatcttgtaacagaagatgtttcagaagaaattgtgaagaaagaaaaagagatagagatgcaaaaggaagatcttttgtcgaaaccggaacaaataagggagaagatagtggacggtcggataaagaaaaggctagattcacttgcattgcttgagcaaccatacattaaagacgataaggtgatagttaaggatcttgtaaagcagaggattgcaaccattggagaaaacatcaaagtgaagagatttgtaggtacactctcggagaaggccttgagaagaaaagccaggactttgctgctgaggttgctgcccaaactgcagctaaaccgaaagctaaagaagagccaaaagctgaagagggccaggaagctgttgc

SEQ ID NO: 13844 - DNA, 865 bp, Arabidopsis thaliana landsberg
  unsure (1)..(865): unsure at all n locations
cccgagaaaaggtatgtttgagtcttattaataataaaaataatcagattatgtttaacaaaatataaagtctagcaataatgagaaagtgattaaaatttataaatctaactaaaacggtaaaaaaaatactaagatagtaggatagtgaatacgaagaacttaaaaaagttttgaaataatttaataatgaacagtgaatacactaaaactctatctttttgtccaaaatcaaatatatatatttttaaacgaatacccgaccagtttaccagatcacaagttagtgccaaatttttgtggatttttgcgctttttaaattgtcggatattaacagtaaactcaaacccgatatatctgtaacactggttaaccagtaggattggacgtgcagattttgtttttctttttttgaatgaatgaccaatgctgaagctttacggtttggttgcaaaccagagttgcagtccatctctcatggaggttgaacccatttgaagagatatatagaagccgattccgaactgtccggtcaatcacttgaattattaccgatgcagagatgggaagctcaccatgtcttcttcgattcctttccgtccaaattgaatggactgtcgctttaaatatacgtagcgtaaaatgaattgatgcgtcttcgagaactgagaagtggagacaatacttagcaaagcagagtaatccaaagtaaaatcttgcatgagaattcgcttggcaagatgttcccagatttgagccgagaatgtgcagctgaaaaacaaatgatcccttgtctcaaatggaacttgacanaacacacatgttggattgagattcgatgaccaagagcacattcgatcacat

SEQ ID NO: 13845 - DNA, 643 bp, Arabidopsis thaliana landsberg
agtctgtaccttgtgcgcttccaacaatctctgcaggtaagaccacatcatcaagaatagcttcatggactgaggtcagagtacggttgcgtggtctctttgccgctgaacccttcttgggcggcctcacaatcctccttgtagcaatgaggatcacatcctaagcacagggaatagagacaaagattgttaagaagctaaccagttgtatagtgactctaaaaccggtaattgaaacacagaaagcttattttcattctcaacataacccaatggaacataacttcattcttaagacaactaaagtagcatcaatccatcaatcaaaccaatgcaagtcgagaaacttaacagaacaccaataggaacatgaaaaggtaagaaaaactcacctttccactgaacttcttctcaagttcacgaacaagccttacatggattttccggtaagcttttctcagtctgtaaggaacattgacaacaattgccttgcgtcctccagagatatcaacttgactaaaagagattgaattttctcagttgttatctttttcctagatgtaacaacaacacactgtagacgaaaccatctaatcataaacaaaagaaaatcactcacacagccgagttgacgtataaatcc

SEQ ID NO: 13846 - DNA, 982 bp, Arabidopsis thaliana landsberg
  unsure (1)..(982): unsure at all n locations
taacctttactcttgttaaaaatcaatttatgtaaacctaacacatgcttaacttttttaaatgactgtgataatatactccagatgtaatcaatactactagaaaagaactaagcattctaactagtttacaactaaaatacatatatatacatttgcttacaaatatataagtatgaaaatatgaaagaaacgttttagagactcagagtatgaagtacatgaacaatcatagatatatcttatgaatagttttttttttatcaaccacacattaattaaaaaataattctatgattgattgtccaattagaaggagaagtgtttacaaaagtaatttcaaaaaataaaaatctatcatatgaatggtttcaaatattaacgtttttgtttataaagattatatagattacatggtatctggatattttaaagctgttttcccttttaaaactattttcttactaaaatatgtaaatatatgaatattctcgtcggcaaacatcggagagctagcccatcatcatcgcaccaagtgctaaaacgcggtattctatggccattaatggaagcaataaactataaactgtactaaagttacattggtcgcacattagccaccaccaccacatttcgtcgagtttgatttgatgatccatttcttgcatacatccaatctaaagatcgctaattcttctacttaaaaacgttaataaatttatgagtaatcactttaaaacaaagatgtacaagagatagttacctaatttatttgttntggtaattgacattgtccaagtacagcgctcatgatgtaggattatgtactaatactattgaataaattgagaagaagaaaaaaagtatatatcattttcagaatctttggtttgtggggagacagattataaaagtcacctcattatattagtcactcttaacaaaccatgatatncattccaagattatagttatactttat

SEQ ID NO: 13847 - DNA, 619 bp, Arabidopsis thaliana landsberg
cctcctcaggtgtaagagctttcgtcgtatctttctgaatgattgattcataatccgtgacagttttgtgtattgatacctttagtttttgcagcgatgtgagcgcctgagatttcacaccagctactgcatcaaagtggaatatcatctctatgtcttgccagagatcagagattgcagcctgcagatccattagcgggaagatcctctcatgcgatttcttctccttggcaacaaattcagggaacttgaaaaggttagtggctgcttcgtttgcaatctcgtagaagcatgactctcttgttgaattagaagcagaaaagacatgatcacaaagaagtttctctccacgaaagagcgtggcaacgccaatctttgcagcttttatccagttcttgatcatatgctcgagcgtgacccagtccgttctgtgaaatctggagcctttgtagatttcaatcccgagcaagctcagcccttcatctacaatcgattttctgacccgcttataaatctttacgcactccttaccatatccgcaacttatcatactctctgctatcgccttaaggtcagacatcaccatagctgaagctttctcaacctgagtgatcgattc

SEQ ID NO: 13848 - DNA, 972 bp, Arabidopsis thaliana landsberg
  unsure (1)..(972): unsure at all n locations
ctacacaaatgagtctactcctccaagaattatttctttgtacgatcattatatatctcataagcatattgaaacctaaatctcttaagtcttaagtatcttatatctgaaaaaatgttcttatattgcgaacagagatttgtcatcacgagggttaaaaggggtcattgcgcctgccttccaaaatttgaccgagcttcgaaaactgtaagagctattagtattttacttaaacgcgatccatgagaaaacatttatattgtgaccaacatatttctaatttttcacatcttataacaaattggacgaaaaaaaatatctcatctcatactatttttttatttatcctattaacggaaaatagattgactttttaacgttttataaatactagagacttgtcaaataatagttttactggaggagtgcccgagtttctagccagcatgaagtcattatcgatcatgtaagttgatataaacaaacataatggccggccacttatatttcactaggtatacttgttgtcactttacattgacattgtaattttgtgtttaccttgacagaaatttaaattggaatgaccttacgggtcctcttcctaaattgcttcttgatagagaaaagaatgggcttaagctaacgtaagattttcacccttcttttttttttatcaactttcctcaacctatagtcttattcaacaacacttattttcttaaggatccaaggaaacccaaagttgtgtaatgatgcgtcatgcaaaaataataacaatcaaacgtacattgtaccagttgttgcgtcagtagcttctgtgctcatcattatagccgtactgattctcattcttgttttcaaaaagagaaggccaacgcaaggtacataattatacaatgagatatatattnttatcgtaacatgcatgcatgatgatgacataccaaaagatgcctaatctcatggaac

SEQ ID NO: 13849 - DNA, 825 bp, Arabidopsis thaliana landsberg
taataactggactagggtgtcttcgatcggttatgttgaaattgtagttaaaactgttttttttcgggtatacaattcgggtttttatcggtttagtttaaattcagtttacatttttcattagaaaaatcgattcacatggttaaaatactaaaccgaacggtacagtagtaaagtttgcatgcgattgcgcgagagggtgtgacagatatctgaattttctttcaattggtaaagagaagacaacggacatatttttggtaaccattcatttgtcaccactaactttcttccactataaataccccaccgctttaactctagaacactctccatttttcaatattgctcaaatctcaatctttctctcctgcgttttaatttctctcggattgaaatcatccatggctgccaccgcaaccgagaagctccctcagctcaaatccgccgtcgatggacttactgagatgaggttttacgctctctcgattagctttcgtctcagattctggatctggtaaatcttattcatcgcttagactgattcgtttccttctgtttcagcgagaatgagaagagtggattcatcaacctcgtttcacgttacctcaagttcgtacgtccgcttcggatgtgtattgatcgaattttgactgctgttatcttgaatctcaaataatttctggcctttaaagttttttcgtgtgctcttagtttgtcatagattttctgaatttgagctttgagtttaccagttagtgtttgtttgctctgttcttggacctcgttctgagttttgaaacgatctactaatgactgataatc

SEQ ID NO: 13850 - DNA, 575 bp, Arabidopsis thaliana landsberg
actaattcctcttcttggaacattttcagctccatgctgctgtcctttttcatccatcaggtgcagaaaaatctctgagagacaccattgatgagctgaagaagtgttatggtgacaaaagttggaagtttttttgggtttgggtagatcaggttctggtaacagacaccattcctggcaaatggatagtgaagtttgataagtgggagcaatgcggtaaacacaacaccaatatttgcaatatgatctttcataactaatatgagcaagtcctaagattttaaatataacatttgatcgtttgtttcgtttggcagaggatgaaagccaatgctgcaaaacgactgtcgaatttacttcaaaggtatgatcagattcttgaagatgagctccattaagtagcttagattgaatgagactgaattaaaatctgcagggaggagatttggtgtgggagaaggtgaagcagatatggtcagaggaatcaaaggtgaaagatgataacagttcttggattctctgaatatattttggagactgttcttctctttctcatgagtgaattggtatatgaa

SEQ ID NO: 13851 - DNA, 735 bp, Arabidopsis thaliana landsberg
tcttattggtttttcttactgaggaacatggccatttctattatgaatgcaggtaccatgtcacaaacttttttgccccaagcagtcgctgtgggaccccagaggaactaaaatcactgatagatagagctcacgagttaggcctggtagttctgatggatatcgttcataggtagtgaaggtttacatgaaagcaaacaatgagatccaccttttggtcatttacaagtcattgaatcttccgactctctaacctgtgcagccatgcttcaaaaaacacattggatggactgaacatgtttgatggaactgatgctcactattttcactctggacctcggggataccattggatgtgggattcacgacttttcaattatgggagctgggaagtatgtaactttttcgtgaattttaatcgaaaatgtattgaacatacaacttccttaagcactatcagttccaacagtctcttttgatcttttctaacaggtattacgatatctcctttcaaatgcacggaggtggctagaagaatacaagtttgatggatttacatctgatggtgtaacctcaatgatgtatactcatcatggactctcggtacttcaaacttttctacaatggatggctaatgcactctttatgtttttcccatctttacaatgtttgatcagctttaagtatatcttaagtcggtctgctgaccttctattttgtgggttttgggatagg

SEQ ID NO: 13852 - DNA, 516 bp, Arabidopsis thaliana landsberg
gtgaaatggtctgtccagttcaaatatcttagctagcctatcattgtcacggcttattgttattagtcacggaggattccacgaggcgggtggtatggaacccatatgtggtgcaaaccagatggatcaaacccaaaaataattatcatgaatcagattggtatgctataggatacgacagcaagaacaaccacaaaatataaggcatgaaatctatgattttaagtataattcttcaagtctagttcgtggagggttcttgaaattacttataattcttatataacgtttaaaagagtcgtgtgtctttaaagagaaatacttactttgttgatcgtaaaggcgaagattctttaatttgttttgattttacaacatagagatttggatcacgtctgcatctgccgtttgattccaatagttatgtgatttcatcttgtgttagagaagagcagattgaggtgtttttgggaaggtgtctggatagatatgtgatggagacatgaatttacaact

SEQ ID NO: 13853 - DNA, 511 bp, Arabidopsis thaliana landsberg
tatgcaattgcaatgttgattatgattctgattatagaagtaagttaactattttttatatacaatttaattagggccccaacggctcatgtacatgactgttctaagagattcttcagccttcttagccttctcgctctcaccagaggaggtaacggctgcggagacagaagacgaagagaaccttttcccttgagaaacagatctaacgttgttccggagatgttgattaaccgaccggagtatgtagttccaccgacaaaaacctagttggtcttttaatgcctctacggctccgatgctcactgccactgtccatgctttgcttgtagaactcatctttcttcagagaattaaacttctttgtgttttgtgttttgtgtattgagaattgtttttgttgatgatgtttataaagtgcagtgaattggtgtgcttatgtaagagagaataaaccctccctctcggcgcgttagtggagttaaaactagaagctgtggccgttggtttt

SEQ ID NO: 13854 - DNA, 224 bp, Arabidopsis thaliana landsberg
ggtatcggttccacaccgagcagtcacagccgcaataatagcctcacgagccagcgagatactgctactgtcaatatagtgcacgattggatttagacaagatgaatccgccactacatcacgttccgcggtatacactatccggaacaaagtgtggaagagctaccggttgctgctctcggcgaggaccacggccatgcggttcagcctctcatgggatttgg

SEQ ID NO: 13855 - DNA, 1019 bp, Arabidopsis thaliana landsberg
gaattaaacctttattacttattagtttgtatataattcattcagtttgttaatttcttaaaatccttctttatcaggtgtactatccattgtgtccacataaccatatcccatcaaagaaaatgttattcactaagtacgacataaagtgcaacaactacaaaaacattatccaaaactttatatacatatatatgatccataaaatttatttctcctttgagtaaaaatctctacaaatttagtaatcaactcacccaatcttatatctttatgttttcataaaataaaaaaacattttgaaattgtcatactcctaatccataatacattgttatgtcaaactctgaaaatgttacacaaaacgacttcaaacaaacactatcacatccctccatcttcacacaaacacactaaaataaaataataaatcatatactatataatatcctgtaggaagaagactgtctttgaaagtgattctctgatgaccccaccactaacagtttctggtctggtctttgaaaggatctgatttcctccttctccctctcagtagtttctgatcagacaggagctctgtgaggttattatctgagtgagtaatacaaactatctacatggttctatgctaaaaataattagcaatggtgacagtgaggctatgttcagagcttgcagctgtctcaacaatggctttgtctttaagaaaagagttttcagctttcaagacctttctagaataaggatgctcccatccgtcttcaactcaggtgaaaccagagagtgctcagtgttgttgagagagttgagagtgagctcttcgagtaactcgttgagaatcagttcactagtttcgaagccaatgcagtcaatgtcacatctgatgtctaaccagtttccagctctagccatatcttttctaactatctgatccaaggcgtgagggagtggcaatggcaagagatgccagtaaaccgcttcttgaaccttatggatgacgcttttgacggtagaga

SEQ ID NO: 13856 - DNA, 733 bp, Arabidopsis thaliana landsberg
ggccaactacacaacaaattgttgaaaaaagtggtggccaagctcaacgaactttccatggttatgaagaaggagcagcatggctttgggattgatatacacaacgccttcatgaccgttatgaagaacaaaggtgagaattcaagtaacaaaagtttcacgtttgattcaatatcaaaaccctagtcttatagggttttttgtgtgatcggtttatgaaaatgtagggagcaaaagatttaaaaacccgatgaagtcgtgttgtgaaggctattgtgggcgttcaagtgacggtgggaagttgtatacgttatgtgatgatccaaagtcttttttcttttgggatgaagttcaccctactcaagaaggatggagatcgatttactcggtattagggaaccctttaaccgactttttgaccaaaccgtaaaaccagaatcttttttcttttggtttcaaatgcttgaagcaattttttttttaaataagttaattgggttcataaattggcttacttctttaaacacgtttgaagaactcggaaattattgagaggatggtaattaggtgtcaacttgaaaataatgaaaattggtaaataacgagaattttttaacattcattagggcggctggacatctgtaactcacgtgtgtcatcgtgttaaatacaaggtatatccatttttcagggagttttgcgtggaatttttgaaaacctagtatttaattac

SEQ ID NO: 13857 - DNA, 581 bp, Arabidopsis thaliana landsberg
aaaattatcacaaacaacaattgcttgaattttgatgctgcgggagattcgcctgagagaactttagcaatggttctgatggtgttttagagtagtccaccaacacaaaatttttgaggtttctttctttgccttctgcactaatgcataaaaaaaaccaccaaaattactcaaaaatccattcatgttcagaccatcatagagagaaagctagttacttccgttcacaaggtagaaaacagaggacaaaataaccctaatttggttaaagtttatattgtatcttaattacacagtcgcaaggggacccttggaagtgaacaagaaccatgctggaatatcatagtcttccttcctcaagacgatcggcatatggttaagaagcaatgagtccttagtttaactatgcaagtaagaaagagtgtcttgttggtttaatgtctagctaagcaaagttgctaggagttgttgttgacgtctaaagtgatgtctagctagtactagtagttgctaagtctagagtgcaagtaattgagtggaatcaagtagtataagtatgtgttgtgtgtaagaaccatctc

SEQ ID NO: 13858 - DNA, 222 bp, Arabidopsis thaliana landsberg
gtatgagtttctaacgactgagttaagttattattcgtcggagcacaagtgaccaataatttatgtttttgtaaccacaagtgaacaaagttattatgacttgaaattgtcaaacaaatttattaattttgtaaccacaactgaacgtccattcttacttgtttgccaaatgaagattggaatggtcaaaacaacagtttctttttataccaccattcattc

SEQ ID NO: 13859 - DNA, 674 bp, Arabidopsis thaliana landsberg
tccgttcaggtctacttctctctcactacgctgggatttcactttaagacctgagaacccatcagtatctgcagttgatcaaacaaaaaaagttggatccgagtgtaagcctgagaaatcttctttttctccacccacaataaacattggtgctcatgatttggcatggttgatcagattctggaacatgaattaccttcctccttacaaactacgcacgttttcccggtggcctcgctttggagttccaagaatcccaagatcaggaaatttgtccctagacagagtgatgacggaatataatctccgtttagatgttacacctatttgtatcaagcatatgacactggattctaataatcctgccaaaggcttgacatttgatatgaccaagctaaagtatgaaatctgcttcagccgtggcaaccaggactttacttttgaatgcaagcgtgagactcttgatccagtgtaccagggaatagacctccatttgcctaaagcctttttgagaagggatcagcattgctcaaagccagctcagatgagtcgaacaagttcactatctggatcaactgatagagttacttctgataatgggacttctaccagtgatggcactgagaagcatcctgacgatggatttttgttttcttctgattatttcacaatca

SEQ ID NO: 13860 - DNA, 281 bp, Arabidopsis thaliana landsberg
ggaaccccagaaatggaaagaagttagctgcgtctggattcccgacagcttccatgacaccaatcaccgtgtcttgaaacccaccggatttattcgagtcgtagttaccgagatcgacagaaaacagaatgtttgatatgatattaagagcagtgatgaaggtagcacgagatatatcaacagcttcttctctctcgctgctttcactcatgaagctcacgagttccttcaccttgttctccctcaacgttttcgtggcttcgatacgctgaggcgagaag

SEQ ID NO: 13861 - DNA, 651 bp, Arabidopsis thaliana landsberg
ctatgaactgttgtgtcttaactgtgatattgtgttgtatcttaattgttaaatattttggtttttaccgattaaatttatcaaactttttttgttttcttttgaggtatctatggaggaaacattgatttggacattgatatggactctacagctgcaacatctcagatggtgagtaaggtaatgcattacattgacattagttgacttttgtatttaaattaggtaaaacttgacttgtattgattgtagtgtgtctgttttgtgataaatgtttgtgtgtgtattcaattgatagcttattgtctatttagaggttgattataataggtaagacttgacttacattgacatcattcttaatgtcaatgagttcaatgcttatatgtttttcattaggtaaaaaaataagttttaacattgaatgcttaaacctacaactagaacttaactcaactaaccacaactacaacttaaaatagtcaaagacttaaacctaaccttttatatatcccaagtaaaatcgctgcttaagccacacctttctcctctttattttctaacatcctcctttaaaagtcattgaaactctttcatccttctttaaaagtcaattgaactctttcatccttcttaatgaattcttatgct

SEQ ID NO: 13862 - DNA, 383 bp, Arabidopsis thaliana landsberg
aagagtcatggccacggcgtttcacgagctgcttctgtgcctccgacaatccttttatcacttcctcatcttccggtgtctcttttctcaatatctcgtaatctccaaccgccgattcccaattcccaagctgcaaccaaccatacacacacaaaaacatattatatttacaacccccagtttatactatatttacgattttgccacaattaaattaccttagcgttacaatcggctcttctgagtcgagccttggtgtagccaggacggacggctagtgccgctgatgtatcctcaacggctctatcgaactggcccattttggataggcaagccgctctgttacatagcaagactgagtttcttgagtcgtggtctaaccc

SEQ ID NO: 13863 - DNA, 766 bp, Arabidopsis thaliana landsberg
aacgaactgtcttatgttttgttatgtttctcagattcttctgattacgtctgcatccaaaactctaccattaacgtggggtatgacgcgatttccctcaaaagcggttgggatgaatatggaattgcctattctcgtcccactgaaaatgttcatataagaaatgtgtaccttcgaggagcttctggttcctctatctcctttggcagtgaaatgtctggtggaatatctgatgtcgtggttgataacgctcatatacactactcgttaaccggcattgcctttagaaccacaaaaggcagaggtggttatatcaaagagatcgatatttcaaacatcgatatgttgagaataggtactgccattgttgctaatggtagctttggatctcaccctgatgataaatatgatgtgaatgctctcccacttgtgagtcacatcagattaagcaacatttctggagagaacattggcattgcggggaaattgtttgggatcaaagaatctccatttagctcagtgactttgtcgaatgtttctttgtcgatgagctcaggttcttctgtttcttggcaatgctcctacgtttacgggtcctcggagtcagtcattcctgaaccgtgtcccgagctgaagagagatgctgatgcttacggtagagctgcagtctagtgaaacagactgcaaaagaaaaaagaaaaaaaaagcaagaaacatttcttgggattctttgataggattcaattcatcaatcatttcatatttt

SEQ ID NO: 13864 - DNA, 771 bp, Arabidopsis thaliana landsberg
atttaaacacatataccctagcatcaaataaaaacttagacccagtgaaaaccttaattgttggcgctatggaccggctctaatgatatatgtctcaatatacaaaattttgatgggtaaggtcacttgccattcacaaatttaaggagcacataattatatatataaaggatacacaaagttatatatgtagaacatacacacaattttttttgtatatgtaaaaaggattaaaaaaattatatatgtcaaaagggtataaaagaaaaattatttgtaaaaaacataaattatatcgtttaaatttgtcccaaatcatcttaaatgtatgagccgacactatgctaaaataccaatttatagttcatgccaaataattaaaatcataattcacatgcacataaaaactagcaaatagtattttattattagaattgatgatagtttatagaaagaaaaccaagtatagcaatcaacaatcatagacgcactggcagaacttttgccaacacgtgccttttccattcttgtaagccttaagacactcagcggcacaccagtttgcttcacatacttctggaaatgttatttcaaaatagttaacacagtttactccatgcgtctccttagtcgccattcctaaacacatagaacattactcaacttgttataataaaaaagcgacgaataaaagaaaaatatgaaataaaagagaagacacatgaaaatgcgtaatatgaattcatattttaaattattaatcatataata

SEQ ID NO: 13865 - DNA, 909 bp, Arabidopsis thaliana landsberg
agtcaaaggattacaccagcttttttaaatctccggattttattgataagaaactaaaacaacttaaacacggtcttgtcgcggaacgtagttccgtcaatatcatccctcatttgattgcaattcaaacaatagttacaaaattctatttaagtcaaatcaaacagaaataacacaaatctatttaaggcaaatcaacaaaaaaaatagcatatgtactatatatagagacaaaagctgaatataaaaaccccttcgtccctattactacaggcaaacacatctcgtatcgatcaaacaataaaaaagaaatctttgaagagaaaaatgacgggaaacatgtataagatgatgatgttgatggcattgataatgatggcatgtggtttacaagcatgcaatgcaacgaatgttgatgaaagcaagccagatccaaaacttgagtgcttcaaaaactgttccataagttgtggcaaacaaaacaaaccttgttacgaagattgtttgacgaaatgtggtctcccacaacgtccttctacatcaacaccagcatcttcctccaccacggcataataagtttccatttttgcgaaattgtgtcttttggtttatacgaaattctatcttaatattgatgtgctaaggatgtatttcaattttctgtttatactgaacaacaaactttgattatttataaaaatatatttatttattttcttcccgcacttgttttaagatctttgtaggaagctctcctatagagagagctaatccggcaccaagtctcttggcataagattctattataatgacatagttacttctgtccaaacacatgtgatccgaattcacatataacagatagaaaacgtacaaaaatgaaaaataaaagtagtgtaaggtggactg

SEQ ID NO: 13866 - DNA, 307 bp, Arabidopsis thaliana landsberg
tacaggtccaaaaagtgccagcaactcccatggaggccctcaaatctcctcttatgggtatttttgagaaacgtcgagctggaaagtttttcagctatgttcaagaatacgacgagaaggacccaaaaacacatgatggaatggatttgaggagagttacaactaaggatttgattgcgtaagctgatgttctcttgtcttttgcattatggtgttgtcaatatttggtttagactattctgctgctaactatcaatttaacactttggcaggaaattcggtcttaaagaagatactattgacttta

SEQ ID NO: 13867 - DNA, 742 bp, Arabidopsis thaliana landsberg
aatgcacttgtttctttgttttcctggttatgtgtatatcagaaattcgtagtgaataacgagttttctacggtgcggatgtatcttagttgtttactgcattctttcctgagtaacgttacgaacactttcttgaactaaagtcagttgaaattacctcaatcttgtatgtaactcataatgtagtttacggaggtagtcaactttctagctggcatgtttacgaatgttttagtcaactaaagtcagttgattcattttttagctggcatgtttacggaggtagtcaactttggtgaaagttggagacttgtgaattaaaaacattagtctgtgggctacagatctatcaaggaaaaggaagttgtggagtatcaacggcttctcatggaagaagaagaaaaagagttaaaggggcagctacttccagtatagccttacatccataaagggttagagttaaacagtctttacatgaagttcgatctcaaaaaaaacaggacactggtgtatatgaccttttgaccataacaggtctatcatccagcataactttagtaagaaattggttgttgaagaagaatctgagcttctctacaaagttgtatcgttggggacatttgaaagagtagaaccagaatggatgagagaagttgtgatgtttttagcacaagcatgtgtcctgtcttcttcgaaagagttttacgagtcattaaagtatgaatatttctccttctcaatg

SEQ ID NO: 13868 - DNA, 581 bp, Arabidopsis thaliana landsberg
  unsure (1)..(581): unsure at all n locations
acacgactgatggacgtgatggcgttttcgttatggtacatgatctacgatctaatatgttgtcatttcgatcaagtgtttagcattgataacgcggttcatcatttcgttagcattcttggttttatagctggacttgcctaccaaaaggtatttttattgtttttgtcttgaaatttatgaatactattagaagatttatcatttattaaattttggtatcatttattgttttgaagtctggatctgagatcgtggctacactttgggtagcagagatatcaagtccttttttccaccttagggagattctcaaagagattggatacaaagacaccaaactcaatctagccgccgatgtgagtatacatatatcatctttttgtgtgatctaaacaagttttaaatggatagatattaaaccatgttaatgtagtctttactccatcatcaactcctagttaaatgcanatagaacgattgtatattcgtttagaacatggaataatgctagatgtaactctacacaatcatcgagtattttcacttaaactgtctacactaggtcactangtcgatga

SEQ ID NO: 13869 - DNA, 452 bp, Arabidopsis thaliana landsberg
tatatatatatatatatatcttttggtcttgtcttagttcctgatttagtattggcttcattcaggtgaaaccctaatgagaattaaaaaaacaagcagttttaaactcttgatcaaatccaacctttccctcataaagtgtcgaatttggatgaggatgatttatgtttcgagaaggaaacatgtttggaaatagctatagaagttgttagaaactaatgaccttatgatcttttccaaacaggagaaattgctgagagaagagaaccaggttctggctagccaggtaacattgaccacattatcttctgctcttgaagctaattaatcactttatacgtccccgttttagagagatacacttatccacgtccatgaaaactaaaagttgaaggactttgatggatactagacaattatagtgaaaccctaaatatgtgataagtgataac

SEQ ID NO: 13870 - DNA, 576 bp, Arabidopsis thaliana landsberg
caaagcaataccaggaaaaaaaaaagagtcagcaaaagctagccctctggtgtaacaaaccatataggggaaactgtataaggtgaatgaataattaggaaatcagagctatgcagtccaacttcatatgattgattacacaattcgattacatatctcaaagcttcaagcataaataaatctacggcagaagcataaatttttgagactacagtacaggtaaatatgattcacttagatatgaaatcaaactgagataaaaaaaaaaatccaaaacacaaaagaaacgcataaagtgttgaaccttcacccaaattcgtaataactaatctgaaaagacacactgaatccaatgactttctccattaattgtcaaatcactgataaaccataaaccattgaattgtgtataattatgatcatcaaattgagtaaatcatagatcaaaatggtttatccattaaaaaagttcgtgtgtgtggttggcttacctcatcgattacttagaattcaatcagaacataacagtgtgttttgcgaagaaagattccatgaagtgagcagtgagatactgtt

SEQ ID NO: 13871 - DNA, 739 bp, Arabidopsis thaliana landsberg
attcatttcgagagtttcaacgttgaaacatgatgttttatatatagcagaagatggtgtttcaaaattccttatcgatcatgggataaactggctagcagggctggaatagatttacatctttccctggaaatttgcaaaaaatcacattttaaggatctgatgtagcaaacagatattgcagaaaacaatcaaaaagcaagagaatgaacctgttcgtaatgtgatacagtacggctatgttcatggtttaaagattctcctgcgggactcataatgtccatcccatggcttccggcgtaataaagttcactcaaattaacaaagctcatacacgtagatgaagcaaaatgtcctattattacattagatcacacatgaagatgttcttggtgaagaaaatgaatcatatagaaagattaccttatcccggcttcttccactaatgatcgcggtcgggaaatacttggcaacattttgcactgcactacgcatctaagcatgtaaaaaggcgtgaaccatataactcattatgaggatgaatcacagacttgatctgctctagcaattgaatctaatagaggaaagttaaaaacttacagcacttgacatgtatgcacaatcaggttcctcaacaataggcgaaagtgtcccgacataaatcaagaaacaatgctattcttttgccttttgcaaacctcatgattttctcaaaggagggtagagctgatggatactt

SEQ ID NO: 13872 - DNA, 945 bp, Arabidopsis thaliana landsberg
aagattttggtttgtatgtatctcgaaaacaaccttcatgctcaagttgcataatcttatttaataataatgatggcataccttctacgagggaagttaccgcagttgctttaagaagcaatgattcacatgtttgttatgttggcaaatggttgttgtattcatgatcgagctggatgggatcaatgagggtaaagttttacttgctaaggagattgtgtaacatctaaaccacaaataattgaataaaagtattcaaagtaaaatacaagagtattaaaagtaaaacataatgcaatacagtttttttatggttctacaccaacttcaatattggtatatgtgtctttttcctcgaataaaatgacagaaccatccttattggtcatcaaaataagggatgtctttaaaaatgagggtgtctttaatatgtgaacaatagaaatcaaatggtctataatttttttggaaaaacacaaaatctctcatgttcacacattaaaggcacccttatctgaaaacaaacttttattaactcaatgataatgggtgttttacaatgaactcgagacttagcttttataggctcataaacaacagtataaagaagctaattgagaaaaataatcaaaaattataaagaatatggtcattggagctttgatgatgaaatcagccaaataagaaaaggcttgtggtttgtatcttgggaccttgggaaagaaagtacgactacttggaacattctgggatgtgtggagtgtcttcaaaatgcagcagatttggtagataaaaagtcgttgatggttaaaaattcttatagtgtgaatgcatctagaaaagaaaaatagaattgtgaaaggatcaagcttagaaataattactgctgcatgggaagacttctcctatatgtctaagaatctctcttggtctccaataatagtt

SEQ ID NO: 13873 - DNA, 432 bp, Arabidopsis thaliana landsberg
aaaaagtatttggtatttctcttccttataaaaaatgaatgaaatgattttctttagagtaaaagggtgagaataatgtccgatgaaccaagtattttacttaagaaggaatgattatacaaaggttggaagaatgctgaggatatctttccaatgatgagagtactactttgtctaaatccttaaaaagaataattgttggggagaaaaagaataccaaaactatgaaaatggtcgacttaacatggttttgtatgggaatgagtctaaaaagttcttgaatattaactttattgatgagtcctagcaatgaaagcctattagatatagttgtagaatttggtttaaaatttaggatgatgtgaatgcatgcgaataattacatggtagttatgatttaattagaactgttaagcatatggatttggtttg

SEQ ID NO: 13874 - DNA, 915 bp, Arabidopsis thaliana landsberg
ttagtctccaacttttacttgttgatttcttttcctttgattcatatcacctatcgataaacctttcaacttcgaagcctctgtttcagatactacatgctctttttcctcaggacatggaatcgctttgggaactcgagtttcatcaaaagtttcgattttctcgcgggcaatcgcgtttttgtctttgtcggtgttattagagcgcgtgaaaacacgcgccgccacgagctctgttaagagaagagcgaatgcagagagagtgattcctaaagtgagcttcttcttcgtgctcaaggcgagcaacgctactatcaaaaccttaaacgccatcaaaacgacctgaccgctaccgccgaaaacgctatttttaatcgcgttcttattcaacgccgctgatttacctttaacgcaattaactttctcgaccttacttcgaacggttttaatcctcgagggcttttcaaaaatcgtatcttgattactcaacgaagaagcgtttggagcggttcgaatctggcgttcgattcgttggaagcgtttagatggagatttttttagacgatcgcgattcttgaagaagagatcgatcagagaagttggaaagccagtttcaacgaacggtgattgttgaaactcagaaatgaatcttaagattcgactcgattttggttttttccatggtagagaagacatggcgattatacggaagtgataataaacctaaaaaaggagagacctttgagttgtcttgagagaattagggttagggtttttgttggaagagagattgatgaagtttctgagtgacaaaggtcgaagcattttaaatatataggagtgaagaagaaggagcgcagaaagtgaaggtgagcgatcactttgtttttgtttagtgttgttttaaaaacacga

SEQ ID NO: 13875 - DNA, 663 bp, Arabidopsis thaliana landsberg
aaaatactaaaccatatgcctatattactaaatgactagtatggcattttatatttatgaatcataaaaatatttaatattcaatctaatcacaatattattataatgcatgtgaactaatacaatgttcgacaaatagacttgttagaaatatagactataaccgagtcctttttttttgttttctcgtaagtaatataacagacttattttaaaaaaacaaacaatagacttatttaagttatatagctgacaacgagaaaataatagtttgatatatggactataatcgagtcttttattattgttgttttattttataagaccaacaatcgagtcttttcttggagtattcatttcttttatttacaaatatgtcatgctgcctgcacataattattttattatagaaattcacaataagtagaatcacatatgtacatacgtatttgatacatgtaaacgacaaacacatactataaaaaaaaattattgtacaagacgatcatatattaccaagaaaaaaagatgaatcacttaaaattttaaatttacacaattgagattagagaaggactatgatacagtcttttaatttatatattccgatatcagttgtactaccgaattagcgcatttataaacattcaaatgatagtaatc

SEQ ID NO: 13876 - DNA, 475 bp, Arabidopsis thaliana landsberg
caaaaaccattagatgattactaatgtactggaatttgtatatctcaatttttttaagtcattcaaggcactaggggggaaggattcatggcactattggagaatgctttattatcaaatttggctcattttatattgacaatggaggccagtttctatcactggcaaacttccttgcatatcacggtatcaaccattacaaaacaccaccacacactccgaagcataatggtttttctgaaagaaagcatcgtcatatcctagagacatgcttgactttacttattcacgctttcatgcccgacaaagaccatgcttaaacaagttctgcatgcatgtatcgacgagctggggcagtttcttctcagtgtagggtttagtcttatctccgcaaggtccagatttaaagatagtgattaccaaagctaaaccactgacgcagattcatcttctctttgacaatacttgactcaca

SEQ ID NO: 13877 - DNA, 518 bp, Arabidopsis thaliana landsberg
  unsure (1)..(518): unsure at all n locations
tacgttgttgtatgtgtaaatggtttgtttctcgagcttccatttcataattcctcatttcccggatctctcccatctaaaaataacccgacccatttacgcgacccaaaccggatcaacccgcaatggataagccaagcttcgtaatccaatccaaagaagcagaatccgccgcgaaacaactcggcgtttccgtcattcagctcctcccgtcgctagtcaaaccagcacaatcctacgctcgaactccgatttcgaaattcaacgtcgcagtcgtcggactcggatcatcaggtcggatcttcttaggcgtcaatgtcgaattcccaaatctccctctccaccactcaatccacgccgaacagttcctcgtcaccaatctcacactcaacggtgaacgtcacctcaatttcttcgccgtctccgccgcaccatgtggccattgccgtcaatttcttcaagaaattcgcgacgcacctganataaaaattctatcaccgatccaacaaactccgcga

SEQ ID NO: 13878 - DNA, 670 bp, Arabidopsis thaliana landsberg
atgcatcattttataacttcttctttccctgtttatcattaacatttcttaattcaattgcgctctcttattcataggtttaatttctcgaccggttacaaatagaatctaacttttcaagtgtgttccaacttcgggagctaggtcagatatatggacatcaatcgaaaaccaacgttttcgagctggagaagacttagaacataaaacacgtaatttagaaacgaatcactgtccaagcatctatgatccaatagtagggaaagttttgttaaaaactgaaattcctagatctgagttcaatcctctctgtaaacaaaaattacatttgtttggaaagtttgtcaattgatttatttggtagtcagaaatgcaagttgcttgactaccttttaacattagtcgaaagtattctaaactctagatagatagtattatggtccttcaaggaaaagtctaactctaaaacattttgatgcgtttcttccaaaattaatcgaattagccgataaaatttatataaaaaaacaaaccagagtaaaactacaataaaaacatatatccaacagatatttaatacaattaaaatccattaaagattatccaaagttgtttgattagatggtgatagtaaaaacgtgtaacagatttaatagatcaccgaacacga

SEQ ID NO: 13879 - DNA, 580 bp, Arabidopsis thaliana landsberg
  unsure (1)..(580): unsure at all n locations
tgccattgtggcgctgcgtttcaaagatgaaccggtagaacacattgttgatggccttgcgaatgaatggtcggtgtaccatgaacttgccatagatgcggtggagcacggtcttgaggtactcgcgctcacgcggatcctcggagtcaaagaggtcgaggagacggaggacgaaggcgtggtccacataccgcttggcgaccttggtgtcggtgtcgggcgaaacaacgtatcggagaaggagctcatagacgagctggaggtgtggccaggaggggtcgaggtatggctcctcctcctcgtcgggcgcggcgccggggtcgatcgcggcggcggattcgtgcagcgcgggtggcagcgggcggaagatgttggcagagatggcggcgacgaagcgcctcctggacgtggtccgggaagcgcgctgggtgcgttggcgcccgctgcctgagctggagcctgcacgtaatcgacgagctcgaggagagcctggcgtttggctccttctccgtgggtgcttgagcgagtcgaaagtcaaagagcnnnnnnnnnnnnnnnnnnnnnnnnnnnnnnnnnnnnn

SEQ ID NO: 13880 - DNA, 450 bp, Arabidopsis thaliana landsberg
atgagtctacacgatgcttaccagatttccttcgactagttactctgattcttattcaacactcgggcttctagggatggttcgggcgaattctatctgaaaatgctaagaataatggtggcgttcttatgcgtgaaaacgctttagggctgctcaagaaaacacttataagagagacgagcttctaaggaatattcgtataaagtcagagcatctagggaatattcggataaggtcagtttgtccgctcagatacgcagttctactcgaccgaaatatctgtcggcccgctcatgcccgatccaaccccatggacccaaactcggataaacacgctgaccttgagctaaagctcttaaaatccaaaacaaatctcattccctcgactcgaacccacgtatcgcctcagctaggatacggtctacacggaacacttatccgcttgaccga

SEQ ID NO: 13881 - DNA, 473 bp, Arabidopsis thaliana landsberg
acactttatcctctgtcacagcttcagcaatcttttcctttcctttgtcatgtctttaagaacatgcaaacacaagctctgagattctatccttttgtgcttgcttacagtactttggtccctcaggagtcccttttgcaaccaagtggtatgtgtaaacaatccgcttctgcccgattctgtaagcacggcttatagcttgtctttcgactgcaggattccacacaacatccaaaagaatcacccttgatgctcctaccagactgatcccttcagagcaggcttttgttgaagctaagaacactttggccttggattttggatcattgaattcgttgattaatgtttgtctttgtttctgctcgagtttgccgtgcatgtacaacacttcctcccctggattccacttgaaacgagagaccagatgtttcattatcagtttcaatgggtctatgtattggctaaagaccaac

SEQ ID NO: 13882 - DNA, 496 bp, Arabidopsis thaliana landsberg
cattacctcaatcaagaaggcccgagaaactgaatcgaatgcttttgtaatgtccaatttgagaagaacgcggggtgcttctgttggtgaagaaaacaggttgtttgttgcactagcatgaagttgtcctctatgaaccgattcttgatgaaagcagaatgggtttgagtaaccataagctgcagctttccagctagcctgttggacaggatcacaggagctttgtgactagtttagcaaagctgtggacaagactaattggtctgaaatctttcacattttgagccccctccaatctctactaactattaagaagctaacgtagaccacaccgtgcccccgcctccccttatcacgcgtcgtatgcgactctcattgcatgcaagagccgcagatgctgcatgctatcgcgcgtcgcatgcacctgggtagacctgaaacttgggccgggccgggctggatcagcacgagcccatcgtgccttggcgcttaagtc

SEQ ID NO: 13883 - DNA, 424 bp, Arabidopsis thaliana landsberg
gcttatgttctgctggtcaaagacatggatttcctgatcatcatgctcctgtttggagaccgcaccgtggcctacccgaacgtgctgttactgttctaagggcttggctcttcgatcatttcttgcatccgtaagtaacccttctcgccatataaatgcttttgaaagttgttggattcgagtttgaacttggttccatcaattgattaaactaaatgcaaacgtttaattgatcatgaaccaaattgtatatatatgcttgtgaacaatagctttatatgtgtgtgtcagtgtgaataaatatgtgtgtatcgaagtgtatttttacttggaagtatgttttagatgggacatgtcgactgcttgtttgttttccaaacttggagatgtcgtgttgcaagcgtaattatgtgtctatatatat

SEQ ID NO: 13884 - DNA, 1937 bp, Arabidopsis thaliana landsberg
  unsure (1)..(1937): unsure at all n locations
agtatttatcttgagagagtgtatcagggataacaacaccatacatggaaaagccatgatatcttgactaatatataagatagataggccaatccactcataaccatttcccactannnnnnnnnnnnnnnnnnnnnnnnnnnnnnnnnnntggatgtattttttccaaattattttctaacaaaacgacatcgtattatggctcataaaacgacgtcgttttgatttaataaaaaattctaccggaaagttaaatccgtttacgaaaatttcacggcatgcccgaaatgcccccgtttacgaaaattttacggcatgctggaaatgacacagtcaacaaaacttgaccatgttatcaaaaattcaaagaaaactttataagttaaatgacatttcgaaagttcatgtttttttcgtcccaaatttgaaagttagcgtttttttcgacattttttcccatttgcatttgctttgttattttttttaatgtaaaactttttgtaaccaaaaatacaaatcaaaatacaattgttagtgaagttgatatatattgggttacaaagaatttgttgtcttttacagtaatttgatctaaatattgtatacaaaattatttctgataattatagtctgattaccaaacaattatataacatgcgattgacatgaaatatatgttgttgtttattctgacttaaattatgtagtgtaattgacatcaatattttttcttatataataaataacttggttttacgaaacagtgtaattgaaaagcttgcgttttacgaaatcaatgaatagtgaggcttcattggcgcgtctctccaacatgttgctcctttcaatctgacggaaaaaaagaaaataacctgtgacaaccaaaaaccccaccgtgatcaaccgtgacaacatcggactcaacgaccattgcatcttcctcttcacggctatttccatcgccgtgcaaaccccatgtaatacaaagaaccaagtaacttccaaagtaggcttctcacggtttatgtagaagtataccagctcgtgaatcaaaccagaaacgaaaaatgtcgtcatacaccccatgaaccttgcccaatcagacctcatttggtgctggcataccgaacgcaccggagagtagacccctggccggagaatcgccgggaccatgaggttccaccggcgaccccaaaagtcttgaagagaggtggataagtatggttcattgaaatgcggctcgaggtcgcaccaaagagagatactaagcagaactttcaatggagctaagagaatctcatactccaagtatatatgcagagaatagagaaccaatagcacagtcggagacatatattgtttgtattcataaatatgcaacaacacaccaaagaaggcaagtttaactgcgaaaacccatttaggcaattgtttttgaggtttagggttttgttgaagcttgatggggaagcaagtgaagcagacgaatcggaagagatttgagggaagtgggaaaagtggaccttggtcgaagcagaagaggattagtttgaaattggcaagccatgagaggaaaaatgctgtggaaccagaaaagtgaacagaggaaacaaacagaggaagaacaagaaacagaacacaaacaggaagaacagatagtaatcgaaaaacaccagatttgattcttgttgatgtgtagtaacagtaagatatggagattattgcataaacccatactttgattaagctcatgagttcttcctccatctctcgagatcttcttttttcttcccaatcaccgaggctttgactaatatgagtttttcaaagtatttatataatcgaatgaatcaaaaacacgttccaaatgttactgaatgtgattatcactatttagttttctttacattaatgattaatcatttggtcaacgagta

SEQ ID NO: 13885 - DNA, 546 bp, Arabidopsis thaliana landsberg
atggtaatcgtttttgaaaatgtaaaggagatcaacttcactgaagattttcatttcatccatcgcttaatttcgattgaaagagatgactctcaagagaatagcttcaagtaaccaacaagacagattatccaatctaccagatgtgcttctgattatgataatcacttgcttgtcgtttaaggaatgtataaggaccagtgtactcgctaagaggtggaggtatctatgtcgggagacaagaaacatttcttttaaggaatccgagtacgtggaccactttgtctccgacaaaagatccaaaagggtttcgtttgctgcttatatgtgtcaatgggtctctagatatcacggtcgttacattgaaaccctcgagatttatttctccattccatcggattttgtggcagcggtcgagtcactgatcgaattcgcggtctcaagacaagtcaagaacctagttcttgatttctcagacccttcttggataagcactaggtgtgcgtcgaggtatgactatgtttgtgtgcaattgcccgtatgcgt

SEQ ID NO: 13886 - DNA, 508 bp, Arabidopsis thaliana landsberg
tgaataatgatgaaaaaatcgaagaggatgtcttggaattttgagactatccacaaccattaggaccgacaacatgggtttgttgaacaaaactaatgtccacacaaaatatgaatctcccgagcagagtaagaatagcccatttttcattgttttgtttcctctctataaataattagttatcacttaattaatattaatatcagttttttggtccttcaagattttaaggaagagaggctaaaatggtgtggtgaaaggaaggtatgtaaatcagacactatgggtcttgttttagttattaaggcaatggtcttgttttagtaactaatcttactcctaatacacatgattatatggtggatattttaacttttgagcggaataagttagagtccaaattagcaattgtccaaagagttctcaatggagaaataaacatcagtcccgatcttgatgtggtccttgaaaagaatggttataaaatatggcagacagtgactcatca

SEQ ID NO: 13887 - DNA, 601 bp, Arabidopsis thaliana landsberg
gatatctgcgagagattgaggataaattagggtttaaattttgaaaagtcgatcaaataggttatctgcgagagatttagatttaggctgacagaaaatcggagaggtttggggttttttcgggttgaggtcaccggaaaggaaaaaaaaaatatttctcttttactaggttgtgtgaaagaataattcatttggaggatttgagatttttttaatttctatttgaattttgtaaataaattaggaaattttaatttttattaattatacatgaaactgaggataaattagggtttaaattttgaaaaacacatgtttgaccaatctactaaaataaggaatagatgggcaaattttattgtagatatcctttatacaatttttccaaaaatcaattctgcaagaaagtattcatggcttacttttttaaacagtctaaccaagatccatcaataactagttcaaagacaatccgataaaataaattccctcatatattgaagcaataagagcattgtataacagcgaagaaactgacttactacatgatataatttacgcagatcattttgtctgcccgttgatggatcaaagaatataa

SEQ ID NO: 13888 - DNA, 684 bp, Arabidopsis thaliana landsberg
aatacttttctctgacttgggaaagtaaggatacattaaatgaataattataatttgaaaaagacaagaggaggaagaagaagaagaatcagatagagacgaaaaaaggagtaataatctttttttttctttttcttggagttggagtgggtcttttctctcacacaggtctctctcttctcaactcttcccatgttgtttcgcttcttctgtaagatttctgtaagttagttccctcagaaaattctccattctccattttcctgcaatccaatatctttatctccaaagataatggcccagcagatctcagatatatagaagatccctcttcttttggtccactttcccttgtttacattttcccgagaaaacaaaaagaaagcttttttgcttttttttctttcttctctgctttcccagctttcaagcttctgaagtaaaagaaagaagctttgtgttaaaatctcagaattttgattattcttcggattgaaaaaaactgttccttttccttaaggtagatcctttcactcgttttgatttctgggtttcttcatcggcagattattttctgcttctttctttaaatactcatttaaaatctatactttctttcattactatgttcttctaggaatctagctcaaagtttcatcttttgcttccctcttggtctttaat

SEQ ID NO: 13889 - DNA, 540 bp, Arabidopsis thaliana landsberg
tggggaaggtggattggtctttctacggcatcgttttccacggcgacaatagatccatacaaattcattaccgatggagataaatgtgtgtttggcatagatgtcttcgttgctcaacgcaacaaatcagaagttttctcctatgatgaaaacataagcaaccctgttttcacttggagcctccccaatttctctaccctcactctcgactcttacacatccgacccgttttcttctggagacagaaactggtgactctctctcactctctacatgtatgggcacaaatacattttgttatatatctatgtgttagtaatttatatgatggttttaattagggttttgaaagtatatccaaatggagatggtgttggaaaggataattctttgtcactctacttgttgagtgagtctaatgaaaagaattacgttcgagccacactacgagttctaaaccaaatcggatccgacaatgtggagaagcccggtgagtggtttagtatgttctttgatatactcgatcatttaaagagagga

SEQ ID NO: 13890 - DNA, 502 bp, Arabidopsis thaliana landsberg
tgtgttatgggtggattcttgcaaatgtaagtatgttcctctatattattatctcgcaaattagtgttgtaatgccatgaagaggttctgattacgggggggttttgggaaaagaaaagaagaaaatcacgttataaaggaaaatgtttgtacctaaccacatattagtatttttgtaaacaatatttctcagcattggattgtttgaggcaatctaataagattgtcgacaaaaaaaaaactacaacgaagattgagcaaaaagaaattatgaagaaaaatgcaatcaaagaaaagtgaaaattgtcacaatataagaattaacaattcactatttttgtattagaatcataactctataaattatgatgcttgctggagatttactcatagacgaaaataatagcaaaatagaatcacaaaaagagaattaattgatccacaaaaatagcaccaaaaagtattattattttttttccaaaaatagcacctcatttgaaaa

SEQ ID NO: 13891 - DNA, 687 bp, Arabidopsis thaliana landsberg
  unsure (1)..(687): unsure at all n locations
attttcagtttatgtgtgtttaccctaggtttttcatttataatgtaattgtagcagtcttttctatgattatcaaagcatagagttaaagctagagattgagataacttgtagctcctgaatttctttgatcttagtgaaatccgcattggaagagaagtgaacatagttcttttgagtgaaccactataaatcttgtatatatttttttttgctttagtttcgtgtttaaggaggaattagatccataattcctaacaagtnnnnnnnnnnnnnnnnnnnnnnnnnnnnnnnnnnnnnnnntgggaagcgaagatggttcaacacatgaacgacaagttcgatggtactagttattcgttttgaaggatgcaaattaaagattatctgtatggtaaaaaaattgcatccaccgatgggaaagaagctagagacgatgagtcaggatgactggaatattcttgatagacaagttttggatgttattaggttaacaatatcgaagaatatcccgcacaatgtcgcgaaagagaagtctccagaagggttgatgaaagttctctcggatatatataagaaaccttctaccaacaatacggtaatttatcatgaagaaacaatgtcaattgaacatggaaaatggtattcctgttgcataggcatgaccaaaatatagccgtaagtgta

SEQ ID NO: 13892 - DNA, 488 bp, Arabidopsis thaliana landsberg
ggaactccggcgacaccacctgctcctagcaactcgaatccgtcgtatgcagcttgaagaccgttttcgacgtgtccaaataccccaactcacttgtctgttgcggcggcggaggcataaccatctccgtcaccttcggcttctcctccatgatttcgtcgccgtaaacaaccggaggcggtggtccccgcctctcggtagctccttttttgttgtaaatccggcagagaacccaatcatccagctgggcaaaaatcaacaccgttgattcaatttaccagaaacagaacaagagattgaaacaaagatgtgaatcagatctgattccataccctgagactattcttcttcttgcgaacggaccggtcaacgtcggcgagacggtactcgtgcatgatccaattggttttctctccctttggagctttgccggcgtaaaaaacaagagctttcttaattccgaccggtttaggtagtccgatcggttt

SEQ ID NO: 13893 - DNA, 478 bp, Arabidopsis thaliana landsberg
aaaaaaagagtaactagggtagaaaaaataatcgaaaacataattcaaaataaaatataattatgaatctagaatttgaagtctattttaaaacctctataaattaatattcgataaattaataacctctataaattaataaattcttccagtcccgagttgggaccagtgtataaatgtatacaaatcgataaattaataagataataatttttttgaaaatcctatgtaaatatatggtctcatcaatattatgtaaaacttagtaaaatatgactttagtattatttttcttcaatttatattaattctgtgtaaaattcaattctaattattttactacgtataaaaaagtttttttttgttttaaacctaataaaggttttctacttgtaattgatttttagaaaaattattgagtgtatagagaactaccttttagatcaaatttgtgtaaaaaatacaaatttgtaaaata

SEQ ID NO: 13894 - DNA, 891 bp, Arabidopsis thaliana landsberg
  unsure (1)..(891): unsure at all n locations
tattacaatgccgagatatgttattgacgattgtttgtattactaccaacaatggtataacataaagagacgctataatgttttaaaaggatcaaccgatcataggagcatctgcaacttggccgttggaacctaaataaacaaagaccctgttgcagcaaaagttttcaatccgcttttctccatatcgaaggacaatcgctaacacattaggattttctctttcgatcgtcattttcgccaattgtccatttttcccaaccagttctggccacctatacttctttcctggaaaattatttgttttaaaaatagtaatatagtattattaaaaatgaaagaaattgagaatttgaagatttcacttcaacaaaaaaaaaagaatggaaagcatacctatagcacaacactctggatcttcgcaaggagccagaccaacatggaggatagcgagacatctcttcttatttctctttcaactaacacaacttgattgctttttattttacttgagctctgtctaatgattttctggttatatatatatacaattgttatatgcttcatatggaaacaaatttatgtactttgaataagaaaattaatcctttatttgatttcctcttttttttttttaattttcgtattcaaactacaaccttactgtatttgtttccatataaaaacacttaccaaaaaaccgttaattagccattattgaaaattgtttaacaagaagaaagataaatcacttaatttattatcaatagattatttttttactgcacgttattactgtgtggctttctggttcagttccaaaacactctttcaccagtggctttgttgnttggaccgatcttctactttcttggctcgatcatggaatat

SEQ ID NO: 13895 - DNA, 496 bp, Arabidopsis thaliana landsberg
ctaatgaaggataaggtatctataaatccagtggtttaattagtaatatattaaaaagaaaagtatgaagaatgttattcgaatatatgatactaaagtgataaatgattgtcttagcaaatttaaatcatactatttaggttatatgcgctttactatttcttttgattaattaactaactacttttttaaaattaagtaaatagcttgaagtagaagaatgtgagactacatttacattgatcataatcttagtgatttcatgcaaagactaaagctgaatggttatatcagtccaaacgaacaaaaccgtctacaaaccggattgctttttatttattatttatgaactattgttcgtaataatgagaatctaaaaaattaaaagaaaatcactgcagcctaattgaagactgtcaattaagtctgcagccgtttgttgtccgctttaaaaatactatatactggacagctgacggattagcccacactaatc

SEQ ID NO: 13896 - DNA, 1628 bp, Arabidopsis thaliana landsberg
gaagagtttctgagggattttaaaagatttgacaccgtcgagtatttctcagatcatcactatgcttcaaagggtaaatcttcaaagcaggtgatgatatatttattctctctgttgttgctcccttaatctctctttcatatcaccaactttaatgttacctgcggcttctctttttatcttatcagcactcgaagaattgggtgaaaaaggttcaagcagattgcaagattcttgagaatgatttgccaggttggtgtatacacttatgcagatcaatgcttgcatcatttgttctttaaatttaactatttttgccaacagaggcaatatctgtcagagcctgtgaatcaagaatggatcttttgagagctgtaattattggagctgagggaactccttaccatgacggtcttttcttcttcgatattcagttcccagatacttatccttcagtgccaccggtatgtcctcaggaacaacttcgtacttgttctgtttttcttacttcgaaaccttaatgactccggaagttcaatttgttgttgacagaatgttcattaccattctggtgggcttagaatcaacccgaatctatacaattgtgggaaagtatgcttgagtcttctcggtacctgggcaggtagcgcgagggagaaatggctcccaaatgagtcgacaatgttacagcttcttgtctcaatccaagcactcatcttgaatgaaaaaccatactttaacgaacctggctacgtacagagcgcggggactgcatcaggcgagtccaagtctaaagtttacagtgagaacgtatttctattgtcgttaaagactatggtttacagcataagaagaccaccccaggtaaataatttgtcaaatcctcatacgtttcctgaataggctgaaatcttcttgttttccaagctgaattgggttgttctttcctgaaacttgttgtgatgaaatgtgcagcattttgaagagtatgttcaaaaccattactttgtccggtctcacgacattgtgaaagcatgcaatgcttataaagctggagctccgcttggatcgatggttaaaggcggagtccaagaccttgaagaagctagacagagcggctccaagaagtttaagaccgatgtagctagctttatgcagacagtggttgatgaattcgtcaaactaggagtcaaggagcttgcagaaaaaccagaaccgcctatgagcaatgctaacacagagaatcagagcaagaaaaaaacccgtaagagaagcagatcatcgaggtgagccaaatccaccaaatgtttcatgcttttcatatcttgaattagagaggaaagacaagtaattctcgtatgtacagttttacttgataaaaattttatgactttctctgtctctcatgtatttttcttattatcatttgtagtgtttgattaggaatggtgattgattgttttttcgagttttaacttaggattttatcattttgtgacaattgttgttttttggcattttggtatagcatcaaagaatttctagcaaatattggaccctgcgtctctcagtagtatcaagttgaagataagagaaaaaagacttggtggtagttatggatctacatg

SEQ ID NO: 13897 - DNA, 635 bp, Arabidopsis thaliana landsberg
tgcgtacctatgtgtcatgggtgcctcatcccatatgataagatctattttttcaatttattctttttgcatcgttcctggccttatatgccatattgaatcttcattgacatccaagggtatcttaaagcgtgaatgtgctgttcttcctgcatgtagtactaatgttgcgatgcctgacaaagcgactgggaggacaattttcttttctgatcgcaacatataaatgatggttgaatagaggtacgttttccctattccacgaggaccatatagaaaaaataattttcccaaaccattttcaactgactccataactgcatcataaacctccttttgttgaacattcaaagtgctgaaaagtttgatgagatctttcttttccttgtgtacattggattgtgactcttgggttaacaggctgttacctagttcattgataacgtctaaatctggtttaggcatatctttgaactcagtgtagtagagtgttcatattggtgcattaccttctctacctcaatcaaagtgtactgctgaagctcagattcttttagtcgtgatcttttaaagtaatattcgaggagctgaggaagaagtaatattaaagtgctgttttttccataacttgtgtg

SEQ ID NO: 13898 - DNA, 589 bp, Arabidopsis thaliana landsberg
cgtgcaaaatgaaggacgtggagtggagctgagcactagaagaagtcggtggacatccgaaggctaggtaaaacaagcgccatgataggagatgttcaccaagcgagtaccctctagcaaacattgacatagtgtggattccaagcaagccccagttctgtgcataacctattatatgttgttttattgcaatattatttgtaggcttcttttgtgcatttaagtgtagttgtttgaaacctagatgcatgaactcaggttcatttatgagatgaatactagtatgttaggtcgagtagctattatgctacttagggttctcagtagaaatcgagtgaattttctagcactcgcgcgaggtcaagaattgactgttttcattttgaaaatgggtttctgattgtttgtggatacagatcattgggggatgcctgcccatggaaagtaattggaataaggattattgtgtggtatcgtgtgtcaagcatttgaacgcattaaacacacgccgagaaatatgacaaattggtaagtctagtacctgattgaacatgcatgtggacatatccccactagctctgaaacaagg

SEQ ID NO: 13899 - DNA, 504 bp, Arabidopsis thaliana landsberg
tttatattgtaatgataatatataggaatttatagtttaatcatgccattagcgctgattttttttactagagatcattttctaattcattaagtattgtttaattagttcttgaatttttcaaagaatatttgtatattgttcagatagttagtaataaactagaatatgtgttaagtgtctttcataacaaaggctaatgttggaagctatataagatcatttgcacttctcaatatgatcttattggggaagttatgaagactgttttgatgttatcatattatttcctttgttttagtagttgaatgtggagtgactttagtttcagttgtaatatctaagttagaaaagttgcttgccatctcactttggtttctccagtgtaacgctgtaatgttttatgtttgtagtatatatcaaaagaacctttttgggacaaaactagaatatgttaagtaggtgacattggtagctactagagttgcttgggtcttcagtacg

SEQ ID NO: 13900 - DNA, 601 bp, Arabidopsis thaliana landsberg
gtaacaatgttccgtgcttggtccgatcacggttttcttttatttatttttgggtccgcaccactacggacataatttgcgactggtacgtaaaaaattgtctaatcaacatacggattgtccgccttaaccactgcaaccactcggacccatgttttatgaaatattaaaggcaagtgaaattaaatcaagaacacgaaccagttgcttgaatgaaaacctgcgtttgtggccacaccctccaaagctttcctccatgtctgaaccttttcctcagttttaccttgacaagtttctttgaaggccttcccaaaatctccggtctgcttctttacttcatttggatcaacttcatagaaaatggtaatcaccgtttgacccgactctttcttcatgatctccaccaattcgacaagacaccaccacgaagaagcgtaattcttggagagcaagacaagagcaatcttagatcctttgatcgcctgtttgagtacaggaccgatgaactctcctctttccatctcgtgatcaacaaaaaagttgattgcttttcttccaaactccttcttgagaatctggctgagaaaggctttgcgtacat

SEQ ID NO: 13901 - DNA, 987 bp, Arabidopsis thaliana landsberg
ggggattgatatatcgcccttaagccaaaaaaacaaaaactatgatatgatataacaaaaaaaaaacatcaaatatatttgaaaaattctttagttttgtacaaatattaagttaaaattctttacatataaattgaagttttttaaattttgtttagtttagtcttttataaaactatattttttttgggaccaaaattatctttctagacatctagtgaaaggcttatagtgattcagactttcgtagttcgcattctactactagaaattgctcttcatctccagcagcaaatccgggaagaacaatcaaaatcgtcatcgcttcatctaactcctatatcttcaacgttttggttgaatggaactgaattctagttatgcattatgcttccatgtttgaggttttttttcatggaatcatatatttaagtatataatcatcgataaatcacctaaaccgtttttattttatgaaatatttacatttttagaaaaaattattttcatgatcgaactatgcatgcaccccaatatgcgcataaacatttaattgctgagttgagatggtcatgatggtcattctctatcttttttttccaaccatgcaggacagtcattgcaaaaattctaaatattagtttagattcttaatcttgtctgaaatacgattttagtggttcacttcaacatgaaagtacttctttttttattcctattcatacataatttatctcatgtattactactctatatgttattataaaacagaaataatgtttaaagaaatctctatatataaagcaattctttcatttattataatttagaataacattttttttttgtaaatattttggaataacatatagagtgagtttggagaaaaattactctataatagagttttagaagaaaaataaatatatatatatataaaatatggttggaaatactctaacatagcttaattatcaaaaatatatg

SEQ ID NO: 13902 - DNA, 403 bp, Arabidopsis thaliana landsberg
ctgcccagttccttattcaggttttcaactacaccattcgactgtttcacggcttcctttgctctactctccgattcaagtcttttagcttgctcatcgttcagctcctttactacttcacttgaccgtttctcgacttcttttgctcttttctccaattcaagtctagcagatttctcttctttcagctgctgctctagcctctcttttgtctctctcagctcagtctccacctatgcaaggaattcataggcatgaccacatgttacacaggaatcattaaacaaaaactctccttcacaaataatctgattatgaagtgacaaaagaaaaagctaggtaaattcatgttatcacattcatgactcaatataacatgtagtaaagaaagaatatgaggaag

SEQ ID NO: 13903 - DNA, 597 bp, Arabidopsis thaliana landsberg
  unsure (1)..(597): unsure at all n locations
aatccttagatcaccgtgatagacaacgccgaaccctccttcaccaagtggtctttgcaagttgtttgtcattggcataacctctgaataactaaaccttttccgtattgtctcgatcgatgtatccgatgtaccagtgggttttacatttgcatgtggcctaattgatgatggtggtagatctgtagagaataaaatttagtacaagaaaaatatatctaaatgaaacccaatgtagcttgatttgatcataacgagcccttgcgtataccttttgcatgattagatgatacatttttccttttaaatacacaaatgagaaccagtactactgctatgaccacgaccaccgaagcaactactgcaataataatcagcaccggaaatttcttcttcggagcacatgagccagataaacatggctttttatcttcatcgaaactatataacaataaaatcaatagagtggtaatttctaatggaaatgtgagttggatgagctatgtcttacaatagcttcagtccctcgttttgtctatcacgaagagctggtggcattgagccatngagatcgttcttggtcaagtttcttaaacc

SEQ ID NO: 13904 - DNA, 561 bp, Arabidopsis thaliana landsberg
gggatctaattgatacatcaaatccatcaaaatttaatttatatttttggtgagattttccttgcattggtcattccatatttatttttttcaagttagaatttgacctctctatataacaacatcatctgtaaacaagtgaaacaaacaaatatattcgtatcaacgacaagcaaaaacagacgtagggggaagttctcacgttgatataactatgatcctcctggatgatttacctttggatcttctcgacatgattctcttcagattataaccccaagctatggcaatgatactatgtacaaacaaatctttcaaatcgtatttaactgacccaagattaggacctcagtatccttcgtgggtcagacccactttgattaacatttggagctctaacaaatctctcatcttctgccaacctttggtctattcatgtgatgatatgtcactaggaaacaaagcatagctcattaacgatcgatgttacattttcggctcatgctccggacttcttctactatacatttggcacattctcatcgtaaatcccttgacaaa

SEQ ID NO: 13905 - DNA, 1017 bp, Arabidopsis thaliana landsberg
gtgccggcttcaagaacttgaatcacaaatggagacattggaagaagagatggagttacttgctcaggtattcgaggcagacattggggctgtctcacgtggtaaagtggtgcaagagcaaagagctatccaagccgaagaaactctaaggaaaacgaggtggaaaaacgctagtgtagcaggaaaactccaggatgaattcaaaagactctctgagcagatggattcaatgtttacatcaaatgagaaaatggctatgaaagcgatgacagaagctaacgaattacgaatgcagaaacgtcaactagaagaaatgatcaaagacgctaatgatgagctccgagcaaaccaagccgagtacgaggcaaagcttcacgagctttctgaaaagctgagtttcaaaaccagtcagatggagagaatgttagagaatcttgatgagaagtccaatgagatagataatcagaagaggcatgaagaagatgttactgcaaatttaaattaagagatcaaaatcctaaaggaagagattgagaatctgaaaaagaaccaagatagtctcatgttacaggcagagcaagcagagaacctgagagttgatttggaaaagactaaaaaatcggttatggaagccgaggcttcttcactacagagagagaacatgaagaaaattgagctagagagcaagatttcactaatgaggaaagagtcagagtcgctagcagcggagttacaagtgataaagctggccaaagatgaaaaagaaacagcaatttcactcttacaaacagagctagaaaccgtaagatctcagtgcgatgatctaaagcattctttatcagagaatgatttggagatggagaaacacaagaagcaagtggcacacgtaaaaagtgagttgaagaagaaagaagaaacaatggctaatcttgagaagaagctaaaggaaagcagaaccgcgattacgaaaaccgcacatagaaacatcatcaacaaaggaagtccagtaggtgctca

SEQ ID NO: 13906 - DNA, 949 bp, Arabidopsis thaliana landsberg
cacaaatctgtttcgcatttaaaaagtccaaaccatatgtccaatggaaaagggaaggatactgttctgtttataaaggaaaaggtaacgctaatgtttatttaccattagcttaacataaaagctttggggtctggaaaatcggatgtcagtatgattcatacttctgagattctgaatttctttagatacatcttctaatacataagtaattgctctgcaatattcttgtttggtaaataccaaattataagcgataaactggatgtccttttaggaccttgcagatatgctagatgatagagccaaatcaatggcagctgttcaagctacggagcttgccaaagagcgtgaaaaattaagagattttcagctatctctacagggtatataatatcacttgtagcttggtgcttcttttgtatccatgttagctagtattctcacttaccttacttccatcagaggagcggaaaaggagtgaatctttcaaggaagaactcgagtctatgaggttagataaaaacaaagtaagtcttggagttagaaaagacacatttattattttcttaggaatcaccatctctaagttacaattttcttattttctgtattgaatctgtttgcagacctccatggagattagcaaaatgcgtagtgaattggatgcaaaattacttgaaatcaaacacctgcagatgaagttgactggtcaggaaagccatgctattggacctggcatggaacatctgaaagaagttaacaaagctctggagaaggaaaacaacgagcttaaggtttattgtgttccatactgctgaatggttgtgcaagcaaaaattgccaacattgtgtatgtctacgttgactttaggaatctggaaccgaatctgatatgctttttcatcacttcatagttgaaacgaagtgagctagaactgagagcgca

SEQ ID NO: 13907 - DNA, 925 bp, Arabidopsis thaliana landsberg
aggttgggagtttcaccagacttgagcaatcaataagatccaattccagtaaattagtgacattcccaatggaagagggaagctccaccaagcttaaacaatttatgagtctcaattcttggagattagtggcagtagagaaatcaggaagctccttcaggtttacacaaaaactcaaatccatccatttgaggtttctaatgggctgtacagaaaaataaaggcagcatgaatatattgtgaacagagagtaaagatcatatggcttcaaacacacacatatacacttttaaacaattggataataataacaatgacttacttcattttcgtcccacagcttctcgagcatgctgtctcgcatgtttattttgacaaggaactccggattaaacttgggaggcaaacatgtcagtggataacgttcccaatgaagtagtctaagttttcgagatatatggctcaaaccttgcggtaagtacaatatgtcgtgacaacgatcaccatatggatggtggaatcttaagaactggagattgcacattctttcaaaggctctttcactaatatttattacgccctcgattacaccagataactcgagatctatgcctataagagttctggtaccctgaaatggatcaaaagaaataagtatactatttgtacaggccaaagacaatgaaggacaaatattaaaacttaccgtatcatcagtgagtacttcacaaatatcttcagtatcaaccaagaactgacgtttcccaggcttatgaatagattgcttacgaacaatgtctaggcctagttgtactagcaaattatgcatctctatatttcccaacgctcacagataagagagatttatctgccaaaatttaaagcccttgcctcacatctacagacttctttgcaagaaatactt

SEQ ID NO: 13908 - DNA, 686 bp, Arabidopsis thaliana landsberg
  unsure (1)..(686): unsure at all n locations
ttcttttagaaggaacaaccgatgtgacaattattttagttttatttttgtatatattgccaaatttgtatttattgttattttgataaaaatagacaatgaaatttataggtagctgtaccacatgagaatgaattggatttgcttaatgctagactcattcataggaggaaaacaatatttacaaatagtaagtaggagatattttgttatacataaacggattataagtttttaaagagtaatatatttttctccttctaaatgagctttattattagagacacatttcaatttcattgtttacaaaaggaatttaaaaagttgacacaagattgtatgtatcacttcgtacattttcttagcctaagattaacacatgtattacattctcggtgcttaaacttgtgtattatacgcaaaagaaaacaaataattctttataaatatatatgaagttaatcttttaaatacatgaattttgttttctaagattttatttcatatgcttagaaaaaagcttatcttttattattttgaaaaaagaaagcatacttatattacttaagtaaaaagattgtacttgaatttttttttatttttttttgatcgacaaggcccgatccataatcacttnctactatatgggataatgcgatttagtagagtcaaactccgatggagaa

SEQ ID NO: 13909 - DNA, 465 bp, Arabidopsis thaliana landsberg
tacacatgtgatgatttggaggaggattggattttgcatacccaaagaagaatactataacatggggaagattgttttggtcatgacacttacagcaatgtgcattctcttgctcaaccaatccccaaccttcaataccccaagcgtggtattacttcttatatgtacttaacttgatattgatacagtgtctcatttttgtagtagtaatgttttcttcatctttcagttttctcgaagtgaaccaggagttacacatgttctagtcactggtggtgcagggtatatcgggtcacatgcagctttacgccttctaaaagattcataccgtgtcaccattgtggtatacatacatctccattgccttacatagattcatgcttctcgtgttgtatctaagtaaagaagtaaatctttgcatgttttggcaggacaatctatctcgagggaacctcggtgcagtca

SEQ ID NO: 13910 - DNA, 1130 bp, Arabidopsis thaliana landsberg
acacaacagacaacaaacttgtcaaccattttatgtgtatcattctcttttgtttatccacaaaccattttgggaaaaagtatgcaagagaatctgaaaaattcatccatgaagcaaacatttgaaccaataataaaagtttgttatcaaattgaatgaacttaagttactaccaaactgaaccagtatttatggtttggttacgttcgattccggttacaattaactgtcggtacaattctggttgaaaaagtttagtatttcggtttgatttaattttgtataccgctctaattggatcggtttttattgctcttcaattaaaagttgaagggtatagtagtcattcctatgaaataagcaaaccctagctcgctactataaatctaataaacctatgaattaagcaaaccctatctttgtcgccgccaaacctctcttagattcttcttcttcctcgcaggtgagaatttctccgtagtatcctaatctcctttcactgtattgctaattaacgcatcggaataatctaggtttcgatttcagaattagttatctcgttgtgtcttttgttgattatatattattgttgaatgtgatcaattattcttgatgaatctcttaattcgaggttctattgctcatctgattagtttttttgtttgtttacttgctcagatcgatttttttttgaagctaaatctcaaaaatggagaacgacgcaggtcaggtcacagagctctacattccaaggaaatggtatatatcagctctctttgttctctgtgtaacgtttgattaaaatcttaagctaattgtcttaattaagtagcctaagctgattctattgttgtgtaatggtaatttgtttagctcggcaacaaacagaatgatcacatcaaaggatcatgcttcagttcagcttaacattggtcatcttgatgctaatggtctctacactggccaattcaccacttttgctctctgcggatttgtccgtgctcaggtttgtgaatttccactctgctaattactttataatcatctccacagttgttaatacaaagttcatgattgtatatgtatattgacattatgattgcatctgcagggagacgcagacagtggcg

SEQ ID NO: 13911 - DNA, 810 bp, Arabidopsis thaliana landsberg
tctttctggtgactcagttagcttgtctagtgtagagcttaaggttgataatgtcatttctaggttgtgtttttgtagagaatttgataatctatggtctattagaagcaaaccccatatgagaatattgaatgttgatgtatttgatacttttgtaggatttgcctcctgaagtaagagagtctctagtagaaaagttggaagatttgaagaagcagcaagacgctcatgcccgtcttgctgttgaacgtaaaatattctttaggaacagaaagattaagttctttggtaagaagagcttgtaccttgcatttagtcaggaattaattagaaatggtgcctgaaagtttagagattttttgttttcttgaatagagcggagaaagatcgaaagaagcattagacgtcttgagaagttacaacgtacttcatctgctcatgtgggagatgtagatatagctgagcaactaagtaaactcaaagaagatcttgaatatgttcgggtaaattcacttctttttatccttctctgcttgttagttatatgatttagaatgagctaagttgagaatgtctgttggtcctatatataactattgtagttcttcccgaaaaatgagaaatatgtatcactttttactggagctgaggattcagatgtaattgagaagagaggtaaaatgcggcagcagatcaaagccaatattattgtggctgctgctagtgggaaggagttagaagggtaacacatgtgctatatatagatgcttatttgtttcctttttttttcctggaactattaagtatcgt

SEQ ID NO: 13912 - DNA, 738 bp, Arabidopsis thaliana landsberg
  unsure (1)..(738): unsure at all n locations
gcaaaaccccattacaaatcacttgatcaccgcagcttctattttaagctttaagattctaagaatttgagtgcagaaggtgagtaaactcttggaatgtgctcagtccatcagaggacttgtcctcacctataattgcttacaaccatctgtcatggatctattcttgcatttactttcttgttctcataattctgtttttttttaatccttggttaaataccagcgctggtgtctgaagtcaaggacttgaaagagaagtctcagaaagaagacgatgttgttctgtctatttctgctggttacaggcaaccgataattcctcacctcgagtatgactatctcgacagagctattcatgaagacctgttcaaactagtccaattttgttgcgaggagatatgttctacaaaagagcagactggtaaagttctgaagctctgggctaattttttggagctgatgcnnnnnnnnnnnnnnnnngccaaggggtcagattctgttgaagatgttgtagaaacccagcatcagcgtgcatttaccagtggggaggctaatgagagttctgatgcgataagtctggtttctaggcaactaaaattcgctaccaatggagatgtgcatgctttatctggggactccaagcatggcgagactggtttgatgaatagggattcttcaaggaaagaaaaatttgaaggatggtgatcacgctaataaagatgttgtcacctgtgc

SEQ ID NO: 13913 - DNA, 573 bp, Arabidopsis thaliana landsberg
cgtccttcacattctcgacatcctcgaagaatttatcgaggttcatcgtttcttgacctgcctcaacatcccccagttgagcctggttcttcttgaatgaattagagaataaatcgttcatttttactctgtgtttttttctctggcttaattatgtacagaatttttttgtttttttctttgggtttttatgtgttttttctttgatttttttttgttcaaaagaaattgattatgattatgaacatcaccacatcgtcatcctctgcatgagtaagaggaagaggatgctaggagttttttttgttttattttgatgagtgaaaaagaaaaagttttagttttgtgggaaggtttattttgttttgttcgaaacgagagacacaagccacttttggtaattgtccaaatttagtcaatggcataactttttcttacccaaattagctccatttagtcaaagacgtgattacccttataatgggccaagccttaaagcctaaagcccaattaatagttcatttttctgcttcctgctgctttttttcataggcttgttttgattaatcctca

SEQ ID NO: 13914 - DNA, 686 bp, Arabidopsis thaliana landsberg
caatgataggttcccacttcttgagaataaccatccactggtcatagtgatatggtttgttatcaagaaatttcttcatgtcgtcctcatagtcaaaacagaattgaaaacatcctcttcccaaatctgacccagttgctttacctttcaagttccagcggttggagagaaagggaaagagggaccaaagtctttggactgcatgattagtcagtccgtcccataagggtgagggagttagctttaatgagctcagaggtgtctatctcaagagctcgaatccttcttcgagtaagaggtgagtatcctctatcaatgccttttcctttgagatgatatgggattcgtttttccatggttcaaaaggttacaggttgcaagaggtaagggtttgaggtttggtttctcatatgtgggcaagagttttccagggatgtaacagttgaaaggttaaacaaacaagattagaacactaagattaaaaaggagtatagagaatattacccaaagaaaggaagatgcaagcgtgataacacatgaaaccgtcggaggagcttttgtatgatgagggaaaggcaccggaggagaacaaaggaccaccggatctttccatttttggataaagactagtagatattactgctaatagaaaagaaatagtagatctctggtttttttaaaagttc

SEQ ID NO: 13915 - DNA, 767 bp, Arabidopsis thaliana landsberg
gttttgtaggacgagttgttatgtccaatggagagcgaggtacaaaaccatacactatttggaatgtttagaaacctacactgcgattaaaggcatgattatgcgcaaattccgcctgacatgacatagttttgtgtcccagctctttatattatctccgaccaagcaacgaagaagatcaccaagtgcacgattagttacttcggtttgaccgtcggtttgaggatgatatgcggtactcatgtccaagctagtgcggagcaatttccacaaagaacgccaaaaatgacttaaaaatcttgtgtcacgatcacatacaatggaagtaggcaatccatgtaaacgatatatctccttaaagaagagtgaagccactgtcactgcgtctgttgtctttttgcagggtataaagtgagtcattttggagaacctatccaccaacacaaagatagaatcgttcccccgctgcgtacggggaagacccaaaacgaagtcgatgctaacatcggtccatggttgagtaggaataggaaagggaaggtatagaccggcattagaggctttacctttagcaagttgacatacccgacaacgttccacgaagcgttcaacgtcacgacgaaaagaaggccagaaatacgatgttgtgaccaattgtaaagttctgtcccgtcccacctgtcctttattgtgtagctcggatatgatttgaagacggaggctgcactctgggacacacaaacgcatccctttgaaaaggaaaccat

SEQ ID NO: 13916 - DNA, 154 bp, Arabidopsis thaliana landsberg
cattaacgaaaatgctggcaggtgacaaagaagcaggtatggccaaatttaagggaattacctcatatttctactgcgcacgagttcacgactatgtaggcagactttacgaggccacatactggtcgggcatactcatcgacgactttagtaa

SEQ ID NO: 13917 - DNA, 656 bp, Arabidopsis thaliana landsberg
taagatgatttacaatttacttatgggatcaataaccttttgcatggtagttcaaacaagatgttgttcatacattttatttaatcgagttgagagactaataaattatttctcataattagatcttacttgtttttggagattcatatgggagtcgagccaggactgtatttgatgatgcagataacaagagaagaagcaaagttatcaaccaaaccatgtacattttgttttcttggtttactattacgagttttgaaacatgtaacatggtgtatttatatgtaagcgaaaatgcattcaggtcaagtggaatataggtcgttaattttgaagctagaaaagtattcattcttaacgcgtatactagttaggcattttcagagaatcttattccttatgaagcatttttcagagatgaagtacttttacttacttttggtgagaaaatagataaaattacccctgagattttgacgcaaaataactaaccttcgttttttattgtcgttcaacaaggaagatatttacgaaaaactcagtctagttatgttctttttagtatagaccgttggattaaaaaaatatattttaaaatctatggctaagatgaaaaaaaaaaaaaatcattctcttgttatctagatcagataata

SEQ ID NO: 13918 - DNA, 596 bp, Arabidopsis thaliana landsberg
ttattaaaaaaatctgatttatattttataaacatgatatgattatttgtttttaaatgtataagaactctaaaaactctaaaatctctattaatattaaatttattaaataaattttaattaattgatccatggtccaacctggttgacccgatgatccagtgacccagaaggtagtccggttcactgtctgggtcgggtttaaaaacattggtgaaatgatagaactaggtacaatacgtttgaacgagtagacaatccttactcaagctcagctctgttaagttaagaaaaaagataacaagcgattctgtgtggacgacaaagcattgaatagagtaacagtacctgacaagcttcctgttttaatgatagatctgttgctagatgagtttaatggggccaaaaatcgtctcaatattggactttggaataggatatcatcatatatactaatatagagaagacaacgtttagaactcatgatggacattatgagtttgttgtgatgtcatttggtattacaaatatgcacatgttacattccaagcattgatgaatgaactttcaagaccttatttcaggaaattcatttt

SEQ ID NO: 13919 - DNA, 678 bp, Arabidopsis thaliana landsberg
aaggttgtggccttcgtctcatgattgtttgataagatattgttgttcctcagttatatatatttgaattttggtgatttgcacactaatcattgcttctaattatctgaataaaaagatcaaatatgactcactagctattttggttgctacatcaacataatagttcatttggctttttacctttttgacattttgaatttaatttatcttcgaattatctaagactctagtatatatcaatctaacccacatccttagcttggaaggccaagggttgtagacgacattaatcgctcatttttatatatatatttgatatctataattcaaaaccgaaaatgaaattttggtcttattcggcaactttataatgaatattttcaaattgtagttttcttataaatatactatcattcgaagttttatttttgaatcaacaattttagttaaagaaaccatgcaaaattgaaagtaaagagacatatagttggcttaatgtgttcgtaaagagatttgtgcgtagtgttaaagagcatacatacttcaatattaagaaatatttggatgtaaaaacacaattttagtggtaatatcagtagtaaatttttaagtaaatgtaaaaaagataataatttgcatgtaaaacatttctaaaaaatttgttgaactatggtt

SEQ ID NO: 13920 - DNA, 646 bp, Arabidopsis thaliana landsberg
acagatagaactagtcaaaaatcagactgcaactttaacgcgcagcaaaaacgcagttatgtttgaatcgacacttaatatagaatctaaaacttgccaattatatttcaacttaccactcttgcaagatccccaacagttacgagaactccagtgacaatattattgttagcattcactccagttccttcactaagtctcgcaacaagtgcctagaaaacaagagttacaaccccgtgaacaacaataatagccatactatctaagaaatgaaaagaaattaaaccttttggacaggggctacgtatggaagaatgagccgttcacaatttcgaactaaacaaccaaggagctttgcactctcttccctgcacttgttatctgcactgctgacattacaattgaagtcaatgcaacagatacataatcataggaaatgaatcttcccatatgaactaaaaaatttgtagttacctcagctcaagataggtcaacaactgtataagatggcgacgaagtgctggaagtacgtatgctggatttttttccgattaccttccagcaactgagatggcatattctcgaacatcaaggtcctgttaaacagagatattgttatatatgaattggaatggttccattgact

SEQ ID NO: 13921 - DNA, 719 bp, Arabidopsis thaliana landsberg
tctttcaatatttgatcaattaacattttgttaagagaatcattattagatatcgagtttaataagtgtgcaagaatatgatactagattatttatcatatacagtatctattgtcatgctcatgcatgctgtagctctccaatattctatccttgctttagataggccttagccatattaatactgagatatcgactatttgttgatgtaaaacagaactagcatttactaaggtatgtttatcatagtccctaatactgaactcttttagtttatatgataagaattcatactttacatggggaaattgtttgttggctatgtttatattcgaataaagtttttgacttatcatatatgaaactttaaggtagaatcttttcattggttgtgtgctcaggatcaagaacaactattcgaatctggtgaagagacatgtttccccgccatacgtgttggattgcagaagacttcgtctgtggtgagtgaaaatgttgtcaacgctattaaaagttcttaactattcatatcagtaatcttcatgacatgccaattggtgcttttttgcatatgcagtcattttggatcgacaaccaaactggtcataagccgttggaagattttgttctagtggaaagtagcaccactcctctttatgaccgtaaatttgctataggtttaaattcagcagatggctcaatcaacgggaaagggatat

SEQ ID NO: 13922 - DNA, 558 bp, Arabidopsis thaliana landsberg
  unsure (1)..(558): unsure at all n locations
aatttatttgntaaacgaagggcaggggaggtacctaattattttgttttgggaggggaggtgaatatattggatgcgaatttatatcagtttgttattgttattttcttatataattgatttgaaatctaattgaaattaaaaaatccaattatccaaattacccntaaattcacttaaattgaagcttagtttttaatttaacccgacttgttctctaaatatacttctcttttaataatatagttaatattgtaatcaaatctttccgaaactgcatataaagaatattaagattatcatgttagcatttttttctaaattctaataggaatccatatgtttagttgctatatattgaagattttattgttgattttgtagttaagagaatatttaatcgagtaaaacagttgttaatattcgaattggaagaattgccttatttgtaagaaatgttatgcatggtaaatatatatagatcctgtttttataaaagctatgtgttgatcaaattgtggatattttctntttaaactcgaactggcatatacacaa

SEQ ID NO: 13923 - DNA, 733 bp, Arabidopsis thaliana landsberg
gacaacattagatttgcaaatagtgccagatggtacagtgaaagagattattcacatcttatgatcattttctttgcaaatttgtcttgttaagacaggggcaactacaccaatgatatcagctttggaactacgacctttggcgagtgatacttacatcgctaaatctggttctttggaactacgaccttttggcgagtggtcacaaagctctattatcttttctttgattaacaggttctgagactatcctaccagcttgtgcggtcactcttgttcataatgcacaaaagcaccaacgaacaaatttcaagtggcaaatatcaataattgcttctatggccatattcattagtgtctctactttccattctcaagaagaattagcctaccaacttagcaggttactgagcacattttcaaaccacaaaatataatacaagagagaacacgagactaaaagagtactacaattttcctctcatgtttagttgtctcaaaccaaaattaaagaactcgtgtaaccaaagaaggataccacactcagaaattactcgacgtgagtaagacttctttgccaatatatactaccttgcactagggacagctttggtatcaaaactcatgctttgttcaaaggaactatgagaatccatgccttgagttttattttcagaacgtatacactcttttagctcgataacaacttgggacatgctcggtcgtttttctg

SEQ ID NO: 13924 - DNA, 652 bp, Arabidopsis thaliana landsberg
ctagtcccgaacgtcgtcaacctaccattttgcttacgccttactgtcaatcgagaagagggcagaggcatgtaagaagtcatatgtccgtgggtatgtatcaaatggttcacacctgaggtagaatgcatcacttattaaaaaaatatccagagccagagactaaatcttagtttaccttaagacacataaacagatgaacttttgtgtttaaaaaacatgaacagagaaaaggacaagatgaatcactaatttccaaggtttcaactataggattccaaattctgatttcatatgacagattctaaggagaaaacagtaccaatcgtgcatcactcctaacagtccacggtcataaatgacaggcaatgtgttaggcccactgacaggaaccacgcttagaacccagcaatcgagtttatgatcatttagtgcagctgcagatctgccaaagccaaaggaataaatgaagagagataagctaagatacctgtataatacctaacaaagaaatattatttcatacccgccaaagcctgctctcatgaccaaaacatttcttagctacatctctttccattataaggcgcgaacatagccctcaattatatcattccaatattttgattctgccttgatagctcttcctagc

SEQ ID NO: 13925 - DNA, 816 bp, Arabidopsis thaliana landsberg
cctgcaactctagaggatccccattccatatgttttggaaaggatttagtactataatcaaattacaaaacatcattagtgctgttttctttttggtttttcttgcagttttcgtgaatggcaaattctgtaaagatccaaaatcagtaacggccaatgatttctcttattcgggactcaacatcgccccgaaacaccaccaacttcctcggttctaatgtcacaaccgtagatgtcaacaaaatccctggcctcaacaccctcggagtctccctcgctcgcttagactttgctcagggaggtcaaaacccaccgcacatacatccacgcgccactgaaatactcgtagtcaccagaggaaaactcctggttgggtttgtgtcttcgaaccaagacaacaatagactgttctacaaggttcttaaacgaggagacgtttttgtgtttgccattggtttgatacattttcaaatgaacgttgggaggacaagggcggtcgcgtttgctgggtttgggagccagaatcctggtaccattaggattgcagacgcggtttttggatcgaacccttcgattcctcaagaggtgttggctaaagcttttcaattagacgttaaattggttagatttctccacatagtgtttggtccgccattatggtagtaagttttaagattgatgataaaatttgtgagttaatcacatgatatacatacatgtatttaaatcccaaacttataaaaattgattttttatttgttttctaaatgaatgtaaaattaggtcaaccctaaaaaaaaaaacatgttacaacat

SEQ ID NO: 13926 - DNA, 605 bp, Arabidopsis thaliana landsberg
tcatttctctttcccccttttctctcttgacgaaccctagatttttttccttcttttctctcttgacgaaccctaattaacgaactcaagaaccacaatcgaatccttcgccattcttttctcaaagatcttctcttcactcgttgctcgcaaacctcttattcttctctcttctctcctttctctcgatctgcaatcttttctcatttaaaatcatttgtgagaaattcaccccaaatcgacgttcgtatgtgccctctctttgtaaggtacaaattctctattcccagtcgtttgtttgtttgattcatatttgtgatggattgtgttgggttttgttctgtgaaacggattgattttcggatttggatttgttgtactttttggatataaaatttgaacttgaatgtgtttttattttctggtgtgtctctgaaatatttggatttctttgtttagatacatgtaaaataaatgtgtttttgatttggtctcggattcgaaatgtgttgacttaaaggatgtgtgtttatctcttacaactagaatttacctggtgtacaccatgaagcaatgtttattcatatatatatatataaaattat

SEQ ID NO: 13927 - DNA, 835 bp, Arabidopsis thaliana landsberg
caagccaagtctgctttttgttttgtgatctggaagtgggtgaaaggaatgtggaataatgtgtatgggttgtgggtattttgccaatgatagtaatgagcagctggaaaactttttgggattcctcttcgtggaacacactctcatgcttatgttagctcattcatggtcagttcacttcagccaaaagtttcaatttttatgtggaggttacatacttgagttagctagtagagacgataacacaaagtttcgtgaaaataagatattcttgtcaatgcctttgttgctataactttattagccatggttctgatgcacacttaatatcctcgctcataacaatatcacaaaagcattttcgatataattagttaactttggattgcagagtactgatgagattgttgacaaagtacttcgtagtgctgatgggaaaaccacgtgcgaggattttgttagtcatgttcagacatggttaaaaaagattcaggtttgtttattgcacattttgctcttcctcttcctgttttctagtctcaggaccattgttctatttctgcttcaaccctttgcttgaatctttgggacagctattcttatgttttgatcctttgtggatgacagaattcaccatctgtaagtggcattttctctgagacaaatcaaggcgagctagcagctttcacctcatatgcactggcattccccaaaacttttcttgccctcgtagatacatacgatgtgagcattaaacaccatagttgatagctcatgtgagccttaggattgctaataaactctcatattaggggtttgctgactgtttacaggg

SEQ ID NO: 13928 - DNA, 616 bp, Arabidopsis thaliana landsberg
gaagctaaaactgccttcgtgagtgtaagtctgcccgcaaagctaagtactctccccttccacccatcgagacatgacgaaaccctctcaagaatctctgcaaatgtctccttattcatacgcttttgcaaaactggcatgctgagatacttcccttagttctcgcgtggattttatcccactctcatcactaattaacttctctaaatcacgagagccgttattagagaagaagatcttagatttctctgagcttactttttgcctcgaggccccacaaaacctctccaagactgaacggattattcgaatttgcgtaaccgaagcttcagtaaacaagattaagtcgtctgcaaaacaaacatgtgagagctgcggccctcctcgagacaaactgattggtttcacttcttcttcatcactgaatcctcaatcaaatgacacagccgctccatacataaaacaaacagatacggagataatggatctccctgacgaaggcctctaagcggtttgaaacttctgtcctttcccatttcaaagtaagctcatgcttggtcctgtgcactctgcataaccagcagatcaaactctaaaaagctggcaccctaagtgt

SEQ ID NO: 13929 - DNA, 612 bp, Arabidopsis thaliana landsberg
tggtggtgagagattgaatctgtggaaggctggtctcaatgggattggagcaatctgttcttttggggttgcagctgctgctgctaccgtatgtgtcttcttcctcggacacaacaatatcaaaatctgtaagaacaagaaccagatgcttcggttccagatttactccgatgataataaggtaatgttcttaattagttaaatgaatttattttatttttctttatgatatatctttgaatgttctcagttaaataatttaatgaaaaattattggttttatgtgagtagtttcgtcttgaggcgaatatatactaacaattgttttacatatttaatcagaaaacgataaatgtaaaaagtttttgtgttttatttccgagatggtgttttgtatattgataaattatatgatatgaaagaaaagggagtgatagatttggataagagactgtatagaatatataatccacctacaaaaaattagtatttgttaagatgaaccaaaatagtgaaaaggggtggtggaatattattttttaatgttaatggttcatgacgattagttcgtaatctgtctgctaattgtataaaagtatagttttgatgaat

SEQ ID NO: 13930 - DNA, 440 bp, Arabidopsis thaliana landsberg
gatacgccgccagtgtagtgcagatttgttgtctcaaaagagtttagtcggacaagtcatagtcacatgcaagtcttttagcagctgttgcaaccagataatctcacaagtggcttgtgctaagcttctatattcagattctgtactactccgactaaccatagattgcttcttactcttccatgtaatcaaagatgtaccaagataaatgcaaaaaccagtaacagatctccttgaatctttgcaagtaccccaatcaacatctgagaaaccatttaaacacaactcagaagaagcagaatacatcaaaccctgaccaggattacctttgagatatcgcagaaccttgtgagcagcttgcatatgaatgtcagttggtgcagagagaaactgactcaaagtatgtactgcaaaagttatatcaggacgaagtaatgcgc

SEQ ID NO: 13931 - DNA, 810 bp, Arabidopsis thaliana landsberg
agatcaaaaccggcaccgtatatagatccgtctgagtcgtcgattagggtttcggctaaagtgaagttgaaaaactcccaccaatgattggcttgtgactttagaccaatcctgttttgttgtctgtctcgttccaatgtgtacactgcttgtaccaaacatgatgccaccgaggttctatggtaagaattattcctatcatagacacaagttgaattttagtatttaaaaaacgagttgactttaagttttttgtttgttgtttgtttgaatgtaatattttaatgcaacttgttgtcgaaacgaatgtttagaagattttagagttgactatggctaaacccgttgaattggcaaaaacggaggatgagtgatgatgagtttgttgtgaaatgaatttggaagatgaatttgtggttaaaaatgaaagagatggaacaaaaaaaatataccaatcaatggaagttaaatggattggaccagaaatgctgaagatttctctttgagaggccattagcccctctctgaccataacctcatcatcttcttcttccatattttctctacctaatcatccaaaacagactgtatagaaacatcaattctttttgaatttatcataattaatcaccttttggatgaatgcaggaaaaatgaggagaagacaaaaagaactccaaaaaattggtaaaaatttgttgtagttacgctacaaaaagaaatagaaaacggaaattcaattaagaaaagagaaaacaacatacccttttgtatcactgcaaaagttctattagaatgagtcgaatctca

SEQ ID NO: 13932 - DNA, 649 bp, Arabidopsis thaliana landsberg
agaattaacttaaagcaataagacaagtacaaaacctctccttaaccaaaaaaggagaaacaattggaatcaaaatctctgcttaaacctccaaaccaacatcagagatttttgtgccccttggcaaaagtgtgaacatgataccatttgactcacttttggtatataaactcatcattttgaatcgactccagccaatttccttctctgttgatgctcagaaactttgtaatcaacaacctctctgaaaagcatagagtccaacacacagtcctcacttccatacacagctgcttgaacacttgccatcagtttcgcaatttctctacctgaaaacccttcggtttttgcagccgcttcctttaagagctcctctgtgacaccctttatctcgatcttctgctgttctttcttaaagaggcggtcgaacaaacccggcttgcttggaccagcctcagctatgtacttttctagatagaggtttaaaagcttgaaccgctcttcttgtccaggtaaggggaattcgagaacttcatcgacacggtcagccacagctgagtctaagtcaccaggtcggtttgtagctagtgctaagactatatctttggattgatcacccgtgcggaagagaagagcatttagagcactc

SEQ ID NO: 13933 - DNA, 863 bp, Arabidopsis thaliana landsberg
aaaacaataattatttttacaacaagagtatagattattagaatgcaagaaattctctgattgtcagattacctgtactgtaacaacaccttggaacattttccggagcgagtggcccccagagacatccactctacattttcaagtaaaaaggctttaagttttgaatttgctatgtgatgcacagttaactaaaagatctcagaggaaggaagatataagttgaagagaattacgcatccataaacattccagcatcacttaagcatttcactgtcgtagtgcccggaaatagttccttgaactgatcgcagtgtaggatggaagctaatcccccagctgaacatccagaaagtagagcctgagatagatcattttacttacattaacaagagcaaaatccagtaacatgatagggctgatggttcaaatgaaaagcaaaacctgttctgctttttgcatgcctttagagagtagttcttccatagctgaatgccagattcgttgtcctctatagtaaagttgtgagctctagttcaaagaaattagaagcaattaaatcccaagttacagagaagtgaaaaacatgaagactgaaaagcacaatctactattggtgactaacctcatcctgactatcgccggtgaaagaggcaccatcgcagtaacgcaatttgactctgttccagttgaagaagtctgcaaacccgtagatagtcaagcgagaatcaatgcaggtaggtaaagattaaccaaatgtgtaagtgcgcagattgtcatgcatagtaccaggattctcattagatttattgctcaatattccagtgaaggccaaaacttttttcatatgatttgatgaacca

SEQ ID NO: 13934 - DNA, 713 bp, Arabidopsis thaliana landsberg
cgaaaatatgcgaagacattaaaagaaattatttgaagttgagggctgtgttcatgtagttaattttgcaacatggcgaataaaatagtcatatgaccaagagaggaagtctagaaaatgaaattcgaaaactcggagacagagattagaaagcaacatgccacatgcaagatcatggtgtgtcaaacacactacgactaataatacgaggagattacaaatagtcactatcaagagatcatgtgacattgaaatgaattcattagtctcaatggtcgctgacacgaaccatgaaaagtagttaagagtctgcaacagtttctcactgtacgagtaggaatccatggatagctcggtaaaagagttgtctccataacataggagggtggtgaaagtttctctaagtagtagcattgttgtaacaacaatttcttgtatcaaaagtgaataggattattttgaccctcaaggtcaggtcagataggtatcgctatgttgtgttaagttgaagcttggactccctcgggaagatgatgtgagggagttggatctgtaactgagaagaggaggcaactaaagacatggttaacttgggatcacaaaagggacaagctagaatttaaacattcaagccgtaagtatggtctcatcctaaaagaggaagcttggggcagttgaactgttatcctttgcgctaaaagttcttcagacaa

SEQ ID NO: 13935 - DNA, 798 bp, Arabidopsis thaliana landsberg
gttctaaattattcataagacgaaaccgggatatagaaagaccgtagtccgtaacaacaacataaaatttcataccaagaacaagttacatgcaacaaaaacaacaacaggagaacatcgtctggatagacattgcttgcctagattgattacttcgtagggtttgagattattcctagcaacaaacaaacttggggaagaagaaaacaacaacacattttgaaatcacagactcaaccaccggtgaagagccttttggatttcaattcttcaggagatttcttgagaaaatccttttgcaataaggattgttacgtagaatcgagtgaggccttatgacttcaatgagtgtggcatgaagtgaaccctatatatgattattccacaaaatcttgatcattctccaatcacaatgttagagttaaaagaaacttataaacttgaataggctttgtaccttggtaacagcaagagcagcttggatgacaaagttagcataagggtcttgaattagaatatcaaaatgaggaacagagatgagttcgcgcacgatctgaggacggctctctggacaatgtgttaagcatctttccaccatatgactactaaatttctgcattgaaagctctacataatgacctttcaactgcgcaagcatcgcggctatcgcagaaaaatccctcagttcaagaacaaattggacagcatagttcctgcatttgatcaagaaaaaataattgctaagaatgagtctctaggtgtaattcttgttccataagaatgggttcccccataagg

SEQ ID NO: 13936 - DNA, 721 bp, Arabidopsis thaliana landsberg
ccttgttcctgttttaagcaaaacaaagatgaaccaaacctaactcctctagctttctctttgacctttggaattgactacgaatcaactgcgaaatactatcttaccttgaatagcctagcgagctcagtagcgtgcaagatgttaccgagctttgactgaccatatgcttgcaaagtattgtaactgtagagaaacagtgagagcaatagcagtatgttattagtttactacactagaactcaaaagtaataaacaatactatcacataacaatcaccttgcttcatcatttattttgtcaaactgaacaccttcccggtaagcaaatcgatgaccttctgatgagacaataacaattcttccttctctattgctttcactagctgttttcttcatcctctccaaaagaaggtttgtcaacagaaaatgacctgaagcattgtacaaaacataaaccttataacatagaaaatgttcctcatcatacttcaaacgatgaagcaaaagttcaaacaaagaagcaaaaagggaggagatcataagttcttctaaactaaacatacccaaatgattggttgcaaactgtaattcaatgttgtcgctagaaagcaagaagggacatgccataatccccgcattattgctacaaaaacaagaacaaagattaagccgactaacacatattaacattcactaatccagcaattactggaacaaac

SEQ ID NO: 13937 - DNA, 545 bp, Arabidopsis thaliana landsberg
taccgtcagaagaaattcgcagggtcaatcatcctcccttctttatgcttgtgacagtagcttttgtatatacaaacgcttttggttctttttattttaaatgcttaagatcttgtcacccacttgttggactactttacttaaacacccttttatcttgaaaggtttcttttcaatgcctcagctggtcagcagaatcggggtcattggtgtgaccctcatggccgtcttatcgggttttggagctgtaaatttgccctacagttatatatcgctctttattaggtacttccctctataattgctagtagattttcttcttctaccttgtgcgttattcttattgcaaatggttttgaggattttgattcgaagtagttgaactctgaatgaagcttttcatcttctgtgatgtaaatggatctacactgatagaagagcagctggattgggaaatttgtgatctaactgcacgttttcctgtctctctttctctctggaaacatatagggagattgaagaatcagaaataaaatcgctggaaa

SEQ ID NO: 13938 - DNA, 679 bp, Arabidopsis thaliana landsberg
gacgaagacacagcaactgcaacgatagaaatattaagctatttagtgatgatatgagtaaagtgggtgtcatggctgaatagtcaaaagactcggaaactctcacagccttaagcattacagtgcatttttgtttttcaagtttgctgggttgactaagtaaattaaattatggaaggaagaccaaacaaaagatcgatggagagtggtcactttagaggaatgtctgatagaagcgaagcaacgtaactcacacttgtttcactaagttgatcagtctcgttcactaatggctgtcaaatgctcctcaatctcctccgttgtcaatgcacggaattccgggttctctgctctcaccacacctacctatcatttcaccaaacggtttgataagatatataacccacaaatgatacaataaacttgccatcatatacgagaagagttttgtatacctcaatctcagtagccttgaagtcttcttgaagaacagattgcaaagccgatatggcagtctacaaacgtataaaaatatcaacgtgaggaacaatgtgcatttggtacttcatcaagaatattaatagatttgtatctacaaagtaacagcacaagtaatcagcagctaaatgaacatatgttaccgtattcgaacataagcagggaaaatatgaaagataat

SEQ ID NO: 13939 - DNA, 585 bp, Arabidopsis thaliana landsberg
cttaattaacatttttagtgaaatttttagtggaattccctttggtcgagtgattgaccttttgttttttaatacttctacacctaagtctatgatgcgagttccaaaaaaaacgcagtctcttacagatgaatgatgcaaatcttattggagatccatagtgcagtatgcatagtcgttcgtagtggtctgaatgttgtagggagagcttatccatcgtaaaaatatcgtatatgcagaatcgtccgctgaagatcagaatgttgtgaggagagagctgcatcgtggaatcgttgttcgtggaaactgttcatcataaataaaatataaaattaacagtttcaactttcaaaaggttttctatgtacatttttgaagttaaaggtctttaattcaataactaaatagttttgggcttttaagaaattttcccttaagttgtttcttcctcttcttcgctcagcgccgctatactcactctcggcaaaaaaaaagttcctcagaagcaaacaaatcttcaattgttaaaccctaaacctacaaaagtctagactttgtttggtgctcatcttcgttcttctctct

SEQ ID NO: 13940 - DNA, 921 bp, Arabidopsis thaliana landsberg
ctatgatacagtgtgtaattttagaaattatcttaagacacaaattacataaagttggctacaaattccccaatccaaatttaaaccaaaaccaacataaaatgtaagatgcaaaccggcaccatcctcactctggtttaaccgacacatgatatcaatagtcttcagaggaactctgccctctctcgctacaaaaaaaaatctccaaggtaaatttctcactcaagcatcttttgtgttactttgatagtcaaaatcaatcttttttattaatcgaatcattatcatataacgtctatgatcagataaatttacctgacctctaataccataaagaataatgaaatttaagttatcttaagacacaggttacataaaccgagctaaaaccctattagtaaaaaccaaaattcttataaagaagtctatcgtattctggtggtggtgttggcatatcaagacttcgactgtagtcattccacagacccacaggcattggttcttcaccaccactaaacctacagccccagtttccactagacctttttcgctttcctctagaagttgcatgagtctcctctcttccgtgactgatccctcctacagttctgtatccctttcccaagcagactcttttgttatgaagttgctgtggcgacacaggagtaataggctccacaacagcttgttggctaaacaacttttgtgtgagatattctccagcagccttgccattgaggaactccaatctatcatctactgttctgttaatggagctgtatatttttgcgggtccgtagtcactaaccacccttgcaaaatatctagacacgtctgtaaaattctcaacctatataacacacacggaataaataaaaactgaagtggtttgacaaaacaaagtcagaatgtgaatgaaat

SEQ ID NO: 13941 - DNA, 1047 bp, Arabidopsis thaliana landsberg
  unsure (1)..(1047): unsure at all n locations
tgatcttacctgctatacaatgtttttcttcttctatctggtttgcgtgctggagaattgagtttttcatcatcgctttttttgctgattcttcacaatgagtaatgtgttccacgaatacgatcagcaatatagcgagctctccataaatctttcaaagaagtgttccttggctttttctctcaaaggannnnnnnnnnnnnnnnnaatctcttcctctttttttttttttctttaataaccaaaacgttttaccgatcactatagtctataatcttttcaaactaggcgaacagaggaagttaattaaattagagtttcctctccttcatggatacttgaactaatgatcttgaaaactaaaaaggtttctaagagaagtgtagaaaaaaaaaaaagatacagaatctattagagatattttggtttatgttcgatgtggtattgtatcttttaaatcatcatcatttttttgtccattttttgcctagcagatacatagatgatactttactaatttacaggagagaagaaggagaagctgtccgaaataacatatgatctggaaaatgcagaaaaattggtacgtggatatagaagtattctatctatgtttcccctatgatgattctctgccttttatttcactagatttcgaaaatggatcatgcagcaagtaaccttccacccaatatcaaattcatccttcttgaaaaattaagggaatccaaatctagtctaaaaagattgagaaatgaaatcaagaggaacacatctgaaaacttgaaagttactactcgagaagaagttcttgaagctgaaaaggcggtatgtaaggacatggttttgttcagtctaatataatcttgatcttgctagtaaaacacattttggtctctttttattgagttaaggattttgctgatcaaagatcaagattgatgaaatcaaccgagggtttggttcgaactacagagatgattaaggacagtccaagaaattgctggagactgaaaatattggtatttcaatactcgagaacttgca

SEQ ID NO: 13942 - DNA, 590 bp, Arabidopsis thaliana landsberg
aaatactatttgttgaacatatacaaaaaaatatatatttttggcatattttttgtaaaggaatttttttttacagtattatcaaacttcatataaaagagttaagaaaaaattgtatgaaagatgcttaaaactaaaaaaatcaaaatatatttattaaagaacaaaacaacagattcttattaggccttaggattgaggtcttgaggagatgagaatatattctgtgatggttatttttcacttatattttgcaatgtatgcttaacctttttgcattttgaatgcgttcctttcttttacttttcaatatgttcttcatatttttcttagcctgatagcattgatgtactcagtcttcattttcttcttcatggaatcaacctttgtcaaaaataactttgtgcctaatacgctccacatcctgctcttgctcatcaacaagagatttaagctaattcagagtctccattttaaataacaacttctctctctcaagctgcttcagttcatggctcacacagaccaacgaccaactatccacaataaaaagtataaaccagtaagtttattcttgaaaaggttcatac

SEQ ID NO: 13943 - DNA, 852 bp, Arabidopsis thaliana landsberg
gggactgctctgcctctagcagaaccctctgcttctctttgtccaggtgcaccttcaacgttcctcctctgcttgaagcctaaacgcattccaataataaccaaatctttcttcaggtaactttatacgaatcacttcagaatttgtcttttaagtgtctgcgtggagagaaagagagagagaacctggtaggcgaagaaatcacacttgttcatcctgaggctccagtaatgagctaaagcacaatgagcacttccagtaacagggtcctgaagagccacacagtaaaaagaaagcagaagaggtcacgtttttgctgttttgaccactcgctcttaatcttctaagagcaaaagactaaatgataacctcattgattccgaatctcggggcaaagtagcgactacagaaatcataagtagatccatcagaagcagcggcagtcaccatcattccttcacaagggcatttcgatatctcatctaatcttggcttcaaatcaataacagcttcccaagatgaaagcacaacctgcaaaccattcgaaaagaatcgagattttggttcccatagcaagaataggaaaaatggagacagttggtgaaatatagttacgaggaggtctttctttgtggctttgacatcaagaatggtagctccattcaaggctttggagaacaaagagagatcatcatcaatgtagttgacttcacatgttggaacaacagggaaatccaattcgatacttgagtcttcgggatcatcatcatttttgagacgtttagccgttagaatccctgataatgtaagatctcaaaagtctctgaaccaaccaaaccagttgagaagaga

SEQ ID NO: 13944 - DNA, 583 bp, Arabidopsis thaliana landsberg
accctcattgtgttactatagagatgcaggtattttttgtctccgagtttctcattgctgtctaatgtttctataatcttatgcccaaaacacgtttgtcagcctgatccagaaaaagcttctctagaggaagcggaggagaaaagtatcctaggaaaagttaaagcaagtatgacagaagaggatcttacagaactagcgcgtgccacagaggagttgagattgaagcaagagactcctgaccctcctgaagcactgaaatgcgttccaagtttaaatttgagtgacattccaaaagaacctatatatgttcccactgaggtgatgattatattagctctctgctgttgttggattccttttaatttttcagcttgatgctgatatggtgctttataggttggagatattaatggcgtgaaggtgttgcggaatgatctctttacaaataatatactctacactgaagtagtctttgatatgggcttactaaagcatgagcttcttcaactgatacccctcttctggtaacttgttgacttctacatctgatgatttaaccttaagactttatattatgctg

SEQ ID NO: 13945 - DNA, 706 bp, Arabidopsis thaliana landsberg
ttttttttttttaattcaattttgttttactcatttcctaaagattatctttatttacaagaagtctttgaaaatcacatggattccagttgccccagaattaataaatctgtctgtgtctcctcaagttacacgcacatgctcatttttttgcttcaagttgcaaaatgcaaaatatctatttaactatatgttattcttctctttactttttctttttcttttttgtcgtcaagcttgcattaagaaacccaaaggacattacacagatacaaggagggccattaaagatcaatacttttttaaatctttttgtttgtactagttcaaacttattttaagggtttgggaatcgaaattagtcagcatttttttgttatcgtttagataactttgtttatctaagaaaaaacaaagaaagataaaaaatgaatagatataaaaagtaatgtatacaaataagtacataattttattttttttgcaccactaagtacataaatttaaaaaattgaaattgcatagacttatataaaataaaagacttgagcaaaaaataaaaagctaattaaaagatacttgttcacaaccgacatactaattgccaccgttaaatttaaaatcatacgtaatatggtctggtaggagttggtctaagtccataatctattggaccataccaaacctatagtaaatcaagacgagc

SEQ ID NO: 13946 - DNA, 546 bp, Arabidopsis thaliana landsberg
ctcctatttctttgaagggttttttaccatgcctcagctggtcagtagaattggggtcattggtgtgaccttaatggctgtcttatcaggatttggagctgtaaatttaccctacagctatatatccctcttcattaggtactaatattcaactctatttccgtaagctactagatagtgttctattcattatttcctttttctagtttatatttaaccaacaataagagtgtttccttataggggaaccattcaatgggctacatgataagcatacataattagcactgaatatatatagtgccacctgcatgtccttcggagagaaagcataaaaatgtagaatgaaagaagaaagcttaggaaagaaaaaatgcagatttaatgcgacaaatatgctaagaaactccacaaaataggaacttatattccacattttgaacttgaatgaaacaaatggtgctggatgttcagttgggatatttttataagctatttccagaagcttgtcatttctgtgatttacatattgggttttgactggat

SEQ ID NO: 13947 - DNA, 875 bp, Arabidopsis thaliana landsberg
acgtattcagcgtatgattattctcttataccttattttattttcacattttagggtttgtggatttgatgatatagaggttgtttcgttgttgggttatatgacatgatgtgtgcatggttcatatcaatgtatatgcttgtagtcgtagaaacccgattgaatcagaacttgctagcattttttgttttgtatcacagggaaatatcaaaccatggattggtctattaggttaagagtcgcctattttgtagctgaagcattggattattgcaacactgcaggctttgcatcatacaataacttaagcgcttacaaggttttgtttgatgaggtatagaagaggaatccttttcatctatatgccttctcgtgtggtctctaaaatgtcataattgttttaatggatgttgaaggatggtgatgcatgtctttcttgtttcggcttgatgaaggagattaataatgatcaaattacaacaggtaattaattagcgtttctctcttcagatttattataagaattaatgtgatgtttattttatcattgtaggaagtgtgaaccctgaaaatgtgatataccgatttggtactgtccttgtgaatcttctaagtggaaagcaaattcctccaagccacgtaaatgattatgctcaagttgtctctttgcttttttagggttttggatcaacagttcatcttgactttgtaattgtaatcataaggtttatctagcattgtcattttcttgcaagacaagccaattaattcttatatatgtttctaggctcctgagatgatacatcgaaagaatgtgtttaagttgatggatccatacctgaagggggagttctccatagatgaagctaacgtag

SEQ ID NO: 13948 - DNA, 735 bp, Arabidopsis thaliana landsberg
aaaccaatatagaaaggacatgttttgatgatccggttgatttaacttatttttatataaccgttgttcctaggatatgcgcagaagacggctcgtgatgttgggaccagggtaagttgtatcgactcaaaaacattctcgattctaattcttttggtcttcactaaataaaactcactccttcgtgtttcttttttttgtcgatatttcaagagacaaggccatacaacttttgattcaagaaccgaggtgagttaaccgatgaattatcgtttctttgatatgtattcaatagacggtaaaacttagcattctagtgtttgtgatgaaacaagtagataaggagacaatcgacatgggagcttcaaacttttaaagaacgatggagcaaagcggtagaagaagacattaagtggatcgatccatcgtcatcaagctcgatgacaaagaggaagagtaacggtaataacagaagattaaggcgtggtagtagtagtagtcaccgagtaaagcataagagaagtcaagagacatcaagaacaacaacaacacacaaatagcaagagaaggattattatacacatagatagtgtttttctttatctcattaaccaatttatatatgattatactacttatccttagttagtttatagctttctagtattgatgaaaaagggttcatattaagatttgtaaaagctcatgtccattatgtactttcatcactataac

SEQ ID NO: 13949 - DNA, 575 bp, Arabidopsis thaliana landsberg
acgtagcctcctttgccgaaagaaaagaaacgatgtggtaaataacatcgtctggtaaattgctgaatctattcatacttatcccaaaccctagagaaccgatcgatcaataccaaaaaaacttcaattttctaatcgaaacaagaaatctgaagccaacacgagattcaatattgaaattgtgatacgatcgacgacgccaattcgagagctttctgacgcgaatcaaagaggaattgacgaataactagagcggagttgtgacatttattgaaagcaaagaaaagaaacgaacacgactggggtaatttgaatccactattttatactcgactactaaaacaaagctcttattttttaatccaatgattttgcgccagctgttattagccactcccaatattcatgcattggtgataaatttatctaaacaatgtatcgcaagtctccgcataaatttaagggacaaaaagaggccaacacaaagaagaaggccggaatcaaaaagatccaacgatcaaaaaaactctgcaaagaattcaataaagcttttgagatgacaatatcagagcact

SEQ ID NO: 13950 - DNA, 807 bp, Arabidopsis thaliana landsberg
agatacgaccatctagttcactaccttcttgacaaaaccatgtctatcagtgtctgggctaaatgttacccgtctgaaagatgtgagtacttataaattgaaggttccgatcatcgacccctaatcacttactttaatctgaaaaagaaaaagcaaaaaggaatctttagatatgatcgcagactcaaaggtagtaaacaagtctcccaactaatcattcaaagttggcaaacacataatccagatgaagcggtagagaataagcttggtcactgcaaaagagcaattattacccaaagacgatgggggagtagtgaccaatagctctttgcacagtatactataagatcatagcaaaaatccttaacaagaaattacaaccaatcctccatagcttgatcgctgaaaatcaatctgcctttgttccacaaagagcaattgccgacaatgtactcattacgcatgaggctctccattatctccattcctcagattcaaaggtctgatgctatatggcagtgatgaccgatatgagtacggcctatgacagaatagaatggggttttatcagctcagttcttgaaagactcagtttccatcagttcttgtgaccatagttagctactcttaccttttaaatgatactgctcaaggctccattgtcccacaacgaggcatacggcagggagatcctctatctccatatctcttcatcctttgtagggaagtcttgtctggcctctgttacaaagcgcagttagaaaataaactcacaggaatcaaggtgggaaacacaagcccccgaat

SEQ ID NO: 13951 - DNA, 925 bp, Arabidopsis thaliana landsberg
  unsure (1)..(925): unsure at all n locations
gttttttttatacaatcaggcaaaatctgcaaatgatggtattttcgtaaatactgttttttttatcgcatagtaaaaaaatgtgaaataaaataacatggtaaattccaaaaatatttataaattcaatgctctttatttttctttgccaatttgccccaaaattacgttaataacccaaaagaagaatctattattattataaatattttttaagataaacgaaaaaggaaataatccagatcgttagtattctgttacgcacgttttgagggtgacgaagaagaagaagcttattgtaagagaaattaaaaaacaaagtctgttatcgttgttgtgtttcaatttattgcacagccattaaagaaaacatcatcactaatcatcatcaaatcttctctcattttctctatcgtcttcgatcaaatcaaatcattaccatatatcttttccattacaaaactcagatcacaaatccgcattttttctcacaaaagtgtcgatcaatgggaacgttcacgagctttcgaaaagcctatggagcgctcaaagatacaaccaccgttggtctcgctaaggtcaacagcgaattcaaggtcagattcttgatttgtttacatcaccattgtgtaaagctttaaatttaagattcggatttaaacgatcgatgcatgttttttttggaatggatcgttataggatttagatattgcgatcgtcaaagcgacgaatcatgttgaatctccaccaaaagaacgtcatgttcgtagtaagttcctctgtttttttaaccaaatttcgacaattcaacgatgattcggagatttgaacgatgatnttttacgcagaaatattctcgggacatctgtgatacaccacgagcagatgtagcctatggcattcatgcattatctaaagattatcg

SEQ ID NO: 13952 - DNA, 816 bp, Arabidopsis thaliana landsberg
cattttttgttttaaatagttgctgaatatatttggaatattttttagtttgttaatcaatttatcgttggaaaaaaatcaataattaatagttaatggcaaccattgtaaataagtcccaactctaggatttatttcacaaaatggctgcaaaaatgtatatatagattatgaaacggcacagaaccaagtattttatttgcttgaaccctatatacgtggcatttgtaagagattgtaaaaaagcaataaaattttaaaatcagtagaaagtacaagattttcttacaaagaaaatgtttaatatattaaaaatgtaaaactcaattgacagtgagattcgttggtagaaggcaccatgcagattcatatgatagatctaccaaaatgtaaagaatcttatatgcgtagttgacaaatggtgtcatcagttcaataattcgccagaagttaataggctaatgggagtacctgacaggccaagaaaaccaatctatttattttgcttacaaattctgaaaaaattaaacaaagactttggtaatctcaatacatatgcccatattgacttaatctagcatgtgcctaggaagtccatatactagaaagtcatatattatcatcatttcacagctgtttccacgtattgccaactcatacaaacttgaaaaaaaagaattaaatattaccttgattaatcgcaacagataatagatcgagtttgttattgaattattgtgtataatataagtgaattgatattcttttgcaaactttattaaaattgttttaatttaattgtattttgacaaattt

SEQ ID NO: 13953 - DNA, 900 bp, Arabidopsis thaliana landsberg
cgaggatcccccctttgatgaaagatatcagagacgagtttgtcatcagcttcaagaagaagtagatcctcgtgaggcccaaaacatgggtgataagaaattggtagcgaagatccagattaaaaattaatcactgcttcaactcctccaatttcttccattactagaaatcaaatgtcacgggtaggtaagcgacgattaagcagagaagtcaagaaatgtttccgaaaattcaaatcaattagacaaagacgcatgaatcaaacctgatgcgaataacgaatcgtctgggtagtgtccgaataacgaatcgcgaggttgaggatgagagaaggaaccttcgagctagggctcttcaggtttcgcgccttattttaggcgcgtaggttttaattctcttctctgggctcaaaggcccaagttaatgggtcaaagaaaaggaaatatgattaccaagtaaaacttaagttaatttggtgtgtgcaagaaataacaacgattatactggagataaccacaagtactaaatagttgtctgtttaatatatcaaccaataaaatcaaaccggcttcgttcatcgaacccaaaccgctgcatcaatctcatctctagccttcttgtatagctcgagcctctttgcacattgcattctcctttccatcaatgccgggttctcatctagcaactgtcccaactgtttcccctgctaaaaagaaccaaacccaaatccttaaaccggaactaaaaccaaacttagctagttaaccgaactcgataaaccgaatgtaagagacacaaacctgactctggctaatctgtgtatagaagtaattaagcaaagagagcttcgcttgcttgacttgccaatgagtaacagcgttaggaatagtgttacaagt

SEQ ID NO: 13954 - DNA, 694 bp, Arabidopsis thaliana landsberg
gggggcgagccaggttaaaatccttcattagtcgacggaaacacattccctgctcataagacaatttctcgtaattaagagtggcctttggttttttaagcttccaattaaagagaactaaaaaccctaaaattaccaattgagatagcttaccaatttgcaaggagtatgaaggcaaagaagaagaagagtcatagaatctctgcttctcgaagtaatatatttggcgatatttaaccaagaggttcaccgtcttcatcgttggtttcaaggagaattcatgtcttttcactgcaaaagcgcagatgatgacgagcactttttggatctgaatctcttgattccatgtaattaattagcgaacggagatattcagattgtgactcgatcaatttcgatctcgttcgtcacaacttcgattatttctagaatgatggatctaagatgggagaaagagagagatctgagaaagagaagtaggaagagaggcggttggctttaacagaggaaaagcaagttgtttggctgagatagaaggagagaataggtttttttatttttgttcaagtaattttttttttggtctccaaactatattaagaaacgtaacagcggcggtaatagtgttattgtggtaaaagtattagcgcctatgacaaaaattcgttttccgcttagtgaaatattggtttag

SEQ ID NO: 13955 - DNA, 495 bp, Arabidopsis thaliana landsberg
ctagctgaatgtcaagagaatgaaaaccgaaaggtaaagtaaacgcatagttcggtaatacatcggctaaacgattagtttttctatacacatgagaaatatggactatccagtcccttgaaagaaagccatagcacaaacgtattaggaaaaacaacggatggttctcaccaatctctgtcgttagaaaacccaccactatctccaagtcgactttgcgttccaatcgcgtgatccctttctcccacgcaatatataacccgtagtaaccccccccccatagctcagccaaaagttttgaacatatccctatgttcaatgcaaagcctcctcgccaattcccgtccccatctcgtagcactcctcccgccgatgcaagtcatggattacccttagaaacatcgtccgtattaagtttagtctagcccacataaggtggagactgtgcaatcaaccttgttacccacgcaggtttgatcacccttcccatcacta

SEQ ID NO: 13956 - DNA, 625 bp, Arabidopsis thaliana landsberg
tgtttttttcgatcagaagagctctttcaagaggtataaaactttctatttccacttgcttttgtttcctttattttttaactcacgtttcaaccaataggttgagactaaggaactagagaaagaggagacttcaagaagcaaacatgtggtggaagaaaaggaaaaggatgaagcatcttgttcaaaacaagttgatgcagatgcaacagagtttgagccaggtaaagaattatgttaccacaatcagactttacccccatttgttaataggtgtgacgtgttctgtttagatgatggatcaatttctgaaaatgcagattacaagtacccgttactaaagaaggcaagccacatgttgggtgctattcctgctccgcttgcaaatgcttctgagttccctacaaaggatgcagctatccggttacacgcagcacaatcatcaggttcagttcatgtaaccgcaggtatgatcacgatatcagacagcaacatgggctggtcatacggcaaaaacgagaaccttgacttgatcctttctttggggttggtccaagggaataccgcccccgaaaaatcagggaatagttcagcatgggcaatgttaatattcatgtgtttctgg

SEQ ID NO: 13957 - DNA, 442 bp, Arabidopsis thaliana landsberg
tctcactcttaaaataattatgtctttatttttattatttattatctaataaataatcgatctctattttataggaaagatagtttcatcacatatagagcgttctgcgacgcattaactgaggaaggagcgaggatgagttcacttaggtaacaactatccgggtgatctctacgacgaatctgaattttggaaatgagtcaaatgttatgaataatccaaatcttcctcatggatttgtacaccgaggagttcatcatcccgacattaatgctgctatctctcaattcggtctagggtttggacatgacctaagtgcaatgcatgcgcaaggtacatcacataccaatcctctttctaaattagttattcatatatatgaaatatatatatatattttttcttttgatgaatatgttataatactattatcaattcaatt

SEQ ID NO: 13958 - DNA, 637 bp, Arabidopsis thaliana landsberg
cattcatattttggtgattcctggataacaacatcaagaggttgtgcccttccattgtagaaataaggaagcatgcattgagaaactgtggctgctttctgcttctcaaagctcaaatctttcacacttctgcacagattaccaacacagcccatattaccaatgtcaatagaaagttcccaagcaaactcaatcgggatggcaagaaaagtgaaaagaaaatcaacgaattcttctctgcactcagcatagagaacagccctgtctgtctttctaacataaactttcaaagttaagagattgtctgcagctcctgcaacactgctttcttgtacaagtggtgtcaacattttacgtttccttgacatgcaatgtttcctcaggaaggtgtctgtcaatggagctttcgaagtgaacaaacaccctagcaaagttagaatctacatttacaaaagacagttgtgttagaaagatcgttattaagaagttgtcatcaagggtagatattaaaaagttcaagtacctttcaaaaccaacaccaataagcatttcttgcagcttatcaaaaccagagtaaccaaaatcattgaggacatttataacaggacccatagagttaatgccactttgagaacat

SEQ ID NO: 13959 - DNA, 543 bp, Arabidopsis thaliana landsberg
ctgatgattagatcattagatacatattttttttcctttagtatataatattgatgatatagaactctcaactgggatctatctcgttgcaaaagaatggagaaagactaaaataatcgtgagactatcattacatcaaatgatattttagaagagatctttcaatatcttccagtgaaatcacttgctaagttcaaggccgtgtcgaaacaatggagatcgatgatcgaatcaacctatttatcccacaaacgtctcgttcgatggggattacaaaccccgaacacgaaacttcttgttgttcatcaactgtcatcaaattctgactcaacaactttgcttttgaaaactttttcaagagatcatgacaataacggacaaatatgtctttcttcttctagttcttatacttttcctgataatccaatcaaccaatctcgacacgaaactatccaagtcttggggtcctgcgacggattggtcttggttggaacctaaaattttaagtacctttacttaatcaatccaacgacgggagaggat

SEQ ID NO: 13960 - DNA, 440 bp, Arabidopsis thaliana landsberg
tttgagggtattctttctttaatatgcagtagtagcgccttgtcatgctttggaattttgttttcttctggatatattgaaatttgaaagtgatgagttatctttccaaatcatgatgattaatgcattattcgtttcccttgatgagtatctgcaaagtatcctgaaaagttaagctttaactcgactctatgattcggaactatttagtattttgtaatccatctaatttcttggtttttcagaactatcaaccgacagtggaatgcagagttcagttaataacatcgaatctgaattaagtgagataaggctgagtttactaatggaaatcgagaagagaaaacagacagaggaggctttggagcagatgcaaattcactggcagagactccgtgagcagttggctcaggtgggtctgttcgttcctattgatccta

SEQ ID NO: 13961 - DNA, 685 bp, Arabidopsis thaliana landsberg
tgaagcggagtcggtgagcaaggcgcagcggatcgttgtggaactcaacggagacaatacgaagcgattgattgatgggaatgagtatgtgatggttttaggttacgcgccgtggtgtgcgaggagtgctgagctaatgccgagatttgcggaggcggcgacggatttgaaggaaattggtagttcggttttgatggcgaagattgacggcgagaggtattcgaaagtggcgtctcagcttgagattaaaggtttcccaacgcttcttctgtttgttaatggcacatctcagtcttacactggtggattttcctcgtaagttgcaaagtcttgagcttttaatggattgttgtgtttgaagttcagatttttattgaaatgttggtcttgtgttgtgtttagagaggagatagtgatttgggtgcaaaagaagactggtgcgtctactattaaacttgatacagttgatgaagcttcaggatttctgaagaagcatcatactttcattctcggtctattcgaaaagtctgaggtattcttcagattgtgatccttggatagatttgtttgtttagagtaactggttttatgtaatgtgtttttcgataccttgtttgctcaggattcttctggacatgatgaatttgtaaaagctgcgtcgttagcaatgaaatccagtttgtag

SEQ ID NO: 13962 - DNA, 614 bp, Arabidopsis thaliana landsberg
aagatttggtttcgggatcatgtaccaccatttgttgcttatatattagattagaagataacaataacttaccatttttcttcttcttttccaaaactgctactggtgagactgccaaaaagtgcttcccaaacccatgagaaaatatattcagatctaacgtaaacattttgtgccatttcttgttgcatgaatcaaacgaccataccacttggtcaggccacttgttctcggatatgcacaagcggttatccaagttgcacatggcaatgttgtcacaatttgcaatgtcaaaaggaactttggagattacttgaaaagtctcggtatgaagatctagagatagaactttgatttctttgcatttggtgaaccaatgcagcgacccatctacgtacacaggatcatggaaagcaatgatccggtaaggagaagaaggggtaatatacttccaaacattggtcctaaagtcgaaaacttcacacgtagtagcgtttcttagtcctctttcttgtgaattatataagcgaaccggcttgtatgtgccattgatgatgtttttgccgaattcagccaagacaaagggaagacactacttattcactacaagattt

SEQ ID NO: 13963 - DNA, 611 bp, Arabidopsis thaliana landsberg
agatgtccttctcttatgcgtctatcggaataggcctagccatcgctactgtagcaagtacattccccttctttatcttaaaacatagtggtttatatggatgattcttcaaagttgacactaaccgtgaaaatggtatacaatatatatgaaaggtgggaagattggtaagacagaattgacagggacagtgataggtgtggacgtaactgcgtctgaaaaagtttggaaattgtttcaagcgattggagacattgccttttcatacgcttttaccactattctcatcgagattcaggcatgtactactgattcctactatcttccgtttactattgttttcatttgcttgttattattaatttcgccaaaaagaggtaaaataagaataccttgaagataagatgttattattgattagaaaggtaggaaaaaatatagatggatggatgatggatcaaatagtttcatattttagatatgtgaagctctaaagatagtgacgctctagtagtatgtcttgtttattttgcaagacacattgagatcaagcccaccagagaacaaagtgatgaaacgagcaagtcttgccggagtctcaaccacaactg

SEQ ID NO: 13964 - DNA, 591 bp, Arabidopsis thaliana landsberg
gcactttaaaacatgtgcaagcaaaaacaggggacaatacaatgagatgtctgagaggagactgcatgatgctgagtctatcagcaagatccccaagttctgatatgaacagagccttctccttcactaaactctgatttgtttgattcaaactcaatttcctctccatctgcaacatttgtaacacaattatacacacttttcttaaaaaagagaggaaaaacctataaaacaagaatacatgacaagacagtacctttctctaagattatatgcacaacgcaaaacggaaccgcatcaaaaagatcaactcctggcagcgtcatccaagtggtttccctagagccatgagatccacacgtgggaccacatttgttgaaccaatggtttggtttctgtcccaatcatcgtagaaggaacaaagactagtagtctttgtagttggagctcttctctttctactaccacaatctactggcccaataatattttattcagaccaaacatacatataggctcttaatgggctatatgggaactcgatcaaacgctcgggttagaagatatgccgcctcgtacacgttagggttt

SEQ ID NO: 13965 - DNA, 351 bp, Arabidopsis thaliana landsberg
aggcctagcagccgctcagtggaagtaagtttttttttcttcaatatctgttcattacatgtttatctgttctgtgtgctgaatgatttaccttttttttttaatctaatttagaaatccctgagagctgaactgagagcagaaactctagtcacgagtttattaagagagaaattgtattccaaggaacaagaaatcgaacagctgcatgcagaagtagctgcaggggtacggggtaacgaagttcttcaatgtgaaattcaaaacgtattagacaacctatcactaaacaaccatcaactaaaagacctcaagctgcaggtatttcagactttacatttttgttactca

SEQ ID NO: 13966 - DNA, 519 bp, Arabidopsis thaliana landsberg
gtgatacatatatatataataaataaataaaaaaggttaaccacaataaaaacccttctcctaattaaaaatatatcaacaaacaaaaaaaaacatattttataaattatgaatataaaacaatattaaatacttaacataaaaccgcataaaactgatgcccgcggtgaaccgcgggttgaatcctagtattcactaaatgaggagaccttataaaatttgattgttctcgatggacctttgaaagcatatgtgggcagtgtgagacgacaagttgcaacaaacaagaggagaaactgctgagcttgcacaagcgaatgtctaacaaataaagctaatatttccttgttcggtgctgaaattgaaatgcaaaatccaacaacaaactgcaaatgataaaagaaacttttaagaactatttacttaaaccctacttagtttgtgaagacagcatcagagagtaaactgaagacaacatgtcaaaagactcatcacaccaaaccaaaataaaaaacaaac

SEQ ID NO: 13967 - DNA, 458 bp, Arabidopsis thaliana landsberg
agtttcccaaagatcacatcaatgtttctttgttggtctgaatatgagactctaactcatttgttggactagtcccatctttctttaatctccggttactctcttcttgcagctgaagtaactgtaaagctcctttagctgcactaatctgtgatttccaagaatgacctttgttcctaacccattcagctacaaatggaactcctaagtaaagagctctcttcccaagttcttgagctgcttgtcttgtgtatacatatccaattgtatgcaacatatccgctccaaaagcttcattcataagacttcaattcagaatgagaggaaatgtaaaagtaaaagaaaaagaaggaaggagaaaatacagtacctgcatctgaaagtctcttggcttcagattctgcgcggcttatgaactcttttttgcctcccgggacatattgactcagaaaatcttt

SEQ ID NO: 13968 - DNA, 559 bp, Arabidopsis thaliana landsberg
aaagaaagaacaaatcagcaaaccccatggattcttctgtctctcctcctctctctgtcactctctcgcatgcacgagacctctcttcctcctttcctcttttgtttgtttcctctcattctcactctctcataacgacaactaattaatcatccctactctgtttttccgatttgaaaaaacaaaacccagatttcgaatttggggaaagcaatggtctttccattaaccaaagcatgagacttgaaacagcattttgtagttgtgtggcgacaacgacgacgatattaaagttagggtttttctcacatgggttgcggaggatccaaagtagatgatcaaccacttgtgattctctgtagagagaggaaacaactcatcaaagctgcttctcatcatcgttgtgctttagccgctgctcatctctcttactttcaatctctctgtgacgttggtgattccattaaacgtttcgtcgacgaagaactcgtcctcgttgggacttcttcttcttcttcccctgattctcctgttcttactcttccttccgacgtagggt

SEQ ID NO: 13969 - DNA, 693 bp, Arabidopsis thaliana landsberg
  unsure (1)..(693): unsure at all n locations
aaatttgaggtgatctattgtagaatctgatcataaggcaaaacgtccttaattacagaaattactgtgagtgcttcagctttcaaacttgttctaataagtaataacacgaaagagagaattctatatactgtatatcaatccctcttctccctttctttgtgtttttgacaagttatggtaaacttccttaaaagagttagctaacaacatcaaatcgagaactttctgcagagattttaataactgaacaatgttaactagttttgagacgaactaacgaatcgagtttaagatggatgcaatgttctttccacgagaccaacgcaagagattgtgaaaaggcttgagcttatgcaccaaaccccaaaacagatcagtcctaaccatctccttctgcgtgactctcagtgccttgcacaccaagaaattcccatactcattcctcgccaacctcatcaacatatctcctccacattccataagctcctccaccaccacaaccattgactccttcgtctccaaaagcacatccacaacgtagcttccatatttctgaaacgagagatcaacaaagtggccacgtagactaacgacgatgttgttcttgctacgcangtcattcagtttaagcacgcgttgtatcacaaagttcccataagcatcgttgcttagtacaagagctttgtgcgc

SEQ ID NO: 13970 - DNA, 658 bp, Arabidopsis thaliana landsberg
gctctttacgtgtatcaatgcatgaccaatgaaatttggttttccttgagtgttttaaggtaaggaatacggctctgctttgttaaattcatcataattttcttggttaaaattaccggatcgaagttgttgtaaactttgtcgttgaaactctgtataaccagcaattgagtcttgtatagtggtctcaaaagattgtcgtctacgactaactcttgaaccacttgcaacattagcgctttagtttccgccagatctatgtgaactactcccacgtctaacagtagagtgagaacttagcctgcttcgttgctcacctcttccagcggagactcgacatgtatcatgagtgaactcattcgatgggtgtgtatcatcatctacattaacacaatagactttttcattttcttgggtctctggtacatgagtttgaggcatattagtaccatcaagatttgagtaaccttgtatgtcaacatcatcccttccctcgttaattatctcttctcttctttgtctagaggactgttgtggttgcgacaaaaatcatgtaatactaaacatcgttgcatcacatcccaaaactctggcggatttcgtttgaacttagtagttaatttgcatccctataaaatacaaaaatatgaatatttat

SEQ ID NO: 13971 - DNA, 544 bp, Arabidopsis thaliana landsberg
cactagactaaaaataacatctcttataaacttatctttattaggtttcaagagcttatatttgctcgtgtccacattcatataatacgtcaacgcgtccttggaatatggctccgttttggcgcgacttatctcctcttttcttcttgaagatatgatcttcgcaaacatacgattgacagtggccaaagctgttctcatcttcctctcaagcccaataccaatccagttttgaagcctccacaagatcaccggtttgaaatgtctataatagattgcttcttcgccaatatccgcagcttcaccgaactcaacttccagcatttcgatggatagtgacattggatcgtaaccagtcatcaaaattgaagaagtatcaaacatgaatctctggaacacatcttgtaattctatgataatgtttttctgagcagcattatcaagaaaaggaacaagaccttcttttaacttacttttattgctacttactgagagctcgatgaaatcttgattgtggaatagggcgtgatttgacttcctcatc

SEQ ID NO: 13972 - DNA, 479 bp, Arabidopsis thaliana landsberg
caaattaccctacgataaagaaatcatacctcatttctttaattttaaaaacagtacaataatgcagggggggttatataaaatgtgaattacgaatccaataagaaatttgtgattcaggggattccaaagatgtttgaggagctgcatatgccaacggaggcaactatgttcaagatccatgatccggaagggaaaaggtcatgggatgttatgtataagttcagtaataaccagacaagattctgtgctggttggattcgtttggctaaagaacttggtttggagatcggagatgtttgcactttcacgctcatcaaacctaccgagatgcttggtagagtctctaaataagagatgatgaagatatgatattagtttgataactctctcaaaatcttttatgtgttaggaatctttactaattatgggtcttattaacttggtacatttgttgtttttttaagactttttatgtt

SEQ ID NO: 13973 - DNA, 614 bp, Arabidopsis thaliana landsberg
gatcaaccattgcgagtcccgaagatggtttctttattgcttcttcaactttcttcttaggtcttttctccctctaccttctccgtacccttttcttatcataatgaataatcttccaccgcttcgtcacatctcaaacgttacatatatacatacatctatatatatacactcacacactcatatatatatatatatctatctacacactactactcacatctcatctctctctagcacatacccatcaaaccatatagatacggtgcttttattcttgatcttcttcttcttctttgtcttctcctcagagtcatgtctaatccagcttgttcgaatctcttcaacaatggatgtgaccataatagcttcaactattccacttctctctcttacatttacaactctcacggtagctactattactctaataccacaaaccctaattacattaatcatactcataccacttccacttcccctaactcacccccactaagagaagctcttcctcttcttagcttaagccccataaggcaccaagaacaacaagaccaacactatttcatggacacccatcaaattagctcttcaaactttcttgatgatcctct

SEQ ID NO: 13974 - DNA, 548 bp, Arabidopsis thaliana landsberg
tgggcagagttttttctcaccctattcttttgagtttaagctttaaagtttctaagcttctgttaattctgtatgctgtatatattaacacatgcctctgtggagagttgtcttctgcttgaaaaggaccacgatgtgtagtctcagatttcgaattgttttataggttgtcccacattgtctataagcatcttgtgaatggaccctttcttataatcgatgtttaaagctgacattacccagccttatattgttgcctgttcatttatgtttgaattattcagtgtgccactgtggtgatctataagaaaccctttttatgtaaatacatgtactttgtgcagatatgtgtttggtgttggcatcatattatagagatggctgagaaagataagacagagggtcgttgtcctgcatgtcgtacccgttatgataaggaaaagattgtagggatgacagtcagctgtgaaaggtagatctgaagctgaaaacaaacccttttttgtttctgtgaaacgtgtaaaaacttatctttttcttggtctgat

SEQ ID NO: 13975 - DNA, 722 bp, Arabidopsis thaliana landsberg
acgagatggtaagggatgcacttggatatactgggattgtgctttgcttgcttggtttgctctatggtggtttttggagaatacagatgaggaaaagattcaagttgccgggctataacatctgttgcgggagacccgcgattgctgattgtacactctggttgttctgttgttggtgctctttagctcaagaagtccggaccgcgaattcttatgaaatagtggaggataaattttgcaaaagaagagaagaaaatagtatgattgatgatgaggttgtcgtatctgcattgcctcgtgaagacggtgtgtttgatccgagttgcttgcctaagaagatgaccacgacgatgatagctagctctactcttagcccgagcagacagaaagatgaaacttgcttgggagagaaaggtgatgaagctctaagtccaccttctcctccattcatacacagagaagctagttagaacttagaactaacagattttaatgaaagtttgttaatgtataaccagatatactatatctaattgaaagtaaagtttaaattcgctttgggtttattggaatttacgagttataaacaatggttaaacaggttttagttttctttgaatttttacatatcgaatacaagttgttgtttgaaatggcttaagttagagaattatgtttttttttattatttcatgtggagcttaccacattaccttgaattt

SEQ ID NO: 13976 - DNA, 469 bp, Arabidopsis thaliana landsberg
ctacgcagatgttcactaatcctaacaactatccagtcttcaaaaaggacaaggccgggcgccaacgtctggtgttttttcttatccttgagtaatgtttcagatttgagtattgacaatatagaaatgattgacagtgtggttttctcccctatgaaggaaaacaaatcaagaaaagttttgaagaaaaatggacccaggcagaccacggagatggaaaaatatttgtactggaacttccttttcatatccagaacaatcccgatacatctagttatcgatgaaaatcataaaaatctcacagtaaaagtctttgtatatctcttaaaaataaattggtaattttgtccagtttagggtaaattaatttgtgtttggctttctcttgcttaggcaaaatataggacaaagaatatgatgtttttgaaagtgttggagggtagctggaaagtggtgccagactttgtag

SEQ ID NO: 13977 - DNA, 724 bp, Arabidopsis thaliana landsberg
attttgatgagtttgtagatatatgtcatattgttttttttataatagcgcaaacgtagagagaggtttttggggattgccgaattctcaagaaagtaccttaccagctccatctctgaagaataatatcccaagatggtcgtttcgaaatcaacaaactcgagagacgataacaaacacttgggcgcagatgaaaatccgaatgaattcatcaactccaaatgctttaagctagcttcccatttcaagacaagggacttcagattcggacagctctcgagaaaagatggcaacaatttcaaatcacagagagtaacacacaggcgagacacacaaccaaatcgaggccggggttcaaatctcacatattcgtggatgagctttatagtctttgaccatatcgtcatatctccgaccttcgaaattccgagaaaaaaaacggcgcatgttttttctcattgatgggaaggcaagagaaatatctaacttggcattgaaatccatattgattaatctaaagctttctggcaagtaatcataaatgctcaaaaagcatagctgaggagcatcaatcacaattcttgaacccgaatcatgccgagaaaagcgtattcttataatgcgccttatcaatgacctagagagcacccgaaagactttcgcattatgcttcaaacatgcaacaatctttaactcttccgagagggaacaggatgagacaagt

SEQ ID NO: 13978 - DNA, 712 bp, Arabidopsis thaliana landsberg
tttttgatttacttcattttgtgaagacttaagaaaaaggagagacactaatggaaatatagaccgtactaaagtcccaattaagtcccatcttttagttaccctcttctctttacatatgtaacacttgtaaatatgagcacccctttaagcttgcaaaataaaaaatttacaaatatctataaaaagctttttcacgagttcttctactattttcgccaacatttgtatgacaagcaatctgtttatatttgtatcttttttttttttcagtttcatcgatgtgaaatagattattacacgatctagtgcacaactggcaatagttcccacatatagtacacgatctacccctgtcccaaagaacccttcactatctccacggtaagatttgagtgattgacaacgaaaaccttgaactcatcagagctagaaattgtacttatattggttttgatataatccaaggtggcatcattgaggtctttgtcaaaagggatttgagcaagcttaaggacgttaagagcattagaaggaataagagattttataagttggattctgcataggtcacgtacatgcggaatctcatatttatcggctgcaagatagagtgacctaacgtgttgcctccctttagtagaaagcctagatccggaactgtagatgaactcaatgataggttcagaagttgggccttatgggtttttat

SEQ ID NO: 13979 - DNA, 672 bp, Arabidopsis thaliana landsberg
atacagaaaatttgaagtagtgataaataattgttttggattttcattgtctttaatttttatttcatacttaagtaataataatatattattaattgttaactggttttgtatattatttttcattagttctttattttttattttcataaaaaaaatgaaaagacattaattattttcaatactgaattgacaaatttaaacttagataatctgagatttcgtacaatatagtatatcatacttaattagttgatgaatttcttctacacatagtaaaagagagaaatttcgacatacagcagatatttatttccaatttttttatcacgtaaatccatttactttttataaaagttttaaaatagaaaatatatgtatatttcgaaggaattatttttgatttttcttttttcatcaaaatgttttgaaattgctacttatactaaaatcttatgaatttgccatttctcaactcttacaactatacgtatttaggattttttttggcaaaaatatgtactaaactataaaaataactgcaatcgactaaactgaaatataacaaataaaacgcatgttaaatcatatttctataacctaaaaaaaaaatcacaaagtattcaaaaagaacaaaatccgaaaataccatctaaaacatgacaaattcat

SEQ ID NO: 13980 - DNA, 694 bp, Arabidopsis thaliana landsberg
  unsure (1)..(694): unsure at all n locations
gatccaagactccaaagtttaagatataacaaataaagacattccccaataccacaacaagatagataatgtagattaacaaggattatatgagaggttgaagacaaagtttaagtagcattttgacacatatgagataacaataaatcgaaagatctttcatgaataaatcgatggacaacatgatggtcattgtggtgactttgatgaagaaattgaagccttctcacagacacgaaaagatctacttggagtaaagcataggttagaatctcacggatttatagtcggttaaatttttcaatagaagtatatccaaactctaaagagaaaaagaaaaaaaaacttccaaggacaagagatcagaccacgaggagtgacacacccacttggctaaaggttgttggcaattctaatgaannnnnnnnnnnnnnnnnnnnnnnnnnnnnnnnnnnnnnnnnnnntccaaaatacatatgtacttgattgtaccaaaacactgttacacacatggaaacatgttaacactgttacacacatggaaacatgttaacactgttacacacatggaaacatgatacatacattgatacacccattacacatacatacatgcgatacatgatgcaacccttgatttgactttcactacatataatagtccattctataatttacagaaataatcagagaa

SEQ ID NO: 13981 - DNA, 667 bp, Arabidopsis thaliana landsberg
atctattttgaagacaagtttttatcatgggtagttaatcttgattttggttaatggagatctggattttgaggtgggagaagagtaaagaggtaaatgctattgaaagatttattaaaggttatttgtcaatgtccatatatacattttttgtacactagcctttagatatttcgagacctacattgaagttggtttagggaaagttgggtaaatctctagataaatttgatatgatcaaattgcgttgaacactagttttaagaaaactaaaattttcaatatggacttgcgatgttgaatcaatgaatctttgtctagaaaaagctgaaatctgtttgagtttggtgaatcaaaaagattactcgatcgatatgctaagatggttcctgaagagttgaaaattattagctttgatggagaaaaagaagttattggagtagttgggaggatcatcaaatcttttttggatggaaaaggcaaagtgaatgccggtttccgtgagaatgtgttgtatcttgtgaatgtctgcctgcgcattgtgtgtctagtcacttaccaaaaatttgagccttatgaagactttggcagtgcaacgactgttgttgcgtccaccatcacgtcgattataactgtgtggttgttgtacaacaagtttgagatgggg

SEQ ID NO: 13982 - DNA, 371 bp, Arabidopsis thaliana landsberg
gaaaagtgtactctttctatacgtcgataaccatacttgttttacctatggcaaggaactggccacacactataggctgatcttaatcgtggacattatgagatgatggggggagaaggtgatgaatggaaaactgcattacaagctacaccgggtgtatcagaatggtacgcgaggcgcatctgcctagcaagagcacgtactacatacatgaggctaatgaacatgcaacgtagggcatataaccggcataatgtggaggcttaccctgatcacttttaaacatatatccagagtttggcatagcatggagaccttctaccaccggctatagacacgcttaaagaggtatggctatatcccgaacataa

SEQ ID NO: 13983 - DNA, 319 bp, Arabidopsis thaliana landsberg
  unsure (1)..(319): unsure at all n locations
gagatgttaagatgatctctgtttgatatgtggctactgacccaagaaggtaaacttttcatttgtattgagacataatgcgattatacatcggatgaggctggctaacaatgnnnnnnnnnnnnnnnnnnnnnnnnnnnnnnnnnnnnnnnnnnnnnnnnnnnnnnctaatgctgctgatcctggtccggatagcgaagaatcaagcgatgtgcgcacgaatgaacctaactatggagcggtaacttcacctgatctgtacatgcatcaacactntgtatatccacctagacgagcatgagaatataccacatgctga

SEQ ID NO: 13984 - DNA, 935 bp, Arabidopsis thaliana landsberg
ttaattacggatgtctatataggttttcttatatcatggtattgtatagatttttttatgatacattatatatagttcattcttatttactatatgttttcacgttagacacttcacttcttgtggattgtcttctttccaatttgtataacaagaaaatccgaattatattggttaaggcttaagttggaaacaagacgaaaattacgacgctctaatctccagagactagacataaatatacattttcctcaatggctaaaactataatataattttgaatatatatatatatatatatatatacatacacctaatgctctctagtaattccataaatacccactgaagaactcttggctattcaatagttcatcgaagtcaccggtaaaacttggaaaagttccgctcccggacatcaaatccgatggtaaaccgttactcaagcggcggccctcgattgctccagccgcttggtgcgtactcgtttccgcaacgctcatttcttgaaccgcaacagaagattcatcagcggatgggatcataggattacttgtaggggaagaaacaacttctttttcggattttttggttaaggttggtttgggttgggaagtttttgctcgagtcgaaccggctaatgagtttctccgggttggtagttcatgattgtgctcattagtgtatgttatggtgaatttctccgggttttgaggatttctttcgacttgttttcttgccaaacacccttttgagctactgcatctgtaataactcctgaaaaaaaagaaataccaaaattgagagattagtaaaccggttatgtttgattaggagaaaggaagatgagattaaaccgggattggttaaagaccttgggtatggagatcctttgatgggtttctgcccgtatttacgccacgcccatgcgtccg

SEQ ID NO: 13985 - DNA, 512 bp, Arabidopsis thaliana landsberg
gattgactcataagacgtcgttcgcttcacaactctcagatcgaaatatctttatactttatagataaatctcaaccgtccaaagtgccatgccattaagttcctctatcactttagatatttgcttttttttcctctgtatcagaaactacgtcgttttcaacaatcgtaagtgacttctgatacgtattgcataaactcagcatcgttctcaatcccagtcatagtctccggcgccagaactacttccagatccacgcttccgtttccttctctaccgggaaacgccgagatcttcccgtcgaatttattcgctccgccgcttctcacagctaacggttttccccatccgaaatcattgtcgtacattgggaatctcggcgagctccccatcgtgatcgaagctccatctggatttccgagaggaaacagcctcggatcgctttcccaagcggcgattccacggcggaccgtcgcgtcgtcgtgcgccaccacgttcctgtgtaactgtt

SEQ ID NO: 13986 - DNA, 609 bp, Arabidopsis thaliana landsberg
gaagatgcttgaggtggagaatttacggaggcagagaaatccaaaatattggtagatatcctatgattttacttcctcttatagaaggagccaagatccaacaaatccacgagttatactactcactcctaagttcttttgaaattggttacaaaactgataatagacttttacatgctaaaattgagcattttaatatttttcagaagaaaaaaataataagttagccgatcaaaaagcagagccagaaataacttgtaacaaatttagatctaaccaccaagcggaagaaatggagaaaatagacctaaaaaagaggttaaaaccccaatttcaaagtaacagaattaacgaccacaaaataataacaagcaaaaaatcgcaaactgtcttaagcctttttttaatccaacaaaaccaatctctcatttgttcttctgcataatctctcacacacttctatttctccctctccttgtcacaaggaaagggcgtagaagaaaccaaaacctaaacaaaagagcaataataactcattaaaaaaccaaaaccaaaaaaaaacaaaatgggtgtcaaaatgttattaatctttggtctcttgatcttagc

SEQ ID NO: 13987 - DNA, 959 bp, Arabidopsis thaliana landsberg
  unsure (1)..(959): unsure at all n locations
ctgtatatgaaaaggccatataagtaatgccattattacataccatgaactttacagagtattaagcccttatgtacttcttgattgatgaatctattaatttataccttttgatacgggctttttccttttcaaaacaaaaatgagagccaacaaagcgataagagccgccaatgaagcaagagacgcaaaaaccggcactaggactttcgtgttcttgcatgagccagagagacatagatttgggtttccttgaacactatagaacaagaatgttattgaatacgcaaaatcatcacgaacaaaaaaaatatattaaggagaaatcttacaccaattttagccctttcttttctctattgtgaagggctcgaggaattggaccggttaagctattccaacctaagtttctgtcaaaacagagaagaacattttgatatatacacatcatccataaatctggtacaagagagtgtgatcacttattgtttaccatgaaataaactcacatgatcgacaatgattccatgttggctagaaattcaggtactcctccagttagattgttattcgataagtccctatcagtcgattaggataacaattaataagaaatattaaaggttctgacaaaataaatgcagtttaaaaggatattgttgtctcacagttcttgaagatgtgttagattttgtatgctaggtgctatgaccccatttagtccacttgatgataagtctctggttataagaacgtaacacacaattttagagattttttaatatgaaatctgtgattaaatagtcttacaaggaaatgattcttggtggagaagaagcatttgtgtagctgcaatttatccccttccatttgaacaaccgaggaacacacggatctccttgccagtctattctactcaattcataagcagctctaatattctggaccgcancgactgc

SEQ ID NO: 13988 - DNA, 671 bp, Arabidopsis thaliana landsberg
tggactcaagaaactaaaactttttttctaactgtattagtccaatttaggtttacgaggacatccttttttttttgcaactgctttttgtttgcaggcatcttctggcctatccaaagggaaataaatttaataatagtttgtctctgcatctggtggttgatgatgctagagcattgccttgtggatggagaagatatgcacaattctccttaactataataaatcaacttacggacaaactctcccaacgaggagataattctttatttctaaactttatattataaaggatattttatgattctacaacttgtcatggacactcatgtggctttgtgctgctgcaagattcttgctatgcattgtgcaattttattgcttgtttggattagagtttctatatatttcgtgaacagagaaacaaaattggtttaatcaaagaaatcttggctcgggttttacatctatgatccctcttcccaaccttcatgccaaaaatgctgggtatcttgtgaacggagaagtcaagattgctgcggagataaatgatcttgaagctattggcaagttagatgtatcagaagaatctgaagagacaaaccaacctctgaaaaagataaagcttgatgataatgatgcagtgtcttttgattctcttaacgagactt

SEQ ID NO: 13989 - DNA, 987 bp, Arabidopsis thaliana landsberg
gacgcggctctcgtgttatcgaaatcgaaggtttttggtcttgaattttgaatctttttgtgattgacttttgttttgaaatgaatggaattggtagctgtagagattacaaatgatcaaagtttagcttttggagccaatggtgctattttaaagttagattcatatctgagtgtgtgggctgatgattcttatatagcctattacatagctgttgtcttcttgatttcctaaattttgcttcttttgatgattgaacttgtgttgaaatgaatggaatttgtagctgttgtctgtagagatttcaaatgatcaatgattggattttggagctaacggtgctatttaaattagattcaaataagagttgatgattcgtatagcgcctattagaaagttgctgtcttcttgatttgcttgtagctttgggtttggtcaattaggagcaatggatcgaatcttatagggaaatttgaaagttactctttaggactaagcaagatttctaaatggatggaactggtagtggtagagctcttggtccactggtatcacttgaatcagaatcggatcagagtttatggccgaatcttatagttcatttgatgctactatcttcctgaattgcttgtaatctggttaggctcatgttagtgaaaatggtaaacatgctcgtgtttgcagttcaagatgattttgttacacagttggtaaaattgaatttggttgataggaccattgggtttaaacgaatctattttcaaagctgctctaaacaagattgatttcgtgttacaggaactctcacagttgagattcaagttatgcccgcgagttttaaaggaacatcagttttggaggatatatttccagcttgtgaggaagattgtggcaaagtaagtactttcttatgccaaaaaatttcgtttgagatggttccataactcccaggtgtaatggcccttagtagggtggttaaaatgccac

SEQ ID NO: 13990 - DNA, 741 bp, Arabidopsis thaliana landsberg
  unsure (1)..(741): unsure at all n locations
ttttgacaggttctcttcctctgcaacttgggaagccctcaggccaagggagagtccggtttcgtggacgcgtgccgtgtggttcaagggtgcaactcctaagcatgctttcaacttgtggattgcccacctagaccgcctgcccacaaaggttagacttgcgtcttggggtcttcagctggatactacctgcaacctttgtggctatcattcggaaactcgcgatcacttattgctgtcttgtgattttgctgagtacctttggcatgctgtgagtatgagacttggcctgcagtccatcatctttgactcgtggcagcggctcattggttggctatctgtcaagaacgcaaggtcgccaccaacgctcagcaagcttgttgcgcagtctgttatttacgccatctggaagcaacgaaacaacctgcatcacaaccaagcttatgtgctgccttcagtcatcttcaaggaaatcgacagagagataaggaactccatcactgctagaagtcacagaaagcgtttcaaaccgctaatgagactatggctccactgatttggcttgtgcctaattaaatattttgctttcttgttttattttttgccaagaaaccaactggaggtttaacattcttcttgtnaagcttcttttcatctatatgatatttgcattntagcaacaaaaaaaactagtcgtgcagtggtaaaaatcatcaaatagatgggatttgacaaaactta

SEQ ID NO: 13991 - DNA, 834 bp, Arabidopsis thaliana landsberg
tatcgacttcttgaggcagtacacatgggacaagcatctagagtcttgtgtgaaatttacaggaatcttaggaggacggaagaatgaagcaccaacagtaatctctccaaagcaatataagagaagattcagaaaagcaatgacaacttacttcctcatggtccctgatcaatggtctccgcctaatgttgttgcaaataactccaagtctgatcaacctgaagaaacctctcaagccggtacacaagcagagtgatacaagaatcattataatgtaagtttattttttggtcttgtatagatttttggcatttgggaacacattattattcgttatttctttctttattggaaggttgggtttctgtcagatatcgattttgtttgcgtcttttagattttgggtcgttaaagtagagacttaggagattgtctgaaaaattcctcagaaagatagagagacatttctcttgtgtatagcttttgctttaatgtgacatgatttatgaaagattcttttgtttatatgttggatcctcgtacccttttttttggtgaaagattgaaatcaaaatctggacgtaagtttcttacaaaagagaaacaagaaagaagcaaatcgctgcttctttcatagccttttttctgtacattcttattcaagaggcctttttgaagagagaaccagattttgatgtttcgatgaagaaaaaagaaaggggatttagaggaagtcaaagctgcttcatttgatcatcatgaactcttgttctgaagcaattatcggtctttgaccatccttgtttgaatcgctcagctcctgataacttcttt

SEQ ID NO: 13992 - DNA, 902 bp, Arabidopsis thaliana landsberg
  unsure (1)..(902): unsure at all n locations
cgatatttttgcccatttcctctccccatgttgcctcaccaaccttatcaactttttatatatatacatattagtttgtattaacaaacgcatatactaaatattttgactcttgtatagatgcaataaaacattttatctatatatacctgtcttcttccgccgtccattgccctttgatgaggttcttggatgatcgtttcttcgtactgttttgataatctctggctgcacttctagcgaccacttctccagtagggtttctgttgccgccattaaggaccaagtgtttctccctcgtcggcccaaacgttgtgttctctttgttgtcgcttctagtctcaatcgatatttttgtcttcacgatcggttggtctctagaactctcttgtttcttggaacacaaggcatcattcttttgaccgtataagaatctctccacggctgtcaacggcggcgcagctccatggacaaggcgtcggtcttccatggaaaaaatgaagaagaatagaatagtcaaaaggagaggagagcacaaatcaaaggagatagtttagctagctagtcataaggaatatgagagaacttaatgagttgctatataaattcaaaccaatgaatgacccattaaattccattatttttatttttctaaaatatataaaattgaccttatagctatggatttttttttcactttataaaagaattaatacaattntttatatatatataccccagaagttaacaatgagtaaagaagactacaaaatctgataactaggaaatattgatattatcgattactataactctatgacgatctagacgtattagtcactaaatttcaaatcgatatttttccaaaatcctctatcatttcctattgtactttatatgac

SEQ ID NO: 13993 - DNA, 1014 bp, Arabidopsis thaliana landsberg
cattattcacttgtacataactattacatccatccctttatattgaagttttcatttcgactatatcatcaaagatgtctaaaaccaccgttattgctattttcatggttgtcctcgttctaggtttgattcacacttttattatacatgacttttctcttttatgtgaagttttcttttatgagtcttctcatttatttgatagtttcttatattcgtcgcattttattttttaataacaaaaaagaaattgagattatgtttaaatatttataatagggcttgtgacaaaagagacgcaaggacaagaattgtgtcacgactatatgtcaggaacagaactatgtgaagaagacaagtgtgtagctaagtgtatttggatgcacgggacagctgcaaaaggcacatgtatgccaaagccaagcaagcaatgcgtctgcacttatagttgcaacgcttgatttttcttgttctctctataaactattctcagttctaataataaaaataatatttcttaattttgaagtgtttgtgaattatgattttaaattatttggcataaactataaattggtaatttagcatactaatctagaagatcgaattagcccatccactttaaaattacaagaacgagagatatagctagttagaacgagaaaaacaaaatacgaaacaaattctatttaatatatatatttttgaactcttatctatttagatgaaatgcatataattaaaatataattatttatgataaaatagatagtgaaactgtaatgtaaaatgaggtatatgggatctaaatctggtttttttggactggtagtcttatcggtaaaacttcagctactatttttgacattttttccataacattttttccaacgactattttttggtggctgattttggagaaaatttaaattccgtagggtacttttaaaaaatcccaaaaggatatttgtcttggtttttcgggtaggtaaatggcaatctaaaaaaaaaaaa

SEQ ID NO: 13994 - DNA, 897 bp, Arabidopsis thaliana landsberg
tcgcatttgttatgtttgacttagtatcaatctaatttagtactatgtaaattttgatattgactaacacgccagatttaatgttgcatggtttaaacaaataattgttaatttatgtagcaattaagtatatcaattggcacagtttattagttgatgtatatatcggagaagatgacttcatgcatgcataggccacttttgcaataacttttttagagaaagtcatacatccggattacactataatctagtcgaccatatatagaagaagtaactaaagctttcaaactttaaattctttaatctttttcttttgagtcctcttctcaaacttttttgttttgtttttgtattaaattgacgtaaaggtacgatcacatgcatagtggaaataaaagaaaaggtgccaaacaaatatcagaccttagggtataccaaccttttgagtcttattttatcttctcaaatttgctgtcaaaccttaaaactctataatgattatactcaatcatctccatgttgtgagaatcttgttctgattctacatgaaagctttgctcgtaataatttcaacaaactcgttgactctacaagcaaaaccctcatgtgcttactttcaagtaagtatatgtagttttttgctcgaaataacaaagaaaaaaaagaacaaaacagcatcttgtgtttggtccaattcttgaatcttgaaacattcttttgagctctctataactatttaaaaaatggcggatggatacgagaaccatgctcctgaaaaccttcaagtaagtatccacaaaacccaaaatgttttttgaacaaattcttgttcagttgtttgtttatgtatatgaatttaataaaacaggggaagtatcaagcaatgggtggttt

SEQ ID NO: 13995 - DNA, 746 bp, Arabidopsis thaliana landsberg
aaaaagggcctactaaatgatggagtagaaatgtagaggattgttaccgattcactgtgaccagttaaacaatgcactaagctaccatcagcagcattccaaacacaaatcctgcaatctgaatatacactgacggttaaagagaaacagaagatagtagtacgttcatgtaataccaacaggtggcccaaaaacactgctttttaactgttgtgtattttactatccacggttggaacacagtgagactgagagatattcatcaaaatgataatttatgcatcataagatttcttctaagattaattatttacccatgatagcggcaagtacaaaacgattatccaagctccatataatcatattaacaccccgtggtgttggaagaaacctttgacgtgggcctcctcgaggaggttgtggaggaagtggaggaggtggaaccttcagatgatatcctttcatccagcgtccagatttcccctggaaatataacatcgaggaagctgagggaactcgggaagtgatgatagaatcggaaatttgctgtcattaacttgcacattgcattcagtgattgattgacagaacttacatggaatttacgtgatcttggagtccatataattgcactaccatcgcgagagcaggttactatattgtcatgacaaaacctagtagtcaaaagtattaattcttaactaacaatagatgaaagatagaggaatggacgatagtccaacact

SEQ ID NO: 13996 - DNA, 586 bp, Arabidopsis thaliana landsberg
tggaccatgctatccaactcattttctggattcccaatgttgagtcctaccaaaatcttgtgagagctgattgtgttccgtttgcagagagagcgtgggagtttgaagcatgacattgaatatgttggcatggcagctagaaccgattttaacattgttgctttccctgcagtggacagaaatctagaggaccagcttttggctctctgactgatgcggtcgatgatcaagttaaacatgtccttcttctttctgccaaagagctcgggtaagccaaggtattttcccaaacctccagctgtttgaatacctaaaacttgcatagcttcagctttagtcgtttctgaagtcttggatgagaaggtaatggcagacttgtttttgttaatcatttgccctgaggccttttcatatttttgcaggattaggagaagattcttgcatctatgaatgtcagatctgcagaagaacatggtatcatctgcaaatagcatatgattcactctaggactgcctttagccactctgattccaagtaaggctccattctgttggtgcttctgacaataaaccagaaagaaccctt

SEQ ID NO: 13997 - DNA, 805 bp, Arabidopsis thaliana landsberg
  unsure (1)..(805): unsure at all n locations
tttttactgttaaaatcaaatttaaattattttttttctgtttagaattttccttactaactacttcttgtggaagtcttctactattaaattaaaaattataattttaataattatttagttctaataataataattttattaatttatgaaacaacttaaaaacaaaaataaaactcttaaacatgaacaattcctcacaaattcctcaagtatacctcaacatgtaaatgatgtaacaaaatttcgagttggaaaaaaagaagtaattttttttgccttctgcaaaaagggaattttnnnnnnnnnnnnnnnnnnnnnnnnnnnaagaagcttccttctccgataccaattttcctacaacaattgtcgaaaatggcttcagtgagtctcccttctcccttctcaaaccgaacatgttctcttttttcctggtttttcgtatatatgagtttcgatttcgccctcttgaaagcctagtttcgatctatgtggtagacttagatgtatattcgtgttcgtgttgcaattgatttcactggatctctttgctcatttgctcattcatttgtatatttatgacttggttcttcttctgttaaggtttccattgattgatgagacttttcttattttacttattgatgtatctctcgtttggatttatcatgatatatgtttcttggtgttctgattccattcagcttatgtattattggcttgcccccagaatttagaaggcaattgtaattgaaaaaagtctttgcttaaacggaagtgaaactgttgaatgtagttatgtgtt

SEQ ID NO: 13998 - DNA, 662 bp, Arabidopsis thaliana landsberg
atactgtgtatacatacatatcttaaagatttgtacaaatacatatcttattgttggagatacttatagattttatacatacagtgtatgactctatgtaacggattggattttttaaaaacaaaatcaagtacatgtacttattataaagagataacaaaacaaccaaatttttcgttaaatcttcaattcaacaaacagagtatataggagaataaactggagcatcttcaaagaagttgaaaagatatatgtagtagagtttacaacttaaaaataataataaaaaactccttgttctatctttagtttcttgcttctcaagttacatgccatgtcaaagtccctaggatcaatattttgctaggcaattccgcagctgatggagagacatatgtaattctctcttcactaatatcaacatttttgatacacacaaatccagcaacaatgctacaaaaaaatataaatatataattgccgcaaaattaacgatctcttcatccgtagcttaagtataatcatacaaaagttgtagatattaccttgagatgatctgatcaggttttatggcgtatgagatagcaagaactttgttcacaagatgttcgtcaattgtcacaagtgtgatcttcaaagggtcatttcctctttgatgagca

SEQ ID NO: 13999 - DNA, 627 bp, Arabidopsis thaliana landsberg
atcagagaatgatacaatttgcaaaacttttatatataatataattcttaaattttaaaaattactctttaaaaaaaaataacgggacgggtaaagaaattatagaacaggttttattttggaattggattatatggtggatctatttgaatcaatatttataaaattttaaaatattattaatatgctgttttaataggggttacaacttcagttttttaaaaattgtctcatggattcgtggtataacgttatttaataataattataaactgtaaaatataaatattttatacaaaataaaatttgcaaattttaatatatattacttttaaaaaataaatcgttctgcgatataccacgggttaaaatctagtataagatatttaagatgattaatcaagagcagattagcagaatgatctggattttgatttataaagatattttcatatttaataatcgaatttatatgttttcatacaaaatttcgagtttgcttatattaaactggatccaataaaaaaatctgtgtttttatttgggcccattgaaatggcccacttctagttccgtacatgttcgaatcaaaactagtcattataaaattaaatgaactatataaca

SEQ ID NO: 14000 - DNA, 826 bp, Arabidopsis thaliana landsberg
gttatgtggtgtttatcttactttcactgatcttacttccgaatcattcactgtggcttgcttctgctaatttggaaggttcgtggttactcaattactcagctttactcgtttctcaattactttctcgattcttttttatttggaggtgaatcgctatctttagtgtctgcattttgatttatgaaaattgttgttgttctttgtatttgtaagatttagtggctagtactttgaatacactgttttgcttttcttgttcagatcaactttgtatattgtaaaggcatgttctttgggttgaaaagctgggttatttgatatcttaagattgatgttgttgatccaaacattctctgaaagacttcatttgtttttggttttgtaaagaatttgtttaattattagcctctaatctcagagaggcctgtttgaatagttctctcttgaaattagacttttcaccaattgatgctaattgtgtagatttgttgttcttgttataggtgatgctttgcatactttgagggttactctagttgatccaaacaatgtcttgcagagctgggatcctacgctagtgaatccttgcacatggttccatgtcacttgcaacaacgagaacagtgtcataagagtgtaaagctttcttctactaatcccactttttaaactttgacctcagcgtggttaccgacatttttgtttcttttgtcaaatacagtgatttggggaatgcagagttatctggccatttagttccagaagctggtgtgctcaagaatttgcagtatttgtaagttccacttatgcatcatgctttaac

SEQ ID NO: 14001 - DNA, 732 bp, Arabidopsis thaliana landsberg
caaacacgataaaaaatatcggccgatggtatacagaaagccggaactttccggacggcaaagaaagatggcgtttaaagattgaaatcactctctctctaaagaattctagagagataagagagaggattatcagttttccaatttaatttttgatagaaaaatatctcaactaaaaaaatataatgaaaaatctaattaatagtcggttcatataaaacctttaactaaattattattgaaaatcacatttaagtacaaattttaacaaaaaatccctttatttataatttcacttaaatatttcttgtttaatcgatattttgtgacaaagtttattaaaaatctgtaaaaaaatttcttttttcaaaattgctgatttcaatttaaaaattccaaaatcctataaccgtcatccattatcgtatttgtatttaattttatattcatttagttactaaaactatacatgaatttctttgttttcattgttttatgtaatatatataatgccatatcttcattatattgatgctactctaatttaataatgaaatcaaagtatggaacaacattattagcttttagaaaggaattagagcacgattactaagacaaaattaaaaacttgttagctgatcactaataataatatgtttgtgtcaggagggggttggctcaggaattcttttcccaagtgtttttttctcataatccttccacaaattaaag

SEQ ID NO: 14002 - DNA, 763 bp, Arabidopsis thaliana landsberg
ttcattcaaattattcattgaacgagctcatacggtagggattggtctaaagcttggaacaatcgatatacaaacgtttaaaactttgaaatgcaatttaatgcatttctccatgagaacaaaggacacaaagtacctaaagaaaaacaaaagattgagatagtaaataattttgtttcttagatgggattgttgttggtaataacccaattagaaaaggaatcgagagtattcacatctgctcggtaatgtttttgagtgaactcaaggaacatagaccaagtgaagtcagggtattttcttgttttcatcttctccaaaatatcacttggtggtttcaccactttgtctttcttcggacacaagaaaaacgccatcgattttctcgcgctctctctattcacaaccgctctatgcaaacagctcttgaatatcccgttcgatagagcctacaaaaccaaagttgattaaccatttctgtatgagtaaccaaaatgtgtttactttcttagaatgttttcaattaccatgaaagtgtcaccaatattgacaacgaaagccttgggattgggacgaatggattgccattgattgtcgacaaagacttgaaggccattgacatggtcttgatgaaggatggtcaaagaacttggatcacaatgaggtcctgtacctaacgtgagatctggtgtttggcatggaggataatgattgagcctcattatcgaatcgttctcttcgaaaaatcctcggaaatagtctc

SEQ ID NO: 14003 - DNA, 553 bp, Arabidopsis thaliana landsberg
  unsure (1)..(553): unsure at all n locations
gcttcaatcctccaccactccaacaactccaactccaactcctccaccgatgatgatgaattctgatttcggcggtggcgattccacggatcttggttcaggatcaataggaggagagccagcaagaacgttgaaacggccgcgtctagtgtggacgcctcagctacacaaacgtttcgtggatgcggttggacacttagggatcaaaaacgcagttccaaagactataatgcagcttatgagcgttgaaggattgactagagagaacgttgcgagtcatcttcagaaatatcgtctttaccttaggagaatgcaaggcgggaacggtaacggaatcactggaggacacgtcatcgtctctgattcggctactgatcggctatttgctagctcaccggttccagctcatttcttgagcccggattacttgatgccgccattagagcattcgtatatggggaaacatgtgattacgcagcaaaaccaagtggttcgtaatctgaggtatgaagactcngaatatggtcatggtagtatgaagatgcttaagctc

SEQ ID NO: 14004 - DNA, 865 bp, Arabidopsis thaliana landsberg
atcaactagattatcgccatttcaaaaaacaaaatctttactatattaagcaagcaaagacctcacaactatagattagcttgaagcagacaagaagctagactgggtatgaaaaagactctgtaacaaacacacacaaccaagcctagcgattattaccaaaacagagaccaacaagccaaaaggtcactatcaaagacaaaaacattaatctaagagtagtaatacttaaactaagcaacatcaactctattatcgccatttcaagaaacaaatttcttactatatgaagcaaccaaagacctcacaaccatagagtagcttgaaccagacaagaagctataattgaccttgagtagacaagaaaagagaacaaaacagacctgaccaggtccagtaccatctagttccttgtctgtagcacgatactcatgcataatccaattagtacgctctcctctaggagctcttccacgatagaaaacaagagtcttcttcataccaataatcatcttcttagacttaatagttcgatctttcccagtagctttccagtaaccaatatcagtagctctattagaacgatgaccactcggatactttcgatcacgaggacaaaaaaagaaccattcttgatcatctgtctttatcaccgatagccctaaacattcaaacaaaaccctaaaaaatcttatcatcatcactctcaataacaatccaaaattcacaaagcttccacctttcaattctcaaaaatgaaatcatgaagaagaagagactaaccaggtaagtcccatggttcccacttgcatacatcgatctcagggatgactctaacctctaaatcacggccggtgatttttac

SEQ ID NO: 14005 - DNA, 539 bp, Arabidopsis thaliana landsberg
tcaacgtttcaatatcatcaagaacttttaagattaccactttggcatatacttggggattaagcactctattattttttagtttattgcgttgtatcttaagtacttgattatgtccctttcaatcaaaaaagaaattcataattataaatacaaagctaaattaaatggaaataatgataaaaaaaaaatgtgaactcagatgaaactggattatggtctaggctaacaaaacaccacagattataggtaaaaggtcttttaatcgactttaaattaaagataagtgagcttgcaaaagtgaccaaaaaatgacaactaaagatacttgaaagatttgtctaaacagattattgctctatgatcatgtaaattaccaaaaaaaaaaaaagtaagatacgtatggacaacggccattaccaaatccttttttatcaaaattagccaaaaaaggaagtgctcaaaagacattaaattaaaaaatggcagccgtcctgaataaacgaaaatcggtgcctcgaaaatcgaaaatgtaaatg

SEQ ID NO: 14006 - DNA, 652 bp, Arabidopsis thaliana landsberg
tccaaagacacttggagttttagtttatcaaattttgttaggtatctagctccattcaccacaaaagataaggattaaggattgaaaagaagaaaataagtgttaatgaaaaaatatgtaagaatcatttaaaatgaaatttttttgacacacttttcatctcataaaaccacaaagccggccctaaaacataaagttgtatgagaattatctttatcttgtaaatagtgaagcaatttttaattctttagacggtaaaattcaaaatatacaaaataagtgacaaaagacatctttttgtaggtatatatatgcctttagtcaagtgattaagttcatttgactccgcatttcttgtcggagtttgactctattacatcgcgtaattccgcgtactaggaattgattatggatctggccttgtcgatccaaatatgtaaaaaaaaaaaagacatacttttcatagtgtttgtcgtaaaactaattaagtcaaactttttggagtaccgcaccaatcatgtgtcttacacactgggagaagacatgagaaccaataagtagtgtcggtcgcagcgttactataaatcatattttatggcgcttaaaaaaatattttacagtatatatcaaaataaatttgctaactacccca

SEQ ID NO: 14007 - DNA, 748 bp, Arabidopsis thaliana landsberg
cggaagtgaacataaaattgaagatttaaattaccatatccataatttcatgctttaaacccacgaaaatggtgaattgataatttaaatgacattttttcaaattaaatatctgcaagatgctctttttacagtccaaaaattctcacaaccacttacatgattactttacttgtacaatcatacaaattattattttaaagataagtaatttaatttatttttttgcatatagtcattttaatactatatacaatggcagaatcaaatgcaacgttcaaaaaagggtaagttgaccctaaaaaatttataatttttttaaattataggataagtttcctaagataattagaagttttggattaacgtattcacaatgacccctatatcatatgatcaattctttctttgatccatgcatattcattttttcacttaacaaaaacctataatatctttattataaatagatctataatatttatttacttatatcaaggtttatttttatttttagacatatcatgtttcattccttttctctcccaaacacaattatcaaggtcacctttacgacaatgttttccggcgtcggtagggctcctgcttgccggcgccgggttttctctcctctccgacaactggttttcaaacactctcacatctaattctttctttttcatggctttcttccacttttttggcaagtttctacccttatatccaacattatcacgaccgatgcaaa

SEQ ID NO: 14008 - DNA, 1025 bp, Arabidopsis thaliana landsberg
gttttgtttttttattttgtgtggagttttaactgtaaaaaccgttgagccgataaatcaaatatttatgttttagttttcttttcttgatatctatttaccatggccttgtagatgcttcaataacttcaaatttgaaattgttgtgtgtgtgttttagaacttagaaaaatgatgataattgaaaaattagacatttaagacataaatggtaaaagaacataagtcaaacacataaatggtataaaaattggtaatgaataatgacaaacaaaagtaaggagtaaattacaaacaaacacaattacttgtgaaaggataagaaagagcaatgaagtttgtaatcattttgtaaccaatcgtttttacgtttttctttgtagaaagatgagcactcgtccaacggtacaaaattgtccagcaaaaaaaatcaaatccgaaacgggttaagctaaaaaaaccaaaatttaactataacgatcttatctcgaaaagcttgatttattcgaggtcatatagctaaacctgacttctccttgggcaaaattgttcaacagattatacacatcacaaatgatgaataatatatacctactcctaattacaaccctatttaagtgattgaaattactgatggcacattttcattgcgtcataaaagattcattcctagatttcaaccattgtcttaacaaaacctcaagtaattaaaacaaagcagtagaaaaagaaaagagaacttgactacaatgccaagaaacaagagaccatcaaaatgtaaatcttggtaagacttttgaaagagaattgggatatggtggaatcaacggagtcttctagcttctctctcggactcgaggagagtgaggacatctccttctctgacgggtcctttcacgttcctcatgatgaaacggtctgaatcagtgaatttgactctaacctgagtgacctgaccacgagaaccagtcctacccatgaccttcacgaccacggcgtgtttgatttgagaatccattctgcat

SEQ ID NO: 14009 - DNA, 653 bp, Arabidopsis thaliana landsberg
tgaaaaaataaaaaaaaaactggtccaagacatagcattgtgtcttagtaatttactggttcctattctactcatgtagaagtaaattaataagtaaacaaaacaaaaaagagtttagataatggtagagaatttggtcgcggaaacaacttcaaattcggcctcaatcatcaacgtgtcttctttgtccaagtaagtcttccgaattttatctaaggaaagaaatttacaccaaccgtaaccaaagtttgatcccttgtgccagtagttcactgcaagaacaaaaaatgtgaaacagttataatgagagtaattaatatctcggtttgtatatcgaaagattataaaaagtaataagataataatgcaactgtcttttactaattacatcggcttgccacgtgattggatccaagcggctttagaagtcgcacaactacttgcgtgaaaatcttctcatctggttttagtgtttcattatcagctaaataaagaaacacggataaatatttgccctttgctctagagttgcccttcggaaacagctttagaaccctacaaaagattaaatattacgaacattcatacacacatgtctatagagatacatttttgttaaacgaattttatataagaaactcaccatttccctt

SEQ ID NO: 14010 - DNA, 545 bp, Arabidopsis thaliana landsberg
gagatggtctaagagattacataaaaattaaatatcaatctcagcggataacaatctcaaccattatattacttgttggagctatattagtgttacatcaatcgatataatccgtcaccgcttctcaaccagtttggccacatatcaccattgacaaaatttgtggctacccatgactaaactaaatttatccatcgattccggttagagcaaaaaacatacggtgaccaagtctctgttctcttgaaatgactagtatgtaaagaaaatcagtatcacccatcacttcttacttaagcaagtaccaaaacaaagttaccaaatagaccacaaataatattcaatgcaaactctttaaaacaaacataggataaaatgtcaacaaaaataaataagataagatagattggactctttaaccataaaattaaatatcaatctcaaccggatatctatccatacagtcttcccatggactgttagctgaaggcttaacgtctggcagagccacccatactgaacttgtacacttaaaacctgcccca

SEQ ID NO: 14011 - DNA, 731 bp, Arabidopsis thaliana landsberg
  unsure (1)..(731): unsure at all n locations
ggccttttatgctacttctcttctttactccttaaataattacttcttctgcttccatctctttacttgactcattgccttactctcttcttctaattatcctttccatcggataactagggctttgtcttgagcttcattcctcttcttctctttgattctctggaaatgacaatggtcattcctcacttcctcggcattatgacttgatcttgagctagtgtccttctagctcttcccacagacttcccgcttctattacctagaaatactaactccgtccttcgagttaatacaatcctctttgtcttgggcttcacattctctgaaactgcaatttctacgtcttcttcttgtctattccttctcttcatttccttaccacacaagtcttcttaaatcttacggtttggctcaaccaacatcttcttcttcgattacaccatctcctgaaagtctgctcggtaccgccagtagtccattgcttctcccttttgtcgacatgacctttctaactttgtgttgatccccgttgtccttacgagaatagtctttacactctcttttggcgtctactcatgattaaaataactactccactctctctctttttcttcattccctttacggctaccggcgatcggctgtttctatcttttctgatcttcacactgaaggctccttccttcatggctattggcaatatcaaccacactanggctgttcccata

SEQ ID NO: 14012 - DNA, 527 bp, Arabidopsis thaliana landsberg
ttttactctacacctgcaaactttttcggcactactccaaactccttccttgccttgcttgatctatcttcttcttcagctatagtattatcggcctcatgatttccatctcatggatttttacgctacttatcctctttgctccttaaacaattgtttcttctgcttccatctccttacttgactcaatgccttactctcttcctctaattatcctttccatcggataactagggctttgtcttgggctccacattctccaaaactgcaatttatacgtcttcttcttgtatatgcttcttccttacttcattaccacacaaatcttcttaaatctcacggtttggcttaatcaacatcttcttcatcaataacggcatctccggaatgtctactcggtaccaccattagtccattgcttttttatttagtcggcatgacattgtaaaacttatcttgatccccttcgtccttacttgaatggtcttcatactctttcttggcgtctgctcatgactaaaatagct

SEQ ID NO: 14013 - DNA, 543 bp, Arabidopsis thaliana landsberg
gccatcaagttctatgcatatgagcttttcaaaaacgctatcggtgaaaacatgggtgaagacaaagcggatataggggcaacgggtagactttttgctggaggaatggctggtgcagtagctcaagcctctatataccctttagatcttgtgaaaactcggttgcagacttacacgagccaagcaggtgttgctgttcccaggcttggaacgctcaccaaagatatattggttcatgagggtccacgtgccttctacaaaggtcttttcccttctcttcttgggattattccttacgcgggtattgaccttgctgcatatgagacattaaaggacttgtccaggacatatattcttcaagacgctggtaaatctcttaactgctatagtttcccattctgtctgatactgcttgaatgtaggactcataaaacttggcttgggtttggtcttcagaaccaggtccgctcgtgcaactaggatgtggaacaatctcaggagctcttggagcaacctgtgtctatcctttgcaggttgtgagaa

SEQ ID NO: 14014 - DNA, 888 bp, Arabidopsis thaliana landsberg
  unsure (1)..(888): unsure at all n locations
tgtccctcgttaccacaatttttctctaatttcgtattgaatcggatttctatttttgttcattgtttcgtttcgcattaatgaaatcgatattctgatacctttgaaattggatgagaattcgtagaaatgtggttttaaatttttccgatttctgattgtttggtaattttcatagggtttgtgttcttattcttatgttattgtcggaatttaaggattgagaggacgattggattctgtctcgattgtttttttttgtctgaatatttgaggcgaatgtctcccaaaatttcatgaacaattttaggttttgtttcatgataatctgggattttcgattgaatttggtgtaatttgttttagggttacactatacaaatacaatctctgtatagcgttacaaggattgtaatattcttttctcgatattggaatctaatttcagatttttggatttacaatggactatttttgattctctgatgttgcgtgaaatttttctgagtattttcctgggttggtttatgtttggcaggatggttctcgagcagccaaggccttctctagggttagatgtgtactacgaggatttgatttcaagacatatatcttcttcttcaccattgtccctattttcatctttggagtctatttgcatggtcagaagctcacatatttcttgagaccgctttgggaatctccaccaaagccgtttcaaacgctaccccattactaccatgagaacgcctccatggcaacactctgcagtcttcatggctggaaacaccgtgaatctccgagaagggtctttgatgctgtgtngctcagcaatgaagttgatatgcttactatccngtggtaagagctttatccttacataacaca

SEQ ID NO: 14015 - DNA, 793 bp, Arabidopsis thaliana landsberg
catatctattttcaactttattttttcctttcacaaattatttcatgttttaacattattttcttcaacatacgaaatttatacaggagtttttttttgcaggtacatataaatcaatagttgagaaaaagtggaaaacaatagagataaaaaaaattagatgtaaattcgctgtaaaacaaaatgtttaaatttcttttccgttatcgaatctcttttatgaataacaaggtcgagtactcaaggtaaggaaacagaccattagaaaagtgccacgtcagcttatttcgttcttcacttttagcttctgaaaagtactttagctgaactaaaacgacggtgacagactgactccagtagctgctaacagtcgattttaaaaatattatatttatttgcaggaaaaaaaaaagtgaaggaagaagaagaagttggagaagccaagagcaaatctaattctctgactactctcattttcatgtcggagacttgccgaaatctaaagaatttcttcaacggagactgaaaagctttctcttttcttctttcgttatcttcgttttagtgttttcccctttgcttacatttgaagaaatcgagagcaagcgatagaaagtgagagagagagatgtatgtggtgacgcctcctcaaagatccggttttggatccgattgtgatttacgggtttaccaaacatggaaaggaagcaatgtgagttttaatgtgaaagctttaggttttgggaattacttgcttctgtggttatacttgagctagctttctggtattttt

SEQ ID NO: 14016 - DNA, 542 bp, Arabidopsis thaliana landsberg
tcaaaacaaaagtatgtatagcttctgttaatattcaattttacatgttaccatgcaagaggactgttacagtgtttatttggttttggtaaattatagccacctaaaagtaacgccttaattaatcattttaaattatgattaacaatcaagtaagtggaacaaatcaacggtcaggatcttatcctcgcagtaatatgatctgtcattctctaactaaaaagataagcctctctctgtctcttcctagaaaagaaaactttgtaccttttccaaagtctaagcaaatcattgtttttgattactggaactcgttgagggattgagaaaaaaataatcagaagagaaagatccatggctgataattgtatcagacttcttcactcagcctctgttttcttctgtttagggcttctaatttcatccttcaacttgttgcaggtacttgaaccttcataatctgtgtttgaaattgcttacgaatatttatgcatgtaaaagctttcttctagttacgatctgtttcgtagccttcgcgggtt

SEQ ID NO: 14017 - DNA, 540 bp, Arabidopsis thaliana landsberg
taatcagcatgtgaggttggtttctgggaaagctcatggactgttttaattttcacccacatgaccaaggaggggcatgggcatgatttggagcgttaccgttgacggcttggtctcgggtctcatgcgaaaggtttctaaggctaagtgtatgtcgtataaaggtgttttactatctgcaatggcccttcttctttcgtaaatcatccgggaaagacaatagaaacgtcatcgcttcatcttgttccaatagcttcattgcctggttgagtagatggaccgaaaattggtttaattacttcatgtgtattgattgtaatctaacctgtcttcattatctatgaaatatttacaatttagcaaaaaaagaaaaagttgtttgaacttgcccattttacatgtaacaaaaccttttttattttagtttgttctttccttttgtgcttatctgcatttattatactcaaattaaaatacagaatatgtttacttcaaatatataagtactcttattcattacattagaatgataatagagtg

SEQ ID NO: 14018 - DNA, 400 bp, Arabidopsis thaliana landsberg
ttcgtcctccaagattgtgggtggtcccaatgatagagcgtcatcgaaggttgtatgtctgcatgtaattagtatgattttattttgattatttgagttataaccgcacctttaatttaattagagaactttaacttaactaatgaattaataatcttaccattagcaagaagttcgtctatgagatccttgtagaattgtacaccttctttgtttactccatcctttagctttccacctatagtaattaaaaattcaccacataacgaattcgtataaataagtgttaataaaaaaaaaaaatcaacaaaaagagagagagagtaaaaaaacttactgggtattaatctagaccaccagattgaaaatcggaaagcgtccatgtttagctccttcatca

SEQ ID NO: 14019 - DNA, 770 bp, Arabidopsis thaliana landsberg
gccgactatcttaataacttcaccgcttttgtacacatcatctgtgcctattgcaatctgtttgttatatttaaccatttgattatcagaggaatgaacacagaaactggtttaaagctaacagaaagcaactgagacatgtctaatcccagacctgtgcatatgcattgccctttgtgtactcagtcacgtcgtagttataggtcagctccaaaactatcgactcgtattcttcagcataccccatcatgcctatggtgtactgtttcatccaacaacaaataaaaacataaataagtcccagcgtagctctaaaaaactaaattatatgtctacattgcatcactgattacttcaccttgtactcaggtctctcaatctttctcaagagtctcatcccgagggcctgcgaggaatttagaaatgatgtaaacactatagtaatgaatatttaaacattaagacaatcatttcactgcattaccttttcatagaatttgatggcacggtcgagatcaccaacacgaagcatgacttggcagaaaggttcaggagttggacctctctggatgagctcaaaagtgtagccatcagggtccttcacaaacgcaatgacactgcctccacctttgactggaccaggttccctagtcacatttccacccttggcacggacgttctcaaccagtttggaaacctacaaaaaaaaaaagccgtgtatctcttcgttaaagatcacatgcatattttgattcttgatacctaaagct

SEQ ID NO: 14020 - DNA, 736 bp, Arabidopsis thaliana landsberg
  unsure (1)..(736): unsure at all n locations
acgacatcaaatcgacacaaacaacaataataggataatcggagattacatctagcggcggcggagtcatcatagtcattgctccgatagtgattcacggtcggatcgagagaagtagaagagagcgccgaacagagagaacaatgaaaggggagaagaagaagaagaagtgagggaagaaatagagaacttgcagaaggagagatcaatcgcttatttctctgcttactctttctcacttttcgataggataattacgatattttcactaaattaagggtttctattgtaattccaattactatttggattcagatttatatgtttccctgagtgttcgtctgagaaacgtgacaggctaatgagaatgcgacatatacgactcttcagatgctgtcaccaattaaaactctccacgtgtattacacgtgactgtgaccgtgacggtgtgggacgtcttcggtgaactttttggcttctctactctgcttcgaaatgtccttaagtttgttttgaactttttttctatattactatcctaaaagtttaaataatgtaaatgaaaatgcaaatttcataaattttaggaaatttcatacagaagttaatgcttagattntgtaatatattgttgtcacattactttaaatgtgaataatgtatactaaaaatagtagaacaatacttatccaccttcatttataagttttgcacttttttgacaagtacagtatgt

SEQ ID NO: 14021 - DNA, 730 bp, Arabidopsis thaliana landsberg
agaaaacagccggagtctatcttaattggacgattatattttgtttttttaaaaaatatcttctactgcgatattaaaaaaaggttaagttatttataatcaaagctttctttatcatgtcaaatcagtgatcacgtagacatcgagcaatgaaaaacaacacttctatttattagaagcaagacctcatgaatcttgtttagccacatactaaaacatacgaaaaaaacattgagccgaaaacatatcctactaacatagggcaaagcttatcttgatcgcggaaggacaaacatttattaatataaccaagacctaatgaatcttggtcagtcacattctaagcttaagaaataaacatcgaaacgaaaccaaatcctccaaacatagctcaaagctcatcctttttgagagcggatggacgaactccttcactaaggaattctctataatacttgcccgaaacttactcatgacgtgtgaggttctttttgtaatcaatgtcatacaatccaaatacgcatataacaccatcttgccactcaaagtcatgcataagtgaccaaacaaaacatgccactacatttaccttgtcttcgctgccgaaaatatacatcagattcaataatggtagatctgtacgtccatcactactgcacaatattagaaaacatatcacttaccaaatagctgccagcaagctcaaaccagactacactatatgtgcttt

SEQ ID NO: 14022 - DNA, 601 bp, Arabidopsis thaliana landsberg
aaaacctgcacgtttcagctgtccattgggtcctatcatcaagttgtttggtttcatatctctgaaacaaatacgaatgatcatccatatgtttaaatcaaaacagaccttattagagatagaacaagttctgcttctaagttccaatgatagtacctgtgcagaacccatttgccatggcaatattcaagacctttcaatatcatttggaggtaagatttgacatcaccaggcgaaagatagagattacgatctcggataactgcttcgagatcagtctccatgaactcaaacacgatgtgcaaattctccttgtgaggaaacgcatcaatcaactcaattatatgtggatgcttaagctctttaagtaatttgatttctctaagagctgttacattcacaccttctttctctttaccaagtcttattttcttgatcgctacagtttctccattctacaaattgccacaacaaaacaaatcagcttccttatacaaacttaaacaaaactacacactttaaatccattaagaacataaaaatgcaaactttgactttctaagaacactattagtgaaagatcggaacttagctgatttaa

SEQ ID NO: 14023 - DNA, 679 bp, Arabidopsis thaliana landsberg
aaacatggatggtttctttaaccaatacctagaataatgttcatgttatgcagaggtaaattaaatgttaatttataacatatattaaaatattttgaaaatataaatatatgcattagtgttaaaaaccaaagaagttgtatcgttattacgaagcaataaaaaattgaactgttgggaaaaaataaataattttaattttcttaaagaatatattttttttttaatttgtcgtaaatagatgtgaaagaaaaaaaatttgtttagaaattataaagatagtggagattagtagagaccacaaagaagcccaaaaagtagcctcatgagaatctcattagtccattgcattaggtctaagtaaatagtctctcatatatatagtaacgtaatgagaacaatgttatcaacctagagagttgtcacattaagcatctcttctcttctctattgtatgaaatcaaatccaaatctctgggttgatttgtaaagaagagagaaagagaaagactttaagttgtcttcaaaatttggattacattaattacaacaacaaattttaatgaattagtataactattaattcgagaagatgttggagcacctccgtatttttaaaactttgtttttctttacttatgtaaaattattagctctacttttttttttattaaatatt

SEQ ID NO: 14024 - DNA, 751 bp, Arabidopsis thaliana landsberg
agtttcaaatcaacaatataggaattgcagttagcgagctccaatggtgagcatctaaacacgcaagtcacgagaaaaaacagaatcataccatggaaggatccgagagaagagtgccgaaattgaggtgtacctatacggcaaatttagtcaacaacaacaacaaagactcatgtaactcattttaactgttctttgaacatatacgaggattcgatccaacgctttatctaatgtactagtgtgatctgtctgaaataccgagagattctgtaaagtaaatttgtttttgaatcagtttccatcgatttaaaaaagtcgcaacaatttttacttttaaatttttatttattttaacccttgaaattaaactaacgattaatatctccatgatctcattaccaactctaataaacaagatgcaagaatgacaaaagaaaaaaagggaaggaaacgacacaaaaaggttgactaaatttgccgtattggtacaacaacaaattacattaaactaaatttgtcgtttgatatctcgattgaaccgttggatgaaatcttcgactcgtctgttcaactcctcgttcgacatcttcgagaactcctccgactcttcttttacattctcccacttcttcgtcgcctcctccatctcctagtcagccttcttccccttgtgaacaaccataaatatcgagctatccgattgactccgatcgtaacttttatgtctatgtttgatctcttgaagacg

SEQ ID NO: 14025 - DNA, 769 bp, Arabidopsis thaliana landsberg
ctctcagtctactatatacttttcatcttattaaaaacaacaaaaaaaagtcggatgatacttaagattttgccaacagtattaaatgcattgtaatcatcaaataagtcataagcttattttaatcgtaattgtagtcatgcctaggaaaatagttaaaatcctaagagtgataagatcgtaaccatgataaaccaggaaagacttggtcaaggagaaaagaagaaacaaacctttagtgtatccctcagttttaaggagatcaatctccacgtttacattttcccaatttgtggattatgttccttgtttctaggattggtgatcgatccactttgcttcatttgtgtataaagacatgaattcattatcatgaatcagacttgaaaattggacaaaatatagtttatttctttggttattttgttcttgtgttacacaaaacacatctctttggttttgaagagggatttattattaaaaaaaagaagaaaaagggacttatcagtggtagcagagtggtcaaggagtttcggaggagagtgtgaatcgtttggtggacttgaaaattggataaaacatagtttatctctctgattacttgttattgtgtgtcgttgtcttacacaaaacacatctctttggctttgaagagagctcatctcatcgctaggagtgtaacaaaggaggatcaccgcccattatattagcaaccggatttcttttgttggttgaaacacctgtttgaggataataatagtattcccga

SEQ ID NO: 14026 - DNA, 612 bp, Arabidopsis thaliana landsberg
tgatccgttaacctatatggaccactaggtctaatactccaaacacagggatgatatttacatacaattgtatctctcttttccttaagaatatcgaaccatctagactgatttttccaaacaaagtgacaaaaaaacagagtcgtctcccaaacattaagagatgcagtaaatccccagtgttgatgaggggctaaagattgaggtccgagatctttacccttcgatttgcagtgtagtcccaattgaacatttggaccaatatcattgatgatatccacatttatatgccgatgagcctcgcaaagaccaacaaagagaaaagcgattaatataacacttaaaatcaagcgaaatgacgatgggcacattgtgaatatttttttaaatatgaaatttctcttggtcaccaacaacgattttatactaaacttttactatctaagtatctatgttgtcaaacgactaattcactctactaaattagtttccgaacataaaatattatcataatatatttggattagttaaattggtaaatcaaaaattaaagttaaaaaaaaaactttttattcaacaacttttattaaaatatataagtataaaatctaa

SEQ ID NO: 14027 - DNA, 470 bp, Arabidopsis thaliana landsberg
taaaacttacacacggccagttcaaccggttcactgggtcgcgggttaatggcgattttttgtggatttttctgggtttaaaattattggctatagtactaaacctaaaccgaaaaagggtttgggttgctgattaaccgttcgaaccgaacggtttgggtcgggcgtgaaaacactggttaattttaaacattattgcatataatctatattttattaaatgaaaagtcatgagagtaaacatgcaggattaatatgctaacgcgtggattaaactgattttaagtacttagtatatatagaagtaatgtcatcttaccatgtacggtggcaagtgtttagatcagtgatgaccgtaacgaaaatgactttcttgtgaagtccttgccatttcattacccacaatggtatgtgttgcatcagaggatgcacgctaataataatgtccggtttgtactccattaaaccgg

SEQ ID NO: 14028 - DNA, 605 bp, Arabidopsis thaliana landsberg
  unsure (1)..(605): unsure at all n locations
ccgggaacagtttgtctaaaccagattaaactcatcattaacattttgggtagccagagagaggaagatctttagtttatagataacccaaaagccaaaagatacatagaatcactcccttactcaccagggatatcattctctcgtctttacccgggtgcaaatgttttagccattgatctgcttcagaaaatgctcgttcttgacccttcgaaaaggattagtgtcacggaagcgcttcaacatccttacatggcgcctttatatgacccgagtgcaaatcctcctgctcaagttcctattgatctcgatgtagatgaagacgaggatttgggagcagagatgataagagaattaatgtggaaggaaatgattcattatcatccagaagctgctaccataaacaacaatgaggtctctgagttttgagatcaagtcttttgcaggtactgttcagagagatctttcaacaacttaaacttatttattttcatgtttgcttcttgaaatgttgttaataatagtgtcgaagaagaagaacaataactntaaattatgtgatatgtctgggtcatggagctttgctttgtttttggttacaagct

SEQ ID NO: 14029 - DNA, 761 bp, Arabidopsis thaliana landsberg
taattttcgaagcatagacgtaatgtgaaatggagtagcataagagcatggttccaacattatccaaagctgctctctgattattatgtagttaaagggaaaataagaatatattctttgatataactgtaaatatcattatataaatgaaaagtttaggaattacacaaaataaaacctaaagcttttgagaccttgccaaaaaggaataaaaaaaaacaaggtaacaaataattgtaaagacacaaaagtgaaatcatctaatccaaggttgcattaagtttccaaaatgcttcctttgtcttcgagacaaattttcgggatctctttatcaatcatcttgaaagtggtttggtgaggcaagatgttgtgaagaacattatatggctgcttccaaatgtggtaaactgtggtttgaactgctaactttcggatcatagaaggcgcaataattcaaatgtataataattcaagattatctttgtttcatttccaaaccatagttttaaccaaagtacaaaaaaagaattccggttctctcttattatctctaaccactttttcaaactacttttactccagccgcttaaaagattcttaactaaaacattaaaactatggttacaaataagatcatgtatatttttgtaattttgctacaagtattgtttaatcaaacaactaattggttataaccttgatttattcttatgttgatcatttaaacgtacattaacgctcgattatttaacttttaaaaa

SEQ ID NO: 14030 - DNA, 735 bp, Arabidopsis thaliana landsberg
tggacattgcactctcagttttgctgaacctttggacctttgcatttgcattgattggtgaaaaaaacaaagcactataatttgtacaactttcatttctatcaattataaattttttatcaaaagcgttactaaaagatttttctctcagtttttttatacattttttttaatataactgttttttagtaattttatactatttcaaaaaaagttaacagataaaagttatgtacagctatgtgttaccaattagagtttttttggaaagaagtaaaatatggcaaaatctatctaaattcaaaaaataggaaagaaatcaaacccaccgaataaaaaattatttttaaggcgttttggctctctgacagctcaaattaaagttgactccttttttaccactcaagtctcattctcattcttcacttgaaccagaataaaaccacagaaagagagagaacagggtaagtaaaatcagagaattttctcaatcaatgtcagcttcaatggctgcaacatcaacatcatcagcaacagctacaacgtttataaagtgtgtcactgttggcgatggagctgtgggcaaaacttgtcttcttatttcctacaccagcaacacgttccccactgtatataaatccatctctccctctctctcttttggattgcttttcttgatagcttttggtgactgttgagatcttgttattacaggattatgttccaacagtgttt

SEQ ID NO: 14031 - DNA, 473 bp, Arabidopsis thaliana landsberg
gattatagtaatccgtttgatctatttgagtcattattcgaaggaatgggtgggatgggaggaatgggcggtggaatgggtagtacaggctcaaggagcatagctatctatggtgaagatgagtattactcactaatcttgaatttcaaagaaccggttttcgctattgagaaccaaatcgatatatctcggccctagagctgttggacttgcaatggttctggagctaaagcagaaaccaaaccaaccaaatgcaaaacatgtggcggacaaagacaggtggtagcatcaacgaggacaccactctgtgtattccaacaagcgatgacttgctctccccgtaacggaactggggagatatcaaaaccgtgtggtgcatgctcatgagatggacttgtgagaaggacaaatccgattacccttaaagaccctgcttgtgtggattctggaagtatgtttatagtgaggggaca

SEQ ID NO: 14032 - DNA, 900 bp, Arabidopsis thaliana landsberg
atctgccacaatatgaccatcattaaagaatgactcctttcgcaggcatttcaagtcatgttggatcgaaatgactggatcttcatccgaagagtacaccttgactttcctttctttctgccacttccttgcatatacgaatcaagtgtttcatcggtgacaactaggttgagaaccctccctattaaacagatgttattcttttcacaagacatgagatcgggcaaatccggcatctcgaatggttcatctttgtcatccaaagacttctccattaaagctctgtccattgcagccgacattgcagaacctcaaagaactttcccctacaagaagctttactgaaccgcggagacctttagtagaagaaaaccgatggaagatcgaacggaaaccttgaaaacactattgagaaaccccaagaattgagctttatcagacaagggaacagtggaatgcggctgagggatcgagattattcagccaaaagctctattcttaccctagtgaaagacactgagagagaaagagagttctaagcccaaaagaggggaaacttattatacttctacgattctattctaccatatactttttttttccatattataaattataattgatttatatatatgagatatatattaactacctttatatttgaaccgactaggtcatttgaaattgaatcagtcttgttaattattatcatattttatcatccagatgggttattattgtaaaggaattataatcaaatattaacatagcattatcttaacttgattctttttttcggtgtcgtcaatgtcttgatttaatcaacataaaaaatcttgacgaaaatgatttatctagtaatttaaatgaaaaaacttgaaatataaataatgttcactt

SEQ ID NO: 14033 - DNA, 775 bp, Arabidopsis thaliana landsberg
aaaatgaacaacagcagtaggcaatcacataaaccataagattttggcattcacataaaacacaacatgggacaagggaaaacaatcgtcatcttaaaaagcacaagccaatatacatagcggttatacacaattccttatcatcgatgaccaagactctaagggtgagtgtgagtgtagtactttaagtgtaattggttaactcatagtgttaaaagactcttccctaaaacactgaatgcagaaacaaaagaaagaagccacatctcttattaccaatgaccacattcatgtcaagtttttaaaaaacaaacaaaccaaaatttaacactgtagaaaattcaaaacaaacagaatcgcgagaaaggaaaagaacaacccacattagaaaatcccataaaccataaatttcagcattcacatcaaacacaacaagaaacattttcatcacaagatgtacaaggctcgatagtgagtgtataatgggtgaacacaagatgttataaagacacctccatacaaaatatgaatgcagaagcaatagaagaagtcacatatgtaactacattcatatcaaatctttaaaagagcacaattaattttcatatctctaaaaattaaacaatttgagtcaaaatttcccttcacagagataagagataaagcaaatttaccatatttttgcccacatctgaggcttggacttccacttaaatttaacggatcaagaattggtcattttagggttttagaagactttcaaaaccttttgtaa

SEQ ID NO: 14034 - DNA, 498 bp, Arabidopsis thaliana landsberg
tcaatttcattattggttgattatgattattttaataacaaattattatattaatttataagtgacaattacaaacaaatgttatctaaatatataataaacgacaagcatctttcttatttatcttatcatcttaagctattctcagtgtggttaattattattttgcccctaaaatttaaatgaattaatatgagatattaagatgcaaccgtcatattagatatgagaataatggttataaatcgtagcggtcggttttatactttgatcattgcccttgtccttataattcacaattaattactagaagcaaaaaaattgtggctatcagattaatatcaaaaggaagggatttatatcagcgtccgattattaatgcaagttaagtgttggccgttagattttatcaaaaacaaggaaccaatgtagtcctccaataaaacccttaattaaaccctaaaattatacctaattagcctaatataaatataagaa

SEQ ID NO: 14035 - DNA, 843 bp, Arabidopsis thaliana landsberg
tataaagcggtgtacgatgcacgtacgtattcatctatataatatataagagcgtctaagagtatgttatgtcttttagtgatgttatatgatatgactaatccattttcatccaatttgctggagacatgattgattgattttacattttaatattacatcatatgttttccaaaattattgtatgaaaattcatagactaaaactatagcatatgaagcatacacacatatatcctatccccaaaactattgtaattagacaaattaacacaagtcatttggagatgatataaacaccggctaacagtatacaagaagcatatatatgttataacgattagtaaagtataattacctggcaaatcccaaggttcacacttgttgagatcaacgtcgacgacagctttaccggtgaatcctatatcggagactttccgacatagataatgcgttatgagctcctcgtctgtaggatgaaatctgaaccccggaggaagattttcttccattttttgttgtctcttacaaatctaaattcaagacaacaaaagaagaagaagaagggtttctcctcgctctctctctcttgaagaggacgaaggagattaactgcttaaaagcttttcaataattaatgtgacatagatggggtttatatattcacttatataactaaactatatattaaaataaataatgatttgtgtaccaaataccgatcttgaggtagaagcggccacgggtagtctttttcaactgttgataattacagctaacattttgacgattcaaggtatttctctacgcatacgtaccctatttttttcttttattaaacata

SEQ ID NO: 14036 - DNA, 772 bp, Arabidopsis thaliana landsberg
aaaatgcgcttgcaacacatgagtgcagcacataaaaacagaatcacgacgtggaagattaaactacctgaatgctttcttgaaaatgtggtggaagctcctttaaatagttatccgaaagttcacagtataaaacgaaattcattccttctccatcagtctcaccatgaaaaattgcagctggatacaatggaatctatgattccgatagcaacatcatcattaaaccgaaacaccaaagacgatgcaaaagaggaacagtttaaccatggaactagacaatatacctgaacatttacaacaaggattgatgggagcttaatcggggtggtagtaacaacaggaagctccacgtattgcgctatatggtttactttacgttgagataaaaatacatcgacaccaaatggattatatgcagcatagtttggtgcaagctctttcttcttatctctaccaaataacgaaatatcagttaaagttagtaacagaacatataatcaggtacttgaaacaacaagctctctccgtaagtttacctgaaataagttttgctacgaacccggaaactaccaggctcaataattgaccaagaatcaaacattttcttttcgagtggacaaaacggaacctgagaacctgccatcggtctctgcaactgcattgttgtagaaactgaaacaatgtagagaacaaagtgagttcttggattcaaatctctttagttcaaatgcattggaaccacaattggaacttacataaaggaccagta

SEQ ID NO: 14037 - DNA, 406 bp, Arabidopsis thaliana landsberg
gaagaagaataatccaccagaaccctgaatctacaggagccacacgtccaatagcactttcaccgaaatccgcaacaatgttatccgtttcacggataggatcatgaagcaccttgaaacttgcaggcatcacaccttctcctaacttaaaccgatccacacgtttctcccaaccttgcagctgaagtgtcttaagcaaaaaatgcttcactatatccggttctccattcatcagaaacgccaacgcactcggtacaaaatccctcacaaacacctacaacaaccgcaaaaaaaacattttgaaacgttttgagataaaaccatgaaaacttttcgatagttttacctgatcatagttcaagacttcatctgagtattatcaaccgcggcaagagtaccaacaggt

SEQ ID NO: 14038 - DNA, 596 bp, Arabidopsis thaliana landsberg
acaactgaaataatactatagtctatagttgatattttgttcaaaattttgcatatatatttttttttatctttgcttctctgacaaggtattaacctagtctctaaccccaaaccccaaaccccaagtggggttaaatgaacttgaatatatgctaatgatctaagtccgattgattcgcgaggataaccattttgatttgcctccataattttatactaattatacagatccgaggccaaatttatcaagaaggttctgaaggcggttgaggaagttttaaccactattcaatctgatgaagcaaaagaaggcaactgtgtggaggatgttgaaacatttaacgttccactgactctgccttggtcatggtttagctcggcggttgagctaattggtgcaattctcggcttactcgctgagactgttcacgctgatgaaggaagaagagaagctgattttgtgaagaaagcgaaaacacttaatgttccactggctttgccatggttatggtttggctcggcggttgaaccaattggtgcagtgggcggcttactcattaaggctggtcaatctgatgaaagaaaagaagatgg

SEQ ID NO: 14039 - DNA, 459 bp, Arabidopsis thaliana landsberg
atgactgttgtgggtgtgttaaatctttggtaatgtttttttccagctttaattttttcctcaaatgccgatgattcaatagtagtgtaatctctcgcacaaccgcaggacacctgctcaaaaccaaaacaaacaaaaattgttttcgaattgctttcaactttggtttctcgtataaaaaaaactaatacaaaggtgcatgagtagtagtcactgaataaataataagcgcaaatagttgacttaaaataataagttgaaagagttgaatgatttcatctcactttttaccatttgagataaataagtttgaaaattgattcaacttattcaaccacaaaaattagaaaactaaaccaatcattaaaaacagattgttcaactctttcatctactattttgaagaggaattgattaaatgatgttcaactttttttttcaaactcaaaattttcctat

SEQ ID NO: 14040 - DNA, 331 bp, Arabidopsis thaliana landsberg
aaaacacacagcagaagaagaacaaaaacgttttaggatgtcgtatctggcattcttctttttcagcatcatcatcttctgcccgaggactcgtttggcttacaccagccatactaaattgcgcaacgaatatctcttcaccctactctctgagtgggtatgggtaaggaactctcgcagatcctccgaacacacagacaaatagatccgtttcgggaaagaacaacaacaatgaaggtaaaggctcaggaaagcgttgtcgcctgaaactgactgtggactatcacaaacggcatgaccaacgcgtgccgtttcttttgatagaaaaacg

SEQ ID NO: 14041 - DNA, 963 bp, Arabidopsis thaliana landsberg
atgtgtctcacttggagaagattttctacaatgggttaataccagaaatgaaagtttgtttttaagatgaaggagtctcgaggattaccaaatcagaaagctaaggtgttgagaatggagtctagtgcctattgtcatatggttagtgaacgagggagtaagaatgttgttgctgctcgtacgtataacaagtcgtatactaagccgttgttgattactagtggggcaccaggtcaggaggttcagcgagcataacctcgtcaaaagcatactatagaggagcttgatgcgatgagaagtaagggaatttgttttaactgtaaaggaaaatacactcgtggtcatgtagtcctttgcgtgagttgcagattttgacagtagtggatgggctggaattgttgttttggatgaggattttcaggtggaggaagtagagtgtgctccttgttctcctgttataagatgtttatctcataattcttttttggggcgtcattctcccaaaactactaagttattgggaatgattggcaggagcacagtagtggtgctgttagattcttgtgccatctcataatttcatcactccaacagtagcacaccgttctaagctgaagttgtgtgctgataacaatttggaggtgatgttgggtaatggagtttcagtgcatggttctggagtttgtaaaaggggtgctgttctggctcggtgttgttgaatttggaggtaacttaatgtctttggaacttggtgctgtggatgttgtgttgggagttgagtggttagaaacattgggtaaatgagaagtggattggaaaactcacgagtagagttttacttatctgggtcaacaggttaccttgtggggagatccatctttacataagtcaaatgtctcattaaaatctctagcagttccctaactgggtggagattcatgagtcttctttgattgaagggtc

SEQ ID NO: 14042 - DNA, 960 bp, Arabidopsis thaliana landsberg
caccaaccctcctgcctcttggccactagatgactttttagctaaataataccaacttttttgcctcttggccaataggactcaatgtacttgttgttgtttcccttgttcagagctttgcttgctcttgtagtttcttccttgcacatttataaagaaaattgcagcaaatacccgcgcctaagcaattttgaaagctttactctcaaagttatacatctaatgtggtgatcttttttactgattaaagtatcaccactccatcctcataccatccattcaagtctttaaaattactacacaaaatatacaaattaaatcatagtggtcctacactcctagtggatgggaatcaatattcgtcgtatatctaacggtacatagtcctcaaagggcttaagcattaatttaaaacaatttgtttgcttttgaactgattaaaattaaatcgagagtcgaaatactgttttccaagaggagacactatttaaacttatttagtaaattgtgtttgtactattgattagatttttttttttgtgtcgtctattactaaatatgttttcaagtgtattttttttcagataacttataactttaatttacttgcatataaatgtggatgttcaatctgactaaccaaccagatctaagctagatcgaacgaccccaaaagagtttccgatattgtataaaatattttatagctgatttaaaatttgattaaatatgaaaatcacgaattaacaagaaaaacggtggaaaatttgtgtcataaaaaaaaaattgttttcagagacagacttttaaaccgaaaaaaaacaaaaacattaggctcactactcataaggctctatacgttttctttatctaaaaataataatctctaaacgtgtttttattttcaaaaaaactttaaacgtttaattaaactaaaaaaattacaaaattatcaactta

SEQ ID NO: 14043 - DNA, 615 bp, Arabidopsis thaliana landsberg
gaataatgaacttagttatactattgaagtacttggtacttaaccaatttttatcaatttggcaaaattgaccaacttttttttattgaaactctaatccaaaaatggaaaaatatcgctttatacttgaacattaaaaaaatagtcattcaatacgtggactttgctaacgatggttattggattcgttaacgccagttaacgtcttgggaattttggtctggtcaatatttggttttgtgttaaataccggatcaacgtttttatcatgttttatttgaccgacctataagttcacgtattgaatgaccactttttaaaaattcatgtataaaaaaatatttttctctgccgaaaattagcaaactttaaccaatatttcatcaaaataacataactaaccgaaattcgattaccggttaaactgaaaaatgatttatcataaaagtattgatccgaattacccaaaccgacccgacccgagtatgaatgggccgaggcccataaaagaggaatatttgggagtcaacaactgaagaagaaagaaaccatgagaggacgaagcttgacactctcaagagtaaagcttgagcttgcgaaaagaagcatgtttgc

SEQ ID NO: 14044 - DNA, 509 bp, Arabidopsis thaliana landsberg
tcgtgtattacgaccaccgaagatcctatccggaaagaggatttcccactaccagagtggcgatcccatccgagcaattttggattacgatgggccaactcaaacgctaaacttaactgtctacccggctaacttgaagtctagacccgtaaggcctttgatctcgcgacctgttccaaagttgtcgcaaatcgtgcaagaagaaatgtatgttggattcacagcagctacagggagagatcagtcgagtgctcattacgtcatgggctggagtttttctagcggcggtgatcttctaactgaagatacgcttgacctcttggaacttcctcgtccgcctccgaacacggcgaagaagagaggttacaattctcaagtactcgctctgatcgtagctctatcgggagtaacagtgatcttgcttgcgttactcttctttttaatgatgtacaagaaacgattgcaacaaggagaggttcttgaagactgggaaatcaatcatcatcata

SEQ ID NO: 14045 - DNA, 1072 bp, Arabidopsis thaliana landsberg
taacttaatcgtgttaatgtaaatcaatggagaatacaaacagagtaaccaatatcagagatcgagaatcagaaccaacaaactcgtgatcaggctaatcaaaaattgagttcctttaacaaagatcataatcgtaacacaatccaaagcccaaaagatcgaagaaaaccaaagaagtaaacaactatcctttaaacgcttatcgagtgacatcaatcaagcaaaaaccctacagaaattgcaaaaagtaaaaaggagaacaacgaaactaacccagaggattagaaagcttgaatgagttcttctccatgatgattcggttagtatctacgatgattaaggaaacaaaaaatcgaaactttatctgttaggctaaatcgggaaaaaaacccaaaccacaaaaactcgaaattgacaaaatggagaggcgaaatcaaacgtacccaaaagacgaaactagggttcgatgatgatcagaggaaaaaaaaatgaattttgattgtagaagaagaagaggatcaaaaaaatgaaaaaaggagagaatatatataaaggaaacagagaggatggatttagggtttagtgattgttacctgcacggcacccaaacttattacttggattttaattagttacgatgcttatcttacgtcagcgagatgatacgacgtcgttggattgtagtggtcatgagtttgtgaactatttattgggcctttataggtttggatctcgtttgggcttttctgtcatttacatgatcaggactactaggcgtggacaaataaaccaactcgaatataccgaatcaaaatcaaagcaaaactaattaaatcgaaacaaacaaaaaattggaaaatattcgaatggatactaaattctataaatgaaagaaccgaaagaaccaaaactaaatggatactaaatattatttatttttagactacataattaaaaataattgaaaagatatataaaatagtaaaaatactcgaaaaaataaccgaaaatattcaaaaatggattcgaaaatattccaaaatataccaaaatattccgaaaaatatttcaa

SEQ ID NO: 14046 - DNA, 704 bp, Arabidopsis thaliana landsberg
ggttacgatgaccactaacagagttacaacatggtatattcattacaataaaagtgtgcgtaatgtcaaaatagtgtcgagatcaatcgacagaaacagaggaactattgattatgtctttcgcatatccctctatattacctaaggagtaaggaactgtgctacatttggtttgaggaatttaaacccgccggtttagccaatccaatatgactccagctatagtttcccgttctggttcaaagagcagatcgtgtaacaacccgtcgtacagcttgatcgacttatcggatgaggaagcctcattgtatagcttctgagtacctttaggatcagtaactgtatcagctgtgccgtgcatcacaagaaacggaaccttgattctgttcagattctgcagtaaatgagcaccaagtctaaggatctcgttaccggttcttgctcgaataaatccagtgtagactagcgggtcagagtatttagccaatagagcttccgggtcacgagaaaccggcattattttctttttcgcagcacttaactgatatctcggtatgaggaacgagaggaatggtgcaattacctgttgaaaaagctctaattttcaagacaaaagccacaaaatgtttgtgaaaattgttcagattcttgaggtttttcaggtttgcttacgccgaagattagggataagttgggtttggact

SEQ ID NO: 14047 - DNA, 649 bp, Arabidopsis thaliana landsberg
actttaaaatttattaaaatggttttaaagctagatttagaattagtagttgaataatattatattagtgttggatttcaattatattaaaatctattaatgaataacatccccttaattatgtataaaagaatagtattactttaccctgaaacgtaataaggctggaaaataattttcaatgtatatatccatagggaaataaattaaaaaatgtattattttcatattttgtatctttgaccaggaatttatatatatccatagggaaataaattttaaaaatgtattattttcatattttgtatctttgactaggaaaaaatacatttaacatgtttgtgttcttagttgacgtataatcattcttggtaaagaaaaactcattagaaaaaaggttagagagaatatcattattatgggattttccccaaaaactttagtcgcattttgttggactgttctcttcatcatatcttttgttcattgtcttcctatgactcatggtgggaaaccgggtaattgtttattgttatttacaccttcacttttgtaattatgaattacatgatgatttaactctttgataattgggttactgattaattattggtaatcctgtatatgtaggttatggaatagagcgaac

SEQ ID NO: 14048 - DNA, 729 bp, Arabidopsis thaliana landsberg
ggtcagggcatacgagcggtgttgatgcagaagggacaccctctagcttacattagtcgccaacttaaatggaatcagctacacttgccaattaatgaaaaggaactattggcattcatctttgcagacaggaagtggagacattatttgctgcctagtcactttatcatcaaaactgatcaacgtagcttgaagtatctattggagcagcggttgaatactccagttcaacagcagtggcttcccaagttgctggaattcgactatgaaatacaatatcgacaaggcaaggagaatttagtggctgatgcattgtctcgagttgaagggtctgaggtgttgcacatggctttatcgattgttgagtgtgatttcttgaaggagattcaggttgcctatgagtctgatggagttttaaaagacataatttcagctctacaacaacaccctgatgctaagaaacactattcctggagtcaagacattttaaggaggaagagtaagattgtggtgcctaatgatgtggagattacgaataagctgctacaatggcttcactgttcaggaatgggaggtcgttctggacgtgatgcttctcaccaaagagtcaagagcttgttctatttggaaggaatggtgaaggacatacaaacctttattagaaagtgtggtacttgtcaacaatgcaagagtgataatgcggcttaatcccggttgcttcagccattg

SEQ ID NO: 14049 - DNA, 747 bp, Arabidopsis thaliana landsberg
ctggcgcaggagatggatccgataacagaatcctcgtgacgaagacagcggaaagtagatttccttatgtctgcttatccgaaatccctgtgaaacaacctgagaatggtagacccgagggtttcaaaatcgctatcaagcctagacccaagagaggatctggttgtgggggtagcggatcaggagtacagcagaatcttttgagaagtgttgaggagagaaaggaagagtatgataaagctcgcgctcggatctttaatagtcctagcagttccgactctgaagattcttcatcactacgacctccctctcttgaagtgagaaacacatgtataaaccggaatgagactgaagtggcggttaataatagtcctgtcgatgctgttactcgagactctggacggacttctcgagtagccattatcagagatagagagaaagatcgatatgacccggattatgacaggagctatgacaggtatgtcgtggatccggcctacaggtaaacctttcaatctctttaatggtgatattcaacaaaactaattggtgttcactcttaaatctaaaggtctttttcttgttcgtaggtacgttagggttatgccgtctggccaaagcttcagtccaatgccaatccatattccgtttcacgatgggttttttccgcatatgcccaagaggtcatcaagccaacctaaactatgggcatccgtttaaccctgctttgagtccctttactcataa

SEQ ID NO: 14050 - DNA, 550 bp, Arabidopsis thaliana landsberg
cttcctccacaagagctagttttgcttccacaagcttattcgcctcaatagccctctcttgctcctttagcctttcaatagccctctcttgctcctttagcctttccatttcttcctgtaaaaaggattttgatactcaaagatcatatacataatagcaattttctaacactagtttgtccctgataacttggaaatataaagaatatttggcaataattaaattggctcttgtcttttatatattacctaaagtttcatctcactgtcggatattgtaataagcctcaatgacattatcgcttttctagatattcatctcggagatatctcattaaagcagtgttttcacgcccaacccggaccacccggaccacccggtccgaccggttgaaccgtgacccgaatgtttttccgatttgggtttagtgctaaaatccgacaagttcaaaaccaaaaaatctcacaaaaacttaccattaatccgtgacccggtgaaccggttgaaccggcggggtgtggattttaaaaaattattttggatttggaa

SEQ ID NO: 14051 - DNA, 602 bp, Arabidopsis thaliana landsberg
tcttccgagagcgaccatatttgaaatgctgacaattattgacataaaatgtattgtagctggaaacagaataaaaagggaaaacagtggaaagttatatatgctagattttgtgatagtcacttactgcttaaataatctgtgatgaacgggtacaatagtgatcgggtaagccctcctgttggttctttttcgattaatgccctaattgacccgtgaaacatcacaaagagtgagtgcacttctttaagcaccctccttaatgcatcgatcctccatatcgctcctgtctccttatttttctccacaacctgccaatgtatagatcagatcttgtttatttacattgctaagacaccataggatgcatcattcatagaaaacattgtgctataacaaaagaaaagtaagacaatgccttaccataaccatccagatatcaggttcagcctcatagaaaacatgggaatgtctttctgcttcgatcacttcacaagccgcctccggagagaaaagtctgcattaatagtcacaccaagcctcaaaacatgaagaagatctacacagactatcgattaacgaccctgacttaatttatcgga

SEQ ID NO: 14052 - DNA, 804 bp, Arabidopsis thaliana landsberg
attgaatttaaagcagccttggataaggcatctgctttgaggttgttctctcgtttcacaaaaccaaaactagtttcagcaaaaattaaagagagatcgaggatgtcgtgaagaattcctctgagctccatagggtgtggtgctccattaaatgctttgactagctgttgcgagtctgaagctaataaaagttttgaaatgccaagatcagatgcttgagactcaacttttggtatatcatcccaatataatgcattaagaaacaatatgttctattcgaatgaagccacttaacaccctagataaaacattcatcacacaatttcaattggctaggagtgaattgccacaaaaaaatatgattcaagcatgtgggcgtggaaatgccttgtctctagatatgaatggtatgttctatatctactattaatttgtttctctaattaatatatgatcatacaacttgtggagtagtcgaggccatgattagagcgattagagactcccagcgtgtagtaaaccacaaaccaagcatatgctgggttagagctgaccatacttgagtggagtagggacgagagaaaaatagatggtcccttgattctacaacctcttgacaaaaaaacataacttccattctcacttttaaagataaatgttttaacaatgtatttaatatttatgaaatgtatcaaaacggcaatatttgtaaaataaatgaattaaagaaaaaaatagaggtactgccactgtcattggaaacttaaaaaaaaaaaaaaaaaaaaaagcactagtaacttgatg

SEQ ID NO: 14053 - DNA, 796 bp, Arabidopsis thaliana landsberg
gtaaagactcgctggttggtctgttctgtgttctcaagagaatggattctcagtgttgagaccgtaaacagagctagaggaagcccaaacaatcgcaggttgtggattagctgctttagccacttcaagaaggttaacgaatccggcgatgttggaggcgatgtaagattgagggtttttcatagcgtaacgtactccggcttgagcggctaagtgaaggatgtgagtgaaagggacaacgtcgaagagtttacgtaagagtggtccatcgttgagatcaccttcgacgatgaacacttgttgtttctccaagagctcttgtcttgctcttttgagtgatgggtcatagtaatcgttgaagttgtcgaatcctaagactccatcgccacgttttcgcagcgcaagtgagcagtgggatccgacgaatccggcagctccggtgactaggacggagagaccgtgtggtcgtttggctgttgaggattgtctaacgcgcttttcccacgcggctccaccgatagaggaggaagaagaggaggaggagaagagtccggtggataagaagctacgacggtggaggtggtgtgctgcggcggcgcggctatcggagagtggagggtagttgatggcgaagatgaggacgaggacaagagctacgagaagcgttgctcggaaaagaactttagaagaagcgttgagaactttggtgctgtgaatcttccggaggtagctattgtacctctccagcttcaccgtcttgcttgtatccgccgtcgccgacaggggcattttcgtc

SEQ ID NO: 14054 - DNA, 761 bp, Arabidopsis thaliana landsberg
acctttactttctactccttttgcatgttttgaagttgacaaatgttgtttataaaatacctattttgccaagttgctaaaatttatattagtctttaaaagtattttagtttctgagtcaaaacgtatcaaaagtgaggactcaactaaataataaacatatatagccaaatgttcattggctacataatataatttaggttggtgttccttaatataattactttttctttttatctgtggtcacttctttttgtctctttcatttagttttaaaatttcaatatacaaacattgctcctatttatacaaacttggtttttttttggtcaagtttgatctttacaaatctaaagaaaacattatttactaaacaataacttataactcaatctacggatcatagcaattgaaggaatatttatgttttatttatcatgctgaatttaagtaatattttgcttcttaagttttgtaataaagaggaatgttcaattgttctcatcgccacgaaagcggtttgcaccgaaagggagtgatcaattaattgagggagctgagccgaagaaccgggtcacggggaaggctgtgcgtggtggtgctaaaccaccaaaaccaacggttgataaatgaagattttaagctggaattgtcaagcgctcgggaataaaccaacaatcggttatcttaaggatttatggaaacaacatcggccggattttttgtttttaatggaaacaaagcaatcttatttatatatg

SEQ ID NO: 14055 - DNA, 892 bp, Arabidopsis thaliana landsberg
agaaagaaatactttaatttcaatggcatgattgtaaataaaatgttgtggtgagggtcgacaatttatttaaatcgtaatatacagtatacgcttttttggggtttgcttgcatttgataaattgattttagtatcctctttaagtgggaaaaaattattgtgtgaacattagaccgactaaagctgagatatgtatgttttatgattacagactatgatttgcgagataatttttgaaactttgttatggaaaaaaatagaacgggatcattgtctgagatgcatcttatgtaacatgtgttatatggtacctcctcacaaaaaaatatattgccaaaccttagaaataacccagtattcaattaccataaagaaacaacttaccaaaatacctctttttccttttagattttactaggggaaaatccgggctacacccggtaaatgtttaaatattcaaattaacaactggtataacatagaggttgtataacacggaatatatagtttcactttcatctagacaaaatctcctcgaaaaggaaaagaaagaaaaaatatattaagtgggtgtatacaaatgtgattttaaaacaaaaaattttgtgttaatcaatcgcggattttaaagaaaacaaaataaaaaatccaatgtcgttaattcaactttaaatttaatgttattggaaagattgaattagaattttaatgactttaagattaggtttgtaatgatcaatatattatataggataagagaaactatttttattttcctattaatcaaatgagacaactttatcttactggatcaaggattgtaattagttttagattaaagctaaaaagaataagaaaataagaaacttataagaagggtggggtggggg

SEQ ID NO: 14056 - DNA, 1169 bp, Arabidopsis thaliana landsberg
aatcggaagatttgtatttttgcgccggttacttaggggtaatgaaggttgggcctaaaggaggattggctgagaaagtcgtggacgaggtcgaaggtcagaaagttatgtttgcaaaccaaatggatatagatgaagaagaggatgctatctacttcaacgatagcagcgatacgtaccacttcgggtattataacatcacttctctaataatttttttaattaaaaaaaaaaaaactgaaaccaaaaaaattggataattttagtgttctatgttgagaattgagatggttagaaatgataatttgcatgtttgtattttataattttacaaattgcaaaccacaaatgaaaataaaatttctccttctaacgtttgaggtttacaattattagataaaatctttgttttaaattatacttaagattgtagcttcatcatctgagaagaaagatagtaattaaccttcaggtttttaatgttcgctcgtgtttacaacttttttttttttttttaaacgtataaagtaaaagaaaaatgttcttaagacaacaaaatcttaatgtggggatattttgaaaatgattttttttttataaacgttacattattatttggagcagggacgtattctacgcttttctgtgcggtgaaaagacaggaagagcaattcgatacgacaagaagacaaaagaggccaaagttataatggaccgtcttcatttccctaatggtcttgccttaagcaaagatggttcgttcgtgctttcttgtgaggtcccaacgcaacttgtgcatcgatattgggccaagggacccaacgccgggacccgtgacatatttgcaaagctccctggctacgcagataacatcagaaggaccgagacaggggatttctgggttgccttgcattccaagaaaactccattttcgaggttatctatgatccacccgtgggttgggaaattcttcataaagacgttgaagatggagctcttggtttttctttttgaaggagggaagcctcacgccgtggctgtgaaactttctggcaagactggagagattatggagattcttgaggatagtgaagggaagaatatgaagttaataagtgaggatcaagagagagatggttggcattggcttgggtctgggcttttgcctt

SEQ ID NO: 14057 - DNA, 741 bp, Arabidopsis thaliana landsberg
tgttcgaaatgcgcatatgatcgctgtgatccaccaaggcaagatcgtcgagaaaggtaaactacctaacattcttattcactttttgcatatggatacacatgtgtgatagcaaaatttgatgaacaggttctcacacggaactactaaaggacccggaaggagcttattctcagctgattcgtctacaagaagagaagaaatctgatgagaatgcagcggaggagcaaaagatgtcatcaattgaatcattcaaacaatctagtctgagaaaatcgtctctaggccggtctctaagcaaaggaggatcatccagaggaaacagcagccgccattctttcaatatgtttggttttccagcaggaattgacggaaacgtcgttcaagatcaagaagaggatgatactacacaaccaaaaaccgaaccaaaaaaagtctccattttcagaattgctgctctaaacaaaccagagattccggtgctaatacttggatcaatatccgcagcagcaaatggcgttatccttccaatctttggcatactaatctccagcgtaatcaaagcgtttttccaaccacctaaaaagctaaaagaagatacaagcttctgggcaatcatattcatggttcttggtttcgcatccatcattgcatacccagcacaaaccttcttctttgccatagctggatgtaaactagtgcagaggatcagaagtatgtgttttagaaagtgttcgcatg

SEQ ID NO: 14058 - DNA, 687 bp, Arabidopsis thaliana landsberg
acagtcgacatagacggtgattgaccaatacccggaattatatctcccgcactgcctcctctcgctattgtatcatgcttttcgctgctttccaacagtggagtcttgagttcttctaaggatttgtcactctctactaggagagctatggaattagctgatggtgcagtgtcagccgacacagattcttcctcaattctaggcttctgcgggatgttgacagttttctgcatttgttcagaagtcggtggcttgtcagctttagatttcgcttctgcagcttccaaattttcgcgatcactggtggagtcttgattcagccacatgaatggagcgacattgcgttcgacccaatcatccttttcagctgttatccaaggaatggtaacgctttcacaattggggagcaccatgacgtctcgtatcgccgtctgcagaatttgttttttgtcttatggttagttaggaattccttcataaacaaaaaaaaaacgcaacagcttaccttgaaccggttgaccaagaacatagcaacatggctgtttgtgattttgtgttcaccaacagaagagacaaggtttgaattcaatatcaggcatgcttgtgaagccaaaccacagttgatcagatggaggcggcttcatgtgtacacacagtgtccctcgaagcgaagacacccctatagac

SEQ ID NO: 14059 - DNA, 898 bp, Arabidopsis thaliana landsberg
aaacatttacaattgccaacataaaagagcattgtatgagaccctatttcgagttatatatgaatctttttctcgacacaagacaaggtatataaagcttaccgtgctcgtagacaaatccatccatgctagagcaaccaggaccaccattaagccaaagcacaactggatctaccgaagcatttctctcagattccacaaagtaataccatagattcttattacgatgtttatctattgcaacataccttagatcacacaccaaatttcataagaaaagagagattaattaaaattattttgaagaaagtctatgatcaaactttctgatagatgagaatttcacaaaaatgtaatatacccggcatagtgtttagatggaaaagtgccgttgaaaccagaaaggttggtaatgagagcagattttggagctgactctgttattgtaaagcgcaaagacaataatatcgaagcaatgatagcctctattaacaaacccattttgatgaaagaacgttgagctacaattactagcaaactcttattattataagaattttggtaatgtttaacaaaaatagatacggaaacaaatcttgggaatctattgaaatttgtatggtaaaatccaatgtagacttcaaatgaaaatcatacttaaaaagatacatggaaagaataaatttttattcttactactataatagagaaaatgttattacctgtaaagaatatgatccagttgtatacacattattttgaatgacataatacatttaacgatcttaatttggcattgctaaattacaatataatgattataaagacaaaaaaaattctatgatatcttttcaaatataataatagttcgataatattattgtaagacatttcatat

SEQ ID NO: 14060 - DNA, 609 bp, Arabidopsis thaliana landsberg
cgatgtgcatgtcactttttaacctatatatttttcattcacatagtaactttggggtacggggggcgcacatgaagctttaagccttggaggaacaatgctcgggttctacccggtgagggtcttaccctcaaaaactgccattctaccagtgaatcccacatttcttccaagggtaaatgctcaaatgttccactaatcaattttggttttaagttttgagttcttggaatcttactaggatatctactatgttgtggttaattcagtcagaagatgaaagggagatgtgcacaaggacaatctattgcacaaatatcgacaagaaggtaaatactgaacaatccaccaaaaatacatattattttgatagtatctcctggtttaagttttctaagactgcaggtttctcaagctgatgtgagaaacttctttgagtctgcatgcggagaggtaactcgtctgaggcttcttggcgatccattgtattcaactcgcatagtttttgatgaaccagctctgataggtttttttctccttggatgtgacactaccgccttgatctatatgggacctaatcactcgaaacccatatcactggcaatttct

SEQ ID NO: 14061 - DNA, 761 bp, Arabidopsis thaliana landsberg
tcctttgactttctcagcatagatgtctgattttctgcccgatgaggttttctatttacggcggtagtctgttagcttatggcatatgttggctatctatagcgccggctggctattttaggtctagagtatcaccgcccatctccggtgtcgcattgagcttttggtcgaattgctttccagtttagaataatgttttctttctttcgttttctgttgcgtttcaattttaaatccaaaatcataatttcttaaacctcttttgtttaaaagactcgatttgtttttcaagcttatcgattttaattatttaagaacaaatcaaagttagggatcaagattttttttggtgtctttgggttgggtttaatgccattgtggctattatttctaaccaatctctggaagcaagtgtttttttttagttgctgctgaaagctccatagacttaatctctacgtcgatgttcctcgttgctgctgaaagctccaacgcccagcggaataattaacttacacaaaaatgtgtttaagtaaaaattatgtcatggagtaactaattttgttcccaacccatgtgttaaaagtatcttttaccagctcaaatgaaaccacaaagataacattaatgtcacaaagtatcttgtattaagcataatttcgttattaaaaagtgcaattttcttaattatattaatttcactgtcaattgaaaaagaaaccgttaatggtttcaattttgacaacaagacaatcagctcc

SEQ ID NO: 14062 - DNA, 670 bp, Arabidopsis thaliana landsberg
agaagatacagagaaatggtcagcaagtgtatctgatgtttacctcaaacatctagctgtaaactggtcgactgtgcggaatgtgatggacatgaatgctggttttggcgggtacatttacaatctctgaaactttaaccagaatccggtttatcccaaactgaaacttgacacaagtttttcttcttttcttctttttggtatagttttgctgctgcacttataaatctaccactctgggtgatgaatgttgtccctgtggataaacctgacactctctccgtcgtttatgatcgaggcttgatcggagtttaccatgattggtgtgagtccgtcaacacttaccctagaacatacgatctgttacattccagtttcctcctaggtgatctcacacaaaggtaaacaacagatctgagtttgtatatctatagagtttcagttctttagcagtagccagtaggcattcactgttttggttcggttcacggttagcttaaccaaagtcggagttgtcataccaaactcggtttgatattgcgaaatagtgtggttaacctttaatatgtgttttttgggtcaatttcaagtgtgagattgtacaagtggtagctgagatagatcggatagtgagaccaggtggatatctggtggtacaagaccacatgga

SEQ ID NO: 14063 - DNA, 1061 bp, Arabidopsis thaliana landsberg
tggcaggaaagctagcaggaacacagatctcttctttctctatgtgtgaaggagttggaagaacacttaaaggaagagatctaagcaaagtgagaaatgctgtcttgtcaaaaactggtttcttggagtaagtaggataaaatatctcatcatcatcatcaccataattatcatccatgtgcatggaatatgaatcccataactcttgtttaacattatcatcatgaaaaactcaactttatggtatccacatcatcatcattatcaatgtcattgtcgtcatcatcatgtggggatcactataccaagagtctttttgttaagttttttttttctttattgttgttattatttttcaatgtgttatttagagtagataagtatcatagtgatgatgatgacttgtcagccccatgcatgggtcccgttttatgttcttctgttgtttttggtttctctttgaaggtttttgtatgatcttaaattagagcctagagaggggcatctcctttagaacctttaattggagttgagttctttaccatgttttggtgaaagattttgtcgtttgctatcgacaatgttatatataaattagatatctttctttctttgttaatattagctatgtccatctttggctaattatgtatttggcaaatctgctactaaatatcattaattaagccgatttcatgcaaaaagaaataagccctaaaatgctgagtttccaattctgaagacattttcaaccatatcaatcgatcaatgtcatatattcacatatcgaaggtgtacatataaaggattgaatccatgattttcctttgaactcttttatgaataattttgaatgttttttttattatagttataagatatttaatagcggtgggtgatttgtacaatgcaatatggtgaatagtaaaatatataaatacttcatacgaaaccaaaaaaaaggtgattaaatgtaataaactttaaaactatgggatatcgagaagaaaataatgtaacgagaaaacatcacatttgacttcaattatgcttttaaatat

SEQ ID NO: 14064 - DNA, 874 bp, Arabidopsis thaliana landsberg
atttaagatttggtcgtcgctcacaggagaaacgtaatggaaaacaaagagaccaagcttgaaccttcagcagcagctgagcaaaagaccgttccgttgatcgaagatgagatcgagaggagcaaagtcgggatcatgagagctctctgcgaccgacaagatcctgaaactaaggtccctatcgatttctttaagtaaaaaaagaattcaaccagaaaagtattgatttgataaaagccctaatgatttggatttgcaggaggtggatgatctgatgataaggaggtttctgagagcgcgtgacctggacattgaaaaggcttcaacgatgtttctaaattacctgacttggaagagaagcatgctcccaaaggggcacataccagaagcagagattgcaaatgatctatcgcataacaagatgtgtatgcaaggtcatgacaagatgggtcgacctatcgctgttgccattgggaacagacataacccttccaaaggcaaccctgacgagttcaagcgttttgttgtctacacgctcgagaagatttgtgctaggtgaataataataatattactacatacattaagttagtgtgggtatataagaaaccatttatgctaatgctctttttttgtttgtttgaatgttgtcatgttagaatgccgagaggtcaagagaaattcgtagcaattggagatctgcaaggctggggatattctaattgtgacatccgtggctaccttgctgctctttccactttgcaggttacttcctttaattcgcctatcatatcttttgaaacatacatttaggtttttagcaattatcactaataaaggaaatattgctataatccacttaactccaaatata

SEQ ID NO: 14065 - DNA, 741 bp, Arabidopsis thaliana landsberg
ccgaaggacatcttagcgaagagtattgtttcttatggttcagcatctaaactggaaccctaatgtgattgccactctatcttgtgtttgtaaatggtttgatgatctcgctaagcggttattgtggaaagaattctgtagagctagagcgcctaagatgatgagtgaccttcaatctagtggtagccatagtgttgatgggagttggagagcactagggaaacttttgatttactgctctggttcaagcaaaggtggactctttaatgatgttcaaatctctggtcattttgttcacagaacccgcttctctagaacatcgggaaggagctttcttcctccacaatgtcgaactgatgatattctctatgtttctgatccttgtgaacatttggatcaaggagaagatggtgatttgggattcttccgtgggattttcaaatcgttttctatgtcaaaggtgaggaagttgcttattaagaaagggacaccatttcatcctacggaagtttgtccgtattgcaaagcgaagctgtggagtatgcttcaggcgaaaatgataccacagagtgctagctgtagattgggggcttatgaagatagcattgagtattatgtttgtctcaatgggcatatgcttggagtttgtacactcttacctttgtctgattctgaaggggccttcgagtttcagtgactataaattgccgaccttgcgttttccgttgcagaaaatgcttg

SEQ ID NO: 14066 - DNA, 586 bp, Arabidopsis thaliana landsberg
  unsure (1)..(586): unsure at all n locations
acttttatgcttacaaactcaatttcctgatgagtgaatacgtgtctgggtcagtgacacatgaataatgtttgtcggagtaattcacaagaactatgaggaggctttccggacaaattctttgatgtatgcttattaggttcgttctcatagggtttgacaaaaaattaaattcaaaaatttaaaatttggagttttaacttatgtttgtaatgttgttatatcacaaaatgattcattatacctgactttataaatccattgaaacttaacaaataatggtcgaatattaccaatatatacaaataatacaatgaccagaaaagggtatggcataaatgtttggtccattttctctagaagttcacagatttcgcatccaaaaacttgtattaggttttttatagtttaaactttacactatttatcacttcaatacacaattgcgaaaaagatttcgcacatgatcggttgacacactttctcaacgccacgaggccatccacataaggtcttatatatatattgnntatttttatcaaaagggtgtagttttcaagattggacaccaaatatttgaacgatg

SEQ ID NO: 14067 - DNA, 619 bp, Arabidopsis thaliana landsberg
ctccacatatcaggagacaaacctgagtgaagcatttcgtcgaacagttggagtacacgattcaacatcaagtttttagcagctcctgagatcaatgaattgtaagtagtaacatctggttcgatcccagcttctctcatacgacgtgttacagcataagcttcgtcgattccaatgaaacgagtgtaccctttgattagagtgttgtaagtgatcacatcaggaagaacacctaatctgattccgtctatgagtaatgtttctgctctctccaagtttcgaaatttgcagagagaattaacgcttatgtttaataacttcgttgagattcctgggaatttcatcaatccacgaaccattctccgagattactaaatagaatcgacatagaagaagaattgtagaattgttaggggttttaggtaattttgaaacgtgaggatcacggattttgccacatatggaaaagaaaactccagaatttagaagaaaaaaaaaatcgagaatttaggagcagagagcttgacgacgacgaatttttattttgatcttctaaacgacaccgtgtattattaagttaaatgctgtcgttaaggcattctcgcaaaacgacgacagt

SEQ ID NO: 14068 - DNA, 918 bp, Arabidopsis thaliana landsberg
catccttttatcacagttgacacatactgagaagagatactaagaatttaagttatttttctttgaatataaaataaatgtggattactatttattattcaaatatcatccatacattttatatctaaatatagaatttaatttctctacatttttgcatcttttatcacacttgacacatactgagaagggataataagaatttaagttatttttctctaaatataaaataaatgtggattactatttattattcaaatatcatccataagattgagtgtgtaaaataataatagaatgcaaaagtctgaaatgaagcaaattttattaagttaaatatcaaagaaaaaatattgattactattgtactattcaaaatttaaatattatcgatcaaaattatttttttttatcttacacccgcctaaatatgcggatcttatctagtattctataatactaagttactaacattaaggaaactaacaaaaattttggtccaagaaaaaattatcaatttttttgtttcaatgattgatcgaccatttcctagattccaaaggtacctcccccatcgaccattttacacacttgtctactttagaattgtttgttagattggtaagtaggtaagcttttgtaatctccttttcttgttgttttagctgggttcagcttggaatcttttttaattaatggaaatttaaaatacaaaaaaaaaaaagttatacaaatggttctaatttctatttaaaattttatgggcctgctatgtataaaaaatagaaaaaacatttttatgggcctacgatgtcaaaaaaacaaaaacaattgttttctatgggcctgcttttgggtcttatggttcgaaacaatggtccatgtgaagcgtgcaccgtcaagtaacctacaaaacca

SEQ ID NO: 14069 - DNA, 760 bp, Arabidopsis thaliana landsberg
gacctttgaaacttttataagttgagttgacaagatgcgttttacctcccatatcgagagttacaaatgcggcctctagtgaggaaacatatacttgtgattttgtttcttaaacgtttaatgtgaacatgaacataaaaggaaaagccattttatcatcataaagaaacttcttttaagctgactctgaccaagtaaaacctgaaaagatggttatttttttacctttttaaagatgtttgggtcttaaaagtaaatgtttagttatttaccattttttagattgtggaataaggtgggaacaagctttgttgtagaagaaggcgatgatgctgactaatagttaaccggtaaccggaaatagtcagtctccggtcatctttatgtgaagaaggaagagccaagtcaaaaagtcaaagagaattgtggggttattaggatgacacgtgtaattattggcaccggcatttgaccgtaaccgacacattacctggcacgtggtggactactggatttgtgttctcaaaccctaataaatatcagacgttagtctatcaatttaatattccaccaaagtcaaggtgcaaatgcgacaatgttatacattacattatattcccgtgtaatttcgaccttagttacaaccaatttacatgaaaatcttaatttttataaaacccaatcacacaaaatgaaatttcttatcaggtacttaaatcctttattaaagtgattcatattgtaataagcttggctaata

SEQ ID NO: 14070 - DNA, 1271 bp, Arabidopsis thaliana landsberg
  unsure (1)..(1271): unsure at all n locations
aataaaatcagatgcccaaaaaagaaagataaatattgtcccaaggatgagcaaaatatgagttcatacttcacataacactaaaaggtttaaccaaacaaacaagggaaataagcaaaatgatgtcctaaagaacgcaaccagaatcaagtcataatgtaacttcactgtagaaatcataaatcttgtttctttttgtgggcttaagataaaattctctcacttagccatcatgactttgacgaattcttcatagttaatctgaccatcgccatcaacatccgcttctcggatcatctcatcaacttcctcatcggatagcttctcaccgagatttgtcatgacatgtcgaagctctgctgcagatatgaatccattctggtctttatcaaaaaccctaaaagcttccttgagctcttcctctgaatcagtgtccttcattttccttgccatcaggttcaggaactccgggaaatcaatggtcccgttcccatctgcatcaacttcattgatcatgtcttgaagctcagcttctgttgggttttgccccagagacctcatcacggttccgagctccttggtggtgatacaacctgcaaccagattcaggtataataagcttttagagacagacttatatccacagtcaacaaacaaaagccattgtatttcttatttcgactgatgaagatctggtaagtaaaaaagagaatgattttttttcattcaacaaagtcctactaagttaacaaagaaactccattcatacaaactaaaaataatcactcttccaagtcctacctaaagtgttagggtaaaagaaatattctgtgtttattccgtctttccttatgtgtgtgtactagcaaatctagaatcatgtgtattaaaaagacacaatattcttctccaaatctctttacatggtatcaaagccagaatcaaaaccctagccacttcgttctattgaacccacatctcaccgtgcaaaggccaataatgcacaacagaattttgcaagtttttcaccaatcaaagcagaatacattcctgatatctacaacatcaatccttttttcaacaattaaactactcaaaatctcaacatatggataaatttcccaaaacatttcattgctgcatcacgagactgaaccagaacaagaacaaaacacagcgtgagtcatgaatcgctatcgaattagccaaaagctagatcgttcacaagtgaaacaaacaccgatcatacagaanactgaagaagatcataa

SEQ ID NO: 14071 - DNA, 598 bp, Arabidopsis thaliana landsberg
acctcctttaatttttctataagactgcaaatgaagaaaaagcacatatgtcgactgtcagtggtaatgaaagccttaatatttttgtgaaaattcaatagccaaaagaccaatagtgaatacttgtgcatggcggtcttcaaattatcaattttgctttcagcgtctaaagccttcttcagcctctcttcactaattttctttgtctcctcaaactttttctctgtttcatcaatcttcagctccagcgaagttaccagggactgcatatgaaagagatatgaatttaaatattttaattgttttccacagctttgaaatccttagtaagaagcaaaaaaacaaatacataacagagcaaattccctaccttgagtttttcgttttcactagtgagtttctccattagcacggtgtcaacaacaggaacctcctttactacaggaacaattgctgcagtcttttttgcagcttccacttcctttaagagcgataccttggtttcctcgaactggagttgtatttcttccaatgctaattgtagttctgcgtttttttgggctttacttacttccatgtccaactaccatggaaaaag

SEQ ID NO: 14072 - DNA, 734 bp, Arabidopsis thaliana landsberg
  unsure (1)..(734): unsure at all n locations
agatgacaggcgaactataataattcccaaaggattaatatgataatttagatatcatttctaattcgttgattataattggttactcgggtggacatttataatgtattccggttcttaattaaattcaattaattaaattagtgtttgactttataattattaacgggatgaattaatttattatttaaacattttatttctaatggtatacttatgtaattattaacaaaaaatatggttacatatgaaatgcactttccaaataatatattgggattttggattttataagaagatgttaaaccgttattcttgcgagagaaacagaagaggcccaactacacacttttttaacgatcacgcagcttatcaagtttctatactctccgacaaaattggtatttaagaggaaatatatgtaaaaataaaaaaaaatcaagtagatcttgtatgatctgattctgatctaatatctacggctaccagcacaacgacaaccatatatcttgactctttcaccacttagttttgtaacttgtattgcccgacgcatggacacatatgtatatatatgatcatgagtttttatatcgccatgctcattcgtttgattgtaaagttacagagatatgatattactagtaggggatacgataatattccaactatnattaactnaatggtntacgtcaattagtcacgccgtacgcaataataataataataataat

SEQ ID NO: 14073 - DNA, 598 bp, Arabidopsis thaliana landsberg
ccgacataccattgtacagcgcatcggggtccgggatcggagaccagtgggcaactaccccacggctaccgtttatcgggtaaatctcccagttgtcaggagaagagccccggccgcctggcatgtagacgtaaccggcaacgtcagagtcaacggcctggtccggcggggccgttaggatgatatccacccagtctggccggagtcggcgaagcctgttgccctctcgcaccacgtagtgattaccgcccaggtctgcgtcttggatcgcgcgcgaaagaagttcgcccgtagtcgcgttgggccacggcctttcgaagatgcttagatcctggatgccgaacaagtcgccgggtcggccgccccgtaggcgctgtagctggaaccgagcctctgtgaagatgagctgacgggcgtacatacacgcaaatacaatgccgtctgtcttgtagcagttgtagatgttgtactggaactcctcgtcatactccttgtcttcgttgtagcccgatcggttcatgtaaccgagcgggaacggctgagtgttggtcaggttgaggtagtcgtcaaaggtgaggccgcgcttttcggagttctt

SEQ ID NO: 14074 - DNA, 301 bp, Arabidopsis thaliana landsberg
ttgacactgacaagacagaaaaggaggagtgatcatggcgtcactttggtctcgcctccgcggcaagtgtcgatgagaagcgtctcaactttgaggactatctgaacctggccaaccccatgaacttcccgatgggtttcgtcaatcgatcgggttacaacgaggagaaagagtacgacgaggagtttcagtacaacatctacaactgctacaagtcggatggcattgtttttgcttgtatgtacgctcgtcaactcgtcttcactgaggcgcggttccagctacagcgcatgaggggcgg

SEQ ID NO: 14075 - DNA, 427 bp, Arabidopsis thaliana landsberg
agttaaaaatggtgacgattattaatgggttcatgtctttacatggtaactttccgctaacattgccggttatttttttttttagtacatttttatcgcaacttttcgtttgtatcagtcattttaatattaacagttattttttggtggggataactacttttttcgtttgtgtctttttatcataactttctatttatatagacggttatttttttctttattgtctttttatcgccactttatatttgtgttttctcatcgtaactttctgttaatatcgatggttattcttcgtctgtctttttatcgtgaacttcgtaaaccaatggacggtgattcttttttggttatatctctttagtgcaactttccgttataatattgacggatgtttttcgcgtgtgttacacctatgcctaccatc

SEQ ID NO: 14076 - DNA, 976 bp, Arabidopsis thaliana landsberg
ttatggttatggtaaaagctcccaatcaatctccctgcactgcttccaagacatttcaagctaagagcagtatcgccgaaattgtcaagctttgcaatcccattgccacgagagaggtgaacaacactctggttcaaatccatataaaccgaagagccagaccaatgcagcggaggagatagaatgaccaaaacaataaatacttagaacaccaccttgtagagctataaacataaaagcaacttgagatataaacatctcccaccgctgacaaatccccatgtatctgccctgtccatcttcaagaatgggtttgcgcaagaaactattctgcagcagttacaaaatcttgttagtagaaagcttaagcaagaagatcaataacattacaatgacacgagactaataatcaagaaaagcatttgagtcaatagtgtaattacaagttgcggcttgtgatgttaagagattcaaagtacagagaccaataattggctacaactgtgtctgaaaaggaccaagtaccaaccaaaatgactaatggtggcaacattttagccttaggtaaaagtgaaacgtgaaggacacatctttctatgctcgaaaaattagaaatttcccaaaacaacagaatgaaagaaaggataagataagattggtttacagattagtacacagtattaaaaaaaaaaaaactaaataatttttgttactcaaaataattcaagcaaaatcagaataatgttaagactttgaaaacttcttatataacatggaaagtcaactttgtgtttgataagtgataagtgataacaagaagcaatgtctcacgattttccattgtaaaataaagatccaaactcaataaacaagatctaaggaaatactaattgttactattaaaccaaaatggaatcaacaaagattctgaatctctatatctcacaagtttctaacttttgggaagaagatctaa

SEQ ID NO: 14077 - DNA, 688 bp, Arabidopsis thaliana landsberg
cacacttcccttgtattctaagacatcccctctataaatacttgaagtcatcagaatgctaataagtcgtgccattagcctttgatttcagaaaaaacacttacaaagctgatatctttcttactacttcgaagaaatcttcttctcccttccaaaaaaacaatccctaaacccggaaccaaagatcgacattcatggctctcttcgacactcataacacatgggcctttgttttcggcttgctcggtatgagttctcacgttcatctctcttaaaatttgatatcaccagaacctagctatatcctaattttgatatcaaaaccagtatatactaacactagccactttcatttcttatcgtgtaattttcaggaaacctcatttcctttgctgttttcctctctcccgtgtaagtattactattgcatcattacttcactctgttcttgtttcttcataatatatgtcattacatatgtttatgtttttatctaactagctagctagagctataatgatcatatgatacaaaacaaaatgagagatattaaactaagagatagatattgattattcgatgcaggccaacgttctataggatttgtaagaagaaaaccacagaaggatttcaatctattccctatgtggtggcgctcttcagcgcgatgctttggctctactacgct

SEQ ID NO: 14078 - DNA, 589 bp, Arabidopsis thaliana landsberg
atagcctttgggaaattttgtagaagtacacaatattcaattatttttctcataaaactctttaatctgctcaggaatgcagtatcgaagaaatttctgatgatgaaggagaaaaatcaaagagctcgaaagataagaaatcaaatggaccggattcaaaaggaccaggccttgtatttaagataacttgcagggttccatataagactgtacttaaaggtatgtcaagcgattatcaaaatttactgcttgaccctctttttactcttttatatgagcaaatcctcatatgctcttatatggcagctcacaatgcgttggttctcaaggccgagagcatggttgataagaatgaatggattaataagctgcaaaaggttatccaggcccgaggaggccaagtgggtagcgcttccatgagacaaagtctttcagaaggctcacttgtaagtaatgcaaggaaactatcttaatgatctttcttttccactttcctttataagtttgctacctgaatctaaatgctgtaacaatatcctagatgatataaatctttgctaagaaattctcttatttataatgagtaaaa

SEQ ID NO: 14079 - DNA, 1197 bp, Arabidopsis thaliana landsberg
gctgatatcactaatgcgactatgaatgggttagaggttttgaagattagtaacgaagctaagagcttaagtggtgtttcttcggttaagtcgttacgggcgggaggatcaggttctaagagcaagaagaaggcagtgatcattggttctttggttggtgcggttacattgattctgctgattgctgtttgttgctattgctgtttggttgcttcaaggaagcagaggtcgacgagtcctcaagaaggcggtaatggacatccgtggttgccattacctttatatggactctctcagactcttactaaatcaaccgcttctcacaagagtgccacagctagttgcatttcattagcttctactcatcttggacgttgctttatgtttcaagaaatcatggacgctactaataagttcgatgagagttcgttgcttggggttggtggatttggccgcgtttataaaggaactttagaagacggggactaaagtcccggttaaaagaggtaacccgagatcagaacaaggtatggctgagttcagaacagagattgaaatgctgtcaaaactcagacatcgacatctcgtctctcttatcggttactgcgacgagaggtctgaaatgatactggtctatgagtacatggcgaatggaccgttgaggagtcatctatatggagctgatcttcctccattgtcttggaaacaaagactcgagatttgcatcggtgcagcgagaggattacattatctacacaccggtgcatcgcagagcattatacaccgcaatgttaaaaccacgaatatcttactcgacgagaatctagtcgccaaagttgcagactttggactatccaaaaccggcccttcgctcgatcaaacacacgtgagcacggcggttaaaggaagctttggttatctagacccggaatacttcaggagacagcagttaacagagaaatcagacgtttattcgtttggtgttgtactaatggaagtactctgttgtagaccggctttaaacccggtattacctagagaacaagtgaacatagcggaatgggcaatggcgtggcagaaaaagggtctgctagatcaaatcatggacagtaacttaaccgggaaggtgaaccctgcctcgttgaagaaatttggagaaaccgcagagaaatgtttagcggaatacagtgtgaaccg

SEQ ID NO: 14080 - DNA, 845 bp, Arabidopsis thaliana landsberg
cataaaataatacaattttatctttgttttcaaattgcaaaaggaaagacatttgttatttaattagtctgagttgactttttcataatttaaaaatataattacaaaaaaaaaaagaaaaagagtcccaaaagttcttagaaccataatgccgaaagagacaaaagaagttaagaataataaaaatatcagaatgaccaacaagaagaaaatggtaggatcttagcgtagatctctttagtttggctcaaatagggatatatatgttctaaatgggtttctttacattgacattgtaacttgtaagtccttcacataagccgagacaaaaggttgtgatggaaccccatgtccaggccgttgtaagccaatggtgcgtacatccatagatcatccgagctcaacaactacatttataaaatatgcattttggttagttaacttgaacatgagttatgataagattctgactaaaaacaaaaaatccttttaacaatctacataccttaatctgaagctgcaagaacttcacgtaatggaccgcttcttcaagcatcgtgcttatatcgacttttgtcccgtttggcacaaggttttgtagtgtcttgagcctttcgttaatcttctctcttcgtttctgcaacaattgataacacacttaagaacgactttactcattgtcatttggttttgagaccgaagtaatataaagtatgttttctaacccgagcataaaggctttgaggatcagtggctgtccctttggtggctctagttttgcctttaacacttgtgaccgaagctttctcatcatctgaactgttgcttaaactctgaccatctac

SEQ ID NO: 14081 - DNA, 823 bp, Arabidopsis thaliana landsberg
acacaccaagtttatgtctctgctcgtttgacaaaacccaccaaagtaaactgtatcaaagaatctcatttggattccaatctctgagactaaagccttgtgtttgatttggttgaacacatcttggtcatgcatcttcggataatcaagacgagaattgtaccaaaatttgtagaactcgatgcttctgtggtttgatttcacgtaagtgaatcctccgtttacccaattgtctgagtcattaggatcaccgaagaatcgatcacatgccatttgaaaatctccatcaggatatagccgaggaaatggatctcgaagccacattatatccgcatcctaaatatataaagggaaatagttagaaatgacatcattgtttttatttgatttttttttttgtaaataaatatacatataaacaaatttggtttgaatccatttgaattaatttaaaaactgaagagacaaaaatttgcaagacttaaagtttttctatgataaccaatgaatgctaaacataactctaaaataaatattttaatagccaaccataactcttgttcaccaccatatgggttggtttggtgaattcaatgatagttaggatattttctgagaaccgatttgttattttgtgtaacaaggccttgcatcaacgtatattccatgttagtgcaaatgtactcatcttctaagcatcacttctagattaaatttcttgatttaaaaggttgctaaaaatatttttttgtttagatagatgatgaagataaataccgtgaagatgaagttgtatcccatttctagcacttgtgtgagaagc

SEQ ID NO: 14082 - DNA, 766 bp, Arabidopsis thaliana landsberg
atgttgattttgattggttattatttttaaaaattaataatatatttcgttttttaattaaatttaattaattaaattaatatttgactttttaatctttaaaaagataaattaatttactttttaaaattttatttctaatgacatatctatataattacttacaaaaattaaaattatatttaaaatgtacttcccaaataatatagtagaatagttaatcctacataaaaatcataaacctggaagaaaaaattggccacatagaagaaacctcacaaaacttgacatgaacgtgtttatttctataataatcatgaaccgtttgtgattgcatatgaatccaatagtggaatagagtcatcaagaatcaaatccacttgcatgacacgtgtccaaacaaaaaaagcaaatattcacactttcccaataaataaaagttggtaaaataattgtcaacgcactcctgggccctgaaccgggtgggtcaaacagacccgaacccggcggattttttcctgtaaaaacataaaaaaaatagcttctctttaaaagttatgtgttttattgtttgccattgctttgttgcttcatcgtaataacttactctctttcacgaaaactctctcaatcgagtgagaaatcagaattcgtacgttgctttgaagttaatgatccgtctctcttcttatcctaaaagttattcctttctttttttctgattgaatgcaaaaagaggttttcgggttttagggtttttgttttc

SEQ ID NO: 14083 - DNA, 660 bp, Arabidopsis thaliana landsberg
cggtgcttcaacttcttctcggtggttactccgtcgtagttgttgataatctcgataattcctccgccgtgtctcttcaacgtgtgaagaaactcgccgctgaacaccgtgaacgcctctccttccaccaggttcggtgaaatttcgctttctaggtctaggaaacgtgtgattgaaggatttgtgtttgtgtagttgatgatttcaacgaatttgggattatgatttgacttgttaatcattgatttgactacgaggctctttttttgtgtttatttatttatttaattttgggcataaattctcgtaataaaatatcagtttttctaaaagattgtttgattccaaaatcatgggtatctttctttggtattattgctttgattggtaactactacaatggtactgggtatttaccgttttaacaatcataaaaacgataccaaaagcgttatttaccgttattttgtaccattttaactattcgcattttcggcttaaaaacttgtatagcgttgtgtcaatgtaattttatatgttaatgttaattattacaatttctttttctctaagatttataacccaaaaataattatttatgtattaaaatattagtttaggcctaatgagttccatgtgaaagagtaattgtcctacttt

SEQ ID NO: 14084 - DNA, 778 bp, Arabidopsis thaliana landsberg
acgttatttcttcaatctcattgatcataattaccattaccctaatctcaaaaatctcaatttcctccaaaagtttcagtttttaaaaatgggttttcttcttttgtaacgaaaaatgtgtcaaactttgaattgaccatttttttttataaggattcgatgaagaaattgagaagctattactcaaatgtgagacatcatcagaatcaccatcatcatcaccatcatcatagcaacattgtttcttcagagaggaaatggatatttttccctctatagattggttcaatcttcgcttagttcttactcttcctcacaacaaccctaacttcaccaaccggaggagtccggtttctcccttttacccgacccgttttgttaaccggatctggttcatcagctttcgttgaatccaaaatcaaacctcaacaaatctcatcactcccgtcgccaccgcgttttgcttacttgatttctggatccgccggtgacgggaaatctctccggcgaactcttttggctctttaccatccgaataatcggtatgttgttcatttagatagagaatcttccatggaagagagagaggagcttcatggatatatcaaaaactcgtctttgtttcgaaggtttatgaatgttcatatgattgagaaagctaatcttgtcacgtatcgtggtcttactatggttgccaatacacttcacgctgcggcgattttgcttagagaaaaagctgattgggattggtttattaatcttagctcttctgattatc

SEQ ID NO: 14085 - DNA, 598 bp, Arabidopsis thaliana landsberg
cccatgggccatgttgtgtgatattgaaagaaacagcatctttcttttagaggcgttcatgatttgaacttataaatgtcccacattttaataatccattttttttggtaatgacattttaataatccattaggcaatggccatcagtttataagaataaaaaaaacaaatgatcaaagatatttctatttgcagtaacaatatatgtagaactgttattcactttctaatagtctaaatatgtgtggtgtgtagcttctacgtagacaatgtgcccatcagggtttacaagaacaatgaggcaaggaaagtaccatacccaagattccaaccaatgggtgtatattccacgttatgggaagccgatgattgggcgacacgtggaggaatagagaaaatcaattggtcgagagcgccattttatgcttattacaaagattttgatatagaaggatgtccggttccaggacccgcagattgtcccgctaattcgaagaattggtgggaaggcagtgcgtaccaccagttgagtccggtggaagctcgaagttatagatgggtccgagtgaaccatatggtctacgattattgcactgac

SEQ ID NO: 14086 - DNA, 453 bp, Arabidopsis thaliana landsberg
gaactcgttctttcagggaagtgtgccgtcttactttttaccgggacatgtaatgggggagcagcgagggggtgggttaaggtctcgtggtaatggacgataccaagggttggctggtactcatccttcaaacctgtgatgacggacacagaccaagcgagagagggaggctttgcctttgacgaaacggaacataaatctggataccatgcatctgttatatataaaactaccacagggagatgggtgaagagaaacactggcaacagaacagaagatactgatggtaggtggatacggagcacagactggctcacattggtccaacgtggccgagaagaaaaactaggaggatatgtgcgcttacacggcctatctgcctgctgcgatgctagaagttgaccatggagatataccactgctgcatgggctgacgcatggaaatggagagcg

SEQ ID NO: 14087 - DNA, 2413 bp, Arabidopsis thaliana landsberg
ctgcaggtcgactctagaggatcccccatttcaacaataaacctctcaggcacaggctctccaaaacaatcctcagcattctcgttctttatcacagtccatttcagatttctgttttttcatagcaggttctttagggctcgggcccggtgcatttcgtttcctcttaacatctataatagaccagttgctgctattaattggttttcttctgggtgtaataccaaaaaaatttgtaaaaaacctttatacttatacttacctgtctcttctaggtgtggtgggcgcgactgctttggtactctagcatagcctccaacccattcatcctcctgccactggtgcccatctatcaacagtgcctcaatgtaatcaacccttggatcatcaacttcatcatcccatgaaagagatggaggacaaacattatcagctggtttcacaatatagttgacctcaacctacacaaataagtatgttaaccatagataatgtacatttacttattatgtacgtacatacacaatttaacacacctcatcagcagcctcacactccaaaatgcgagatgttcagattgctcgcagagaggcaagacgatggatagacctctcagcaaatgtcctgttaggtacatcatcaggtcctagcttagcaattgatgggattgtttcgaaagctaaaagctggagagctaatgggaagccatggagtgcataagaccctacaagtaaaccccttattagttgttgagcatcgtaaggagtttggaaatttgctatcctccccaaagtacgggtaaaggacacccttccccatgggtatttgcagaagaactccaggttcttagtcatctcgacagtcttcgaagtaggcctgttggggttactgtgggccgctaccacaccgtcaaccaaaataataagagatagtgccagttgcttccacccctccatgctttcctcctcctgcagccagctcaccaaatcagcaattgttggaaccgtgtccccaaacctctcatcaaacagagtcttccaaacactctcacactcaggtttcacactgataacatcatcaacgtctttcttcttgggatacttcccacattccagcctagttaggatactaaattctcttaatccaaatctaattggatgaccgccgaatacaatccacatctcattcaccttctttgtcactaactgacggcatattagtccaaggacaagcttagcattgaaagatgccttgtttttgggtattttaaaaagttccccaaatggagaatcgagaagaaactgcatctctggtttcccctttagtacattttctatgttagaaatgtactccggtttagagtacgcgttcatctttgtctcggaagggtaccggtctatagcaaagagtcttggtgtaactcttcaactgtaagatcttcaatcggagcaacacttggactacctgcaattaaaagtcatatactgttaagcaaaccgaagtagtgtacgtacacagacattttccagattataactcaaaatcatatttttggcggaaacagagatttccaattctacttctcaatttttcatcctaaagatatgctaaattccgacaagttctaaccctttaatcaaacaagctttacaattctgatacacccaaagacaacaaacggtaaattagagattctaacccagttcctccgttgcctttgttgcagagcgttttctccgcggggaaactcttaatacccgcttctccttcctttgaccatgctgcttcctcgggacttcgtcgttagctttattcccagccatagctaaagatgctatcttgccggaggttcaaatttcgccggaataaaaagtaactttctcttggcatcgccgggaaaaatagtaactttcacttcccctgatgtgggagttcagtggctcaattcaactacccaacaattcgaagttatgtcgaattttgaagcaatggatactgaatttcgtttcgctttctgattctctctcaaatctctccgttactctcttctctttttcgttttcttcggtttcttcgtttcagtttttttgttttgtctttttcaaaactgaaccgcatcaactaaaccgaaaccaactgctgtagggtttggtttatgccatcaactgaaccgatacgaactgctgcacggtttggtttgtaccattattaagttttcctaaggtaatttggtccgaaattgaatgaaaagacaaaccgtaaaaaccagttctcactttgacaaacggtgagagcaaatcttttttcgtctacttctgtaaaattttttttaatggttagtttgcttttaatattaaaatattaaatatattggttttgagacactcaaaaaaataattatgcaatgagaata

SEQ ID NO: 14088 - DNA, 649 bp, Arabidopsis thaliana landsberg
  unsure (1)..(649): unsure at all n locations
ttaagatacaaatttcaatccttcaacatctaaccacaacgagctgagaaaacaaaggagaggaatcttaccatcatccggatgaaggtcgttttccctgtaccattctctccaagcattacgataatctgagagtctgtgaactccccttccatcacttccagcttgaaatctccaagttgcttagtcatatttgggtatttgtatcttgcataggacttcacttccccatcattctcttgtgtagtctcagaaaccttggaaagagaagaaaaaacgatatcagtcacaaatgaaaaccacttctcttggaggccactggaaaaggaaaagctttaccctgaaggtcagggattcatccctaaaacgcaagttttctgtggggataaatccagccaagaacacgttgattccttctctgacagaaaaggggagagtcacgacaccatatgctcctggtttcccatacaaacagcaaacgaaatccgagagatagtcaaggacgctgaggtcgtgctccacaacaattacgtagctacaacaacaaaaaggtaaagcccatgtcagcaacatgtatcctatttgggagatanactcaataccaaggaagttcaaaagatgagaaaatcagacctggcatgcctgaaga

SEQ ID NO: 14089 - DNA, 653 bp, Arabidopsis thaliana landsberg
catataaatggaacaaaagtaaaatatccctcagaagataggcaagagagcacacaacacttctgtccttttggtagtaatttaattagaagaacccaacaaaaatataaaaactactccataattaataatactaccactaaccactattacttagctaatttttcttacattacaccaataaaataaaaaataaaaacgatgggttctcctaattatccgaatccaagtcttgtcctaaagagttttgttgcatcacgattatccagaagcagagcttgatgaagagaggttgttgttgttgttgttgtttccttgatttgatccactagagttcttggttttcgagagcttttgtttgagttcgaagagaagttgttgattctcttggttcagaatctgagctttcttcctcaacctctcgttctcctttattatataacagttttgcaagtacagcttcgagtttagcctctccatctcgacaaaacttggttctgtttaatcaaaaaaagagagttaaattatggtagatgacaaagaaaaaagaagaagaagtagaagaagggagattattaaagctctctaagttatgattatagttgcggttaaatcattgcaacaccacatgggttgtgcagcttcacacgttt

SEQ ID NO: 14090 - DNA, 996 bp, Arabidopsis thaliana landsberg
taatagttctattggtttgtggggtagctttaccatgatcactatcaactttaccacgtttttcaaacatgacgcgcgacacattaggaaataaacaattaatgtgtgcaaatgatattgatagacgttaaactcagagatttataataatatactatttgaaaattgcttgcaaactaatagatgtgacaatttaaaaatgattgtaaacttctttttttttttttgaatgttgttaaaaaatgattgtaaactaaaactattgttaaaaaaaatgtctatgtaattcaatattgttatttgcatgcatgaaggcaaatcatcctttgaaaattcaaaatataaatgattgtacacatatacaagtcagacgtaatatcataaaaataacaaaacattaatttttctttaagggaagaaataaaagaaaaacaatcaacgaggagaaatatgagattcaacatgggatttgccttgtggaccttgagttctgataaagagtctatactgatcaaaggtcatgggagggtataaaggaggattatgagttgatacaagttcttgtaatggttggatcggaatatcgcttttaggattgtagaagaaggcaagtgaaactctctccttgtccgagttcactatcactctatgctccacactcttgtatgttgagttgcttagtatctgcatttttcatcatcgcaacatgtattagcttatcaacacgtaagttgtgtgattctaaggtaaaatttagacaaaacacaatatttattttctaaaagtacaacaatttagaaaaacattaataatatctaagtttatgatgttttgagaaatttcatgtgcatatacatatggtgtttgttttaaaaatcgtgttatacattgtagaaataaatattccttctatgcaacatgggcaaacggccaaacacacacatgtgcgcaatgaaagatttgatgtactatttgtttcggattacaaatattgag

SEQ ID NO: 14091 - DNA, 347 bp, Arabidopsis thaliana landsberg
ctgacgcggctctcgaagctgtgcacaagggtgtgcaaaatcagtcatatgactttggcataaaacacaaacacaggaatgttgctaggctaagagaggttacaatgatggtaagccagtctgttctgtttgaagctgctgcttttctattacaactttcgcccactggttcactgcaccaaatattattggagatgaatcaatttacaattataagtcttcatcataaaagaaaacattatagctccacattcactactaagttcaagcttcttatgagcatatatatataaatcttaggagatgcagaaaataacaaatacatttaggatgttcataaatataat

SEQ ID NO: 14092 - DNA, 168 bp, Arabidopsis thaliana landsberg
tgatagatgagtgaatagagtgatgaacaagtgcattacttattgaccgctcttaggaggtataggagggcgactggatattcattggcagacatgaagggcatttgacctagtttgtgtactcatagaattaatctagacaatgaaccatattttagagctgaacta

SEQ ID NO: 14093 - DNA, 444 bp, Arabidopsis thaliana landsberg
  unsure (1)..(444): unsure at all n locations
acgtggggctatcgtaaggggataataagctcctctattgttcttggccatgactaggggannnnnnnnnnnnnnnnnnnnnntcctctcgtgatctttgcaatgactagggcttggtgtggcagatagaataaggcaccgtaaaccgtaatgagacgcataaaccaaaccaactactcaaatacaaaagacaaaataagcagtaggactctaaaaggaccaagggtcatgagtagataacttaagaactatcttgctatatcatccagtggttggtcacatatacaagactaggttatggtacataaagaaattatcatgaagaacatggaggacttacggctatgagtttccaggcatttctaggtctctctgcaacctggatagcaacatcaacagaatctccagaagatataccaacctgaaaaggttatagtcgggtac

SEQ ID NO: 14094 - DNA, 743 bp, Arabidopsis thaliana landsberg
cccgttctctaagggtcacttgggtcagtttctgttgtcagttcacagagatttgtgtagaactctctctctctctataacaaaattggacagaattgggcaatcgagagagaaagatgcaagccatctccaaagtttcttctgcagcatcattctttagatgttctagggtttgtatttccttaattcgtgctgaatcatttcctccaatctcattgtccgattactcaccaattttttagggttcactcctctgttcgaaaaattagatactcttgattgtttcttcttaaatctctattttaattcgatgcgttatagcttattggatttatacaagttacttacttctttacgactggattttttttcagttaatgaactttctctgtttatggtgaaattatgaattgagaaatctggttgtacactttttcttttttttttaaaaaatcacactagcttctactcaaagcttctctgagacttttcttgtatgagtcttggctgtgacttttcttgtatgaatatttttcaatattgttgttcatatctttgattagtctctgctcttatctatatgtttatcagaagctagttagtcagccatgtgtgaggccttgcgtgagacagcttcacgtcagaaagggtcttgtctctggtgtcatgaagctgttctcttcacctcttaggactttgcgtgatgctggtaaatccgttcgcatttcaagattctgcagtgt

SEQ ID NO: 14095 - DNA, 776 bp, Arabidopsis thaliana landsberg
taatgccaaagtaagacaaagccgagaacaaattatttaatgtttaaaaaacagtttggataatattttgaaagttgtttgtaaggtgccagaaatattttgctagatagaggagggcaattgaagatctctggttttggtttgataaagttgtcaaagattggagaagacagtgcaaaagtagtgaaccacgaagctcaaatcgataagtcaagtaagaaaaaggctgcattttaagttagaaacagattcatatatatatatacaagttagaagcattgttcttgaaagatcctatgcttaccttttgaactgcagattactatatagcacccgaaatttacaaagatgaagtcttcgataaaagggctgatgtgcattcgtttggtgtcattttgtacgaggtagtaacacaaagctttagccttttctttgtaattaaatgtctcagtttcaaactctgcaatgttgttttttggtttcatatgtgaagttgaccgagggagtatctttattccatcctaaaccacctgaagaggttgcagaatcgatttgtatagaaggtaaaagaccaacaatcagaacaaagtcaaagagttaccctccggaattgaaagagtaagcaattcaagatcatcagctattattacatatatgattgttttacaaacattaacatctcaagaatcatatgactatgtaggttgattgaggaatgctggcatccagaaatcagtgtgaggccaatattctctgagattattatttcgctcgac

SEQ ID NO: 14096 - DNA, 886 bp, Arabidopsis thaliana landsberg
tgttagtgattctttttgggatatacttctcttaacatcaaactccatggctcttaaaggtcagaccttcaaaatgttctcaatgcaaattgttttttgttgttgttattttggaatctcacaatgcaagtttgtctttaaaccagtgatgactgaatcaacaatgaccagatgcatagccgtatgcttaatcgcgcacttgattagattcttggtgggtcagatttttgagccgacaatatttttgatacaaattggatctctgttgcaatatatgtcttattttttcagaatcgtatgatcccatcagcttccagtatagtcttttggtttgaagataagagaaacctttacattattataccatactgtattttatgactaagccaaatattatcgccaccaaaaattgaattagaccttactaaaatatcaaaagttaattgttggtctgttactctgtgcgggcggatataactcaaccacctacaattatttgccctacaaaaaccttgttcctcacgatatcgtcgctccatctttcttggaatgctgggcatatgtggtggcaccctccttggaatggtgggcatatgtggaaccctcctatgaatgttggagatatgtgggactctcctatgaatgtggggcatcaacacattgctgcaacaccaagtgaatgtcataggaaagacgaggagacggttgaagccgaagttgaagctccccttgattcttatccggagaatgctactaccatggcgagaaagcaaccaaaggcaagttaaatatctgaaaatgttgagaattctgatgataactaaagcattgacacgaatattgggttaacttaataatacttatgcttatttccagtctcgtttgt

SEQ ID NO: 14097 - DNA, 757 bp, Arabidopsis thaliana landsberg
tgtgtggattaccggaaatcgatgacgatgagtcatgaatggagccaccattggtattacctcctcttgctccagcacggatgaaaaactcttcaagagtgatttcccctaaggtttgttgtccctgaagatgagtaatgtttgttactcctccattgttattggtgtgtttttcctctgtgatagatttccaaacttcaccaacattttgtttgctaagtgttggaggcagagtagttgagccttgcctctgcgacccctcttgtgtttcttcagcactagatatatgcttaaccaactcatccatgttcattgatccacaatctatccctaagctggtctgaaactgatctactgtccatgagtatattgatccttgtcggcttaaagaagtactaactggcaaatcattcaccaagtttttcagtctccagtaactatccatttcacttgacacaaatctgagtgattagtggccttagaaaacagttgttgaaatgtaagagcttttgaggttaaaaatcatgcgaaacagaggaaaagagtcccaaaaccccaaagagaaaatttaaaacatagggagagagaaatgatcaagaaaaatattcattttggttctcataagtttttttttttttttttgattaaaaaagttcttaataggtttttaggggaacccaaaggaagttacttggaattttttaaaaaaaaattttaaaggttttgggcaatttaaacccccaaaaattaaaaaatt

SEQ ID NO: 14098 - DNA, 923 bp, Arabidopsis thaliana landsberg
tgggaaatattattttttagaatagaaaatagagatatacattggagagaaactctttttctaaaatagagatagagctatacatcggtgatggtccaagagaaactttggaaaagatgagagactggtacgtgtcacgttctaattgggtgttttatttgacaaaactgaaaaaaacgcggtaaaaaaatccaatttttgccccgactctctctttggcgaaatgacggagccggacttttgtcccgacttgaagaataatgtcctaaagaatcggacaactttgtttcatgtctgtttcagttttaattttcttaataagtcttcctggtttatagggatagaccacgtttaagtttgtttcagcaattctagtagcttaagtttcgctttcaagttgtaagttcaaggtctatttaagagaccaacctctttagtgaataagaagaacttttcagctcatctctttcttgttcttaaagagattcaatttacagagacaacacgactgtctctctctttgtcgaaggcgatttcgttggagaatctgcgattacgtttattgtgattttgtggtgactgagagttcgatccaccagatgcataatctccagagtcgctttccaccatcgacgacccgagctccgatgatgacaaatcaaaagagttttgttttatcgattctttagagttttggactccgatttggtttcgtcttgtcctgcacttcgagattctagctatgttggcggattataagcctcggtcgaacaagtctttaccttctttggcttcttcaattaaggtttcgtttcaatatctagttgctcaaagcttgtagctttaggtatcccggttcccagtacatggcattctaaatgaaaaacattattggtcaaagtttgtgacttcataaatttgct

SEQ ID NO: 14099 - DNA, 632 bp, Arabidopsis thaliana landsberg
atgttccgtttctatatctatccaaatttattgtgtcccacttattaggaccaagatagagatcgaagttggggtaagtattagtaccatcgtagtttccataaaagaacatggctccaatgagataagttgtgtcacgcgtgacattcaaagtgtaacaatttcgtactccttctggaaagtatctcataaccagatatggttttatatgtaatttgtcaaaagctttatcgactctgccaatcgttcccgtctggattagggtcgaatctgatgtgaatactaatccactatctggatcagtataaggggattcatcaaagggcatgccacaatccaaagtgatgaatcctggtcaaacataaaaagagaaagctggagaaaataatcaaaatacataaaattatgttgataactatgaaaaaatcaaattaccgtcttgattctgtggttgaacacggtgtataatggagaagatctcaatcatagccaatatcaaaaatagacttttcattttctgtcagtttcttgtttttttgggaaataaagaatggttcatgctctgtggactagcaaataccccttatggacactgcgtgagcgaatgctccaatcaacatccagaaatgtca

SEQ ID NO: 14100 - DNA, 670 bp, Arabidopsis thaliana landsberg
cacacaaacgcttactagggactaaataaaaactaaacaacctaataggaaaaggaaatacttttaaatgggaaaaaataaataaatcttaatgttaattaatctttctttttaattaacctctttgtccttatataagaaagtgaaaacgtgaaagcttttataaccctaatatctgatttcttttagatcaagtaaaaacaatggtgagattggatcttccatgggatttggtagatgaaatactctctcgacttcccgcaacatctctaggtcaactacgatttacatgcaaacgatggaatgctttattcaaagatccggaattcatcacaaagcaatttcataaagcaacaaagcaagatttggttctcatgttgagtaattttggggtttactcgatgagtaccaatctcaaagaaattcccaacaacattgaaatagcgcaagtttttcattgcaacggcttattgttatgttccacgaaagagggtaacaagactaaactcgtggttgtgaatccgtgtactggtcagaccaggtggatcgaaccaagaactgattacaattataatcatgatatcgctctaggttacggaaacaacagcaccaagaaatcgtacgacagctacaaaaatcttgaggattacgtatggttgcaaactcgttg

SEQ ID NO: 14101 - DNA, 952 bp, Arabidopsis thaliana landsberg
  unsure (1)..(952): unsure at all n locations
aaaaaaacccctccccccccccagcgaatgctccttaacagaaaaatcataaatatttaccgtatcttctcttcaaatactgcgagagaccagcctgtgatactccaagtacaacatggttgacagtctactaacacgaaaatcaatgaaagcaagattaatgaaatatcatatacgtcacatctctcaaatgttgtaaaaaattcgacatgtcaatataaaattgatcactaacttaaaatgtgtggagaattattttaccattttcatggcgttcttgattagctttatgtcatcaagacttacggtacgatgaaccatacacatccgtttacccttgcttaacttgaaatcgcctttgatcggtgtttcagtatccttaaggaacaatgccgtagcaataaactccaaagcatcactaaccgtattcaaaaccaacaaagctgccgaccatagaaccataactagccaaaagaaccgggaataacatcttgaactggtttttaacgaggatgatccagaagacggccggttctggtatggtagactcgggagctcattggggtttgatgttttacgggtgcacgcgaggactagagacatcatagacataccgtcgcctaacgagtgatggatccttaaaaccgcgacgttttcagcgtccgaggttttcaagtcgagtaaatgaacttcccataacggcttggaggtgtctaacgggatcgtagtgaggtcggagacgtaactctcaagaaaaacgtctgcgtttgcgttctctatgtngttgtgttggatttttggaatggatgacgtgatccttgaccaccacgtttgttcgaacccatttttgttcctgtctattgttgttacaaattgttcaccttcaataaaatttatgcatggttatattaaaaccatcgtcaaacattgacaatttgacttaatacaaaaa

SEQ ID NO: 14102 - DNA, 982 bp, Arabidopsis thaliana landsberg
acaattcaagacactaatcatacaataataatatatagagtgatcataagatattttaaatcataattaattaattctaatatagtaatatatactgtaactaaatcttgaatattataaaatcctaactggagaaaaacgtaaatgataaataaatctctaatatttgaagaaaaaaattctaccaaaaggactcgaaaaaagaacaatatatatttcagattaatggaaggaaaccataattaataataataataataataattaaaaaatcataaatcaccatgaatcaacagtctccaaacgctaattatgtattttatccagcttccactccaacagaccaagccttttactatatttgaatgttgaccgctgaaatccttattctattaaaattactaagccattcagcatttagcaatatgattcgtccatcaacataactccaatcacatctacattattcctatcttaaagaaaattttaacaaaatttggtaatcctttccatactattcgcgttctctgtgttagagtgttagtagttattgccagagagaggtctcgattcccaaacatgtttaatctattatgttagttcattgtctaaaataaatttaccaaaaaagagacaaatgggaacacagataagacgtgatttgataaatcagacaagaaaatgtaatgagtgggtccaaacattttgtagtgacgcctcatggccggcgcaccaattcaccgagacacaacttaaacatttacttaacatgctaacttgctttcatagtctatctcacaattgagtttagtttgagttcactgaaaagaacaaaagagtaaacaaagtggtgcaatactttccattgactaattgactttaaaagccctcagcaaactttattttaacaattatctgacgatttagtattcgtttccttaccggtgaatttagtggtaaattgctggtgaagagtaacatg

SEQ ID NO: 14103 - DNA, 709 bp, Arabidopsis thaliana landsberg
gaatgaccggttccatagtagctatgatgatagcagcggcgatattcactacttgcgttgattgaaacaagttcttttatcaccgggaaattaaagtacttcgacatttgaaacggttcaacaagcctgctcttatatccattaaggtacatatcttatataaatttcatgacaaaaattaaagaaacctttttagagatgaattctaatacgctttcattaatatttcttgcagagtgaagatggagatgtaatagattgtgttcctatcactaatcaaccagcttttgatcatcctttacttaaaaaccataccatccaggtttggtttcacttccaagtctatctattgttttaaaacattatgatttttgaatcaattgtgacgtaaagtttacacatgcagatgagaccgagtttctacccggtaagtgattctacgtacaccaagagggaggcaagggctgtaactcatgtttggcacaaggctggagattgtcccaaaaaaactgttccaatcagaagaacaaagaaagatgatctcttgagaccaaaatccatcaagagttttgggagaaagtctcatcaaagcattccaagaactacaacctttgatccaacattaggtcatcaagtacaagtcaactacatgcacacacacacacacacacatgtgtatcattgttaatgtcttgtggcttacactttt

SEQ ID NO: 14104 - DNA, 561 bp, Arabidopsis thaliana landsberg
cgactccttgggattatctgtacgctatctccttcacctccaagagacttctgcttcatctctttgcttatttgtaaatctctcaaatctctatgtccctctatgtgaaacttgctgctaaagaaagctaacaaaaccagaaacagagctattgagatcgatcttgatggatggaatctcttcatttgtgaattctcttttaggtcttgagaaaacttttaggtagaaatatgatgagttaaagtcttaaagagaaggagatagagaaagacaacttgtaaagcttgttggctttgtaagatatgtatgtattgtcctgcgactttttttgagatctgatcacgtgaattaatttttcttctccgaatcatttatttcagatgctgagatattttttttatcttaatcaactaatttatggaacattcactgatgttgagagtgtcctcactttcatacaagcacatgtatacacgtttatttatgtgtttaccaatattagtaaatccaacttcatgagaactcaaaagttgcaggtaaaacattaacaggctgggtttt

SEQ ID NO: 14105 - DNA, 1180 bp, Arabidopsis thaliana landsberg
tatgttgcctgaattttagttactatgttgttgtgatttgttttttctttaacaacgtttgatatacttaatatttacagtacccttttcattattattttataacggttggtatatggtggatcaaacaacgtggacctgcctttacctaattatatagtcatgtcatacttatatctgcaacattgttttatttcttgatatttcatcgtatgctttctaatatgcatattcaataatcaaagtgttagatatttcatattgaaaaagttgttttcatttaaaaataaaaataaaagtacacttgatttaatgtatatgaaacatatatagattaattctttttaaccaagaaaaaaaacattgatcattcctctgatttattttaataggaaaatacaaatatatgtgcatgttagacggactaagattttacttttgttgcagcgtaatctgatctatgctggtcataatcggtaattcggtaacatactttcattaaaccgtcaatttgaatcctttttatgaatgttttttgaattgaatgtaaacacgttttcaacaaaaaaaacctttgtacactggatgcaatactatgcttcagaatttgaggaatcagaacatagaatttgaagaaacaaagcagtcgggttttaaggtgttgatcggtggagaaccatagccttaggtcatagcgatggttgcttgagactttgattgagctgatgcggttccagacggttttgtcaattagtttgattagcagcgttgaagatggaagctccccgtgtcgtcttgcattccctcacgccaattgtggtagagggtagcttggaagacatatgaaaacagacagagattgagttcaggagtgcttgtgttgtgaagcagtgcgatgagctggtcccaatttgccgtgtagctgaaatatttgtcgaatgttttttaatgaatatcattgtcagacgttatcaattatctgaaatctgatatatatcctgacatccttgctgaagacatcaaacaatgtcttttctaaagtatcccaaacctcattaacaagattcagtcaacaatatctgcttcaccaaagtttcattatttatatttctacttatttgatccactatttagaacaattgtcacacttcatagcaattatatctcatctgttgtaagc

SEQ ID NO: 14106 - DNA, 715 bp, Arabidopsis thaliana landsberg
aaaatactaaataatagcccaaatatttaaatataccttcatggaatataaaaaattttaaaaggccttttttttataaaagttaaaagacataggtttaagtataaaaaaaattaattggtaatatataataaaagaaaaatggcaaataatattcccgtagttttcgttcccttgataaattctctggtccatgtttaatttttttgtagtatatgatactaatattttttaattgtagtgtaacatagtatttgatttgtatactaaaataaatgtaaaatttatcgggctgttgtacctggcaagtacaccatatgtgtactctctcctcaatgctctcgtcataatctttccatgtcttcttctctctatatatattacttaactctttctcactctctctaattttaaatttatctctcattagtttaaaccgccggagaacaaaaaatgaagcatctcatccgccgcctctctagagtcgccgactcatcctccgaattctccatccgccgttccacctcctccttccgcaaccgtcacggtcaccatcgtctccacgcgccgccgcctccgtggtcaatatgtccagctagaagagtcaacaccgtccccgctggtcacgtacctgtctacgtcggcgaggagatggagaggttcgtggttagcgcagagcttatgaaccacccgatcttcgttggtttgcttaacc

SEQ ID NO: 14107 - DNA, 464 bp, Arabidopsis thaliana landsberg
  unsure (1)..(464): unsure at all n locations
acagctgtggtatttgaaacaaaccatgcagttagagaaaggaggaactnnnnnnnnnnnnnnnnnnnnnnnnnnnnnnnnnnnnagaagagcaacaagcatgtcctcatagtcaccagaagtgnnnnnnnnnnnnnnnnnntccaaaggaatgctgtttcttcgctgatattcctctttgatgcgttccatgtcaacttcagttcgtgtagtcacgactcgggttagtccccattcgtctgttcccattttgttgattgatagacgaagaaccttctcaaaatgcttctcagggtatgtcaaacatgtgattacagctcttagtagtttcatgtagtcattgtcgtccgaatcttccttcaagttctgcaaaaatttcacttcatataataagctttccgaacaagattttgtaacatcaaatgaaaaagcagttggtggttaagctaaccttgttaatggcg

SEQ ID NO: 14108 - DNA, 585 bp, Arabidopsis thaliana landsberg
acttgtgccaaaatctcagcaagcttgagaatctggaacaaggtactcttctaactccatgattccagattaattggttgccatgtcagctcataagccaaaggaccaaactctcacaaattcttcctgtctgcaggattccaagagctcttggctgatttggttgaagccgctattgctcattgccaattgattgttgtttccaagtaatcttcttcttcaccgcttacacgtatcaaacaagttaatgattctcccctcaatgtcagctcctgaattttgtgatatttgtcttggttaggttcatagcgaaactagagcaagacataggtggcaaaggagtgaagaaacagctgaacaatctgtgttacatttatgctctttatctcctccacaaacatctcggcgatttcctgtccactaactgcatcactcccaaacaagcctctcttgctaacgaccagctccgttccttatacactcaggttctttcttcctctctctctccatctctgcatttgatttttttttaagctaagttttaacacgtttttgttgcttcttttaggtccgccctaatacggt

SEQ ID NO: 14109 - DNA, 617 bp, Arabidopsis thaliana landsberg
  unsure (1)..(617): unsure at all n locations
acatggacttaagcccaacttgtttaaaaagcccaatgtacaatgacacaattcctttttctaaacatattcgagtttcaacttgttttaaaaggcctagcccaatactaacttatcttgctacggaagaatgttaactcgcctctatctacgtaatcaaactagggctttcttattctgacgaacaagatcttaaaggatgtcatcagaagcggagatctatcggaaaaaatttaaacgagctgtctgacaggatcagtgccttgcctgacgatttctgttgcatatactgtgtctaatcccaacaaaagatgcggtgaccaccatgattttgtcgaaacgatggcgttttctctggacgatgttgcctaaactcgagtacacagaaagcaacgaaggcggaaagagtatttgggacttgctagaaaagtcattgcaactacacaaggcaccttcagtagaaagcttgcgtatcatgcttggtccacaatgtcctgttgatgtagatgtcggaaagtgggtctcgaatgcagttgaccggtacgttagagagctaaccctaagtcttagttntctctcagatcctgccagtaagaggctttacaccaagcaaacgc

SEQ ID NO: 14110 - DNA, 600 bp, Arabidopsis thaliana landsberg
aaaacatcaaatgcatttgaatggctaatagtatttgtacgtatattttaaataaacttcactcgacaattttatatttttacaataatagaatagttgaaaagagtatagttcagttgagttacctttgtaaaaatcgattttcgcaaagcgaatcaaacaaacaacgataccatcaatagattcttggcatgcttgatcaacaatctcaataaactttacctaaagagtacatgccaaactattgtcccttgaaggttcaaaactattacaaacaccagttgttatggagaattgcctccaaacctgaaactacttaacctgaatatgccatgcattccttgtaagacttgagagatttcaagggggtgggggtggaggtgagggggggtgaatggaaaaggattagccaacaatatcattttacttcttatttttgtttcgtatgaggaagaatatgcaatattggtgaatgaagtacgcatatgggaaagacgtatttataagagtagaatggctaggtcgaaaatattcttttcggattatgtcttgggaaaaatattgtctaaatcacataaatatagggaaatatctagatga

SEQ ID NO: 14111 - DNA, 660 bp, Arabidopsis thaliana landsberg
tgatgattatgtttccttcttggctgagaagatcttgggataaacactcctgttcctttgctctctcggattacgttgtaattgatctgctcattgtacatcatatatggtgttgctgatgtttggtagtttcctctgaacaaaccctgttttgttatcaacatcgcggttaatcactaatcaagagatatataagatagagaaaaagaaaagagtttaaatttggacaaacctggaaagagacagaagaggaaagtgaaatagggttttgttcatcttcatctgtgattaagagattgagttgcttgcttatgtcagcaaagaagacatcatcatcaagctcgagctccatggccatatatctagtctcttgattagcctgttgttgtctctagaaagaagtagtttttaaaaaatggtctcaagtggagttgtgagggggaatgttcaaagagtggcataaataggcaagagattggggtttaagagagaggggaagagggtcgagagagaagtgcctgtggcagagtggggccaaagtcaacatccaggaaatgtaatttaatctggcaagagaaagtcccttcacacaaatggatcatgcagggaagggtttgtgcaatgatgttgaataaactacttgcaaatccataaagatat

SEQ ID NO: 14112 - DNA, 680 bp, Arabidopsis thaliana landsberg
gtttcttgaaattccactgttattagactcttgactctgttttgtttcccgccgatctcgtgatgatggccaccaccaccaccaccaccaccgctagattctctgattcatacgagttcagcaacacaagcggcaatagcttcttcgccgccgagtcatctcttgattatccgacggaatttctcacgccaccggaggtatcagctcttaaacttctgtctaactgcctcgagtctgttttcgactcgccggagacgttctacagcgatgctaagctagttctcgccgccggccgggaagtttcttttcaccgttgtattctttccgcgagaattcctgtcttcaaaagcgctttagccgccgtgaaggaacaaaaatcctccaccaccgtgaagctccagctgaaagagatcgccagagattacgaagtcggctttgactcggttgtggcggttttggcgtatgtttacagcggcagagtgaggtccccaccgaagggagcttctgcttgcgtagacgacgattgttgccacgtggcttgccggtcaaaggtggatttcatggtgtaggctcattaatctgtcattaggtttccagtttcgtttattagatactctgtattccgtgaaactcaattcccctctattattcaatgactcatagcatcatcctaagtttcc

SEQ ID NO: 14113 - DNA, 900 bp, Arabidopsis thaliana landsberg
gaggattcctggcctttggcacaaaaccatctaggaaaaatagatatgtacgtaaatctatctactggaaagcagtcaagtaagaaacatatacgttgaagaagtctacgaacgccggtgttgtacgatatatctataacactcaattccgtatctataccatgagagttagcgtaaatgttatagtattgtattattaagtatgtttgatagtttatgttgcgtgtactctgtatggggtacttgttgtgtattccttgtatgcttgtggtgtgctttggttgctttctattattgtttgggaatgggattggagatttattattaactagactcggattcattggataatcctagattactcatgatgcattttttgttccgctggcgatattagtaggagagtttgtagcagtgcactgatccttaggacggctggtatatatgatttttcagctttttgtcaaatacgtagtttttactatgtataaattttcaaaggatctgaaaactatatatgttttagtaacaatttaggtatgatattattactaaaactaaaagtgaccgaataatatatcagtcttgttcttgattgacacaactcgcgactgttgtatgggttgaaaagccttagactgtaatgtagaggaaaatattctcgtggttggacgatcatagcaaacaaattggtttcgcaaaaacttcggttggttgactatgggcgttgtacatgacacaccgggttgttcttaatcctatgacggtaaaagggtgttgcaaaatatgttttaaaagaaacactcttggatgttcataatgggacttctcagaactaggactcttggttattgagaaaagttctcaagctttagaatcaggtagctttttttttttttg

SEQ ID NO: 14114 - DNA, 496 bp, Arabidopsis thaliana landsberg
aaaacaaaactaacaagaaacaataacgattgagaaccaagtctctatagttgataaactgggcttatgaaatcttgtagattgtcttgttatgcccataaactgaaaatacacgccaagcacatcatcttcatctccagcaacacgtacgtcgacacacatcacaagtcattacggcatcagtagcttagttacataatagtactatatatattctccagcattttattcatacgttataaatatttcttgctgattatatagctaacagtaattagagacggaaatgaaatcaaagtcaactcccacataaagcttatccttcaccaaataagggtcatcaagttcccctagaggcatgaaatccgcaaagccatggcggtcatcaggttctgcaccaagccaacccgtaactatacgtaccaggagaaaaagattagtactgtatttaaccatcatgcatcacatgactttccaaaacataataaacacatac

SEQ ID NO: 14115 - DNA, 485 bp, Arabidopsis thaliana landsberg
  unsure (1)..(485): unsure at all n locations
nnnnnnnnnnnnnnnnnnnnnnnnnnnnnnnnnnnnnnnnnnnnnnnnnnnnnnnnnnnnnnnnnnnnnnnnnnnnnnnnnnnnnnnnnnnnnnnnnnnnnnnnnnnnnnnnnnnnnnnnnnnnnnnnnnntggtgacgacgattggaaggcaggaaaatgatcttgaagaatctcaacaccaggtttgcatttcaaaagaagaaacttctaaacttgagaagcttgttgagtcaataaaatctgaccttgaaaccacccaaggggaaaaggttagagctttgctgaatgaaaagactgcaacatcacagattcagaacctattaagtgaaaagacagaacttgcgacagagttggaaaactgtaagaaggaagaagagaaaatcaagaaagctatggagagtttaactttggatttgcaagaagtatctgttgaagcaaaggaagcaaaggagaagctcttaacatgtcaagcggagctcgaac

SEQ ID NO: 14116 - DNA, 746 bp, Arabidopsis thaliana landsberg
tatcttaagaagtgtggagagtcctacttgacattgttgttgtatgtagatgatatgttgatagtgggagcagacttgcatgagattagcaagttaaaggtaaaactcttatcagtttgcgataaaaggcctagggaaataagattaatataagcaaaggagagcatctccaatggagggctctcttgctattttgagagagttttcttgattttgttgattaaaaaataatcaaaactgattaattttgagagaatcgtctctctgaagagagatttttggagttgagagagccgaacacgtggctctaggtgattggttggtttatttaacaattttttttttatcgtttatgtattcctgtcgtcttctctagcgattgtgcgactcttttttcctgcgattctgctactctggagaaaggaagacgaatgattagttaaagaagaagaagaggagtcttgcgatagaagaagatttttgcgatatcttcatagaaggaagatggtcttatctcaaggctctgcatctctctccttttctcatccatgtaatctctttttctctctttgctacccttcttcttcctctagttgtactttgtattctgaccaattctccaattctctaaatttaagctttagtttgaaaattaagatttctgggtatcctaagcagctcaatttttgatatttctgattcgttttataaactgaatcgttcacatacggttttgttctcttaaa

SEQ ID NO: 14117 - DNA, 663 bp, Arabidopsis thaliana landsberg
caggcctactcgcataacccactaaaaccccatattggtccaaccaactgcaaggcggtgtagcccgcttacacaacctaaccaaccaatgggaggaattgaactgggataaataaatctatggctacttgttagagttaagaatcaagaacatgaataaaacacaaaactctttttattaaaaaaagaatcatagtaccaagaatagaaatcgagaaaacgatgttgtctccctcagcctaacccgatacaacctccaaagcactttctaacttagttcacaaaagtaaacacagaggaaaatgaaatagagaaaacagtttctatatcagaaaacagaaatcctaacaaaaaggtaaatatcctactttaatgaatagcatcattacctcttccaaggatcatcaaacacattctccagatctgaacagtctggaacatcttcatcaggtacccaaggtttcagctctctttccaaatcaacattataaaactgtgatatcagagagtctgtcaacagctctaaaggtttctcgcactgaacagaatctgagacgctatcgctggatagaggaaggtcctaacaaatagaccaatgacgaaagaataataatgtcaaaacaccaagtagtcttatgttgttgcattcatgtgaacataaaa

SEQ ID NO: 14118 - DNA, 605 bp, Arabidopsis thaliana landsberg
  unsure (1)..(605): unsure at all n locations
catgtttaactgctggaatttctaaaagagttcaacgttcaaatgagaagttgtaacgttcaatttattagtttcaacgttaattacatgaaaggtttgttgtaacgttcaatgaagtcacagaagaaggaagcaaaaagcttctcaaaaaacttctattgcatttcatttttttatttatatgtaaaatataatttaatttcctagttgaaaattgataaatctattttttacaagtaatggttaagtggtgatgttctaaatctatgtggcatgaggtgtaaaattgtacattatttttttatataagcaaaaaaggttctttcatgtgcaatactcatcatcatggttctttatagaaattaatatttttttaatttatatttagtaaaacaatttttttattgtaaaccatttgcttctactataaatacccctcctcttgatcaaatctcttcactcatcaaaacatcacatacactatttgtctcctctccttattgactatatagttttcctctttagctttttcatttcgaaatggcccaccgtgagggattctcttaattatgnntgtcgtcacattataaatctatatctataat

SEQ ID NO: 14119 - DNA, 745 bp, Arabidopsis thaliana landsberg
catgaatatccccatatccacaatccttttcatccggagaaggaaacttatttgattcatctcctcagaacccatcttctcaaagtcaccattaaaagccacaatgagggatttcagattcgggcaacactcaagaaaattcggcaaccattttaattcggatacacggagagtaacgtgcaagcgggacgtgttatcaaattgaggtagttgtgctaaattggaatagtgatgaatgacctgaaaccaaacagaggacttgtgggttagaaactattcattacaacaaaaatgtgcatgttcaaaacatattatatatataccttgaaagtgttctcagatattttcaaacccatgaccttcgatattgcgggcagaaaactacggatgcgacttctcctcgatgaaacgcttggttcgccaaaatcttcagaaccaaagtctagatgtatatctaacttggcattggactccagatcatttaatatataggtttctgatacacgatcattgattctcaaatagcatattagaggagcatcaataacaacacccggaacagaatcaaacaccatagtagaacttcgtagtaaacggagtctcttaagcgaacgagatttcactcgataaactcttccatcattccataatacatcaatctttaagtcttctaaagcagggcaagaagagacaagtctctcgaaagtggcatcattgggaaaccaaacatagtttagatgcatga

SEQ ID NO: 14120 - DNA, 779 bp, Arabidopsis thaliana landsberg
ataatattatatagatataacagaaactcatgtcttggtttaggccgacctcaggagtcaacgtagtttggtgttccacacgatgtatgcaagagtccatcatcctgatatccccaagcatataaaccatgtttaagaatagatatatgtatataatttttgacaacaaaatccgtaagttcttaggaaaaaatgaaaccacttcttggaacagtaaaatacttatggaaacagatggtcattaccctgacttgttgggacaaagcacttaatccaaaatctgagatcttgaggtttccataggagtccaatagtaaattttcaggctgcaaaatcacattacaatagtcaattactggcttactgcacataatatatgcataggtaacttctctatcaatataccatgtttcagtcctaccatctataaaaacaatgtatgtaccttgaggtctctatggtagacccctctgctatgacagtagtccacagcatgtataagctgttggaaatatctccgcgcctcatcttctttcatccgcccatcatttaccttcattcataagttatcactatcagatttcacaactataatgtgacatcacagaatcacaaccatttataattgtggtaactaacttacaatcttatcaaagagttctcctcctgtaacatactccaagatgataaatattttcgtcttacttgccatcacctgcaacaacaacaaccagtacaatttcgaagtaagtaatttccaagtacatagtacataatca

SEQ ID NO: 14121 - DNA, 712 bp, Arabidopsis thaliana landsberg
cctttccgttctctctgttttttctttttggttctatctccaagacacagattactacttatattagctaatgtttttgacttgggattttgtcattgggccattcaccactaggctcaatattagtggaaaggtattgatataaaatttcgctcggttcatacaaaaggttaccctttgtactcttcacatttacatatttttttggttttaatgttaacacattatatttgtttaaaactttaaatatgcattagtatactccctcggtttatacacaaaatagctttttgaataattttgaaacgacatccgatggaccattcttgtgtttaatatgtctaggttgtttgttttcgtttgtatttatcagtataattgattcaatgtttccaaaataggttagtatcttaaacgaaaagaaagctctctatgtttgttgtttgcatttacaatttacaaaaactttcaaaaataaaaatttgcattgaatactttttgaataaatcgaggcatttatgcaaatggcagctgaaaaattagttgtgggatctctgtttcggtgtttccgcttcgggttccgttggatagagcaattcagtctgttagaacttgatatataaggaatcattcactttataataaatttctatattcattccatttcttctacctacagtttaaaacaaaaacgggaattaaagtcttttcc

SEQ ID NO: 14122 - DNA, 762 bp, Arabidopsis thaliana landsberg
aacccctcatcattggattgatagacacatgcgaaaccaactttcggcaatctaaataagtggagatcagagttactacaagggactccaagcttggtttgaatcaagagtgataagctaaggaagatttttttttttttttaagattttttaagataaaccgtaaacgttatactagttgtactatgttacttataaatctaatttaatattacaataaataaaataaagaaaaatactaaatcttattaaattctataacatccagatcataatacttgaaatgaaaccagttgaaactgcattaacatatttaaaatcatcaccaccatcaaaatttgtatataaaagtgaaaatgtataaatttagcctttgatgtcattgatgaagttatcaccaccatcaacttcattgatgatttttttaccaaaaaaaaaaaaaaatcattgatgatgttttgtttcattagtattggaagaaagtaaaaaagtttgaagcgctttaagatattgtacttatatttacaagtgactttatcatctttggtaaaaaaactaccgatttcgattagatgaatataatacatgtacaagtaaaacgaccgcctgaagtcaagggtcttgtagcatgggtaaatgggtgggaaatgttccgtgaattagtcatatagatgtttaaggatatccgattgagacaatctaagttaccttggcaactacgtctctaaagttaggctctatattgaacatatatgtaattat

SEQ ID NO: 14123 - DNA, 674 bp, Arabidopsis thaliana landsberg
tagactcttgggctatccgtatcctcttcaaagatccttgtgttagactagccggagaaatctgcaaagttttatcacaactctccgaaagcattcaaaaccgacgtcattgctcgttggagattctctccgacagcctcgcagcggcattaaaagatctcaactccacaatcaagtcacaacctaagctcttcttaggctctaaccttcatagtaacatcactaacaagcacctaaacggccacgtttcatattacaacgaaactaactccaatggcaccgtttcatatcacaacgataataacacaaacggctgcgtttcgggagaaactatagaagagaacgacaccgtatcaccacttccgttaaacagcgttgtttcactctctagcttgcgatcggtgaagaaatcggcgcctaccggagagaagaggagatgaggaaacaattgagcaaaatcgcggttatgaaaagtttggagttttcggaagcgttaccatttgctgcgtttgcgtcgcttcttgtggaaatggttgcgaggcttgatacctgtgtattgaatgaagcgttgaaggaaattgggaactaattcgacctgcctttacaggcagtaacgcataaagacctgtgtgagggtgcgaaattaaaaatccggttaatataggtggttgtgt

SEQ ID NO: 14124 - DNA, 487 bp, Arabidopsis thaliana landsberg
  unsure (1)..(487): unsure at all n locations
gattcccttgaaatgctgtttttcctcctcattttctagtgttcaaaacgacatcgttttgatataaaagaaattctaacgaaaagttaactctctgattgtttggttgatggaaacttaacgacatgtcctaaatggtcaagttaaactaaactttaagatttaaatagttttgaaagttcattttgtcgtcctaaatttaaaaatttgcgctttttgatattttcccgttgtaaagtttccatttatttaatgtaggagggttttatacgtgagaccttggcttaaatatagttttgtttttgattaataaaagagaaatttatttttgaaccgcanagtttttgttttcttaaaagtacgaattttaattaggaaaaaaattttgtttggacacacataaaanaaaaaacagttttggttcggttgtgggtttgttttcagattttataatagtgaaaccacacaattaagaaattcattttac

SEQ ID NO: 14125 - DNA, 840 bp, Arabidopsis thaliana landsberg
aatatttgatttcatttatccatcttgttcgtttttaaattcatgtgatatctccaacaattacagttcacatgtatattcacagtaaataaagagaaagcaagaagtttatttttcttggaaaatagttttttttatcacgagatgttccaagggatattaggtaatcaaacgattttcccccttttttcctcttttgattcataaataatataattatgtagttaaagattgtgaaaaagaataatagaagaggcttatcgcatgtttgcttcacgcaaacaactaaatgtgagagaaaaagagaaaatagagagagatcgttttttttttgttagctttgtcgtcgcttggctttaaagactttcttctctatactctcctcttaccaaaccctaattctcctctcttgattcccgtttctcaaatcttcctctcatcttcaaacaataccaaacataatctccatatttttactcaacaagtttaaaaccctaacgcaagagtggggagatagagtaacaactcgttaattggggggtggccggtcatgagcggtggtgggaacacaatcactgccgtgggaggcggaggtggtggttgtggtggaggaggcagcagtgggggaggaggaagtagtggcggtggtggtggtgggccatgtggtgcttgtaagtttctaaggaggaagtgtgtgccgggatgtatatttgcaccgtactttgactccgagcaaggatcggcttattttgcggcggtgcataaagtgttcggagccagtaacgtctcgaagcttctattacacataccggttcatcgaaggtccgatgctgtcgtaac

SEQ ID NO: 14126 - DNA, 799 bp, Arabidopsis thaliana landsberg
aagccagtaatcagaaaattggtttattcagtttagaattgttaaacgatttttataataaaaatcaatctttaaatcatcttaaagcatttcagttttttcttaattataatcaatattcaaaaaatcgctaggcgcttgttaggcgttcaatagagatctagcgcctaggcggattagtcggacctaaacggaatctaggcgttagtaaattatttatttatttagtagttctaaatatatattataatgtagtatagtgattaaacaagagtcgatcgtaacgcaaaaccatgtaatattatatgagaaaaataaaactgaaaacaattaattaattaaacaagtgcagaaaaaattgaattcgactaaatgaaagcatatgatcgatctaaaggatattattgaggtagtgcactaaatgattattgaaaaagcaaggaatgttttttaaagtagcttctgtttgtcgaagaagttagatgaaagaagaagaaaaatttagaaattgtttaaattttaaataatattgcacacgtcttagtctgattctttcttggtttttttctaactttactaaaccaaacgacgcaatttagatatagaaaaaaaaactgtaaaccgaatgtgtaaccgacattttgaatgatctggatgatttaaaccgattttgagcgcctgaaccggagaaatgatttctttcaccgactatatgaaaatcgcggcgcttagttgtttcgagcgtttagtcgaacgcctatgtaacgtttaggccgatattgcgaacatcgattataat

SEQ ID NO: 14127 - DNA, 856 bp, Arabidopsis thaliana landsberg
aaccgcgcgtgtccatgtttattgatttttccttctgttctttccacctatgtgtgtgtgtctctgtgatatttataaaataaagacaataaatttttttagaaaatatctggatgttccaggtttgttattcgattcagagcaaaacgataagtgtttaaatggatttagatttacagttaatatccagatagagagaaagaaggataaggagagaagaaaacgattactttcttctattcttgttcattacaaccttataatctcaacatttgttttttttcttttgttctctctttcttacatatttcttttggatttcgttgtcttttttttttctctcttttcttctcctctctctcgctcgatttcaatttgggcgagaaaggagcggtcttttgtctttcctgggtttatcagctagatccctcttgcctaaagtttgtaactttcttagggttttcttctgatttcctctctctcggggttaattctgctcaaaaatgtaagcccttctccttttatttcgtttgttagattttgttttgcttgatctgattctgttatgtaattttgggttcagggtttgattcagaggcaaatctggttatgtttagacaataaagttcgggactttttgacatactcacagctggtttttagctttggttcttatagagagtaatagtagtgaagggtttgtgccaatagttagaaatgatcaaacagatatttgggaaattacctagaaagccttccaaatcattgcagaatgactccaatggtgaaggaggtgttaataattcttattatgcttcgaattcgagtactactagtatctctaaacctggttcaa

SEQ ID NO: 14128 - DNA, 940 bp, Arabidopsis thaliana landsberg
gttttcaattgtatcacaggggataacaagtttgaatagtcttgaagatgagccgagtatggaggaaactatggtgataggatcattcgtgagtgagattgaggaagagttggagcttattaaggcgcctatcttcaattttaatatggatgaatatgtatgtgttggagcttgcacttgatgaaattcggtagaaggatagttttacaataaataatttttccatgaatataaatacctgatatattgaatagttttacaataagaatttattgcaaaaaaatcttctattacaactttactctttgcttttaataaatacaaatttacgcaatcatacttttttgcaactttttgttatcatcaattctgtgaaatattaacatataatatgttaaattgaaacgctcatgataaaaaaatttaattctattttcaaattttataaaatttaatatatgtgactatctaaatgttaatatatgtatacaatttttattgcgtatattttatactttatataattgatctgaatttgttcgaaacgaaactaaaatttgtaaaaatatatgaagtaaaacaaatttatgcacaaaacttctatattagttttaagggaacaggccccgactattgtcgaggtaaagtctttattaaacacatacttttgctacagaaggtacggacgcaacacattaccaacatatacggacgtaacacattaccaacataacaaaaagcccctaaactcaaacaacatcatcatatcatatttaatggtctaagacgttaagaccggtcttgtccactccacgcttacgcatttaccacagctcctcctacacaaacaaaaacaccaaaaacaatttaagttgacaccaagttcgccacttgcctataacgtcatatctaaatatatcaatctgtgttggtttactta

SEQ ID NO: 14129 - DNA, 708 bp, Arabidopsis thaliana landsberg
aaataaatcgttagggtttagattcagatctgatccgcattctttgcaagtgtagatcgttgaagccattgtttgcttctcaattctgaattttgatttcttcttcacgtctctcgtctttttcttctttctctgtgaggaaattttctcagagagacgcgtttctttggtcagcgccgtcggaactgactctgaatctctgccgttgttagattgggcttatgggccaattttgtaatgggctttgtgtaatgatgttctttttttttttttaacaactaaaactttattatactgtataaggttgatacaaataaggaagtaaacacggtggaggaacattaaataaatgatacaaagaagtaaaagacaaagcataacgaaccatcttatcggctgcactatttctttcacgattgacatggagtagggaggatatggacagcttacccatccaatgacgtatatcggaaaggagagctcctatttctgaatgatcttcaccattattaataacagagattaagtggtggttgtctccttcaaagcagacacatcttattccctgagcccaagtaacttgaagcacatgtagcaaaccgctagcttccgcctgtaatggtgaatgagtcatagggagttatgcacaacccgtaagtataacccttccctcactgtcccttatcaaccacccagtatttgtaaagg

SEQ ID NO: 14130 - DNA, 386 bp, Arabidopsis thaliana landsberg
  unsure (1)..(386): unsure at all n locations
cagacttcaagtttattaggccaagcccacgagcttcttactgatctcccacactttacgagccttctcaacgtcacttgcttcttctgataactggttctcaaaagaagccgaagcattgttccagctccaataaacccctgatttcnnnnnnnnnnnnnnnnnnnnnnnnnnnnnnaacaaaactctatggcttgagtacacagcaagaaaagtctttccttgattaacaagctacaaaaacaacactatcttctatattacctgagcaagtcttttgcctgactctgtttcggagacatatcctttagtgatgtacttctgaaagggagggaagagggcaccgaagagaggaatgtgctctcggaataaacctgtggaggcga

SEQ ID NO: 14131 - DNA, 718 bp, Arabidopsis thaliana landsberg
gtattatgcacatgcctaccaaaatacccaaaacaattaataaaaattcattagatagaaattgggataaaatgtaggaagattgacaaaaatagtactaaaaggtttttgtttccaaaattaacccaacatttcaaaaacaaaaacaaaaacatgaagtggatatttataagttttgatttcatgaaaatgacttgtatacttttctgaacaatctacatatatatttttgcagctattttgtgaaataaatcctagagttggaactcacttacaagttacaaggaatgccattagcattaattattatcaataaattaatattcctaattactagcatttccttatctaatatattttcataaattctaattacttcaaaaaagagaaagtttagcacattattaatattatactttattaaaagataaatattatagttatttataatttattaaacatttagaatatttaacggaaaacgtttagaatatttataatatggaaaatcttacaaaattaaataattatttgaaagaactttgaattgatttgaattataaattttttaattaagtgtattattaaaaaaaaatgttttaatttcacccgaacgagataagaatggtatgaccggggtttatacatatttatattcatataaaaacttttaataaaaaactaaaataaaccattttgaaaagaaaaaactttttaa

SEQ ID NO: 14132 - DNA, 757 bp, Arabidopsis thaliana landsberg
taacatcatgtcctgttatactgaatttaaataaaaataattaactaaaattaaatcagaaaaaccaaaaatggaaagaaaatccttatatatatttaaagtaccttaacgtcaaggttgacatcttctcctctcgtttttttttaatgtaattcttttaatatgagcaaatttgaaagaatgacaataaaaggatttgtcattttaataacacaattttacacgtgatgattgggtttattttgggcaaatccacaaaatccttaaacaaatggcgcaaagaaaaattgtatatatagtataagagtatctaaaatcagatgctcgatcgaaatatataaaaaaaagttttatacaaacaacaaaaatcgcagttgaagcaataaactcaaagagtttcgacaagatattttattttaccaaaaagaaagaaatcgacttaaaaatagtataaacgagacgaagagataaacgtaactcgtttaccttgataatggcaaagtaagcagtttaaacgaagagacgttaaatgatggatttgcaggtcactatgattggggtaatcgagatcccgaggatctatcatctcccacgatcttaaccgttcattttctggcatgaaccattagatctcaaagggataataattacaaatcccttatgtaaatcactatcttggcttcataggaccctgggtattagtgcacaaggttttgcggaatggcatttgattcacctgagttaaaacttgctttca

SEQ ID NO: 14133 - DNA, 736 bp, Arabidopsis thaliana landsberg
ataattagtgccactgatttcaattttgaaattcgaatcctcctcctttggaattcagaaaccctagagttcttcagcgagcgaactctgtctgcgatttcttgttgattctaaatggatctctcgcgagaagtcgatgactttatcaaagagacaatcgatcactctttagggcttccgatatccatggacgttctccagaaaaagctctacacggcggaagaatctcagcgtcgtctccgtgaacagtatctatctctggtttcgagattgaaagagaaagaaaaagtaatcgatctcgttagatccgaagcgagtatgaatgcccagtcgctgaagaaattcgtcgaagagaatcagaaattgggaagcgagcgcgaggatttggtgaatcagtgtaagaagtgggaaaaagaatgctttctttatcatcaagatcgtgaatcactcatggagttcgggaacgaaactgacgaaagggctagagaagcagaatctagggttcgtgaattggaggaagaagttagaaaaatgtctgatgaaatcaagagccggatcgaatctgaagaagattgtttggttgattcaatattggcatcgttcgttagtaaagatgagagtatatcattggggcgtatcttcttggaggctaatagtgaagaagacaaatgttgtgaaactttgttgaggaaatgggatcagttaaagccaacgacgcaaaagtttgtgtcttgag

SEQ ID NO: 14134 - DNA, 925 bp, Arabidopsis thaliana landsberg
agcggcgaacacaacaaaagtaaacgacatatagagaaagaatctgactgacaaacagctatacaaaaatacaaacgtattttcgatggaaaagaaaaaaaaaaaaagctttgggaatttgttgctttttatccatgttttgaaaatgtatgttctagttccatggatagcaaatagattgacacggattgcattaggtctctttgtaaaaaaaacattaaattatttgcataccaagtaagataaattgttgacaagtaaaataaattgttatcagtattattattactttggacttcggttttggagtcaacactttttaatattattattttggtctacaataaaagatcagaaagaaaagaaacaaaaaacgctagaggagaaaaccaaagaacacaaaccctaatccgcctcctcacggccgtgaatctcctccgtctttcgttggcttagaatgacgacaatttctgatcttcctgaggatgtggtagaggagatactccctagggttccattgacatctctgagcgcagtgcgatccatttgcaaaacgtggaatactttgtccaagaatcgtgttctttgtaaagcggcagtaaagaaacagtttttgggattcattatgatggattatagggtttgctccatgaaattccatcttcgaaacgacgagggaggagacttggttgatgatctatctataaagcaagtaggtatacttgatcaaatcgagatatctgaagtcttacattgggacggcttactccttttcgtcactaaggacaactcaagtcttgtggtatggaaatcctattttgggcaaacgaggttgatacaacccaataacaaatttccactgttcagaccgctatgctatcggatatgacaataacccggaaccttaaaaatcttgaggaaattt

SEQ ID NO: 14135 - DNA, 363 bp, Arabidopsis thaliana landsberg
catggtcctctaagaaacacccaactgtctctcgcagttcaacggaagcagaatatctctccctttcagaaacaactcaagagatgacttggatttgtcatgttcttcgagaattaggcattcctcttcctgttacgcctgagctctatggtgataacctatcttcagtctacttaacagcgaatcctgccttccatgctcgaagtaagcactttgagtttgattaccattatattcgagagagagttgctctaggctctttggttgtcaaacacattcccggtcatcaacagattgctgacatcttcaccaagtccttgccatatgaagctttttgcagtatgcggttcaaatttggtgtgg

SEQ ID NO: 14136 - DNA, 768 bp, Arabidopsis thaliana landsberg
agttgacagctagagaactggaaacgttcatgcgttgcttacccagttttggtcaaatgtctcgattcttgtgtcacgtttctatagtttatttattattgtaaagatgtctatgcattattggtcgcttagacgctcctcatctgtacttgatgagttctggttttaagctacatgtttcatctttgcagcgtgctgtacctaatgagcttgaaggatcgtttgatatcttcatgaaatttctgagcaattctttcggtatgccagttgaactgcagagggctctcttgtctttgctaagtgagtacatcagttggacgccaaagtctcaaagtgacagaggtcctacaagaattccaccacttatgcacaagcatttgcgtgtgttcattaatttgttacttttttcaccacacaacggggtgaaggatctagcgtacaatttagcagtggcagctatgaacagtactggtgcatttgaaaacaacccaagtgaaattggtgcatggttcttgtttctaccatgttttgaaaagattaaattacctcttgagcttcaggaggctgtacagagcatgtcatcagttgtcgtgtcctttttatgtgatgcagtttcgactgttggaaataatttattcaagcactgggacattgtcagaagtagcttgtcccatttaaaaggtataggtatttttgtgccctcgagatcaatggtttggtataaaattgatgaaaacttggtggttatcaaacacgattcaattaatc

SEQ ID NO: 14137 - DNA, 762 bp, Arabidopsis thaliana landsberg
cataatggcaattcttgaacatctcttcaggtccgatcattcttcttcttacgatgttgatgactcttctcagtttcagaaacttgctgaaaaagcttctatggtaaacaccactattattataattttttttattctttgtgccttattctttcccaattctcattttgttatgatagcttagtagcctacaattgatatgatattacttgaatttacttacgcctttttctgaaaaaaatagcatactaaatttgggacttttcttttacaaaactacaaccctttgaagtttcaccaaaaggtaaattagcaaaaatgaagtttataaatgtctacagataacccagtctgttaaaaaaaacagctgtagtaaaacttcaaaatctattactaacaaaaaataaaccttgaaagtttcttatttattcactaaaactaatttcccaaacatattgttaggtcttattttaatacttttcgaaacatttgagtttttgttgttaactttgcttttttgacgtaaaccaccactttataaatcatttgacataacctaagcacgtgagatatggcaggttccggtgactacgtcagatgtgtcagtggtgatgccgggagacaaattaccgtcatacgtagctcttccggcaccatttccttgccggagagaaggcattcgctggcattcccacctctaataaagtattgtctctcttagcttagtcgttgtatcataattacttatcaattgttctgaca

SEQ ID NO: 14138 - DNA, 694 bp, Arabidopsis thaliana landsberg
tgttgttatcagttttggcaaccaaaaagtcgtttttacccttatcatcagctgaagaaaaaataataatgttctttttttttcaagtagacgccaagaaatttaagctctcttttacttaatctcacatgaaaatctaaagagtggaaccaaaacccattttttgataatcatgtcaattggagcccttgggtttagtagatatcatgcccttagggtttagtttcttttattccaaagaaattaattgaatctattgaactcatcaaagatggtttgaacttttagttgaaacgtaaaactccttatattttttttttttgataactgaggtgattctaaagactttcgaggtccaaaaattaatcttggggtctagagaaaccatgttagatattgaacccgataaccaatgctgctcgaaacactagacctaggcaacttggttaaactccttacattttaggctacaaatggtgtgtttttaacctttgaagaaattataaatataaaaataaattcacacatttcccataaattaaaatgaatacattaaaactaaatgcaaaatattaatgctaaattgctaaagaatagtacattaaaactagatgaaaaatattagtgctaaattgctacaaaaatatctattgagattctatttgattttataccattaatggttttcaaggtt

SEQ ID NO: 14139 - DNA, 911 bp, Arabidopsis thaliana landsberg
acgtttctaaggtttgattctgattcttttggtgctcattgagtaatgtttttgtgtagtttatagtctcattgcgttttgctttgtgcagacggtttacaagggttgcacaagaagatttcgaggtaagctcttattgaattgtggtatttgcaatgtatagagtatcaattatgttaagactttcttgtctttgtttcagatgtcacatttacagatggagtttctttgtagctatctttcggagttgagcatgttagactatcaatctgtgaagtttctttcgtctactgtggctgcttcagcggtgtttctcgctaggttcatcatccgtccaaaacaacatccctgggtaaagcattttgcaaagtggttctcgttctaattctgtgttctctactttatataagaagctaaagctctggtgttgaatgtaacagaatgtgatgttggaagaatacacacgatacaaagcgggtgatttgaaagaatgtgtggctatgatacatgacttgcatctgagtagccaatggggagctctataagctatcagagaccaacacaggcaccataaggtaaccctaaatactattaaatgataccttgaagaacactgttcttgagattcacatgccattctttctatttggctcaatacaggacaagtgcgtagcgacaatgcctgtatcaccacagctgactcttacggtttttgcagacgtcaacatttatagacaacttttggtcatcgtgctcaatagtataaaaccaggaagcggatacactggtttctttccttggtgaactgcttgtacaatgcttatgactactagcgagatccacgatcttagtatatgttcacagattatggatactcaatgaattttttatgtgacggttatagttgaagc

SEQ ID NO: 14140 - DNA, 724 bp, Arabidopsis thaliana landsberg
acaatcgataaatataatgataataatatttttgaagattctatgtatacatatagtaccatatgtattatacaatgatataaaaattcaaatgaaatataattttagtaatgcttcttttgcttaaattcatattagcttttgtttaaatttaattctaatatgtttactgtatcaagcattttggtgttgtttactagacatgagaattattttgtacatgtaaatggttctagaaagatattttatttagtaaaaaaatcttatattttcattgaaaattaaaaaagttatgaaattaagaaactctctcgataaattaattaatgataacattattaatctatcgataaattaataacattttaaattaatagaattttgcagtcctactactattaatttataaaagttttactgtatatgcaccaaaaataatagacatacagtattggtatagccaaaaaaaaaatggatacataatcttacgtgaatggctagataaaaacgtctaatttcaatagaaaacactgattaataaccctatttacagaagagaaagtttaaaaatgtatttaaagtgtgaaataaagagattctgaataagaatacgctataattaaagtattcttagactttaaaacctagtagaaaaaagaaaacagatgcttttaaaccgctttgtacagagtcattcagcaaataccaatgtcttattcagaga

SEQ ID NO: 14141 - DNA, 992 bp, Arabidopsis thaliana landsberg
ttgaatatcaacccgttgcactatgtagacgactgttacactgttgaacggtatcacaaaacgtactcggctaaattttctcctgttcctgagttatcagcttggccggaagcttatggagttccaacattgattcctcctgtcattgagccgcctccacctaaagtatcaggtaagttccggagatttatattgtgttattgcagtctcttactttttctgacaccatgtttgtgttatcttgtaaaaggaaaagggaaagagaaagataccgaggatgatcatcttgaagaagatgaagatggtgacgatgatgaggaggaagaagatgatgatgttgatgatgacgaggaagacgatgatgatgttgatgatgacgaggacgatgagtggtaatgatgcttattgcgtaatgagctttaagataagatcagtaggactcattcatgcccactttaaacagccttttgaagttttggtttgcttttctggtttggtttccgcatagttttaatatccctttctttggatttttgtaaacttgtgaaattttcaatgaaggtttaggaatcgccatgtacatatcagataatcttttctaagtacatttacgttttgctctaaggtcaattacgaattaaaaattggttctaagttcgaagttcaaaataataataaaaagttctaacttctaaaccaacacacaaaaccaaagaaaaaggtaaaaataagatagttggtcctaaaagaaaaattggaggcaacccagagagtaaatggaacaccatctcagattcgaaagccattataacgttcacatttcactttacagccaaaataagattttataactcactttcaagtgctacaatacaacaacacacaagtcgaatttgactctgctcattccattatttcttgactataccgggggatttgggtatactttgggtttcggtttcacttcaatttcattaacacttctaacaaag

SEQ ID NO: 14142 - DNA, 537 bp, Arabidopsis thaliana landsberg
tctgataggttcttgaatgctattgtagatcttctgtacagggattaccaaggagaccagaaattcagtgtcaccacttactcttcaactggtgttgtaagtttttattattgtttttatttctgtcaattctctattttgttggtgcgatgggtttattgttagtgataaaattgagatttgtctagttttctgttatgtcaaatttggttgtacagtttgttttcatgtgtactctcacttgactctttcttgtgtcgaatggtgataaatttgtaggcgatcactacaacgggaacaaacaaaggaagcttgtttttgggtgatgttgctacccaagtgaagaacaagaacttcactgctgatgtcaaagtttccactgattcttctgtaagtagactttttagctttagctgtttctagtagatatatgatgttgccgattgctgctggagtattcaattgatttttttttgtgtgtgaataatttcagcttttgaccactcttacctttgatgagcctgcccctggactgaa

SEQ ID NO: 14143 - DNA, 558 bp, Arabidopsis thaliana landsberg
ggggcggacttgtaaaacttttcaatgggtggaaaatgttactaagaagatttgaacctattacctcatacatttaaatggtttattactaaacaatctgccactgtgcttaatctgttttggtatcaaaacgttaactacttatatattactggggcaagtgcccccacaattcatcatgtgggtccgccatgagattccgggacaacgccttctacctgatccaaatgggtgtacatgtagccttgtcctttaaactccacaagcaaatctaaatgcctctctggcctaaattcttttgcatctgctcccaaaattgtcgtgtctcttagattgaccaagcattagttatcagtcatcacctgaattcccacgtaagttctttaaaatttcactaaatatgtaattatttaaaaaaaaacaaatcaaggtagatatgattttaccaatgttcctgcagcaatatcatatcctttaaattttatatcttaatatagtcctcagaaaattattggaaatggaagatgcaaacgtaccacttcgttttttaataactaa

SEQ ID NO: 14144 - DNA, 759 bp, Arabidopsis thaliana landsberg
aaggcaattgtgacggcttctcttataaaccacaggcttgataatggcccttgttgtgttttgtgtaaatgtcttatgcaaaattatgctcaataaacttttgtgggattggattttaattgtggttcatatctttgtcacgagagagaaattcacatgcaaagcgcctaaactatatttgtggcaagctcaacattcttgtaagtaaatcataatttaaagaaatttataagcatacaatgggttaagctggctttaagtatttgaacaagaaacctaacaagaagatgtttctgataacagagagtaagccaaaagcagatcacaaattgctttaaaatccctatgaaataattggagaaatgtcacaaaccatctttatatatataactcaaaggtgaatgcaaaagcttgaaagttatttcctttattctctgttttactaaaggtatcattacaaagtcaagatccatcatctcttccatcagtatctgtcacaccaaaagtatgagagaaacattttcctttttgtttgccattataataggcttcaaagagggaaggaagcaagaaaagaatgagataaagagaaaagaatgagtatagggagaaagtattatagtagtagagagtcgtagaagaattatcttctaaggtcattagtgatgaagagttcatagttagtttactttgttcaaggtggataagcaatagggtttaggcctttgttattatcagacttctactttttgaagacac

SEQ ID NO: 14145 - DNA, 653 bp, Arabidopsis thaliana landsberg
ctttagagttaaatagaattgaagacaaattctcttttattgccacaaattgaaacctgtcaacacaataaataaaaaagttgccaatagagataaccggatataaccggtataaaatgagacgcctagtgatctgagaaaacaaggcaccgtctcgagcggcacaaacgccaaaatccgataacagcgagaaaaatcgcgatccggctttttcagccactctcttaacaacacaactcagaatcgctctcgccgctgtttttctggtaaacagttcacacctttgatttctccatttcatctagacaaattgcgaatctcaaaatcgtttttttcttcgttctttcaatgttagggccaaatagtactcgatctagtgtacagagcttaactctaaattgcgttaattttcatcacatgaatgataaatgtactcgatctaatagattttcagaatttgccttgcaaaaatctttgctttattttatttttttctgggtctctcgtcttttgttgtctcctggttatgaatttgttagaatctatgcatttggaattgataagtcctgatatacatccaatccatcgcagttgttggatgaccgatgtctgttgagtccatacaacttcccgattatgctgccgttgttgac

SEQ ID NO: 14146 - DNA, 1194 bp, Arabidopsis thaliana landsberg
tttcacttttattgttttccttcttgtatttatttcacttcaatatataagcatgtatttttattaaaaacatgaaaatactgtagaaattatgttttataaattatcacattaatgactaattttgagaaaccaaactttatatattaagatgttagtaacataacattataaccatcaatctcaattcacaagggagataaattgatgaagcagcagaataacatcatttctgtttgaccacgcttgtacaaacatgtcaatgacaatgtgttggtatttctaatgttgactatgtatatgggctgtaattgaatagttaaaagcccaacaggccatttgaaacctaactgttatactatcacgcgtatagatgacgaaatccaattataaaactacgaggcataaggcttttgcatcattttgagtccgccgatattcgacccaatacacatcggtccggtttagtagttggtccatcgatctataccgaacatatcgtgatcaatggctagaaaaaaccatcatctcaacggggcatattagagatattgttccatattagaagttgagtaggatcttaagtgatattcatattagagatattgatctatgaatctttccactcgttatctattagttttgagttggaaacacacagacttgagttgtatataaaggatatggacctttccacttattgccaattaatattgagttagaaaccaataaaacttaacatagtatcagagtccaaaaatacatgatccactaattcggtccggaaagtagtctggtcatctttactaagtaatggttttaaaaaaggttaaattctgtggagataactaaaaaaaattatttcgaaagagcgtataaaaaaaaattcacattaaaatataaaataaacttgactagtatataaaaaatataaatctctttattcattgtcagttaatttcgaattaaaaactattaaacttaacattttttacattttcgtttatatatcttcttttgttctcagtattcattatatctaattcattcttttttttttatctttttgctcgatctatttttataatcttataagttttttcttacactaacgctttctttaattgaaaaataagatgtatacagtagacattaaaaaaaagactcattcattaatcacatatggcatagtgg

SEQ ID NO: 14147 - DNA, 876 bp, Arabidopsis thaliana landsberg
gaacacgtatgggtaaaagggacatgtgtatgtgacacgtgtgtaacatctgctgaaggtgaaaaaagacgcaaccgactcattcctagcgtttccacggggctgaaactccgatcaaatccaccgaactctgctaatcaaatcatcgtttgccatccaaggattttaccagaattcagttaaaactccaatcaccaattctctgtctttgctaaattctctgagtgaaaagaaacaggaatccgagtcatcagatctatgaactgctggaacatacgacatggcgagaggtcagatcagtcgcaaaacacgctcttctgaactgttctacgccggccatcaagtcccactcatcacaattcacaatcttaaagagaaaccttcatcattagccgattacggtccattaggggtatgaaggatttattctccccttgaccagaattgagaaactgatgattcttgagattctgaattaagcactcagcttctaattcttcttctccaaaagaaatctaagatctgcaaaaggagagaaaaacaaaacaaaaaactagccatagtggctaagatagactcgcacttggacgagaatagacaaaaccagatttcaccggaaacaaaatccgacaaaacatcgtcggaaagaaaggaaaacacctttctctctctcaaagattgttgtgagagaagagagagaaaataattgatttgtttctaatgattttttttgtgaagattaattaataattagttatatgtttatttttagaaaagcagattatctccaacaaatatgaaaattgattgggtataatatgcagatgtgcatatttatctaactcagcactagtattttttgattctatctaatgg

SEQ ID NO: 14148 - DNA, 745 bp, Arabidopsis thaliana landsberg
tacaaagtccccaaaactatagacgataatagcaaattcactaaagacgataatgaaaaattctttatcatatatatttttgtttatatcaattattgtaaaatatttttgagcttagtattcatttatatatatatatatatatataatagtgtagaaaaactataatggtttttgagaaatatcatatacaaccaccactacacgtacagatttggatcatcaaacaatgcaaaaaaatagaatttcgtttggataggtaagaacaagtttgtctctcgagccaaatgagatggataaacttctaggcttcccaaaaattcatactcgaggagatatgaacatatttgatcgctataactctctatgtaactcattttaagtatgtatttatataacttatatttagctgctaaaaagaaagagaaagtgagtactgtacgtcatgaccaatgacaagctcatgtatctaccaaaatagatgattgggtttgatgtacctaaaaacctatagtacaactattaacaaatagaccctagattgtattggagatgaaaacagataacagtgaaagttatcaatctccaaatcatcatctgtattccaaccaaatcatcaccagcagatccttgtacctatataatgtacaaatgaaaacagtagagagtccatcaaatagtgtggtttaaatagttagttggaatgtacttttgttgtagtaatctaatgagatcaatatacgtg

SEQ ID NO: 14149 - DNA, 1154 bp, Arabidopsis thaliana landsberg
actacaaaccaattgattaactagggattatctgctaacaagaaagaattataacaagctaatgacagttcatcgcaagaatgatgtaaaatttcactgtactagtgcatgatgtaaaatgatagtatgatatttctgttgggtaatgggtctatcagttagaaagcagaaaccaaatgttttggagatcagaattgagagtgtacgttcattttgagacaaactccaaacttggaaagccaaactaagtcgttgataataatattgatctcgtaataaattttgcccaaatttatgtttcctaatttcacatgtacgtattactattaggtagtaattcttcttattacggaattcttcttcttatattttcattaaatccgagagtgtgcaacaacaatacatatatactcacgggccaaacatatgaattaatttgttattcatttttttattattaaaagatgaattaattatcttatcttataatactaaatcgaggaaagttctaaatttataatagactgataactaaataaaagttatgttgagaaaaaaaaaacaaatcatcgatattttattcaataggagaaatgaacaaattatttgcgatacaacaaaaagtaaacaacacaaacccattgatgttcttcatgaaattgaccaattcaattaaacgagcacaaaagaaaacgtataaggataaaacattcaagatttttcatggtacgtaacttatatatcaacgtattgattttaagggaattggaagtcacgtgatgcctctctgttgcaaatattgagaagcaagatgaggttgatgggaagggtaaggttgatgccaagaacactagccttgagagcagtgcaaagacaaatcgcagcttcaagatctaccaaaccctcgatcaggctgcaacatggagtcacaggaggagttccgggggtcaaaccgtttaacaagttgagtgcgttaacacaaacaccgacctttaaggcatctttaggacaagtcccggtagtgggtgttgggctaggcttttgtttgctgtgtatgcctggatggaggaagacaatatgcactgcgagtggcagccatgagagtgaagaaaaggatgtctaagagacagaggatcgcactatagtctgttaga

SEQ ID NO: 14150 - DNA, 674 bp, Arabidopsis thaliana landsberg
ttcttgatttcctgctttactcattgatctctcggacttggcctaaaacttgtaagcgtttctggttttgtagttgtgtaccacttcgaagttttgaatacatttacaattacctgatgcacagcaatctcagctatgttgactggtaataatcatgtttcatcagaataacaaattcaccttttcactcttcttcccaacttctttaactcttacaaattgatttactttggactcttcagctttgacgatccaggtcaacatggagcaggcaggcatatgaatcacatgttgcctgaaatcccaaagaaggattttcgaaagggtgcacaggtaaacaattttcattgatctagtaactacgctcacttaggaaaattggctctgtttcagtgttggtatctatttacatggcagaagtctcaagtagatcctttaggtactagtctgccattttaggaagtgaaatatacatttgaacccaaattactccttcatgcagtggttcaccatgaagcgacaacacgctgtagcaactatggcagacagtctttactactctaaattccgagattactgcggggtgagtatcagcaaaatccctgataacatctattgaaataaatcgtattcattaataagaaagcctgcattttggttcttcagccaggtat

SEQ ID NO: 14151 - DNA, 695 bp, Arabidopsis thaliana landsberg
tacggtgtccaacctaggtgtagtcttcatcattttgcttatctttagtctttttctttcgactaacgcggcaataacaatggcgatgatggacaggaacatcccaatccccattctttccttcacagaaatacccttttcgtttttcgttagttttttggcgatcggtatcaagattttgtcgtagaagggcataagaaggattatggataaagtgatagtgctttgtagtgttgctggtgggatcttgaagtttggtccgatgtttctcttcatagtcataccttgctttgtgaaaaaggtcgcgggttgttggaatataactgcaaacataagaagcatcgtccatataggtaaaagtcgaagcaatagcttgacggtttcaagccccgaaaaaccggttttgcagcttttatgatcatcaggtaagctcttggtagtagtattagcttcagtgttgctacagttacatagaggcttctgatcttgcagcctatatatagaaaacaaaagcaagaaatttagagatgtttaagcctatatattcgaacaaaccatatccaaatatattttttggggattgaatgtataaaagtaaaataacttactctagctccatggcatttaaatcgtggtcgttcacaagagtgatcttatttctttcacatactcttttctttgataatctctagtat

SEQ ID NO: 14152 - DNA, 503 bp, Arabidopsis thaliana landsberg
ccttccgctttttgtccttctcccgctcttgctcgtgcgcgttctggtgaccacctaaggcttgagaggttgagaaaccttttttgcaaaaatgacaagtgtagatcttgtttgattttgacgggtaaaacttcatgatctctcttcctcttcggacagcactagatccaaaactagagttctcaatcctcctttcagaggtaacctcttgaggagaacctagtttcagaatagtgttccttgttgccttctctttcgacttctccatgtccacaacaatgcctttgagctttttggatttgggtgtggaagagcctgcagaagacattgaagaagacatagctggttctctgtaacaaatcttttttttctttgttaagtgatctttatctctttgtgatagattcggagaaatgaggatgctatttattgagaaggtaaccttaatgttcgttaactattatggtataaaaactcccaagggtttaaattaatttaaaaat

SEQ ID NO: 14153 - DNA, 709 bp, Arabidopsis thaliana landsberg
aaacaaaacttcagaagaggaattccaaaaattacaaggacataataaagaaacttttactatgaaagtctccaattcatctctgtcatccacactctcttctattatgcatattcccttaacatgccaatgcaatgttcatgatccaatcacaagtctatcagcagttcagaccaaaactccttgaaacaattttcttttcaccaccaaatttcaaagacttatcataggaacaaattgttcccaaacttatctgtcagtgcatgctacacacaaaagccaattcaaattcaatgagtaatccaggatatgtaaaatgcaataacttttgttgtatctacagattgaaatctccgaaaaatattcactgtttaagagatgtagagatagatcaaaaacaatcttaagttatactatactacatgaagtagcttaaccaattgaaaaagtatgaaaatgatcaatgcatggctggaaaaagaagagattggtgaagagaaatcacctaagtagcaccgacgatgatgttgttgattggaataaagatgagcttcacaaagaatcccacgaatcccattactacgaacccgattgctgtacggactgcaactttcgtgaattctacaaacaacagaaacaaaagataggcaaacacagaatcaaacacagatctctcctcatacacagatcttcacatactcaaacaatt

SEQ ID NO: 14154 - DNA, 561 bp, Arabidopsis thaliana landsberg
cacaaatgcctttaaacctttttcatatgttcttgaaactatactcatcttatatgcagatcatctttagggatttcaaatcctctaatatccttcttgatgagaactggaatgcaaaactctcggatttcggactggctcgaatgggtccttcagatggaatcactcacgtttccaccgcggtacgctacgccttacttgttatgtctccattgattgttagaaacaattgaagtcttaccaaactatgaatctacaggttgtagggaccattggttatgcagcaccggaatacatccaaacaggacacctcacggttaagagcgacgtgtggagctacggaatctttttatatgaactcatcacaggaagacgaccttttgaccgtaaccgcccaagaaacgagcagaacatcttggagtggatcagaccacacttattcgacataaagaagtttaaaatgatcatcgacccaagacttgaaggaaactacttccttcaagtcagtattaaagctagctgcagttgctaaccggtgtttgatggttaaagccgaaagca

SEQ ID NO: 14155 - DNA, 1052 bp, Arabidopsis thaliana landsberg
caaatcatagcgaatcagttccaagtatcacagaagtaagacttctaacttccaagataaaacacataccgcacatttcaccatccacaatttcggatcacggactgatggcaaaagcgcttgttgctcaacttctgtagcttcttcatcatattcttcatgatgcctagaggagaaccgctcttgaattcttctctcgagatcttccacatcctcatcattttcgtctcgaggaagaaacctccgttcgtaccgtctatcaccacgctcatccggaaggtccgttccattatccacaataaaatctgcatttcataaaaaaatccttcaactagtgaacatttccagtgactaagtaaccaattcttatcaatggtgacttctgagaaccaatctcaatcacaaaacaacacgaatcttaacctaatggaaatgaatcgatggaaagaacaaaaacgaattccgaaaattcaagagtacttaccatcttctgcttcatcttcttcctcttcgtcttcatcatcaacttgatgagcttctcggtctaagaaaatggaagcagatggcttctttctcttactagcagctcctttacctccacggctactaccataatcttcatcgtcatcatcttcttcctgagaatcttcctcagcataatcatcgataaaattcgatcttcctctcttccgtctagaaccgccgccacctcttcctctctcttcttcttcttcttcgtcttcttcctcttcttcctctaaatctaatgcttcgtagtcaccgtctaattcatcgtcttcgtctctgcttcgcggcatcgtttagggttccgatctggaaatttccaaaatctatagattacagaatttgagtttctcttcgtttgtttgagcgaaccctagaaatctgaagaagtgaaaaaggactctcaacgattttcgaagagggtggtgttgtttttggattttaaccggattggtttgcaattacggttaattgatttgtttttggtctgtaagcacgcacgttgcacgacatgatcaacgactagg

SEQ ID NO: 14156 - DNA, 858 bp, Arabidopsis thaliana landsberg
  unsure (1)..(858): unsure at all n locations
ccctttgattgacgctccgtgctctaaagttatagctttccagctcaatcaatatgttctatgaaccagcaaagatactgaagaaagattcacatttttgggcgctgatttatatcgctctcggtttaaccaatttcgtcatgatcccggtccaaaactatttctttggaatcgctggagggaaattgattaaacgcatccgatcaatgtgttttgataaagtggttcatcaagaaatcagttggttcgatgacacagccaattccaggtactataactttatatatataactaaacgtgtattttgtatgttttgattctaatatttatttgcgttttgttacagcggtgcgattggagcgagattgtccacggatgcttcaacagtgaggagtttggtaggagatgcattggcgttaatagtacaaaacatagctactgtaaccactgggttgataatagcgtttacagcgaattggatcctagctctcatagttcttgctctctcaccatttattgtcatccaaggatatgctcaaaccaagttcttgactggtttcagcgctgatgctaaggttttaatatagtggttacaacatttttttgaatatatcccggtttagtcgcgatttcgggtttactgatcgattttttttctggtttaggcgatgtatgaagaagcgagtcaagtggcgaatgatgcagtgagcagcataagaacggttgcatctttctgtgcagaggagaaagtgatggatttataccaacaaaaatgcgatggaccgaagaagaacggtgtccggttaggtcttttgagcggtgcgggtttcgngttctcattctttttcctttattgca

SEQ ID NO: 14157 - DNA, 818 bp, Arabidopsis thaliana landsberg
ccttttaagatttggggataaatatttatatataaggctagacatggggaaaataaattataatatttatagacatgcatgctatataccagattaccaggtccagaaataatctaaagagagcatacaaagtgaatattaaattgcaaaaatgggggaaaataaaaacaagaatagacatgcatgctatatacgcatatgcagagtgagcgatcacttgatgagaattttttgtaaaacgattatcgcaatttgagcatctttattgatgaaatacttatagaaagtttctcaaataaaatactactaatatatttatttattttttggtgtgagagttttacatatatagggttctcatatatagattctcaattatgaaccttttgtactaaaaactctactattctagaaacttacctttttttaaaaaaaaatgtgtgaatactatggatggaaatgtctttagttgctatgaaaactaatttgtgttatttatacggttatacctaacgtttctagttatcacaaaaattaatggtgtattaatgtatttaataaagtaagttaagttgttgcacagaaaagaaagtgtaagttgggtaaattgtgtgagccaaaaaagattgtaaattgtgagtttgtgacgctgaagagtgaagacaattcaaaaggttatatcttatatgcgacggcgtaggtcagttttggaatggtaaacacgcggcaagtttggttatcatcatttgtcacaatcatatatatttactcatataacatacccacattgcttaatcgtcctctttggttcatgaata

SEQ ID NO: 14158 - DNA, 481 bp, Arabidopsis thaliana landsberg
agatgaggcccgggtgtgttactttctctgggttgatcaaaccatttctcatagtcaaatgggtcagcaagtttacgtgttgatccctctgaaaatattggctctccagatggatcggtcttccatgcttcatttcaaataaaggaaacatacagtaagtaaagatgtttagagccttttattttattttttcaacttaatctgaataaaccgaaccataaagctccatttaaaggacaaaaatgaattgagagtcttagtacagttggttagaatggttatactttttctctaattgaagaaccaaaacaaaaaccaaatttaaaccgaaaagagaggataaaacttcggaacttaattttgaaaaataaaagatacagtatatttgattaagaaccaagccctaatcaaaaccataacaaattgttccataattaataaaagcaagaacctgttgtgacaagagcggatcggattgcag

SEQ ID NO: 14159 - DNA, 790 bp, Arabidopsis thaliana landsberg
aaaaagcccctaagtcttttaaaaatggaaaaaggaagcggcaatttgacttgagcaagccaataaaataactttttagcactgttgagagcagaagagccagcatgccacggtccacgtagattttaaaggccaaccctttaacaagtcccaccattgatcaattttccaaaccagtcgcagtattttagcctcagaccacggtggactactcagtcttcgcctaccatctccaactttttcgaataagcctttcatcatcttcattccataatttgaaggtgccagtgagtttcaattgttgacattcattttttgcaatccaaccaaggatcaaagtcgatgactcagttgtagcatgtcttctcctctattccgctgtgagctcatctccggtgttaatatgtcctaattttttcctgtcgatacttctccatcaacatatgtggagaccgaagactcttcttttaggtttaaccaaaactgttcaccattgcctttttgggttcatgtcactaggtctaaataccataagcaacactctaccgacgagaaagtttcataaatagactgacactaatatcattgggatccattcgataacccgtcagaattctccgggatcaagctaccttcagctattaggtcttgttgttggggactcaagtcgtggctcagaaggccttggagagttgatatatgatgatgaaaccatgaaggggttcgattatgagtttggataacaataatgattttaacgatgatgaaatccttaataatttgttgatta

SEQ ID NO: 14160 - DNA, 532 bp, Arabidopsis thaliana landsberg
agcccccgtctcgggtaaggccgactccagcacctcggtctccgcctaggatttccagttggcattttttgaatgtgtttgatacttatgattataatagagctggtggtggtgaaagttccggtgccggagctgggttttttccagccatgggtggaggtaagtcgaattcaagtagtcctgattcgagggaagtgagagagagggaagggattcctgagttggaagaagaaacagagcaagaagttatctttgggcagacgtttaaacatatgaagagaaaaggcattgagaaggtgaaagaacaacacagacaggagaatgagattcacgagagaaagatcaagaaacgaggagattcaggtgaaggaacttcaagggcagtgcctgtggtagaaagggctacggagagctcttttggttcaaagactgtgtcgtcgttttcgagcagtgaagaagagtcggagtttcatcatgttaatgatggagaagggaagagtagcagtaatgatttaggtgggcatgagacggc

SEQ ID NO: 14161 - DNA, 709 bp, Arabidopsis thaliana landsberg
ccagcaccaagcaacttagcaaggccaaaatgtgaaacctttgcgttgaattggtcattgatcagaatgttgcttgacttgatgtctctatgcactacttttggctcaattgtttcatgcagatatgcaagactacacagaggaataatgatcagtatgtgagaagaagaacttaataaaaaggaaattacattgtttgcttacgctcttgatgtgccgatcagaaccttcatccttgcttcccaagttagatatccatgttgtctcattgctccatgaagccattgttctaagtttccattattcacatattcgtaaaccaatatcctagtagcaattcacattgatcttttagtattagtaactcacaaatttggttcctaagttggaatttttttcaccaacctgtgtgtgccttcaatgcagtaaccaagaagccgaaccaagttcttgtgccgcacatgaccgatagcatcaacctcgactcgaaactctttctcagcttgtcccctataaaatctatcaatcaaccaaaactcaaaccataaaaaggtatgaaaatctttttacaatccgatactcacaactggttaagaatctttttaactgcaacaggagttccattcattaactctcctctgtagacaacaccgtaaccgccttcacctataacattctctttagagaatctgttagttgctgtttgaag

SEQ ID NO: 14162 - DNA, 931 bp, Arabidopsis thaliana landsberg
ataaatgaaataaatactaataacacaacatataaattgtaattaaaaaagcattattgaaaatttgacaacgaaagagacaaccaaaaatatcatttagtaaaaccatatcatactaaaagaaatatgagtagcatgtgattgttatggagatgacaatggtaatggtgtatggttacgaaagtggtgatatagtgatttaaaaaagaaatgaatcatataaaaattacatccttttatcgtatgttagttgagatattttgaggataaggaccatagggtgtgtggttgaggtcaaacatcgtgtcgcgcaagtaagctggacgacatgaactatatgttaatcatacaagtcgatatataagctactatactataaattctgatgacattacacatgcatagacataaatgttatttataaaagggtaaaataaaagcatgataagttgtaggaatccagcaatatataatatgagatgatgatggttcaaagaacacatggcttcatgtgatatttcacttatattatcataaatagtttcatgattaatatatagttgcatgataatcatacaattaattaactagtgtagtttattttactttacattctgaaaagaatcaaacaatgttaatataataaatcattaagtcacttatacaaaatcacgtcttccataatatttgattctattatgaatcatatcacttaaactatagtttaatactaatagtcttttacaaaatcacgtcttcccaaatatttgattctattatgaatcatatcacttagattatagtttaatactaatagtttagttatgcaattaattatgttaattatgcataatcatgtagatatttatgatttaacatttattacatatagatatgcagataagaagcaatatattgagccatgtgttct

SEQ ID NO: 14163 - DNA, 797 bp, Arabidopsis thaliana landsberg
  unsure (1)..(797): unsure at all n locations
aacatccttttttgacatttttaaatttgaaatgcttcactgtttctactcaatccggaatttttcctgcgtctggcgcacaagacaatggttttggcaacaatcctttttttgacattggagcaaaggcaaaatcattattacctttcgtaatttgggaaatggatagcatcattatcatcactactaagatggacacagacactcgcttgttcccactcatttcaagtgtttatannnnnnnnnnnnnnnnnnnnnnnnnnnnnnnnnnnatctttcatagtatttataatagtgtataattatgacccttttagtagacgatctatattgtttttttcttggattttgtgcatacatgtgttaattttactaggacatcttacctttgggagaaaacgaatacattgtattttattaaccatttgtgatatgtttcattatataaaagaaactaatcgattagattttttcacattgtattattatctttgagttttttttcctgaaaataaagttattcattttctcaactagtaaaaaatttatctttgttttaaaaatagataccgttttagagttaaataatgtgaaattatatgctaagaacaaatatatatagtcacatatctatataaaattttacaaaaaagatttccttacaagaaactttcataattagtggtggcttattttctttggaagcattgtcgctcaaattacaaacctcatatgtgacattatcatgaagaaaacatggaagaaaacaatgtatcttatgatactgaaaatgatta

SEQ ID NO: 14164 - DNA, 1039 bp, Arabidopsis thaliana landsberg
gtctgtctgttctgtgctctctttcaggggaatcgatgtaagtttttgccgcttccttcagtctctctcacagtttagttttgtttccagtcgcttttctagtttagggatttcgataatgcctttggtagttttcttatgaatctgggagatttaggcttcatattttagctgataatacttgagatacaaacatattaagtttaagggtatgggtctattggaaagaatgaaactttggcttaatatgataatgaattttgttataattaagatttccagattttaggattttattgcaattgatgattactctctactcagataacgactttaactcatattcttcctttactgaattcaagcactctagattatctctgttaccggacataaggagatacatgatgctacttggccaacatagaatgctttgaatgaaactctggaactttggagaatgaagttttggggaggcttattagtgatcgttggttgcgtttcatttgttggatttgtgtttgtagctatagtgtctaaattgtttccactctctgacaatcccattatccaagctattcagaatgacaggtacactcttgttccatgctaatgtttgtttgcatatatcattcttgttatattgatatccatcatgttgatatctgttacgtgtatgtcatctcatgatttatatttcatataaaaacattcttcaggtactactgcttcttggcaccactgactctaccagctcttctggttgctgtttactttcattggcttagcatgaagctcttcaagcacgcatgatatatcactgttacttttttttttttttggtgtggcatcatacttagtgttatctatctttttttttttaaaaaggaacagattgtaaccaaccttattgatataaaggaaagaaaatgtcagatgaattggatgttgcattctgatgaaagtttggggagagacaagagattagctcgcaagagcttactgttgttgtctgcgtccacaacacccactttcacag

SEQ ID NO: 14165 - DNA, 1096 bp, Arabidopsis thaliana landsberg
  unsure (1)..(1096): unsure at all n locations
ttatctgaatgctttttagactttcttcagggttctttattaaaccatttgaatcaggttattgattagatttggttgaagtttttcagattctttgcaatggtcctgggacctgtattcctctgtgtgtgatcgcctttttattcaaggtatacacacttcggaaatattttatcaagattctttgcagttctttcctctacattttggatgaccttgaatggacttgtgaccaaaaacagaggatgtgttttgtttattcttagtcatggtttcaccattacatctagaattcccataagtgcttgtttcatcttgggttacaggtgctgggaattagatggtcatcaatcttttatgttgagagtgtagcaagagtgaaaaagctctcattaagtggattgttgctttacaagttgagaatagctgatcaattctttgttcaatggccacaactgcataagaagtatcctcgggctcactatgttgggtgcctgatgtaagctgattggaactctacttacacctagatatattacaaaaacttagaaagctacatagtgtacaccttctctttatatgcaggattgagttttaaacaatgaatttttgtaatcagctgttttgactttgttaatgacttaatgctatttcagtgagcttataatgtgattttggtcatcttattccaaactaaaccagaatcgtgcacaacatatatttaaataaaatatacttcatgttacaatgatgcacacattttcaggctgtgacttcacttgagtcgcatcacaaatctattatgtttatttttcattgtaggctgccttcataccaataaagaaaagtaagtttacttgatcagctcgctttagtctgtaaactgtgtgtgccacaatctttgaagtaacagcttattttgattgctcacttgacccttctgcttctggtcggtcaggggattctgttgttggtatttcattacttttcttcaagtttgtttcatcaagatattgtntgtagacataggatacgaaaccccaatagctagaatcatagaaatcacctttaagccgttcatttgtcatgaaaatga

SEQ ID NO: 14166 - DNA, 535 bp, Arabidopsis thaliana landsberg
aaaaccatatattaaaaaatgatagagagaataataaaaacagttgcctttacttaatatattaggaaataatttgacatgggttagggagtaaaaggagaatacaaattgatatatattactaacacttaacagggaaagaaatagaactatgcattaattggaagaaaaaaattaaccgaggtgcaaaaataggattgaaatgtggatcaagggggtcaaattctattttcttaaaactacattatgaaccaaatgctaatcaagctttgtaatgaaaattgataaaagttatgggggtcaagtgattgatgtttaagaaaattaaacctactttcaatacttgcacgtgaagctcacgtgggatttacgcttatggttaggtacaaacaggggcggatctatgttgagactaggtagggcacgtgccctatactaaagttaaagtagttttaattgatcatttcttattgatatctcttggctcatttggcatagagtgccccaggttaaggtcctgagcgacaagttcgag

SEQ ID NO: 14167 - DNA, 1047 bp, Arabidopsis thaliana landsberg
aatatcctataatatatgctacattaaattagaatgtttatgcatctatatcaactataatttataaataagagttcagtaagtgtaagattaataccttaagagaggtttagtcaaagaatagtaattcatttttttggatgtaaagaatattaattcatgcttttggattgtgcttaattacgtctgccatgtcatgattttatctttttgtatattgttgatttgatcgggtgcgttttctttttttaacggtttctttgttcagcttatttagggtttagctttctatttgttcctttagttaatctttctaattcttttttgtgtccacgtgtattttattgtgttttatgtacttgttgtttagctttcgatatcgatatttaaaactcgagttatcataaactagatttttttcacgaaatattttccatgtctaaccatatcatactaccacatgcgtgaatattttttttttctttttttgaataccaagaaattctgggtcgaaacccataatcactccagtcctgaaaccacagcatataatattaatttcctttcaagcgtcatttaaactgacacctctaaacttcgcttagactctttacatgcgtgatttaaacaattttattacttcaaaatatcattttacttttttatatgaaattcggtatgtcttccaaaccattatgtacaccgtttggagagagagagacgtggacggcgtcatggagaaccactacacacttcagaaaaacttataggatagattgataaactggttcaaaatcaactcacaaccattcgatgcttgggagatcaacgatatgacacggtttttcaagtctggctccatgcttgagtctgactctattttaaacctttaaaacaccttaaaaatttgaaagtattttttatttcttttcgattaaccgttacactagttctaaaaacggtatttttttaaaatgacgcgggaagaagctagtcatgattacacattccaaagcgcaattggggaatgttaaaatagaaatttac

SEQ ID NO: 14168 - DNA, 948 bp, Arabidopsis thaliana landsberg
agcacaagtttatgtggatatgtgtcctttggtgatagttggtgtttttttctcaactgttttcctctaatctctcgactttctaacatgacagatctgcgacatgggctcgtgtatcggtgtggctgcttataggagtgattgtgtatgttttctatggtcggaaaaacagttcgctcgccaatgcagtttacgtaactacagctcatgcggaggagatatatcgcgaacatgaaggttctttggcatagtctgagaaagcagcatctcttttgttatatatgtaacacaattctgtattatctttatctggatgtaacagcaagagtggcactatctatttgtttgcaaaaagatctgtccaccgcctttgtaaataatatatatcatcatcaattcataatcagaaaagactcacttttcacttgtcaagaagagtattatcaatatctatgctcacacgactctgaaattaagtgggagaaagtaacactgcttcgccgtctctgttcatgcgttaatgtcgcatgtacatctatacaattgttttagaactttcgcagcttatatatatttatatatatagacaacacaacaagatctgtatatatatttttcagaaccaaacttggttcgataacggtaatgagattgttgacgaaatttctaaacaaaaaccaggattcaaacatcgaataacccatccccaatgcagaaaatcaaccatcatttctatctccctaatgaaaatgtgaatcatataagaaaaatagagactggtgttaaggatcacttcttcaatataagattattttaatcaaataaactgatttaaatattctaattgcgacaaaaattttttctatgagacccatctaaacacgtctgtaaaaaatcggtggggtaatggaccgcacttcacacacgggggtaacttcaccccttggt

SEQ ID NO: 14169 - DNA, 784 bp, Arabidopsis thaliana landsberg
ctttacattcttagctgagcatgaagtgttgaggtgtgaagagcatctttggcaagaactgtttgtttagtttacttgaaaacacctatgtggtatccatgatcatgatactatgattattattctttgaaaatatagaaaacaacgaaacaaaagttgagatataatcgtggtactgtttttgttgaaaacatatttgaatctgactaaacacgtgagattcatgaaagtatcattttgcctaaaatattgaatcatgcaagaaagaaaccttccatacgaaaaagaagttcacacaaagagtcaatatccatgatcgtgatacgttgataaaaaaaatggaatcaagactaaacacatgagatccatgaacgtattcctctttttgctgaattaaattgtgtttgaagatatacatttatcaaaatgagttaaatcgtgtttgaagatatgttggtatccgaaaggaatggggaagctgttagtttcaaaaaaatctttttagcctttctccattccttgcgtgacaagtttggtcaggggatttttatcagatcataacctaatttgttttttcatatttcggtttgacttggttttcttgagggtgcaggggatttgatcagcggtgggtgaacattgacggtgccgtccaatttcgatttgacttgcggtttatatactcaatactaaatcataaaggtattattaaagaaaaaaagatcttagccaaatcataaatattattaaaaaaaaaaaaactaaatcataaaagatagttaaa

SEQ ID NO: 14170 - DNA, 610 bp, Arabidopsis thaliana landsberg
  unsure (1)..(610): unsure at all n locations
actatatacaccaaaccctaaagcaaaattggattcgtaccgtctatatgaacctcccccatcgctcctcacggatcaagttcttgccttgtgttgaagaaccctaatttctagttttgtttttatattttctatattaaaaacattatttaatatctagttaaagaaaatttggccaatgaaaaagtttactgcagaatataaatagtcactaaagttcttaaatttaattttgcatagcaacttgatatttttcttcaaaacatcttatattgtgaatcaaaaataaaatggctaaaacatacaataatatgaaacaaatggtgtatacttaaagtttaatgaaaaaatcaataaaagttggctaagtattttacccaaagcaaaattgaaatttattttaatagttaaaataattcagttaggnnnnnnnnnnnnnnnnnnnnnnncttcttaaggattactccaacaacattatctcccactttctaagacatagcaataaagacaattttgtatttcattggttatgcataactttcanattctcatatgacactagctcatatatcatatacatttcacaatcatagtctaacatatgacacta

SEQ ID NO: 14171 - DNA, 746 bp, Arabidopsis thaliana landsberg
gaacatatctatttacgtaattatctacaactattaatccttgatccatgttctgaacatataatcatatatcgtgggttcccaaaatatgatattgaatctgctcatcctgcactagctatactaagattgttttgttgtcactaaactaaacaatagaatgtcgtcaaaagtaaaagaatgatgaagatgcgcacgtgcttgttagtcgcaaggcacgtgagatgatccgaagaagaatcaaagatgcttcgcttgaagccataacgatgtgtggggaagacggcaaagcaatcaagcaaatacttttccttcctcttcttctccaaaagtcgtttgttttcacatttctttcgattcccacttgactctccgagaaacctttgcagatcaacaaacccatcttctgattctggaaaccctaacccacccggttccgattcagacaaacgggtcggagaccgattttgatctcgaactcgattctttctcagatgaaagtatcaaaaattgagaatttgaggttgtttgagtcttaatcatctcgatcaatgtcgcgttttccccgtggatttgtggagaattcatcaatggaggaacccaaaatcgctcgtcgtccaactatttgcttcagaccaataaacccttctgatttagaacgtttggagcaaatccatcgtgacatattcccaatcaggtaaataaataccttttgtttggaaagaatttatatgtgatctggtttt

SEQ ID NO: 14172 - DNA, 645 bp, Arabidopsis thaliana landsberg
tttcctttccgtagaatgatattaaatacgtaagtctttgcctacacgggtgtggtctagtggagtgatcagattagaggaagttgtaatgagctaccccttattcgatccaccctacaactactctacaaatgtgtgagtatcagaagttttcacatggctctccctggcccctaaattagttgtatctcatggctcgttaactcgagaatcagtaagagagaaaagttctcgtgacctaccatgaactcataagtgtccgttgaaccggatcatccgaattaaaaaaaaaaaatagacgtttttttcgacaaaaaaattatagatttgtgtgagtcatttaaagcatgtaagcatttaaaactttcaatcactgattgtaatagatggaaaattacgatgttaacagaaattgtatagtcttaactataaatacactttcgaaggttttaaatctcgaaaaccgaataataatgaaaatactcacacacatgtatggaaaagagctccacgaaatttgagtgaaatgcccatagtatatatgcattccaaattttaccataaaacaaaacacaccagattttcaggaattcactattaataaactataccaaaattattattttatgcataaaatattcctct

SEQ ID NO: 14173 - DNA, 661 bp, Arabidopsis thaliana landsberg
caaatcgatgaactgtcttggaaccatttcaggcacttcatgtcggttctttacattgtcattgttctcggtcgtagcctgatgaaaaacaagggtataaaatctttaactaattatatgaaataattgattaagacgtattagagtgttaattaattactaggtgatgatgatcttcttgttgcctcatgacagcaacaagttgcatctgcaaggaattgaagttgttggttgtttgacttagcatttcctttagtctttgattatcttcactcgccttctttagctcttcgcgaagttgtgcattcttcattttattaaaaaacaaaaaaatcatgtatcagacattaaatcattctagtaagaaagagtaaatctctctaacatgtccggatcttacggaccgatacgaacaacatataaaaatagaatgtctaagtctacgaaaacggtatatttttactaattcttaagaaataaaaattttgtagagaaaatcagaaaatatctttttatgcttaattatgtgacaaaatgaagatgaacagtaaaaataatcaaaatttagcataaaaatattttcattttttttgtcatcagatattatttaaagttctgacgaatcagaaaagcggaaaagtgaaaacgtacgtaacaaacg

SEQ ID NO: 14174 - DNA, 975 bp, Arabidopsis thaliana landsberg
ggttaaatctttaatttcttattttttaagaccactaatattaagcatatcaaataatcctaatttaaaaagaatatatgaaaccaaaaatgttatgtggtatgtataatgttagtatatataaaattaaactataaaatataaatgtattagagaatgatacaatttgcaaagcttttatatataataaataattcttaaattttaaaatttactacattaaaacaaatcacaggacgggtaaagaaattacagaacgggttttattttggaattgggttatatggtggatgtatttgaatcaatatttataaaattttaaaatattattaatatgttcttttaataagggttaaagcttcagttttataacaattatctcatggattcgtggtatagtgttacttaataacaattataaactgtaaaatataaatattttgtaaaaaaaatttgcaagttttaatatatatatattattttaaaaaataaatcattccgcggtatagcgcgggttaaaatctagttatgtgttatttggtttagttattatttgttataaaaagaaacaatatatggagttgaatctagtgatgatatatggataatctagtgatgatataacgacaatactaaatacaaatcattagagtacatgtttttttaagtattacagctataaaataaaacatatatacaaaaaaggaagaaaaaacaaatctttaccactcccatataattttgcacccgccgctagtccaatctcatcaataatgtgtcgtgaggaagaggtagcaaagcatatcacgtaataaataaaagggataaaacatgtgagtgctttggaattcgaaatagctaaacaatcacatgacccatgacgcggacgaaatagctaaaaatatatctctcaattttcttatctctaacttcatagttgattttttcatttgtagagtttggattgaaattatg

SEQ ID NO: 14175 - DNA, 655 bp, Arabidopsis thaliana landsberg
ggggattcccctattgaagtgtcgacatcaattagctccaagcatgttgcggttttaagacaacttttgcatgaaaagggtacttgatagcttgtcgatttacttttcatgacaagttaattccctcacttgatagtcccctcgacgatctcccatcagcttcactcgcatatgttgagtaaaagtcatcatctccttgttctctctccttcatcaaatcttccatcttctcaacagcctctcttatatctaaccttttctccacatctacttcacaacaactcaatccaattctcatgagattgagtatatgtgcttcacaattgcttgttttccccatttcctgatcaaacaattcttgtgtccactctcctttaaaactagaccttacccagctcgctaggtcctcctcgctttctttatccacttgtgagaaactttcaggtaactttcccgtaagaatctccaagatgagtacacctagcccccaaacatcggttttcttggtcacacggctttgctttacgtactctggggatttgtaagccaccatgatctcttgcgcgctttcttcgttgatcattgcgattaaaccatagttcttaagaagaggctcaaatttctcacttagaagaacattagatgatttagatga

SEQ ID NO: 14176 - DNA, 526 bp, Arabidopsis thaliana landsberg
cttcaacctctttttggtctctggtctactagtcgatactccaaaagctttttgtgtgattctagagaagagatactgaaaatgtgtgtggaaaggtccattttttacttttcaaaataatgtaatatataagcttataggggacctaatatgtaatgtcttgatggcacaattaggggaccaagaaagatgcaatgtcttatggacacaatacctacaagcacaatggagcctcaaggagtagcttcataaccatcagagttttccttactcggttctcgaacaaccttatccaggtcttagtcaaaaccattacgcagtagctcaagcccacctgaaagaaacaccattagtgctgagcaacaagacaccacggtggcacgagcagctacgctgctggtgcttgaatttccatggccgtgtcacagtagcgtcagtgaagaactttcagctcgtggcatcaggagctagctgtggcagtggctcggcaatgtcaccggacaggcagagcgagcggattatattg

SEQ ID NO: 14177 - DNA, 855 bp, Arabidopsis thaliana landsberg
ctgatatctattggatgggtcttggacgcaagttaaccaagtgagttgctatggtatgcaactttttttcttgtgtgcaatgataatagacttgtttggttcttaagatttctttcgatggtctttatgctactaccttgtgaattctactatatgtttgcatcttttctctgatatgtcatctttgttcttgtctaggtgtacatcattgactacggacttgcaaaaaagtatagagatctccaaactcatagacacattccctacaggtgcacatttttcttcgtcttgataaaacggtttgctcaagttaaaattttcgaagggttagtgaaatattggtaatatatttactaattgagagttactttattagggaaaacaagaatcttactggaacagctcgatatgcaagtgttaacactcatcttggaattggtgagtattgtttgctttttcttctttcattttcacataaaaaacttgactatttgtacgtctatcgaactaaattgagatcttttaaacagagcaaagtatgagggacgatctggaatctcttggctacgtgcttatgtattttctttgaggaaggtatagatacatctttacttcacccagtattttagagttttcgtttccatttgtccctaaccctaagactctcttgctagtcttccttgggaaggcctttgtgcaggtaccaaaaaacagaagtatgacaagatcagcgaaaagaaaaggcttacacctgtagaggtaccaattcgtaatccatttttcacttatatcacgaaccctgtggtgaaactgccatggatgcattcatagaattaagttaaatttcccctggca

SEQ ID NO: 14178 - DNA, 778 bp, Arabidopsis thaliana landsberg
  unsure (1)..(778): unsure at all n locations
gttcgtatataatgtcaatagaaataagtgtggaattctttacagaatccaattaaatcctgaactattttaaaaattgtctctaaaaaatgacttgacattttttactaacaacaaaaagtattttaaggtagagattcaaattcgtcaaaagtaaccaccgatgggagatttaattgggactctagtcactgaaagtcgaatctggagatcaagacggcgaagaaattggtttcaagaggttagggtttgatgaagagagaatcgctaaagaagaagaaataggttaggtttttttgtagtttctcaaacataataagagtacttttgtcatttaccagatataacgcgtttgacgctgactttcattagcatctacaattgttagccgcatgatgctgagtttgctgcagctacttgcatcaaccaaacgaacatacatactcagttacgtttgccaccgccacaacaacatgtggtgaccaaacgaacacgctaattatacacgacaaggatcctcttattcttcttgcgagtcatgatcccttttacaaatttataaaccttgtgatattatcttcactaatataaaacttcatatgggttgcacaagtttgcaaatatttctagctttcgatcaaaagcccaaaataatctacccctctgccaaacaaagtcttccaaaattttcttatttgcttcccattagaccatttgtagctatatgcattaggttcttttngaagagaaagaaaaataagagaactgcatcatgtta

SEQ ID NO: 14179 - DNA, 525 bp, Arabidopsis thaliana landsberg
attgcagttttatcagatgatgaaaagaatctctttacgatttttatggtgaggccggacttaaaggcgctgctggatttggcaatggggtacgttgttcaaaacacagatgcacagattcattctttatagacactcgaagttaactctctgatcacttcttggtttggttttttgttattaaatttcattaggattttagtaatccgttcgatctattcgactcattattcgaaggcttcggtggtgggatgggtagaggttcaagaagcagagctgtggatggtcaagacgagtattacacgctaatcttaaacttcaaagaagcggttttcggaatggagaaagaaatagagatatcccggctcgagagctgtgggacatgtgaaggttcaggtgcaaaacctggaaccaaaccgaccaaatgcaccacgtgtggcggacaaggccaagtggtttcagcagctagaactcctctgggcgtggtccaacaagtcatgacttgctcgtactgtaatggcactg

SEQ ID NO: 14180 - DNA, 912 bp, Arabidopsis thaliana landsberg
ggttgtcaagaacagagcgacgagcgttggaataagatttgacacgggatggatgaagaatctcggaggtgagattacgacggagaagtcgccacgtagctccgtatgatcctgagctgatggtgtgttggttactagtgatgatctttccggtaggaagcgccggtggacgatcagagaatacggcgccgtttaaaacaagagccttgtgagccaaggaacgatcagagacgaagatggcagggacggaaaagatgcggagagagatgattgggccgagacggtggtggatggagcggagataggagtagaaatcatcgaagccttggcggagccactggaagggaccaagcatggggaagaaattagggttcggaggtagaggaagattgttgttagttctgcggaagaagagatatagaaggaagttgactgtgaaagagacgcagaagatgtgaaaccatgtcgccatttttcttgtattctttctctgcttttttttttgttatgcttttaggattcttcctcttgaattcgtatatatagcaaattcttcagataacaatttgctatcgtgacgctcaagtataaactgtttttatttatatatctatagttcggaagacagataatttagaaataagtttggataattgaaaatatatccgatttgtttgcttcttgggcgacacaccaagctccggagaaagttatacgatctctttgctacgtttagcttcattactccaaaccacaaacccacatgaatttttgtgacatcatcgaacttttgtgatttgtttttatttttgaagataaagacaagttaaattataatgttatatctaccaagtaccaccaaccaatgaaaagaaatcaagatttcaactagaataaagtcgataaatggat

SEQ ID NO: 14181 - DNA, 766 bp, Arabidopsis thaliana landsberg
tcctgatatctaatatgggacgtctggtacttggatggtcgccccaatggttattttattattcaaaatggtgggtgttttaactcccccctgacattaatttgaaagcatttcaaactcggatcatgcaatgtggtggcccaattctacatggatcgggagaaattcactctgtaaaacatcggggcattcttcctatcgaagccgaccggatcagcaaataagatatatgagaaagaaaaaaaacagcaacaacaactaatatgtaggtgtagatatcatcttattgcaaaaactattgtccgtcaattttcaaccatgcaatgtatagctcagatttgttctttcaataataagtgttgtggtcctagatttcttgtggagagaggtttcaatgcatatttctgaaagcctcaacctaaaaataataattttgagcctctaatctaaaagaagcaaagagtgttacgttattggtttggtattatctagagaagtgcgcgcacgtttttgttgttattaccctagcattccatcgacccattactctatattttccacataaaaaaaatatatacttcttctgttttactttaaaagttgttataggaaaaacatttttattttaaattaattctcactatcctatacaaaaatttattatttcttactttttaattattcttatttggaagagtgttttgttagtgggtgaaaaattttaatttttaaaaaattattttgatttaataatgaaaaaaaaaac

SEQ ID NO: 14182 - DNA, 575 bp, Arabidopsis thaliana landsberg
ccgaatgccaagacctacatttaaaactaatgtcacaatactacatgtaaaaataacactcctttgcggtatcacggatctgatcctagtaagtaataaaatagcttgatttttgaatcaaatcatttaattgttagtttttcgtagagggtgattaaaagtttattacaaacactttaatatcataccatatacgttacactaaatattttcgtgtacgtacaccgtaagttatatatacgtacacataaaaaattcgattaagggtataactgtaatatatcatcttcaacgtgagtattctcttctgcaaccctaattttgcggccgtcaattaacaattatctcagatttatgttttctttacgtttataagatttttacatagaatattttaagacatccaaagtccttcatcaagtaaatcaattattctccttcatctacttttctcaaatttgatctaacaaatctagaatctgtgatttcatgatccggctaattgttcgtcgggtcatcatccattagattatataaaagggagagtgtgtgaatcgagagaaaaagagacaaag

SEQ ID NO: 14183 - DNA, 553 bp, Arabidopsis thaliana landsberg
ttttataagcccagcctgaggtaaataattggggttaagaatcctaaattacaaaattggtgaatttgtacctagggcttggaaaccagatcttatggtacatgttgcatagtattttatttgaacataagtaagtacttaaacaactagaaatgcaaatggcttggattcttcttcgttacagttataatgctcttacagaacattactcatatgtagttgatggcattgattacattggatgttgcaggggatgattacaagattaaagtttggaactacaaaactcacaggtgtcttttcactcttctcgggcatcttgattatatccgcactgtccaatttcaccacgaaaacccatggattgtgagtgctagtgacgatcagactatccgcatttggaactggcagtctaggacttgtatttccgtgttgactggtcacaatcattatgttatgtgtgcttctttccatccaaaggaagatcttgttgtatcagcatcactggatcagacagtccgtgtttgggacattggtgctcttaagaagaagt

SEQ ID NO: 14184 - DNA, 781 bp, Arabidopsis thaliana landsberg
ctcaacgagttattaacaacctcagccaacagcagcagaagttcacagatagatagatgaattgaaattgactgtgacattgcaattttgagagctgtgtgttgtttccataaacaaattttagaggatcagttgtaagatttcttacaagattactataagaacttttatcaaacaaagattcattaaaccacaaacttccgtagaatttgttttgttaaaaatcggaaaaagatgaacaataaaagcctactaatcgatagtaatatccaaagtcaaagtagccaaaaaacacttagctctgctgattctctctgaatctttagactagaccaaatgagaaaccaatctccttaaaacatactcaagcatgtcctggaacaaaccagaaactcttcaagactgaagcatctaatgatttaggccatgtgattgtacttgtcgcaagatcaaatacaccgcacataggttgtgtgatgggaataaaaagctgactaagtggccaaagatcatcaccgcggaaacagattgaatcactcttgattcccaaaccattaatatctaagatcggtgctcttatggtaaccccatgaccaaatatcaacatcttaccttcaagggaatctactctctcccagttacaacttccaaaatccatcttatatatataaaacaaacgcttatcttctaacccttttaagctcacgatcatcaaaacctttccagagttaggaatcgctacaacctgcttccaagcgtgttcctcgggctttgaaacaaa

SEQ ID NO: 14185 - DNA, 1099 bp, Arabidopsis thaliana landsberg
  unsure (1)..(1099): unsure at all n locations
caatttaccttacccgacaaccaaaccggagccaaacaaggaaagtctcttaccttgtcttttttggtctatttggaagcctctagctcgtgtagaagcttctaagagtctaaagacacgctccttatcctttaaagaagaaatattctccattgaagacacttaccataaccggacccgagggaatcacaccatgattccggccacaagcattgaagctgcgaatattctcaagacatctaagcctccttttcaactagaagactcaagccacgagattatatctccttctccaagacacatcccacttctttccatatccggcaccaacgcatcaccaccacttattcccaacggctagaagatcacatcctctccaagttatcatttatttcgaatattgtttccttattttcatttcttgaccgttggaggtctctttgtttcgagcctatataagctcttcttcttttgtctcttaaaacacacaattttcaagtaataaaaagttcagtttgtttgctttcaaagttaaagtctttgagcatttgtttgagtcattctctttgtgtggtttccccttagagcttgtctcgtgagtcccttaaccttgtgtggtttccccttggttaattgattcgttctggttactctttgcttccatcaccatcactacaacacttccgcaagccattctgcatgaactcttgaactatcccttgatttacgaaaggtgtgattccgatcgtgtatcaagaagccagataaagaaagaggagaagctctccaggtaagttagtaacctttatgatattgtcggatatctcctcctaacatgtctttcgtcagtagtaagaaaccattttgggctaagtctgtttcttgcagaagtcgagttctttggcttaaccatagggctaacacatggntatattattttgntgtattggtctttatttacctctagttggttcctaacttcctatgaacaagactcgtttacttcatgcagtaaaggaaaaaagtgagtgtcaagtacgaatccatgttgagcaatcaaaaaccacatatgcacacagtcaatgttttcatgtcttga

SEQ ID NO: 14186 - DNA, 477 bp, Arabidopsis thaliana landsberg
ctttttcgtccttttttaaggtgttgctgaaagctccatcggcttactctacgtcgatgttctttagatttcaggaatcaattgcctttgggagatctttcctttccagatttgttaatgaagtttggtggattctctaattaaaaatcaatggacttctcttgaagctccggcggtttccggtggttttagagttccctgagttgctaaccagaacggtggtgaatggcgacaactaaggcttcttcagtcaacgtgtttcaactttgtttgttaacatcacacgtggctttgtggtggaagggaatctttaatttacttcctcataaaggttttgtttcctggtttgggctttctttatgggcctctgcttataagttggacttgttggttttttatgcaatatggatgactattattttagttgatccaatgttgtaaggtttaatatgtgtcaagatttgcaagtggaaggtt

SEQ ID NO: 14187 - DNA, 954 bp, Arabidopsis thaliana landsberg
gattgttagtttgcttgatcatcatctctgtaaatgcttgtctcaagcatccaatattagtagccagaatatgcaaagaatcataaatatgggttgatgccattgatgaaaactacacaatttttatatgtagctgttattaagcaagaatctgcttcattagcttttggattcattactctttcatcactatgtttattaagcaatttacagagttgatgcaagtttcctttttgtggtaactaattggttgaaatgctttgttgtgagatgtgtagatcttaaggcagcgttggggaagcaaagaaaagatggaaagagtgctcctttacagccgcttaccactatgcaacgcacgcatataaggcgtttggtggagaaacatggtgatgacattgaggttagatctataatcctactgattctatcatttttgctctgtgtgatgatactctttctaagttctaacatctattcctttgaacagggcatgtaccgagacaggaagctaaactggatgcagcattcggttgcaacacttgcgacagctatgtacgagatatcagatttacaaagacaagaacccgattttagtttcatgatgatgatgatgatctctgtatcctttgttcaattttgttataaacttgcaacaacactacaatggttatgaagtttctataaatacaaatacagtttttggtctattctaaagcatcgttatgaggtgaagaggacatatgcaaacttataaaccatatttaatgcttaagagtattcagttttgacacaaaaaaatctgcactctttgtgctaggaaacacactgacagaggacagcaaatcaaaattaagagtgtttttactggcatattctcaaaggtaagaatgtcacttagggagccccaaatcaaactgtatcatattccagtgaagcttcggcattggtaatccc

SEQ ID NO: 14188 - DNA, 680 bp, Arabidopsis thaliana landsberg
acattcgtgttttccataaactttactttttaaatgcggtttaactcttattgaaataaatattactttcataaaatactaagagaaccaccgtgcgacgtatacgtacatgctagttatttgtctattactaaaccaaaatatatttgtgaaccatcttttttcttttagtagagtacatatatgttttttataatatcttataaccttgatttagaagtttgaataacccattcaataactaattaagttgtattaattagttgaataatcaaaatgttgactactcaagttaagaagcttacccgttgttagatgggtcagtcaaacttgtaatctaaagaagtcctgtaaatattctgaagaacaaattctcttcaactgtaaaagacattttggttattcgttttatgagaaggttcagtctcttttccaagactatcaagtattagtggaatttaatctctctcaaatcaagctcctgataatactattcgtctttactttataagagttgtggccttgtgggacctttggctatcacactcctaagtaattttccttaaatcttagttttgttgcatctagatgaaaggatgaacgaggtagctaaaatgtgtcttattctatatgactcaaaaaaagaaagaatgatgtgtatagcttctagagattttggc

SEQ ID NO: 14189 - DNA, 1290 bp, Arabidopsis thaliana landsberg
tgacattgctttacgattgattaacaaatattttaagtgagcttacagaatcttttggagatccattattggtagcggacccgacggcgaagctggctcctcgtgacacatcggtgccgggttttagcgccggcggtaaatcgtgtggtatccccatgaattttgctgtgatttattcacccctcatcaatttcatatatctttaattaccaatcaaaatttccatttagtatagagtacctataaaaacgagtagctagttttcttaatggttaaatgatatgcattatagcattatacctataaagagcgtgttcatcttgtatacgttgttaaaatattaaagaaatcaggctgattcagattgagacctttgaaaaaacaattactagcccgttacgtttttaccaacttttcacacattataaaagagtttgcaatattgaagtacccgttacaattgcttatttttaatcgaactcattataaaatcatttattgatttaagtaaaatatttaacaactgtattgggacagaattttaacatgaaggattacaaataagcatcaatccacaaaccatatgttgtcctctatatgtttacttgggattagaaagatataataaaacaatctgtttccttttgaaaaaattaaaagtgtaaaatagagataaatttacaaacttaccaataaagtccgggacaattttgccatcagaaaacttgcccttagggtcatctcgagattttaccgtaaggccaaaagttttgaggaagtggagcacttgtgaggaactttttatttccagcgtcgaagttggaatctccgaaagtgaacaaacccaccgccggaagattctgcccggagatggtgacaaggttatgaaggagaggaaataccagtaatattcctagtacactcactgaactacactccattttcagttaaccagaaggaagaatgatgaggtacaataagttcctcggtcctctaatatatttatattgtaaaatatttggaaataaaagagcttttaacatgttctataattgatgacaaaaaaaaaaatgttctataattaaagattaaacgaactcagtttaaaataaagaaaaaagtttggggaaaaaatatctaataaaaatataaacgttagaaaatatatatttattgtaaacgttaagagctgttacgtaattatagaacaaacaaaaaaacaattatgtaacacaattttttaagaaaataaaacgtttcgcaaaaatgtcatgtaaaatcattgttagc

SEQ ID NO: 14190 - DNA, 582 bp, Arabidopsis thaliana landsberg
  unsure (1)..(582): unsure at all n locations
aatgattaattcgaccactgatattattatattattaaagtgtatttatttattttgttaaattgtgagtaaatttcagggttaaggatgcttgagtttaagtatgtgtgattttcggaaaagtgattgtcggagtcggaactgtatgagtgaggactaaacacaaaaaaagatcctgaggtgatttgtaagattggtaaataaatctttatagccttctgaacgtaacagacggactatcaaacagaggtggagcttagaaaggttgtaaactttggaactaaagataaagcttagaaagtgattgtgttttcaattctttgtactcttcactgacagatgattagtttttaagagaattaggtttagacttgttcttaatcaggattgataatttggatagaataaattaactaattaagtaaccgataaataaccgattaagtaactgatcatttgggtggaatacaaacttctcagataaaagaaatccttataaaatatcatgtaccaaaataataagtttgtatacggtgtaattcngcgttttaattaaactgtttagttttgctgaaaatatta

SEQ ID NO: 14191 - DNA, 499 bp, Arabidopsis thaliana landsberg
tctcaacctttaagttcgattgatctttttttggtaagtaaatcttctgtccgagattccatattttctgatcttctcttttcgaattcttcaatcttcaacgatcccaatcttcttcttctggaaatctattttgcttcttcttcaaattttctggggaaaaaatcaaattcttgagttaattagactccgattttgttgaatcgagaaacgatgaaagcatcgggttcattacatagctggagagaatatttccgacggcgaggagattccgatatattcgggatcatccatcatgcgatcatggtggctgctactgattgtcctaacaaattcaaatccagaagagacaaaatcgccgagcttttattctcctgtagagtgaatcgttgcgtcggatgcgaccatcttgaattgtctgttcccggagacgaccaggctaaccgtggaacccccggaaatggtggtggtggtaccgcggttgatgaagattatgagg

SEQ ID NO: 14192 - DNA, 611 bp, Arabidopsis thaliana landsberg
acattttttttcaaaataaagtaatttgatgtgttcttttacttatcaattattttaaagttgaatcttatctagcttttcaactttgtcagagcggtttgtcaaagcggcagtctccaactatcggaaagtaggtatgccttggagggtgaataatgtaggatccgcctcggatttcttaaacccttcttttcttgagtgtggaactaattaccttgtggtactagagtgtactttgaccgaaaagataagtgtactttgatgatataggtaaccaaaactcaattattttaaatctctccgcatacaccaccatattcctgaaaccggagtgatacattatctctattttttttctataactatattgttaactagaaaacttaaaaacttaaaaactgaacattctcaatttgtgaaaagttagaaattgaaagcggagtattatcgctttcgcagaaagaaaacaaaacaccggataagttgatgatacatgaggaatgataaagtttacgtgagccatatacatactgctctgttctcactcagttacaagagcaggactaaaataagaagagcttcccttttgctgtttccatcacgttttgttg

SEQ ID NO: 14193 - DNA, 610 bp, Arabidopsis thaliana landsberg
agtcagggcccatcatccactgtagccactagtacgttaactcaatatcgtctttaggacgcagggctaacttttcttttaccgccataaccactttggcaaagccatcttgctcttgcagtcatactcctagtgcaaacctatccatctgcgagacgtgtttgaaaaaactgttttcatcttttttccttccctagggaccaatcttaccacgaacgccattttcacttgctggagttttcagcaataacatatttgttagtgttttcgttattcttagctatgaaactctaaagtaaaaaaacactcttgttaacatgaacaataatataagtaatacccaaaacttttacttttacctttaagctttgatttctctatgtgcttatcttcctcttccattaaagttgtcagtatctaaactatttagtgtgttagatctgagttgttgcatcaaaagggatatagtgctaataaatagaccagcgtctatagtagatatacctgcatcctcatatatatcaattgtaatgatagcccgtatcttaaagtttccaatgtgggcggggagatatcttccaagatatccttagcatttgatgctggcaca

SEQ ID NO: 14194 - DNA, 726 bp, Arabidopsis thaliana landsberg
tcggataacctcgcaatctcagaaaatcctgggatttgtttcttcgtatgaactcttctcttccttaggtaagtttcttctctcgcagattcatctttctttttcccattttgatgaatcatcgctgaaatttcagttaaaaactgttcggtttaagttcttccgagtccctgatgcatcaattcggtgtttttgggtacattgtgtttacctaacttactctgtcctgttcttaaaaaaaggaggtttgttatcactgtgtgttgaatggaaatgcaagaggatagcttgtggagtttgtatcctgtacacgatattgatacggccttaacgaatagattagtctactgtgatctttatttgagacagtacaaggaaacattgaaacagaccatgcttggccaagaatctgtctttgaaactcaggttagctttttcattccccaattctagttagagtcactctatgagtgcgtctgtcttcaaaagatgtctcatttcagtatttcttgtctctcttacaatacttgttatctcagatctacgagcttcatcgtctgtatcaaaggcagaaggatctgatgatggacatggaggaaactcaacatttattcccaaatgccggggtctctagtcctagaagaagtagacactggatgggttcaagcatctctacatctaaaaccagcgtttggccaccagaagacccatctgccaagggtgatg

SEQ ID NO: 14195 - DNA, 594 bp, Arabidopsis thaliana landsberg
atcccggcgttagagtcgtcggaggaagaatctacgattccagtaatggcaaaacctgtcaccaggttatttcaaattttccccctcaaatccatcatctgtgtgtgtgtgtgttttatgctaaagacttgatttcgttattggctaaagacttgattttgtttgtagctttagatttgagtttgtttgtggctttagatttgagtttgtttgtggatttagacttgatttttgtttgtggtctaaagacttgattttggttggttaatgatatcaaagtttcgatttttggacaaatgctgttgattgtttggttgcagtgtcgacagaagactatggacttcgttgcgtcttgcaaggctatgaagaaggataagcaatgtaccattaatttttgtcataagtgtttaataaacaggtttgttttgtgtctttcgtgtttattggttttctttcatcaaaattttcctgagcttatgtgttttggatttgaatcataggtatggtgagaatgcagaagaagtagcgaagttagatgattggatatgtcctcagtgtagagagcatctgcaattgcagtttttgcaggtaata

SEQ ID NO: 14196 - DNA, 574 bp, Arabidopsis thaliana landsberg
attcaacacaattatacaatcttaaacactaaacaaaaaaaacaatatttacaaaacaactattacttaaaattcgaatttttagttacaaaaaaatcgaacaacggtgtcgcggactaaagtttacattatatcatctaattgatcaaatttcaaacaaaatcaactaatttgtctatacatcaaactaacaaaaatacacagattttccaaatatctctatattattccgcaaatcgaaacaaatctaacattcgatttactatgcaaaacacaaatgaaatataaataatataaaaaataaaaaaatttagttattgtatcataaataacactatacacttttctatgcatattataatttatacactacaatatctttcactaaagtattccaatacatttattaaaatatgaaacttcgcacgtatgtgcggatcagaatctagtttagttttaattgaaatcttttagttggtccaaacctggacacaacctcacaccatatacctattgtataacaaacaggcatatgaaaattgaaatgcgtggaggaatatgcataatataaatt

SEQ ID NO: 14197 - DNA, 887 bp, Arabidopsis thaliana landsberg
taaaagcacatgcttgccaaaggtcggggtcggtgaacaaatttgtttacaaggtttgcccatattgaaaccaagaatgaagtttgtttttgaggttttatgtaatcttatgaagctaatctatgcattttatattatgggaagaaaggatgaaggtgccatggccattgacggaaagagagatgattctgcactatttctcttttgaatactttaaagatggcttagtcgtcatccttctgaacacggtaaagcaaaatcaattcatcttatgatccttggtataataatttgacattattcgtgataatttttgtttgcaacttttagatctctgatttagatagcattggagtttcctctaaggacatcatcatacctgaatcaccggatgcagtgaggatggatctcgtaggcggatttgttttacaaaaggttactccacagaggagttacttcaggttagtgatcattgtagtattgcaacatgttagttgtctttggttatgaagcttaaaatacagctcttgtcaaattttgtagaacgataggggatatggatataaagctggacttgatgccaccatctcttatgaattttatatctaggcagctgatcggcaacggtttcagactatataaaaaggtcagacaatctggttttatgattttgtttgttttaatgtcaggtaggtacttgagtgataatatgtttccgtatttgaatgtaacagtcagttgcttccgtagctaaatttgatgaagattacagtagagctttaactgatcctttgtatactaagatacgtcgagctctatattcaactgatgaagcagtcgaggaaaaaccaaagttggaaaccaatgaagtaaatggcgttactctg

SEQ ID NO: 14198 - DNA, 894 bp, Arabidopsis thaliana landsberg
aaaataagtttcaaaaaaatattttaagatataatttttatataaagggtttatttttaaatatatggtgatgaaataaacttttagaaaacttataaccccctaatttgtatgtacagtttttttttgcaacaaatatattagattgactcaaacaagccaatattgagaagtattattcacatagatgataaattgtggagtataaaaacttttcgtccaagattatccgtgtttgcatttgcgttttaagaaatcaaaattaaagaaaatgaatcaaattctcccttattactctgaatttgaatctcttccagatatgtagagaaatcaaaattaaagaaaatgaatcaaattctccattattgctcttcgagatatgtagagaaagtttatcattcttgcagagaagacgccatcttcaccatatctaagttgtctgtatgtaaaactatttttcgcttatcttggccgatcataaatttcatcaccgaaactactgtttcacctctacatgtagtgatgttaagcttcttcgaacatttgcagttccatatcatgcgttccatcggttggataagcacaaaaccatcctaatccaacgaaacagtattttctttccaaaaaccatcaatataacactgatatccgaaatcattttctcttatcggtttaactctgggatgataatgaatatcaacagccattgaggctagatttgcttctaagaactatatatatcggagctaactgccaaactttgccttcatatacagttttttttaaagtaaaaaaattatagaccgtaatttatgaacataactataaaaatagtattttatttgctttataatcgaggttttattcgaatgtttcacttgcatgtactacatg

SEQ ID NO: 14199 - DNA, 721 bp, Arabidopsis thaliana landsberg
tgagagtaaagtagttgtttatccgctttctgccttcaggttcacaaccaatccgaaacaaacgctttggcaactccacatcacccattgaacagataccctggaattcaaatggacaatcatcactattatgcagattataaattcaccaattcgcaatatagaacgcacataatacaacatgaggcatgaatatgtggtacacaacacaaactttgtatttctcagcttccaattaggtacaaactccaaaaattaaactcataaacaaaggagctaactcaaaaactgccttatgcattgtactcttgcgggcatcaacaccagaaacacaagtgagtaaacaatctacaaaattaggaataacttggcaaatacagacaccgatttccgagtatttgagatacattcatataaaaaaaaaacaattgattcgggtaaacgtacaacagtacattgcatacctccaaatgttgagactgaaaatcgatgtagaccttcgccgaccctaattggtaatgaaattcactggtagtacggacgactacccagatagaaccagagacggtcccttatttgaacccaaagggatgtaatctctatccacgtatcaacccccaaatgaaaacagagcaaacaatagcttcggcggaaattggatgtgaatataggcggcgacaccaatcgcagaatatgtgtggggccaattcatcaaatctcg

SEQ ID NO: 14200 - DNA, 798 bp, Arabidopsis thaliana landsberg
cgtagctgctcatattcagacagagaactgagacaagcaacaaaagcatattcaagaaaatttattgaagacccatatagactattcacgaaaaatttcacctttgaaagacagctaacaagatttaacctttaagaccaagacacatggttacagggaaccaaagtttcaacatttcaaaactaaaactaacaagaaattacataatttaagaacatgaagagttaaagaacagatttttaccatgttctcagaagaaatatcaactctctgtagaaccttgaagaagctctctctcttccgttcttctttgcacatatcattgtcactgtttctagccatctttctcgctttttccttcaacttcctagtatctctccacacactctctactctctcactcactctcgctggttatgagagtttgagagatactgaaatttcaaaatttggggtttaattgcaaaagaaagtactaatttttgttgttttgttttcctgataatatttacaaaaaaagatgtgtatttaagtgtagtgtcagcaaaagcagagagagtcgtctgcttacatcatctatttcaccaaaaaggtttagaccttcaaatttgtttttcttgtgtctggctcttctcgctctgttttgatttttgtaatttatatactttcttttagatcaaatcttttgtctactaatatatccttcctatataaatttgatggacacataattttagttaggatctctatcaatccaaaatcactagtataaagctgaatcttattttggttttggtt

SEQ ID NO: 14201 - DNA, 727 bp, Arabidopsis thaliana landsberg
ttttatttctcatcttaagcttatgagctgtacacgagatttagagattagtagtcttcaactagaatcatctgagataaagattgatatgacgtgcattcaaagcaacacaagttctctgttgcgcaatccaataatttcttgagtctttctgatgtgtatgtataagattgtaaatgcctagggagtttacatggctgatctttgctccaagtcttagatatattgatgttgaatgttctgactagctctagaagatataataagtaaagagaaggctagtttaagtgaagaatcagggatttttcttacgcttacaaattcctgttaatgaagtgtttatagtttcattactcagttttgtttgtttaattcttttcagattggataaaatgtttgttacaaacagtatatgcttcggcactttttattttaaacagatttgtgtgtttgaatgtggtctgtctctactctgttactactatataccaatatatatggaattaaccttcgaatcttggttaacaagtaaatgtacccgtcgtcgctaatggaagacaaagacttccctcgaaactaattccccagcttaattaggtcttctatacaatccacaacaaattgagaaatgtgatggcatagtgtaactcatagtgtgatgattgctcatattgtttcactacaacgtgtgtgttccgtggcgaaggagaaaactatctaacacagt

SEQ ID NO: 14202 - DNA, 1198 bp, Arabidopsis thaliana landsberg
tatgtaacattgctatgacagaaatggataaatacctcatcgggagtttgattgggtttgatcctaatttcatcgcagagagacctaaaagctgacatttgttgtccaactttgtcggaatatgcttgcatcatcgtacggagctcaacgtccctcttaatccggaagtacacacatatgtcatcctattttattatatttacaaaaatttaacatgttaatctatacgcatgttaactcagcttaattttagattggttaaaattaaaaatattatcatctttgaggttgtcgaaagtattcacttatagaaaatatgtattattctgtcaacgatttaaccaacagaaaaaaacctagaaacctagcacttagaatcaatgaattctttgctgttttgcataatatacaaatacttgtgtatggaaaatttatcgctttcacaatagcataacaagaaagaggtctttttagaagaaaatttaactgctaataacattgagattattacaagtacctgacttttgattttgatggtgatatgtgacggcggaatcaacggttttttgtcagctgccgacatcttcacacttcactttctaaggtgacggttggatagttcttaactgattacttacatgcaatatttatctatatatacaacaaacgtaagcacatacagtatataagtgacgatatagatacagatatgggtcatatcattaaattatgattaacactaattaaagttggatatgaattttgaatcatacccattaaattttaaaccttttagttttctgttcccatttatttccctctcgtgggaattaaagttgatcgttttgatcatcgcaaacttttatgcaccctttccgtttttttctttctcactttgaccaaaagaaacgatttgaaacgagactaatcatttttgtattcagatttagaggatcacagaagggtctccagtaatctattaagggcttagctatattccagtatgggcctagtgaaagcccatcaagatccaacttcagtgtgtcatgtttttgttttgtataataagcttgtgtaaaagcaattatgatatatcaagttcttgttcgttttcattaatgaaacttgtttgatttactaaggaggaaaatattaaaaaggagcccaagaatatttaattttaaaaaatcaaggaaaa

SEQ ID NO: 14203 - DNA, 1066 bp, Arabidopsis thaliana landsberg
tcctataattgacggatttgcgtcggtgataaatacaggacaatatactacaagtgaaatcatagaattaacaatcaaaatataattatccaatcttaaacgctaaacagaaaaaaatattaacgaaacaaatacaacttaaaatttaaacttttttaaacgcacctttgatttttttataagaagcttaaacattctaaatattttaactttattctacaggtgaaattctataattgattggtttgagtcataataatatgggactgtatattaagaatgaaataatagaaataacaattaaaatataattatacaatcttaaacaaaaacaaaacagataatattaacaaaaagtatgatttgaaatttaattgtttagaaaacacatatcgattattttataagaaacttacattgttaacatttaaaatttatgttatggatgaaatcttaaaattgataaatttggatcaatattaataatcaaaatacaatattcgtggggaagactttgtgtatgagttggcgtcaatcttatcgtgtagaagtgtagtgtgcaagtgtaacgaatgagaaaactttaggtctaaccaaggatttcaactgatttaaattttaacatttttgaataactagttgtcaatattagttagtttaataatcataacattttcttgaatctgaatttttcttctttcgtataattctgcattgtttttaggcggagaatataattgcaaaacgatttagaatgcgtatttttattattttctttctaaagaccctataaatagaaacaccttcatccttttggttatagatcaacatagcctctcagttcaatcacctgtctctctctcctcaactaacatagggcagttctctctatctatgtttgttttatttacatctatgtttcagagctctaatatctgatctaaatcattgccaaagcataatgcgcatatgtgcttaaaaatgtagagcatcctatatcagaaaatgttacttggtggatattagctttatctgcttcttggatccaccaaaacgaaactcgatc

SEQ ID NO: 14204 - DNA, 431 bp, Arabidopsis thaliana landsberg
cttctccttgctacaatgtccttgtggtgctttaacagtaactcattcatttgtgcatgttgatgcaaaagctgaactatcctctgtttcaaaatcagaaaacaatagtaatgtcacgtctcttaggcatttcatcaaacactttgtatgcacaaaaacatacctcgtctctctctttgatcacatctcgaagatgatccatgttttctcctttaacgcgtttccgacgagctcgtacacgcatccaccaccaaatcgcaatggcaagaactggataaaatgatcggatagtctttgagaaccaggtcaacaaattcttcaacttggagtataaacgtacaagaagaggctcccaccaatcgtggaggacatcaacttcacgattcaatggtttccccagtaatttcccatctgaatcgcatgggtggaga

SEQ ID NO: 14205 - DNA, 894 bp, Arabidopsis thaliana landsberg
acatgtataataacgaataacatgataagtatcaaaatgagggaaataaccaaactagtatcaaaaaatattttgatacttgatacttgacttcgacttataagtaataaaattaacccatttgttatccgacttacctatagttagtatttcaattttcaaggcaagtacggtcaagtaacgagtaattgcagagtaaagagtaattatgtgcaggcctagatattataggcccatgtttattactgttcaattgtggaccaatttcgtttgggctttttctccatgcatacacacattttgggattagttggatcgttgagggtatatttatttctcggccatcataaactggggcttgatttaggtttttaattctaatatgataaaatatgataatcatcccaaattcttttcaacacacaaaaagatatatatattttttgttctttttaacacacaaaagagataaatatcaagacagtttgtgaaaatttgaaaatcgatattgaattctttgcacacacaaaaaaacatagctagttcttttctctttgtgtgtcgccaattgtttttgttgttaaaaacaaattgtaactgtcccaaaaactaaagaaaaagtccctgaacgagtctcaatgtaagccgcaagtaaatggtcacccactggcctcactgctgtcactggcttgtacatgtaacctgtaggtaggtaagacatttttgtcaaaaaaaaacattctagaaaaaattgagtgacgtaaaaaaaattctattattatttcatttgtatctggctatctgcttttatctaaacatttttatctggttttttcatttgtattttaaaaacattattatttcctcttcttggttctatttgagcattttttt

SEQ ID NO: 14206 - DNA, 874 bp, Arabidopsis thaliana landsberg
ataggtcactcaactgctttgagtttgttggtcctagtagatcgaagcgggtatggcgattctctgatcttgttgcttgactcacacactatacgtctttccttacacatctttcctgctaaatgatttgaatgacatcaatatataagttagaaacaaatttcataaaaccatgatcatgaaaccataattaaactatccctttatcatttcattaacgagattagtggaatcaaatattttattcagactcaaagatcataccacaaacgattactattcgttgaatcgtgtatatatagagtaaccgataaccatatatttctaatcaaacctacaaagcgctataaacgattaacatgttgacccaatcatcatcatcgagaaggcccgatgcatataattgaaagaaatggacaaaactagatcacgaggtatctctagtgtgcatctgatcactaaatcatggtttaaaatatttttccttcaatacatgagagcgaaagttattgccaaaatcgcaagatttttaggtctttatgtatagcaaagtttttggctactctttagaagagacgctctaaaattttaccagatcaatgagattaatatgaagttgatatgagaaactgagaaaaaaaatccaaccaacgaccgaacataatattggagaaaatatataccttagcttggctcgattttgtgcccctaacttggctagctagatcaatacttaaattttaaataagtatgcaaacgatggaatttggtctcaagattcaagatttgatgttgagtgcacatttgtgtgaattaaaaggcaaattataagctacttgtggtatctcattcgaccaaaatggcaaaatacccc

SEQ ID NO: 14207 - DNA, 959 bp, Arabidopsis thaliana landsberg
gccgtaacatgttatataagcaaaaagtagtaaaatttcgaaatcaagacaagaagacacagaaatatttagtacttgctctggggttttttaagacccataatgcaagaaacaaagaccaaacatgtgatcaactaaaaacgtaccttagattgaagaaaaacacgcagaaatgtataggaaggagaggaatgaaacgaagattgtaagaaagagtagagaatgtgtttagacctttgctttggctctgtttttatagccaaaacttcaaaacccattacgcaagaaacaaaaaaatcagacctgtgatccactaaaaaagtagttttgaaatgtgtaggaaagagagaaatgaaacgaggatttgagtaatctgacgatgtgtttagtactcgctttgctttctaggcaaaatcggcaaagcattgtgttcacgtttctctaatttgctaattgaattaaaggttagttggaactaggtagatttacttacaaaaataagaatcaaccttcccattaaagtatctacacaaaacaatttaacgttgaaaaaccgaaaagaaacagaacaagaagaatgtcaaagcataacaaaaactcatcatgtacttgttataatatatatttttttttttattattattcgtattggttttaggctaaaatgattatctcggatgttattacaaaacatcaactgcttttattatcacgaatattattattatatacgttggttaatcacaatttattgatatgcatgcaagtgcaatacaaactgatgtacataagttaccactcttaaaaaaaaaaaaaaaaaaaaagtttccactctttgcatgccatatatgggaaggatcatagtttgaatttacatcgtcaagaaatgccaaaactacgaaaagttgttatataattaaacactctttgaaaacgaaaaaatgattaacaaaaaggtt

SEQ ID NO: 14208 - DNA, 570 bp, Arabidopsis thaliana landsberg
ttttttatttatttatttataaagtctctgtttttaaagcttacggctacaatgagatttgctactctgttttcggttttgcttcttcttcttcgattcggtttaatcgtggaatcgatcatcgtcccagttgatttcttggctctgcaagcgattcgtaaatcactcgatgatttgccaggttccaatttcttcgattcatgggatttcacctctgatccttgtaacttcgccggagtttactgtgacggtgataaagtaaccgcgcttaacctcggtgatccaagagccggttcacccggtttatctggtcggattgacccggctattggaaaactctctgctttaacggagctctctatcgtcccgggtcggatcatgggttcgttaccgcatacaatctcacagtcaaagaatcttcgatttctcgcaatcagtcggaatttcatctccggtgagattccagcgagtctaagcgagcttcggggactcaaaacgcttgatctgagctataatcagctaaccgggtcgatccctccgtcaatcggatccttaccggagctatccgat

SEQ ID NO: 14209 - DNA, 608 bp, Arabidopsis thaliana landsberg
tccttatgaaattcttacttaattgttgaaaatatttagggttgtcttacttaattgttgaaaagcttcctaaataatatgtcttaaaacaatttatgaactagattcatcattgtatcaacaattaatgttattattggcaatgtgtaaagtgtgtgtataaattgtccacaaaacttgttttgatgctattttagggtatttctctttttcttttccattatatgtgtataaaatccgtaaaaaaaactgaaaaatggtatataaatattttgtaacatgcaactgtatctataaatgtagcaattaaatcatataaggttaaacaacttaattataaaaaaaaaatgaagaaacctcttgatgaagataattaaaggtttgtacagcccaaaccaatttctgctctagtttggatgtaactcatattccaacgttggttagattaacgatcttgtaacaaatttttgcaatgtattgattctaaactgggcctttaaaaaggcttatgtatctcttctttctttttcaatttgaatacgaaaactttttagccaaaaaaaaagaaaagacgaggcttaagattttattaaaaaaacattttacac

SEQ ID NO: 14210 - DNA, 757 bp, Arabidopsis thaliana landsberg
caaaagtaatactacaggaaaaacaaataatttaattagaagtttagtttttggatcgttgacatggacgtatgtacgtagctcaagcacaatggctgcactatatctaaatcattacgaatctaaactgtcggccatgcctcggaatctaaagccggtcgtaatctataacccattacattaaaatctctgagataagcctaagtccaacgattcttaattgttttactgctatgggatttgagaagattggggcctggtaagggagatcaaagataccgcagccttctgggcagatcctaaaggtactactgtatttgttgaaagattaagaacatagaagaatcagaagcattgaagtagaagaatctcacgagaagaggaaaaagcaaaaccaacgtggtattggtccagtagtaaatctttgagatagaggtgatggattcgacgcctgttggaagggattttttctctaaatgacatgaatttaacttcatgtagatctcatctctaaaaaatataggacattcgaacttaaattttcagatattcaaaaaaaaaataatagaaaaaagaggaacaaacaaaattaacgacaaatggtgatgtcatgactttggtcctgtttgtttacatgtcgatagcgacagaaatcagcgaccgggaccaaaagttgttcggttacttgtcgctagaattaagtgtatgtgatcacttttctgcaaatcaaggttaagcttttatgactaaatcacac

SEQ ID NO: 14211 - DNA, 703 bp, Arabidopsis thaliana landsberg
atcatcttgaagtagccagcacgatgatgaagaccacggcgatgacgaagagtatgtcgatagtagtagtagtattggtgattgtaacgacgacgacggtggttgtctcgttgcaaccgctggttcaagataaacggtgtcgttttcttgatgtagacgagttggtgcggtgattcgtaaccgttgagataagcttccgttttttgtgttgatgatactcttgtttcttgattcgaagatgatgatgatggtgagatgaggaagacgagagtgagaataagagagacgatgaagctttttagaagactctgtttcatcaaaaccaaatcttccattgggattgaaagagagtatagggttttggctgagagtaagagagagcgtatagataaaacaaaagctcagaacgaggagggaattagaattatataattcctaattagtgataagtaagatcattaatgaaattatgaatttgttttttaaattttcgtcaatgttgtgttaaatatgaatatagttttatattgtagtcgaaagaaagtgattaaacattctaaggcacatgttaattatttttgaatgcagccaatataaaaaactcatcactacttcattagaaaggagtaggaggaacatcgatggtggttccagccataatctgacccttaccaattagacgccaatgcctatcgacaggtcg

SEQ ID NO: 14212 - DNA, 449 bp, Arabidopsis thaliana landsberg
ccacactaacacaactggccactagactcacgtagattatcatatccataacttctgagttattttgcttctttaggactttaaggaaggctagctgttgtagggataagactagaccataaccagcagacgcagcaacggtgcatatgaaacctttgacatactctccttttgtaacttttgtggaatctgactcttcattattgaatgcaagtagggtggaagatacagttaggaggaaaagagaattcaaaatgataggagtaagtttttgtgagttaagaaaataagagaagaaagcattgaaggctaactgagatgcacagatcagggaatatgtagaaacgggtaagtaaagaagtccaatggagtacagatagcaatctgctcctacaagtagtccaagcactacgtaaaccaatacacggttcctagttgagggtcttttt

SEQ ID NO: 14213 - DNA, 361 bp, Arabidopsis thaliana landsberg
tcccgttgtccgatcagttgactttattggtcaacagaaggaaccacctccagttttccgttactgttcagatgacgcaagcttggacattgtcttccctgattggtccttttggggctggtaagtagcccaataagatgataaaaggcttattgttgttactgatttgttaatatttgggcttctaatgggccagggctgaagtgaacgtaaaaccatgggggaaatcgttggaggcaataaaagaagggaaccatatgacgcaatggaaggaccgcgtggcgtacgcttattggagaggtaatccttatgttgatcctggaagaggagatcttctcaagtgtaatgttacagaacatga

SEQ ID NO: 14214 - DNA, 581 bp, Arabidopsis thaliana landsberg
aaggttctatctgaggtatattttgaacccaggttgtgagattacgtttttccgtacacttaactaacaacaaactttttacttcatatgaatttatgtaggttctaatctgagagttctaatcttgattatgtccataacaggctggaacttatgtgaaagaggatgtatggcacgcgctgattgttgtaataacaaatgcccctgatctccatgggtacactgtcagggctttgtatagagcattacatacatcttttgaacaggtagacatttctttggttagacatttcctaaatttgaatatcttgtaacttaggagtaagagggtcattatcatgtttgggcaggaaactcttgtgcgcgttgcaatatggtgcataggagaatatgctgatctgttggttaacaatgctggaatgcttgacttagaagatccaataacggtaagtactatcatcctgcactcagggtttattgttgtgactggtactggaggtgcaatttggggatctctttcttaaatttgcttttttgggcttggaaaaatatttctgcttaacttgatttatgtgggggat

SEQ ID NO: 14215 - DNA, 629 bp, Arabidopsis thaliana landsberg
catttttatcataattttttattattatcctctaataaaatcttatttttatttctaatttgatttttgcgaattggattctaacaataatccttcacaaaaaattagttattttttatgtctctttgggatgtgttattttagagttttattatttgtgacctgagtcaaatgtattaataaagctatgtgtgtttattattaatggtatttgccgcctatgtgtgtttattattaataaagctatgtgtgtttattattaaccggtgatatatagcgtgttcaattttaggatatcaccactccacccccgtcaacccagtctcgctctaacggaagattatcttctaactatgatgttatcgtttattgtttatattcatctttcgcgtttgtatgacgtggtgtgccctgcaagtgtgtatacgtaccatatgtgatcattactttttacgttttttttagtttcaccagggtggcggcgcaatatcttcgaagatttgcggaatatttaatgcttgttatcttgtggaaggaggctaccgattatcagtttgtataggggcaattatgtcatatttaattggcaataaaatttccacctaaataacaaaatgatatgtatagat

SEQ ID NO: 14216 - DNA, 1023 bp, Arabidopsis thaliana landsberg
atttgtattttagtgttgaataatgaattttgagttttctaaataaatatgagattgaaaagacaagtttaaggtcaactaaactaattgatgccctctcaagttggacgaagtttagtttaacgaggtttatttttttacgctaatattactacaatgacaattattttatatttttttcgtacgtcaaattaggattcgttacccgttaataccgacagacttatgttttaaaatgaaatattgttgtttgaccatttcctcacttgaggttttcaaagaacatcatcgatccatgagactaacattttggcacgacgtattcaaatttagagatggacaagtcccgctgtaaagggaaggattaaaaaaataaatttttaaagtatatttgataaaaatttgtagtggttcttttcatttatatttcgtggtattttattatataaagttaaaaattcgcataatcgtcacacggtaacaaaataactaaagctgttattaaagaaacatgatcgtgacataaattaaatactatatattaaaatcagttaattttgaaacattaaacattatataataaaatttatattaattatataaaatttcatttttaatatgtctttttcaaaagcaatagtaattgtaatttgtccatctttttcagtatgtagaagccggggacacaaatccacaatttcatctcattgttactacatgttcttttaactgatttttgtcccccggttttaattccattttcttttgattttagaactcccaaattctaactatgatcttttcatcttggttgatgtttatattttgtttgattcttgtcttcgaatagggtttattaaaatcattcaccagttttttaattcgttccttctgttttagtctcgagatgattttctgttttagtctcgagatgattttccctagttattacactttaactgacataaacctgtcacaatagctaaagacactgtcttattcataccacaataccacatgaat

SEQ ID NO: 14217 - DNA, 710 bp, Arabidopsis thaliana landsberg
atcccaggctacccgagtaaattcctccaactataggccatacaacggttggatgtacggagctcaaatggtcgctttcaacatgcaggtttgcagtttatctattctcggtattttcaaaacatctgactaaatctcaacgcactgatacatctttgcgtctttgatattcagggctatggaagagctctttggatgatgcatggtatgtttaggggaaatggtggatgcgggtacgtgaaaaaaccggactttatgatgaacaataatctcagtggagaagtgttcaacccgaaagcgaagttacccataaagaaaactctaaaagtgaaagtatacatgggcaaaggatgggactctggtttccagcgaacatgtttcaacacttggtcctctcctaacttctacacaagggtaagcaacgtagatggttctgtttacatagaccatagttgattctctactctggctctaattcatgtggattgtactattgtgtgaataaaagcaggtggggataacaggagtaagaggtgataaggtaatgaagaaaacaaagaaagaacaaaagacatgggagccattctggaacgaggagtttgagtttcagctaacagtaccggagctggcgttgctaagaatagaagttcacgactacaacatgccagagaaggacgatttcttgggtcagacatgtttgcctgtgtcag

SEQ ID NO: 14218 - DNA, 1064 bp, Arabidopsis thaliana landsberg
gctttgtatgaagcttttggcttaaccgttatcgaagccatgaactgtggactaccaacgttcgccacaaaccaaggtggaccagccgagataatcgttgatggtgtctctggtttccacattgatcccaacaatggtgatgaatctgttacaaaaattggagatttcttcagcaaatgccgttcagatggtttgtattgggataatatctctaagggtggtctcaaacgcatctatgagtggtaagtaaagataatcttgaaacaaaaatcttatcagttatcagattacattgcttatttgtggattttgtattgtctgtgcagttacacatggaagatttatgcagagaagttgcttaaaatgggaagcctttatggattttggagacaggtgaacgaagatcaaaagaaagcgaagaagcgatatattgaaatgctttacaatctccagttcaaacaattggtgagttttgttatctgaagattactattgatgaaagctacaaaactaacctttacatccttatggtttcttgtagaccaagaaagtgacaatcccggaagataaacctctgcctctgagactggcttcactccgtaaccttcttcccaaaaaaacaacaaatcttggagcaggaagtaagcaaaaggaagttacagaaacggaaaagacgaaacagaaaagtaaagatggtcaagaacaacatgatgtaaaggtcggagaaagagaggtaagagaaggcttgcttgcagctgacgcatcagagagagtgaagaaagttttagaatcttcggaagagaaacagaagctagagaagatgaagattgcgtatggacaacaacatagccaaggagcttcgccggttcgaaacttgttttggtcagtcgttgtttgtctctatatctgctacattttgaagcagaggttctttggtgctaactcggctcaagagtattaaaaagtttgaccttggatcgaggaaaagtgaaaaactgtaaaatatgtaatgactaatgaatgaaactaccatcgatgtaaaattaactaataaaatcaaattg

SEQ ID NO: 14219 - DNA, 1845 bp, Arabidopsis thaliana landsberg
tcttctctctttcccctttatatatttgtaccacatatactttttcaaccaaaactcttcaacatttctctgtgactacttcatttcctctggccaacagttaaaaaaagttctgattcgattcaagccaagatccacgtataaagatatgttcatgcgtagaggtttggtatacaacaatatatacatataatagtttgtcgttatgcctggctccctgtatgccacgagtggataccgattttggttttaaaatcggctgccggtggcgtacaaggagtcaagcatgaccagaagcatatggtaactcaattgcatctacaactaaatatgaaatatctagttatgtatatggtttgtgttatataagatgttttcttcgaattttgatttttgtgttccatttgaataagcaaacagaaataaaaccaagttttgtagttttttgctttctttctgatttggtccagtgctttgattcaggttttgagttgattcttttaaattcatattgatttatatttgagttatttttttcttcttgtatttgatattttatagaagaatcgtcttcattttgttttgtctttcggacagtggttattaaaaccattggtcttagggtaatcatcttgtctatgttctgtagttttaccgtaaagttcttgaatatttgaacttttgttctaataattgtaccattttatttgaattatatgtggcggtcaaaattaaagtcttagacgaagaataaagtttgagagatttttcggtgataaacagtaaacgtaccaatcaatcagagtaattatcgatttcatattttcaggatttaggcgttaatcaagtctatatcacttagaaaccctccaatcacggaacactatgaattgatagtgaacatacccactgcgataattaactactgagtcgtcatctctttgatctatacaagggaaactatttattgtataattttatgttgattcttactgaaattttttgaaaattattaatcaggtctcttagggaatggtttatttttgagaaatatttgacatatttagataattagtaggacttgactttactatttaaatctatgctagagagagctagattagatatgttgtaatctgtaacatgcagctcgactcaacaatattcgtcttgagttttcagatagtttgaagctcttacagatacagattggtacagagatacatgcctgatgcctagcgactacaagtattaagggacattattaattttgaccttgcagggaataaacagtattatagtacccgataactaacctgagttcctggccagaggtactcgagccggctatctttcatatcgagttcgactagattttccgcccgaaatttaagaggaagacacttgcttgggtatgcatcccaatggagtaaccttaggcgaggtggaaactccatgtcctctggtatatccattctattatacccatcatgttttgtcttgtaaacacttaggaatctaagattgcacattcttctaagagctttattgcttatactcacttcattaattcctgatgtatcaaataatatgccagacacagctccggtacccttaaacaaatttagtatataaataacttgttagctaaataggtaagatttgtttgtctttcacttggagtttctaagcgtaaggagcaaagaaactaaccgaaataaaaaataaaataaaaatcacttactatatcattttcaaggacatgacagatttcttgagcatcaattaagatccgacgtttccaaggctcttctctttgattggcttgtctacccactaggtaag

SEQ ID NO: 14220 - DNA, 2241 bp, Arabidopsis thaliana landsberg
ttaaaattgcttggatcaggttccgaggatattagagagattgcccgcatcatggttttagtgaggttcagaggagttgattggcattatcagatggctttggatgcagctagtaatgggaatttcatgtgaagatatccagaagatgcaacaattttgattgatagcttagcttccagcattagtaccaaaagcgttgacattgcaaggaaaacgcaagttcaatatgttgcacaggttgacagtttagccacttcagagaagatggatcaacagagatacatgagtttcaatcaacaatctacacatcaaaaaccggctcaggaaactacaagcttcattcagaatcatgcttcttctacccaagcccaccctccacccgacaccactaggacgattcaatctatgctcgaacagattctcaaaggtcaagagaagcaaacaacagattttgatcacaaactggttgcattatccgacgatatgaatgggaagattcaaatattgaacaatatgatcgagcaattgactacaaacaaagaagatgttcgtgctattgagttaaggagtggaaaacagccaaatccagtgcttcaacgagagcttcctgcagccaaaatcgtgaatttggaagaaaatgatgttgcagtttttacagaccagacaccagtgtcgaccgacactactgggtgtcgatcgacaccagccacggtagacactacagaacgcgacagtgtcgaccgacaccaacagggtgtcgatcgacaccaacccagtccaaacctgcgaattctccaaaacctgatttcagctgcagcaaaggtaacaaaacccaaggttccttttcccaagagtcctaagaagtccaaataggagcttgatgatgatgctagatgcaaagctatgatggataagttgattgtagagatgccacttatagatgatgtgaagtcttctcctatgatcagacagtttgtgaagaggatggttactaaggatatgcttactgagaaagctgtgatgacgatgtctacacaggttaacgacattattcagaacaagattctaccacagaaacttccagatccaggtagctttgttctcaattgtggtatctttacgagagttttgattaatgcttgtgcgatcttggttctagtgtcaacttgatgccacgttcagttgcgcttaggcttggtttgacaaatttagaacctacgcaaatcactcttgttcttgtcgatcgatctgtccgtagacccgatggtatcctatgcgatgtccctgtataagtcggtaccagctacattcctacagattttgtggttttatcttatgagaaagaacctaaagatcctctaatcttaggaagacctttcttagccacaactggtgccattattgatgtaaggaagggcaacataggattgaatgtaagtgatcttagaatgcagtttgacatgaataaggtggttaagaagcctaccattgatgggcagactttctatgtggatactatctcttctctggctgacgaatttctcatgaagatgacacctgctgatccgttgaagcatgctctaattccctcaattgacaaacttcccaacaggtatagtaagctgctggataggactgagcatgtgatgcaaatggttgctcaagaggagttaattggcacatcttcccaagcagcaacaattagcgattggagcccagaaaaaactcctaaaattgatctaaaaccgcttccagcagggctaaggtacgcatttcttgttgaaaactctacttaccctgtcattgttaatgcttctttaaacaaggcagagctcactttattgctaagtaagctgcgcaagtatcgcaaagctcttggctattctcttgatgatattacaggtatctctctagacttgtgtatgcataggattcacctcaaggatgagtctaagcccttagttgagcatcagaggagactaaacccgaatctcaatgatgctgttaagaaggagatcatgaaattgttggaagctggtatcatctatcctatttcagatagtgattgggttagtccagtgcatatggttcctaagaaaggaggtgttacagtggttaagaatgacaagaatgagctgattcctacacgaactgttaccgcccacatgatgtgtattgactacaggaagctgaacgctgcaacaaggaaggatcattttcctctaccattcattgatgcac

SEQ ID NO: 14221 - DNA, 849 bp, Arabidopsis thaliana landsberg
ttttataaccatttttttcttaataaattaaatttgaatatatctttgcaattatacctcaaatattcctaattcaattttgaattttacaaataaaaaaaaatcttatgtttaaatttctcaggctttctaatttgtatttctttaacttgggaatataattaaattcaaaggttatgccaaagacattagagcacctctattgatgctaaatagggtgtctttctttattttataatagtagattaaagacactcatcgaaaaagagaaacaaaaatgtcgctagcaagacacttaagacctctattgaaggcattcttaaaataaaatgtcatatttttattggttttaatttttttaagtttaatatttaataaataaaattaattaaagatatctttgacgaggttttgtgatgagaatgaatttttgaagtttcaccgggaaaataatagtcatttacaagtacatacgctatttgttagtccgtaaagcttgcgtttgaaaagcatggtcactttcattattttattaaaattgtgttcaaatggttatatttgatttgtttatgtattgtataaactcggtatgatctcatatattcatttgctgttaaaaaatgaatttacatgattacttgactcatctaactagtttagatctatattgaaccactttaccccatatcattatttttagtgaagtgatagttcgtatctttctcggcacacacaaggttcattgttgtatacgaccaccacgaggttgttagtatatttttttttttggagtttctctaagatcttaagattgtctgttaggttctttaacaaaaaaaattatttttt

SEQ ID NO: 14222 - DNA, 1371 bp, Arabidopsis thaliana landsberg
ttgcactgcatatcaatgaattgtgattaaccaacgaatataataatttttatgacactaaaataactttctgtaataatatccgagatagatattttagatataaaaaaattgtaataataaagaaagattataacaagtgatgatgagtttctgatgctttgagattcttctttttctgtttctttggttttcctacgttgcaaattttgagtaaatactttaatcggaatttgattctttttgtttttctgtaaataaatttccttagttccaactaacccttaactcaattagccaactagagagacgtgaacacaaagccattgccgattttgcttgtaaagcaaatcgagtagtactaaacacatcgtcagattactcacatcctcgttgcatttctctctttcctacacatttcgtgtcaatggtattatttagtggatcctaggtctgatctttgcttcttgcgtaacacgtcatgaagttgtgcctataaaataacagagcaagtactaaacatatgcacatatcctacgcttactttcaatcttcgtttcgatttcgtttcgtttcttcaatcaaaggaacgtttgttatttgatctttgaagaaacagagcaaatattaaacacatccctcgttccatctttcttatacattttttcttcaatcaaaggtaccatattttaagttgatatcctgatttttcaaattttgctgctttttgatttcagtcttgatcattttttatttctcgaatgtgattctttgaaatcgaacacgttttcgtaattcttgtgatctgcaaagagatttttctgatggcatttggataatgtctgaaatatggacaaacttttgttttgtgtaatgctttactctcacgttagtccggttttgattattgtttcagttttgatgatcttgtatttgatcctaagataatcatttttctcttgttggtatgattttagatgagaccagaaactctcgcggttattcagaaacagctcacagaaatgaaagcgtctcagagaaatatgaccgaccacgaagtaatacgagccatgaacgagttcatgttctgtttcgaaaactgttacacagagaatgaaactgtgaatcatatagttcagaagtttccttcttacgtacccaagagtgtaagaagtttctttcagaagtccatagccttgatcgatgaagagtcaagagaggcgtatcttacggatgctgaagaatgtgctagtgtaagaaggagtcaggctcgtgatacttctgaggaagctaagagaagtcaaggtgaggccagtacatctcacatatgtgaacctaactgcaacaaacattaaaattaatactatgatc

SEQ ID NO: 14223 - DNA, 1171 bp, Arabidopsis thaliana landsberg
ctccaaagcatagtccccaatttgcaggttgatcgtgcttattctcacatcaattataactcctgcaatgtttaagaatggcctaccaagaatgagaggatcatgtggttccttatcaagttccatgataacaaaatcagttggaatgtagaaatttccaactctaacatgcacattctccgccaatcccactggatatcccacagaaagaggcatcaaattaattgatgtgatgcctaggcgctttgacatagaaagaggcatcaaattaactccagctcataaatcagaaagaaatctctcaaacatagactttccaatccggcaaggtaaaacaaaacttcctggatcaccgagttcctcgggaatagtagctggagggatggcactacatgtactgaccatctctttcccagctaacacctctactacattagtgagctaagattccttctgttgtctctcagactcctccagctaagcatactcttctcctttggacatcaacttaaccccttgtcttgttggacaagatatctttcaagtaatttctgtaggttggaacatggagaaccaattgtaagaaagggagtctgacatacaactgtttcatgatctgtcttcctcaaagcgtgcatactctttcttcttttaaatctgtcttgcacggcctggaaatggcaacttagggggatatagggtggcggctccacaaataaaagttcatcatcctctacaatcatttcctccacaattgtctcaacaacgacaacattagtttccacctgtttggcgaaatcaatctctctaggctcttcctggatcataatagcatagcactgctctttacccatgggttctacttttccagaatgagaaccagctggtcgcagagaggcagaaacaatcagagagacctgactctcaagagtcttgacatgtgaggtactttatacttggcagaatctcgtataattgcttgaactaactcacgaatattgtgctataaccgttgctaaccgccaagttataggggcttatggactagaatcaaacttgaacttaatgctttgatcaatatgtcgttaccatgttcgggctcctagcaaaaagaaaactaggtagcgaggtacagggagattagctggcttccacctactagccattaggg

SEQ ID NO: 14224 - DNA, 803 bp, Arabidopsis thaliana landsberg
agatctaaatctggagagagctaccggcgcagaattatttgacagagagaggacgttagggcttcggtacttttgagaaatttgcctttctgttctgaagacttctaataattctttattgatttatatacagtacacctttggtttgcgtgccgtttatgcacaaaaccaaagcacagcgtgccgttttgtcatcgtgccttgttaatgtgtttgcacttagaaactggagacgtttaacaccaacgtgctttgaattaattcaatgatttcatacgaaacagttgaataaaatggacctaagctaagatagaatcgggttcttcctttttattactccacttatcatttatatatatatttttgcagccattttgtgaaataaatcctgtagttgtgatttatttacaatgactgctactgaactttaatgtttgtttttgataattagaaagaaaatcttcgaattaaatatttgacatttaacaattttttcaaaatctctccacattaactacacgattagttactaaaataaaacttctaaaatatttaatatcatttagttactacaaaagtattatttctgatattgcttttctgcatgactataacaattcgattataatcatcaaaccgtagagatatttgatagcatttaattacaacaaaattaaaaaatatttagacaatggtttataaacatattataaataaaatcaacattaataaagtaaatgagtttttttacaggacgggtttggcaggacattacttaataacaattgtaaacgattaaatat

SEQ ID NO: 14225 - DNA, 736 bp, Arabidopsis thaliana landsberg
ataccagttttattctctttgatactgataagaaaaactaaataatgttgctatctattacatccattgatccatatcctatgaacttgtccaaaaaaaaagaaaaaaagaaagatcatatcctatgaaccaaatgatcattttaaattaattttaattagatttctattaataaaaagaaaaaagaaaaaaaaattatggatatgactttagaaatagtcatttatgttcccagttttcacaataatggatccgattggtaacacatgactctacaaactttttagttgttagttgaaactatgagttttttcgaaatactgtaaagctgtaaaaaaatgaactgtacgagaatactgtacaataaaatggagagtaaaattttttgtaatgattttaataaagtttttgtaaatgataactttcaaaactgtaaactgtataaattgtgacggtttgataatgggttaccattcaaagccaataatttaaaatggattagtggtccattaattgcataatttaaatcaaagatgcaaaatgttagttttttaattcgtaatctttaacggtaatatatgtactatctcaatggttactatttctaaaaacaatagtttgaaaaaaaaagaataatggaaaaggaattcaaaataaataaataactacatgtcacaattcagaccattataacatcgaaccagaccaatatacaaaccggtttggttcaaaccgc

SEQ ID NO: 14226 - DNA, 681 bp, Arabidopsis thaliana landsberg
gggatcatgtgttttttaggctcgtagcctttctgatttctatgaagcctgcaaaggattggaacttgcaaggaattttcaatttcctgttctaagagaggtactaactgtggacaactttgataaatttaattggcaaccgctgcttgtttctgttacttgatgcatttctttacatttgttcacttcagcctccacaatcttttctgacaacaatggaggagtatattaaagaagcaccgcgtgttgtcgatgtcccagcggaaccactggtatgtatgcatatttctcatattagtgatccaatatttttttgcttctttttttctgtgtcttatgtgctaatgaagttttctacattcagcttctaacatataggccggatgatggactgactaccgaagatactgaaccgtcgcatgaagaacgtgaaatgttaccttcagatgatgtcgttgttgtatctgaagaaacagaaccttctcccccgcctcctccttcagcgaacgctcagaacttcattgataccgatgatctattggtgaaaattttatatgatcactttatgactttgattttaattttgattcttcatgcgtttcttatgtctcaatttctctttgatcaattttccccacagggtctgagtactggtgctcctgatacatcattgatccgaga

SEQ ID NO: 14227 - DNA, 1178 bp, Arabidopsis thaliana landsberg
aatttaataaataaatcaacaacaatctaagatatgtgatgatgattgcagccattatcataaatctcatcttttacacggagatctaaagaaaaacaaccaaatccagaaaaatataagatgaaaaacacatttaatgtatcacttcaatcttctcattgttgctattgttgttgtttccttgccatttccaaacaatatctttcaaagaaggcctaagctcacgatcacaaaattgcttatactccattgtatcacctccacttttcttaaactcaaccatatgaaaactatttgtcacttcaaatatctcaacatcaatcgcaagatgtccttttcttccttctctcttatcttccatcttcactcctacatcgctcttcgtcaaattgaatctctcactacttgttgctatctcctcgaatttcgacactatctcttttgcatctttcttcgttgtaaacttcgattctgatctctcttctttctcaaacaaacccgagagatcgaatccttgagacagcgaagagatcaagtcaaacgcgttgtaagacatcggttttacggaaaaagctgcgtggacatcgctgatcagtgagtcgatctgatgactttcgggagatttaggcgtttcgatcttcttgaaacccttttgaaaccaggaattctccatgattttttcaatcttgattcttgaattagggttagggtcaagaatccgagacaacaacttcttgacctcgggaggaaaccaattcggacatttgaattcgcctttcgtgattttccgatacatttccacaagattttgctcgtgaaacggaagaaatccagccaatagcacgtacaacacaaccccgcaagaccaaacatcagctttagctccatcataacctttcttgcctatcacttcaggtgccacgtaagcaggtgttccacatgtcgtgtgaagcaagccatcttgctgcttcgactccctcaatgcgctaaggccaaaatccgatatttttaaatcgccgttttcgtctagaagaagattctccggtttgagatcgcggtggtaaactccgcggatatggcaataatcgattgctccgatcaattgctgggaatattttcgagcaatgccttctttaagcttcctttagagacttttcaaaagctaccgcctttacgta

SEQ ID NO: 14228 - DNA, 625 bp, Arabidopsis thaliana landsberg
  unsure (1)..(625): unsure at all n locations
aatactattcgctctgttttatattataagatgttttagctcttttattttgtttaacaatataagatgtttaggacaaaaaaatcaagtttctatgcaaaaattaaatttatatacttttgtgactatttatattgatcaaactattttttattaaatatttaatgtagaaagtataaaaacaaaaaaactgttaattaatatattaaactttgtgtttttagccaaaacattttatatattgaaacagaagaagtactatattttatattatgatatgcaacgaaagagacaacttgcacgttctagttaaaaatactcatttaatgatagcttgacacgttcttattattaaatcaagatattattattaattttgtggagctgacagcaattattattattattattattttgttataataaaaaaatgttacttaaaaaaatatataaaatttgtttgctttattattccattgtagatatttctttcttttttgtgtgcatcggctatatatatagtatggttcatggcagacttggcagtgatataattatcaaacttcaaataggttgaaatcttatccgtngaacgagtttgaggtttaatactttttggatggat

SEQ ID NO: 14229 - DNA, 849 bp, Arabidopsis thaliana landsberg
attcacccttttttaataagaaaaaggggccccaattttcccccaccaaataagcccaaaccccccaggtttttctttcttatcaaagaccccgttttaattgggcatgaaccaaccctaaacctttttctctgaatcgtttcaattccaattacagtgtcctttgaagtttgaattactatagaaaaccaaagtgaatcaaaatatagactgatgataatcacactttttgacagaacaaagacaatagctttttgagatataaaaagaaagaaagaatcggattcatgaaaaataacgttcataatctcaagtatcaagctatcatggattgtctaataacactaaacacagaaattcaccagcaacttattaggtacacagcaaagaaccccagaaaacaagaaaaaaaaaaagaagcctttttagaacctatagaagaggatatctattgtctttgagacaataagagtattgcacgattcaacattagctgaaaccttgtttgtttatcctcaaacaatggctggagtcttctctgctagtttctgtagcttctcgggacgagaatcttcggttttatcttccccataagctgaaacatgaactccaagagccgcacgacctgatgggtcaagattctgtgaccaagctgcgtcccattccacagcttttgctgtgctacatgccacacttggacctcctggtacagttgctctagcagcactctgctcatttatcagttatatatccgttaaacaaatctgagcaaagatcaagacaattaaagaagaccaagtaaacattcctgtgacttttagaacctaaaggaaaatcttataattgatg

SEQ ID NO: 14230 - DNA, 993 bp, Arabidopsis thaliana landsberg
atccttcgttaccttaacagtaggaagagcatcaatggcggatttggaagcaggtgtagttccgtaacgattaggatcattctcagctagttgctgaatcaactgctcaagacctggaccaaagaagtaatcaccgaaattcccaggcatacgattacctggatccgaaggatgattctcgatcacgaactcaaagtgcgtaccgctagatcgcaaagtctggagatgattctgaagaaacgtaaacggatcaaacgcgtcagactgaggattctgctgagtggaacgagcctgtggttgcatcgaaggaccgaataagctcatgaagtccatgccggaaggagcggcagcggaagagccgaatatgagcgggagcaaggtggagaaaggatcggccatggggaaaaaggaatcagaagagttagggttgaaattgagggattgattagggttagggtcttcgtattcttcaagaaaccctgggttacaaattggacaaaaaggatcagcggatgaggaaattgagattgtgactgtttgattgcactggtagcagaagaacatcttgtcaacctccggtgctgctgcggcggagccagttgaatttacgccggaagacatgacggattctgcgaatttttcagagcgcgagagagagacgacgaaacaaaaaaaacgagaggacgaaggaagaaaagaaccgtcagaggagagagaaaagtaattctcagttatgtcatatgtggccgactccaactcagaaacgatgattacagattttgggctgaagcccatagaaagcccatgtatagtcttaagtacagttaaacttttataaattaatactcgataaattaataatctctataaattaataaattcttccggttccgaattgggatcagtgtaaaaagtgacacaaatcgataaattaataagataataatttttttgaaaatcctatagaaacatatggtcccattaatatcataa

SEQ ID NO: 14231 - DNA, 699 bp, Arabidopsis thaliana landsberg
aaacagcctaaactttataaatacaaactttaagcaaaaatttacagccactagacacatgaaaacacaaatcacatgatgaacctttacatttgcaacgtttcgaaccgacagatgactggatttcatataattctcgagattaacataaaaccaacaaaatcagaactgtatttcattataaattttgtaatacattgaattgatattaatttttagacattttttcaaaatgatttaatttttctacacataaatgacaatagtttcaatttcattattggttggttattgattaatttaataacaaattattacattaatttataagtgaaaataacaaacaaatgttattatagttatactaaaaagaattcgcatacccgcccatcgagcgggtccttatctagttaattaaaaagaaacatagaaagtatatcttttgatgaaatatataaattttatataaaaatagataataaaataaatattgagggtataatactagtatatgtatatatatatcagatgagaaaaaaagggtaaaattgttggcccgtgactaatgggccacgaatgtcagcccatataaaacagcaactagtatcggtcaacgtctataggttgcccctgttctgtcgctcaatccatctttctctcctttgttccatcggtcggtgatttcatcgttacggttta

SEQ ID NO: 14232 - DNA, 772 bp, Arabidopsis thaliana landsberg
aacaacactcgcggtatacgcaagttgggaaactgcgagaatcgagggaataggatggagttgggctggagttatttggctctacaacatcatcttcttttttccattagacataatgaaattcggaatccgttacatactaaccggaaaagctcagagtctctttgacaacatggtacacttagttttgaacagttatgcaaaactcagctggagaatcctcagcaatggaatatacaaccatactcaagctgaccatacttactcactcttggaagtgtcaactcctccatcccaggacttgagaggcgttgggtgggtttaatatcataccgtggtctagtttgttttgttttagttctttttatttgtttttggtgtaattttttttagttttttttttaattgaaattttagttaaatagaaattagcataatttttctactactccgtcttcaattttaattttcttcaactcttttttttctttttaagtgtttccttaagttatatcactaaattgaaaacaatatatatagtatacttaaaacagcatctccagtgataacacaaggaagaaccaaatttggtggtttggtatctcaaatctcacactaaaactgaatttattattattttattattaaatctaaaattattttatattttgataaacattatttatttatttttttaaccctcacaaatcatttattgattatgaatattttatctattttgtaacccacaaaaacaataattattttataa

SEQ ID NO: 14233 - DNA, 605 bp, Arabidopsis thaliana landsberg
aagggtataatgtaaatgaacaacatttgggaacattttgtttgaagtacacaaactaacaaaattaggggcttttatagatttaggtatatttcagcccaaaaatttgagaaaaagcacattcacttgtttctatagagatggacatattttggtagataaaatgacaatttcatcctctttcttcatttcttcttcattcttcgtcgatcttcattcctcattcttcattttttttttccagaaaatttattgatcttcttctaccttttgaacccaataaatccattttagtaaaagaaatctaaaccctagaagatggtgtatagggaacccaatgatccaatcttaaacacatagtaaaatcaattacatatttggggaattcaattgaatcaatctctttaattacatgtttaactcagactggatttttgatatagaaaattacatgtgtattcaatcgaatcaccctctttaatttaaaatcaaattaaaaaatttacatgtttgagaatggtgataatagattaatagagacttgatcctccatggcttttcttctctctcttgatttctaagatcgaaataaagaagcaaagatc

SEQ ID NO: 14234 - DNA, 603 bp, Arabidopsis thaliana landsberg
tttatcaccaaacgctaattcttcttctcacgtttttttctttttcttcttagttttttttatgattggctcgtgtttggttttttcagatatcgttgttgataactgcgcaatttgtaggaatcacatcatggatctctgtaagctatttgaggtatctatactttgttttgaatcatcttgatggattatgcttagttctttgttgtgtgttttgtggttttaggtattgaatgtctagctaatcaagctagtgccactagtgaggaatgcactgttgcttggggtaagtcattgaatactgaactcttttgaatccagatgtggttttagttttgcatatagtcaaacgaaattatatgttatttgttgatctttgacattcattgacttacttatctttgatattaccacaagcactttgagtaatctgatacgacctcaaggaagattataaggccttagtgggccttaacactagttaatcgttttaagcccatattattgtcatcttttacttgttattagtatctctagttcttctgtaatcggtatcgaaaatgatcaagtaaatctagtcaagaactcataataccatagact

SEQ ID NO: 14235 - DNA, 2612 bp, Arabidopsis thaliana landsberg
  unsure (1)..(2612): unsure at all n locations
ggtgttgttgttgtacatagaattagtagattattcctcatttttgttgctttttttttttgcctagttttacctttgatattgcttcgattctctttttatgctcaggttggtatgtgtctagttccgtctaatctctccaatttcattgattctttggtcttctctgattttagttttagatctcagttagaacaaagtctttaaggttgcaatttcagttcctcgcagctccatacagaatactcaaaaaaaattttttatccatttgataatccatatctccaaggctaatgatgatgctctttgtgagatcttgccataatatagtagctacttggtgggttaattaggtgtaaaatagacaaaagcttgatggtatatatgtctgatgctgaattagacaagggaaccagcttccatttcatgaaactcaacactgagactggttaatgactgagaagtgcactcctgaaaccttaacattatcatctagccttcttgcaatgctcaaatcttcaagaactggacaagacacgtcaagcaattgtatagcttcatcattggcatatacgtagacaaaactcacttaggcattgcaatctgcaaattcatctgcaaatttttgcgcaaaattaatacatcgatggggatggactcttgacgctgtcgatcatcactattcactaacaacgaacaagtcattgcttacctgcagaattcattttccacggtcaatttaatttggctggacaaaatacaacgtgttttttctcatgttccctgtacgtaactaaaaagtaagacaaaaggagtgaaatggacattattcaacgtaaagactttttaagtcgttgcgtttaacgtgaaaaacgcctcgtagggtcaagctgtgttggaattatctttgtggagtagagtctattatttttgtatataaagagatgggcatgaaaacatgtcacgtaccatcacaatttccagattttatttttaaactttggcactatcaatattcaagaaaattaaattagcttaagaatgatggaaggcttttggaactcaaagagtatcattcgtattactctctcttttatgttcttattcatctgtcatttctcggacgtgcttgcggctccaactaggaacttgtgtcgtcccgaacaaagggatgcactcctcgcgttcaaaaacgagtttgagattgggaagccttctcctgatcattgtaagatttatggcattgaatctcctcgaaagacggactcatgggggaataacagcgactgttgtaattgggagggagtcacgtgcaatgccaagtccggaaaagtgatcgagctagacctaagctgcagctctctccatggccggtttcattccaacagcagtattcgaaaccttcatttcctaaccactctagacctttcatttaatgattttaaaggtcaaatcacgttatcaattgaaaatctttctcatctcacctatctcgacctttcttataatcatttttcgggtcagattctgaattcaatcggaaacctttctcgtctcacctatctcaacctttttgataatcaattttcgggtcaggctccatcatcaatttgtaatctttctcatctcacttttctagatctttcttataatcggttttttggtcagttcccgtcttctatcggaggtctttctcatctcaccactctcagccttttcagtaacaaattctcgggtcagattccatcttcaattggaaatctttctaatctcaccactctcgacctttctaataacaatttttcgggtcagattctatcgtttattggaaacctttctcaacttacctttctcggcctctttagtaacaatttcgttggtgaaatcccatcttcttttggcaatctaaaccagctgacccgcttatatgttgatgacaataagctcagcggaaactttcccaatgtcctactgaacttgacagggttgtcacttttatcactctccaacaataagttcacaggcacgcttcctcctaatatcacctcactatccaacttgatggattttgatgcaagtgacaacgccttcaccggaacgttcccttcttttctcttcaccattccttctttgacttacattcgtttgaatggtaaccaactcaaaggcactcttgagtttggaaatatatcttcaccatctaacctatatgagttagacattggcaacaacaacttcataggaccaatcccgagttccatttccaaattagtcaaacttttccgacttgacctttcccatttaaacacccaaggcccagttgactttagtatcttctcccatctcaagtcactcctagatctaaacatatcccatttgaacaccaccactaggatcgacttgaactatttcttatcatatttcaaaaggctccttttattggatctctcaggcaaccatgtttcggccacaaacaaaagttcagtttcagatcctccttcgcaattgatacactctttgtacttgtcagggtgcggtaacncaggntttccagagttcgtaagaacccaacacgaattggggtttctaggcatttccaacaacaaaatcaa

SEQ ID NO: 14236 - DNA, 505 bp, Arabidopsis thaliana landsberg
tctacaatcacttatgcctaagcaaatcatcttttatatggttttgaattactctgaagctgcccggatattggggaggaactccaatgcatctactacaaacacaacagcggcggctcgaggcaagtattcttctagcttagatataagccgagagtgtccaggaacatcaataagatgaacaggctttacttttcctttctatcaaacaaagaggcaatatctttcaagtcccttaaaaactttacattcttgaacaaaaccaaagtgaagatctttctttaccttagtgttgttttcattgtgaagcacaaaggtgccttcgttcggttccattgacgttacagcaccctgatgggaagatccatctcgtagctatcacaaatacataaaaaaacgtaaaccaaaccatcttataaataatgacacaacaacattcacctactcagtttcttttagcagcttttctgataactaaaatacattgtctacaaacgagtaaagg

SEQ ID NO: 14237 - DNA, 547 bp, Arabidopsis thaliana landsberg
atagattgatatattaacttctacaaaaacagttttcgtagaaatttggaagctaatttcctatgagaattgatgtaagaacatcgtaggaaattaagtttgttgtaataaactggtagaaaaaggaaaggaaaaagtctcgtaagaatttcactggaaatcgctgtttttctgtagtgtactaagactttgtcctctatattttgggtagccaaaaaggagttgtagagccgttcccatgcgcttatgaaacataggaacgatcttgcgaaggtcatcaccaacatcgtcgcaggcggtgccaccaggttcatcaccgaactcagcagaacaaccatttcttcttctagctcttcccgctactctgatctttcttttgaaaataaaatttcaccttctttttttcttgttgcatagataaaaaattcagagatatataggatgagataatcaaagcgttgaagaaagtaagagggttttagtagaaaaacgtaaaaatgatacatagtatctgtctttacgaaggaaaacaaaatgcgtttagttt

SEQ ID NO: 14238 - DNA, 667 bp, Arabidopsis thaliana landsberg
ccaaatacatacaacttcgtcatggaccttatatttaagactactctatgccgaaacatagatagtagaaaacagggcaaggaacataatggcgagaggttagatagagtaaagtttaggtaaaatgaattttatatagctcctttacgtctttgtcaatttcatacttttatcaacaagacatatttccgacttcgattcaaagtcgtacattggaaaattatgctttagaaaaaacaaacttgacgaccaaaaatattttttaaaacttaaaaataaaaaaaactgttaataaaaaaagtttcaaaaatagcttgagcaatgcatgaaagagagctgggagtgatagtagaagcaaaaaaaaacctttcaggagatatatataacccaaaggccaaagctctatattagaacacaaacattaaacattaggcatggaaaactctcaattagtttcgatcactttcttagcttacactataatcatatcaatcggctccatcaactgcatagacaacaataatcttgtaacaaaccaatccgctctgttcgtgtttggagattctgtgttcgatgctggaaataacaactacatcgatactttctctagtgtccggtctaattactggccgtatggtcaaacaacattcaaatcccctactggaag

SEQ ID NO: 14239 - DNA, 1214 bp, Arabidopsis thaliana landsberg
cgtactacagttaccaatcttgttattttaccatcaaggcattaatttaacaaactaagttgcaaaagtggctttggttgacaacaaaaaacacacaagcgacttacagaatccggcaaaagatttgctcaaaaacaattaaaaaaacacaaactgaaagatatttgttttccaaagatgtagcattcaaccaaatctgagaaacttatgtacagacaaaagatcagatttaggtagaaccgagatttcatgatcacaccaaaaagcttatgttgctcaggcaacatgtcttaactagaatccgttggtgcattgctatcttgcgacgaggagaacaaggtgctaaacggccacgggatcgagaatccgcttccgtcattgttctcgttctcctcctcttcctcctcttcttcttcttcttcttggcgccggtttccatcgctgttctcagctccatggctggttgtagcagaagcactactgcttccattgttatcgctcgttgttgttactgaatcagtcttggcttcatctgcaggtaactgatatttgcaaaccgggcatgaactgtgaagctcaagccatggtaacaagcagtcactatgaaacttgggcgtacagggcatcagctttgcctcagttccaatctcaaaatcatctaaacaaaccgaacattgcagagtctcttcgattttcacagtagccaaagcctcgacagcttcttttttagctggaggtgttccatatctgttgggatcattctcagctagacgttgaagcaacatttcaaatccaggaccaatgaaatagtcacctaaagaaccagcaggtacagaatccatatcagcagagttttgaaccgtgatagtctgattggaggtattgatcaagatcacccgtcccggattattacctccattaccagtactctcagattctacagacaaccctgctcgtatcccctgaagcaactgcaaaacagcagcggaatgtcttctccttctcctgagaatctcttgaagctgccaatccaaatcattttctccatcgtcttcattgttctcggtctgtacctcgttttgattatcttcaacagactcaacactctggtttctcctacgacgcacaggatcattcataagttccatcaagataggcgcccaaagagagttgtttgctctaacatcagcccgatcagaagaatcatgatcgtc

SEQ ID NO: 14240 - DNA, 558 bp, Arabidopsis thaliana landsberg
  unsure (1)..(558): unsure at all n locations
caatattctgagtttaatcactggatctagaaatttcatgttttcttttattaccacttctcttccatattggttaaaaatgatgaagtaaaatacattttttaaactatcaatgacaatgattgagtgtctttgttgttaagaacaaaacacacacaatggttctcaaaatacaacaactgatctgtcatcgactgcaaaatctttcacacttgaagaagactcaattctgtttgtagctttcttggcctatccattaaaatacacgaagaaaacattaatcataattaatctaagatccatgcatagcttttataacaaaaagatatttacctcttcatcccaatttgtaaaaatagtgacgaggccaagaccaaaaacttgaacaacgagggcacatatgattccaagccaaagccccttaaaatttaacattgttgatatgtttaacgttgacattataatcagttaaataaaaaaaaaaaatctgattaaatnggggtagtttcatttacccgaccaccaacgtgaaaagtgaaagcaagtaacaatcctgaa

SEQ ID NO: 14241 - DNA, 821 bp, Arabidopsis thaliana landsberg
aaaaaagaaagaaaagggcttttcctctctatctttttacgattctctgtatacgtttctcgtgtagattattgtatagcatatagttgattgggagatttagattgtagaaatggggaatgtatgtgttcatatggtcaacaattgtgtggatacgaaatcgaattcatgggttcgtcccacagatctcatcatggatcatcccttgaagccacaactccaggacaagcctcctcagccaatgctaatgaacaaggatgatgataaaaccaagcttaatgacactcatggtgaccctaaattacttgaggggaaagagaaacctgcgcagaagcaaacgagtcagggacaaggaggaaggaagtgcagtgacgaagagtataagaagcgagcgattgcgtgtgctaacagtaaaagaaaggctcacaatgtgaggagactgatgagtgcagggctacaagcagagtcagtgttgaagaccaaaacagggcatttgaaggaatattataacttgggtagcaagttaggtcatggacagtttgggactacgtttgtgtgtgttgagaaaggaacaggggaggaatatgcatgcaagtcgattccgaagaggaagctagagaacgaagaagacgtggaggatgtgagaagagagattgagataatgaaacatctcttggggcaaccaaatgtgatctccatcaaaggagcttatgaggactcagtggctgttcacatggtgatggagctgtgtagaggaggtgagctgtttgataggatagtggagagagggcattactctgagagaaaagctgctcatttgg

SEQ ID NO: 14242 - DNA, 601 bp, Arabidopsis thaliana landsberg
gaagctccggcggcagagaatcaagtcagctcaacagaagtaaaggcgaatggagtttgtaaaggtttgtattttttccagatttggttagtaattggcagtctttggttttaatcatattcagaaacccccttttccaatacaacaatacctgggttatatgtctctgtcattatacagtttagaacagctaacaaattggtatctaagaaaaataatgaccaaatctgtactttggcacattttgttatttcgtgattgaaaataaagggtattggttaatctctagatttagatgtcgccatatcttgcagaggttagattataatatttttgagttgtaatacagtttaattactcggtttccttaattaatagctaccaaatttatatagcaacactttgttctttctgttttacaggtttaatgtctgaacaaagaactgagcaagaggttatcaatctattgcagaggtcagtttcttaatcttctttagttgcagtattttgtgtttaaagttcaagtgttcatatcatttaggtggattttgttatgagtaggaagtataaatctgagttaattggataactgattgaattc

SEQ ID NO: 14243 - DNA, 918 bp, Arabidopsis thaliana landsberg
ttaatgtgatcaatgtctcagtcttttgtttcttttgtttttatctcactttgtgtaaataataatttaaacaactcaattataacgactgactgtgaatttcagcttagatcacgataaataactatgctattatctgcaaaagtatacattaataatcgattatttttactatttccagttaagcacgcattttttaaatactatttttgtatagcaattaattgtgttagttttctaagtccggtaaccttacattagtaaatttcgtggaggttttcttatgcgtaaagcggtaaacgcaaatgagtgaatgaaatagaaactgtaacatgaaaaattgagaccaaattaatagatttttggatttcctaattttgaaacacgataagttagtagtttttccatatgtttcaaaatataggatgtttaggctaaaacacacaaaatctaaaaaaactattttttttttgtttttatattttttacattgaaacgtaattaaatatttagtgaaatacagtttggccaatgaaaaatattactatagaatataattagtcacaaaattgtataaatttaacttttgcattaaaacatgaatttctgtccaaaacatcttttacgtttaaacaaaataaaatgactacaacatcttctaacatgaaacagaaagagtatataggaagatatgagaccattatcataaaggctaatccaatcgaaaccaccaaaaatgtcagaaaatatttccactatcaagtgataaaaatgtttgaacgaattaccaaagactctcgcaaaaccaaataataaaacagatggtttaagcatatccaaacgatcacaaagacttccaaattttaagctcgttctctacctgtattcgatgaaactgaccctatatataaaagaaaa

SEQ ID NO: 14244 - DNA, 650 bp, Arabidopsis thaliana landsberg
  unsure (1)..(650): unsure at all n locations
tcgggtacgatctgcacatacgtcgctgctttcgcctggtcttggggaccgctcgggtggttaatccctagtgagacattccctctagagacacgttccgcgggacaaagtgtaacggtctgcgttaacttgctcttcacgttcattatcgctcaagctttcctctctatgctttgccatttcaagtttgggatattcatcttcttttctgcatgggttttgattatgtctgtctttgtgatgttcctacttccggagactaagaatattcctatcgaggagatgactgagagagtttggaagaagcattggttctgggctaggttcatggatgatcataatgatcacgagttcgtgaatggtgagaagagtaatggtaaatctaatggctttgatccttcaacacggctttaaagtggtttaagagtccctaaccaaagtagaagcagaagagagtgaacaagaggtggtaaacacaccaaagtagagaagggaaatacagttttcaattctatacagtgtactaaatttcgttactttaagtttgaactgcgtttgtgaataagtgaaagtttttttttgctttgttgtggntcttaatgtcatccctgagttccaatttctacaagtgtgacatgtatatgtcaaac

SEQ ID NO: 14245 - DNA, 534 bp, Arabidopsis thaliana landsberg
ttcccagtttcacaacatcgatggctgtattaggcgttgtcattcgcactgaaacttggatctgacttgattcagcagattctattaggctctttctcgctctgcaactaaaatctgtcatgtattcaggagaaagatactagcatttcatcctctctctttaacctgtctgcaatattgtctcgccatgtccattacaccttttaacacatgaagaaacatcaacattgagccttttgcagattgaagccaatggagttggtaaatcatctttcttctcactctcttctaaatggtttgagtcgttcgactcttctcttttctcaatcccatcatcatcattctcatccaaaccccttttgctcttcctcttcctcgacgacaaactcttcccgtcaatcttcgaaacttcactcagtcttctcctcctcaaagtagtagaaccagaggttgctacatcaccacatttcctctttttgctagcaaaacctgaacattttctcaataatctctgacaagattcatcctctttgt

SEQ ID NO: 14246 - DNA, 574 bp, Arabidopsis thaliana landsberg
  unsure (1)..(574): unsure at all n locations
gacaattgcttgtggcgaacaccgtggatggatgtctgtcgcatggaaagctgcttgctttttcccgggtattgcgtttctgatccttacaacgctgaacttccttctatggggtagccatagcactggagccattcctttctctctatttgtcatcctcctcctcctgtggttttgcatctcggttcctctaactcttatcggtggttactttggagccaaggctcctcacattgaattcccagttcgaacaaaccaaattccccgggaaatccccgctcagaaatacccatcctggcttctggttcttggcgctggaacacttccattcggtaccctcttcatcgagcttttctttatcatgtccagcatctggatgggccgtgtctactacgcctttggattcctttttgtagtcttgatccttcttgtcgaaatgtgtgccgaggattccctagtgctaacatacatgcacctgtgcgttgaagactataagtggtggtggaaatccttctttgcatctggatcccgtgcaatctacatcttcatatactccatanactatctcgtcttc

SEQ ID NO: 14247 - DNA, 833 bp, Arabidopsis thaliana landsberg
taccctaatgaaacgtatcaacacccaacggtttcagactttaaactttaccccaaaacacacattctactggaacagtgacaataaacaaacaagagagccacattgtgaggaaaagtggttgtaatgtatcaaacctgataaccacatttgcaaggtttaagatgttgatcagtcaagtccatctcctcagtacatagaggacaagtcttttctcctttctcattcatcgtcacctaatcatatattttaattaaacaaattattaaacaatcattagaatcagaacataatccacaattctcaattataaaaaaaaaaaaaactactgcaactacacattactccttactttttaaacaatggagaaacaacttctaatcaaaaccagaaaccagtgaagacaaatctcaaactaaattaaactcgcaaaaacaaaaagaaacaattttaaccaatcaactctcaaaaagcttgaattgtgataaagattattactttgaccactccaaaattccgacgaatgacaacgaaaaggttaaagaatcaggctaagaactcaaaagaaagtagaaatctttaacctttacagagaatttggtggagaaattgaaagtcgtaacctttggaatcaacgaacaaaaaccctaatccgtacgttagggtttgagaaaagacggtttggagaattagcttggagagataagagagggagattgaagaagagagtatcggtttttgaggaaggagaagagattttcagagagaatcgaaggaagaagaggatttgcgaagagacgaggagaaaaaaaaaaactgtggctaaacctttt

SEQ ID NO: 14248 - DNA, 481 bp, Arabidopsis thaliana landsberg
ttgggaacaactcgtgtcgatatgtgtgttgacaactttcttgatcccaaagtattccactatcaaaacaaatactatgtgaatctgaagaaacagccaaattgtttcaacaagagaaagaattgagtttagggtttatataataattacctccttgattgggtttgggcctgcagaagacatagttggtagtgatatgtttaccggggcgtacccttgtttggaagagcttaaccatgtcatcataaggatccttgacttgaaatgttatgagaaacatcatcggacaagcaaagtgaaaattggctttaacaactttaacaaactcatactctgtgccatgtctgccattgtggtcatgaagagcttcctgagcaaggctcttgagtaaatcctcagtagtatcaaactcatcgtcagcgaattgatcagaatggagaatagcaagatggagttgaatacacagaggaaggaactgaaa

SEQ ID NO: 14249 - DNA, 1044 bp, Arabidopsis thaliana landsberg
  unsure (1)..(1044): unsure at all n locations
aagcatcccaggatatcccgaaaaaaaatggcgaaaaggattcacaattgcaggtggttttccaggtacaaaccctacacacacccacattatattcaacaaacgaatttgaacaatgtgaatgattgtcatctttttattattatattaggagttgatgtcataagttgtggtatcatggacgaccgatttgcagtgaagggagaaaatattgatcaagataagttattggagaaaataaaaaaggttttaaaatctgtcgaaatcattgatcacaccnaaataccctccagattattttttctatgatttctaataatgatgtttatttttctttgggcaaataatgatgtttatttatgttttcatattctataaaaataattggatttggtgtaagtcttaagatatatatggttaagttaaattatatattagtccattcttataagttgtaagttataacctttttgttcaagaagattgattttccttggatgcatagtcgagagtatgccactaaaaatagcttaaccatattggtctacactgtcaccttatttcttcctctataaacgaattaaaacgaaagcatacaacgctattatgagatttgatttggtctcccatcaaagagacagatacatactttaacaaaagctcaaaacaaatttgagagagggaatggtatatgattacaattcttgtttaaaatatgattaataacttcttctagaaaatgttttatatgcaaaccagtcaaaccatcatttgatttacatctatttagaaatctatttatctatttcatcactaagaatgtgttttatcaccacctccaaaatgtgtttacaaacaaatgaagccaactacaaattattgatcttgaaatctgtcgaaatcattgatcacactgaataccctgcaaattttttttttttatgatctctaataatgatgnttatttttattttttacttttatttttctgaggcaagtaatgaagnttatttatgttttcatattctataaaaaaaaataatt

SEQ ID NO: 14250 - DNA, 607 bp, Arabidopsis thaliana landsberg
tctcagtactcatagccaatatcttgtatttacatcattatttactagcatctcgaaactcgtttctcatatttgttgtttaaaaccaacaaaatactgtgtaaaataaattatacatgtatacgtataggttaggagaatttttttgattaatatattattgatttgatgtttgtttgctaaagtatgaggtattaaataagggtgagaatcctttcagtatgagataatacatggaattattaggaaacaaggaagtatatagataaaaaaaaaatgcattattgataatcaaagaataaatctcaaatttcacatattatgacacaaaaacttagaaatttgaaaggaatgttacgaaagaaagaactagaaaatttttctaattcttcttacaaaccaccaaaggtaatattctttgcaaaaattcttaaaggatccaaatctgatgtaacacatcatcgcgcaaggaagcgtttgaatacccaacactcatggtacgaaaaagttgcgccgtaagtgttatttaaaataattcgatttttctttattttttctcgcaactcctcacacatgtcacgtgtttcttctaatttcaaaacataat

SEQ ID NO: 14251 - DNA, 700 bp, Arabidopsis thaliana landsberg
ttttgcgaagctgtcttcaagtggtcaaaaggtagcaactcttttttcttgtgtaattgtaatcatctgtgttatgaagtattgccatttttgaattgagtatggaacttctcatgtttaagaaaccaagctttattttcaaaagaaacattcttaagaactcctcatgtattcaaccattggagaaggtttttcttaaaacagtatcatgggctctctaacattggataatctaaaatttattagaaaaaaattggtgagagccactcattggctcttaccattggagatgctctaacgtttcacattacataaaaatgtcgaagacgtgtctcgaatcaatgacgcgttaacttttaaaacaattttgacgtgatccagttgatggttattaattattttaccaaaatttgttttgttttgaaacaccaatataatattatattaaaattaacttgcggttacaacaacaacactaatccggaagctcttcaccaaagaatttacttgtcgaatatttgaaatagaaacacaattgaaaaagaatgtttgaaagcgataagatagaagtttaaaatcaatgatgacaaccagaagctcctcgaaaagtacttcgaaagtgatcagtttgaaatcgatcaatcctcggtcttgtaatagatccgagagtgaagcttggtcttttgccattgaggcgggc

SEQ ID NO: 14252 - DNA, 836 bp, Arabidopsis thaliana landsberg
attagttcaccactaatagtactagaaaaaagtttgtcacctgtgtttgtataaaaatgtatttgttgtactttgtttgagattgcatcatttgaatctataaagtgtaatcatgcagtagttcctttgatctctcgtgtccaaagaatgttatttttgtacattgactaatggttgtgctacatcacaagagaagaagaagacaacatagtggtagactggtagtcattaacataaggaatttaaaggcataacaaaaataacctaccaatctccatccaaatgctatgtatcatacgccgtcttcttgttatggacccatattcatttttgaaaggttactgtattgcacaaaccacagatgcagcttctttgatggtctcaattgcatgcattagagctacaatattcaagtctttaagtacatgacgctctcactctgatctctgatccataaacatcaaactaaattgagtaggcacaaattcacccttcttaggaacataatggtaatgtatacctttgattttaatctctctaatatcattactttgcagatcacaacaaagaatgtacaacatatcaaacaaataatctggtgtcattataaccttgccactttgagttataccttttaactccaatccaatctaacgttcttgaccaaatgcagcggacaaggttgcaaaaccagagttttcgccaaccactcctttgtcctgacatcttctagaacccataaattcactgtacccttgtcttcaagatcggtatggtaaaaaacagttacttttccgccatattctataagacacaccttcttgatggctctatgc

SEQ ID NO: 14253 - DNA, 708 bp, Arabidopsis thaliana landsberg
gggaattgagatgttgagaaagtaaaaggctcagctaaatgactccagcgaatggctcaggtctggtctgattttcggctcggataatatttaatttattaattttcggtttaacataccaccaaaattagtcatgattattgcttattggctcatcaggattttttttttatgttttatataaatataaaatttcagttataaggctgattattttttattccgaagtgtatatatcttggaaaaagtgttcaatgagttggttttgctagaaagaaattataagaaaattctaattaattacataattcaaccaaaccgaaccgaaatagaaccaatgtatatcaactagtacattttatgattttcttaccaggacaattgaaattatttctttgattataattacttttcttatacaatgtgaataatatgatatgtcatggatcaacttaagctaaatttagtctctaacatcctgattaatcacagaaaggatttagttcttatgttttgtttggttttatttaggacaatcacaccaaagttacataccaaaccaaaatggtagatttaggcccaaatcaaaacggaaaacccaaatatattcgcatatttagaatttatgaaaaagcaattatgtttccaatcgcacacctgtcacttatattaaaaaacaatattaactgggcccaaaaaaaagctatt

SEQ ID NO: 14254 - DNA, 854 bp, Arabidopsis thaliana landsberg
gcaatgactgggttaagttttttcactataatctcaatttttattgataaatgttatttcttttttcttatctttttaaaattgtattatttcgaaaagtatttatgaagtatttaaacaacaacaaattctaacttatcaataacaaaatttgatttgaattgtaatggtttgctattgtaccattttggcctactttgctgtaggttttaaatagaaatatgaacttagaagaaacccctataaacttattacccttccatatagtttaatcttaccaataaagggttagaggttgcatttttgggggataacgaccaaaatcaaccccaactatttttatgcggtttttttaaattcaaattttggtcatctgtatttatcaacctagacttacataatttttaaataacaaactgaactgtgtaacatatacatgttatatttttaatgtcgatttgaattgttaagttaaaattatcacttattttgtatctaaatcattccttttatttaattggctaacgattaatattaatttattatgaatatatgttgaaattggctaacggttacataactcagatttattatttgaaaattgtgtgagttcggattgataaatgcatgtaatcaaaatttaggtaggaaaaaaccgcatagaaataattgagattgattttggccgttcgtattgatgtaatcaaaattccatgattatcgatagatcaagctgattgcataacatgaagaagaagaagataacttccactgaaaagcaacttgcttgttttagttttgaactaccaaaaaacattcaactgttcacaagttcttgtgtacaacaactattg

SEQ ID NO: 14255 - DNA, 239 bp, Arabidopsis thaliana landsberg
gaactaaacttacgcccaattatgggctagacctctttctcttgtccatagatgaagggattacgggttatcgtgatgattctcttgagactgttaaacggaacgaagtccaagtaagcttctttttgaattctatgtgtgttaagtgattgttttatggcggttttttgtttgatgggttctttatcctcctcttccagtatggttggcctactaagatcgatgcatattacgatctg

SEQ ID NO: 14256 - DNA, 473 bp, Arabidopsis thaliana landsberg
atattgattatagaaaatctcttgatgaagtaaaaacctaccacccatataagtaatctattctagtacagaggagcagatgtatgatactggacgggtgttgtttgccttcggaaaatcttttcgcgtgcaaccactgccaaaattatcaaattttctccttcttaagataatgcaatttactgaataaataaaaatatgactgctaaggaaatcaaagccgttaaaccataacactaagcctatgtgatgtacagtcaaaacaacatcgtgagctaaacttgtaataacagatatgaatcataacaactctttatattaatagacatatatacagatatactctttagtgtctaatatgaaaggagaagataccatctatatatgctcaccagttaagcaatcatttcgatccatatgaacctcgtcttcccatatcctccatctatgaatctgaacaaaaaatgataatc

SEQ ID NO: 14257 - DNA, 774 bp, Arabidopsis thaliana landsberg
tgagacttcttagcttatgcggcataatgtcatattttttttttttttttttaatttatagttaaagacattcatgtatgttgtgcaatgtagatgctgtaacggtagatactgctaccttaaagtttcgcaagactaaaagtagaagtctcttgtgagaaagtttttctttgaaagagcgattctctaaagctgttgatgttgatgccgctagtttggccaaagctggagcatataattggcttgaatgggggtgagatattcggacggatgagattcctaaacatgggcttcatgttttgaatgaagaatcaagttgatatattagagtttataattacttactattttattgatttatagattcttagatattttgggtgaacctatcgtcaacatgcttcaaaaggtaactaagaacataatggtttttactgcatactctagagtctttgtcatctcgactcgagatcaatgattgcaaaaagttctagagtctttttctgatggattactatacatcactgcttgagaggagttacgaattgtgatacttctttcattcaatagataaacggaattcacaactcttgctacgaagattacatatgcatttgttcatgcagcaaccgcacacacaacacttaccatttgttcttttcaaatgtaatgtaaggattaacataagcaggatttacttttataacattaaaactctaaaactaatttaagatagacgatagctagaaaaatctctaaagctttaaatcgcaa

SEQ ID NO: 14258 - DNA, 800 bp, Arabidopsis thaliana landsberg
  unsure (1)..(800): unsure at all n locations
tctacgtagctggtgacttcgtctatatctttttcttctttagtgtgtgtgtgttttcagttttctttatgcttcatgtagattgatgactaagacttcgtctatctcttgtttgttcggtgtgtttcttttgatttcttggtgtgtaagtcaaccaatgtttgtatctttgctttagagacgaatcgtttgttggattttggtatgctaaccaaatcttaagatcgatgttgttaagagtctttcttttgtttctgaagcaattcttgaatatatgtgaagtcaaatctttttctcattttcttactgtaattgagttttctaatccgaaacagagtacatgacacttcaatttcgatattcaacttggttattttggtttatattgttgtatcgtaatcagaccgatgtaaatggtcaagattgaacaatcaaaaaataaaaaaagtgtgaaagttttactctgtaaagtttttgttctctttgcgagaaagcaggggttttcttttcattttctcttaagaataaggtaaacgtttgctacttttgagattatcatcaaatttgatttgggttataacctctactcaagcctacaactatataaaattcgagtctaaagaaacaatttggtggatttaatgaagaaaaaaatatgggatgattcgatatgaggtgcaaaatgcaatcattatggtattaaacagaggcagatatggtttggatttattaaaatttggctttatcaagaggaacacatgataaattacgtgaccatantacttttcttctttcttttg

SEQ ID NO: 14259 - DNA, 900 bp, Arabidopsis thaliana landsberg
aatcatcattctgaaaacaacgatttccaaattatccaactttttgcacaatgagatttgatttttagtgcacgcttatttcaattttacattttaagttgcagtggactatgtcaccaatcacagaatgtgagaatcattacatcagaaaaaagcgcgtaagaagtaatcttacagaaccgttaatagtagtagagagaagcagcagctttaagcaactggaggacgaaggacatggtcctgtgaggtatcaacagcagcaggaggcatgaattgccacattgcaaagccgggataagttgtgaaagggacaagcttgcttccaggagcttgagcttggagagtgtttgcggatttggtaagaaacaaggttgaggctgaggctgtgtcttaatacgtttcagttgctgatcgattctctccttctcgaccttaagcttctgtttctcatcacgcagctcgttcttctcatcctacatattggcatatacataagatcaatggacaagctaaagatcttgcaggagttttcagtttttaccttcaactccttgattttctcctggaggcttgagttcaagtcctttagtttctgcgcttcatctcttgcttgattcaccatgcgaattgcatcattgataatagcaaccttgtctgtttttggagttctcccaggttccaatacggaactcaactccgtaaacctattgacaaagcaccataccaaaagattaagaactcaaaaggtaaatgatagaagagaatgacgagaaagcaagaaaatacttgtcatttagtctatcacgtctttgtttctccctacaagcatttcgagttagaaccagtgcaagattcagttttgatcctgcagcagtaagaaggaaaactttacaacaggtt

SEQ ID NO: 14260 - DNA, 433 bp, Arabidopsis thaliana landsberg
aaaaacgtgggatgcttgacgcatttcattggccaaatttgttgcctttctcatgctgcagttgagatttaagctgtttttatgaactcttgtttagtggttgatgattgaatgttgttcttagtgatggaattagtaactagataatgccaaattgtttggaagttagatatatgtaataacggaagcaatttacatgactttaagagacctgattctttaagaggaaagctaagaatttgaactgatttttggcaaaatggtcatcatagcattgttgtagatgtatatcataaagtatttgcatttttccgttctttcttttactttttctctaaatttgtgtcaatggtttgcataaaaaaatgttgtgcagccagataaattgccaaactacgtagtccctgatttgactggctttaaggtttttttc

SEQ ID NO: 14261 - DNA, 448 bp, Arabidopsis thaliana landsberg
aggacgggttagttggagatttcgggtcacatattccactgtgaataaccaaagcaatgctctgagtatctcttgactgataagactgtggcacaaaatcagaatgtgaaccaggatgcagatcttcataacggtcttatctaggtctttctctagctgatctgccacataggtttctataccttgcactctcacacccagccgttgtatttcgctatccatcacaacaaacttttctgtaatcttgccaaatcttttctccatagtttcccgtaacaagagaattaatgcaacaaggacttcatggacatcattaacatcaataatacgtcgaacatcaatgtttgatttggtaagtctattccaacagatcttcttcttctctatgataagacgctctctccagctatcaacaattggatcgattatcaaatctcatcattaacat

SEQ ID NO: 14262 - DNA, 651 bp, Arabidopsis thaliana landsberg
aattttggtcttttcgtatagtattaactctacggcgattgatctaagcccaataattgtggaacttgctcgacttaggtctcaatctctattttctaccaatgccaaaaaacaatttccttgcaaattttttatttttcccatcaaaacaattcccaccaatttacatttaaaaatcattgtaatctattacatttccttacttttaaaaccatttacaaatctatttctcgccaaaacaaaaacgggaaaaatgtttttggaaaaaaaaaattgacagaaaaattattttcgaaatatttttggcggaaaaaatcgatattctattttattaacctaaaatattttcaaaatatgagtaaaatggtcattaaaaattaaactaacgtataaatgaaaatgactaacaggaagggttataattaaaaatgataattttggaagaacattttttacaatttctctttaatcattaaccctcgttgtatggaactccggtggcgttgagccaccaatctctatttatgaactctctaaccgtaaacatgactgcttccatcgggtctgtgatgataatgttccccttcggatggattctctggcttgcgtttgctctggggcctttgttttgatactcgcagtagaacaatg

SEQ ID NO: 14263 - DNA, 719 bp, Arabidopsis thaliana landsberg
accatctcaaaggaacaaacaggttctcattcagagccttaccaaaatccttctccacattagcagcatgaaatatgccgctgtaaacagatccatttttgagatgaacttctacctgatgtccaatattacaagttgtgaaatacactaacagcttctgagaaggggtatccacactttcagcgtcccaaccgttttctgcacatatgtatcaacaaacaagagaacgcagaacatgatgttggtgctacatcagagtaaaggtatatatgtatatgtctcgaaatatatatacaaaacctgtattgtcaacagaaggctgtgcgttattcatccatgcctccttttcaaatctcctgtgtgaaaatccattggatgaagaacccgagtgaagaacaggcttcatagttgctttaacctgaagaaaacgaaaatatcaataaacgggttattcaataagatgataaagataaccgtctcacggtacgatgagcctaatatgcaaactggccctccaattcgcattcctgctggcatcaaaacttcttttagatttcttaatgcgatgtaaaagttatattttttagatagaatgtcacagtcaattccatattactaggggttcgtcaactaaaccctatacagagaagtaacctgaatgttctgcacattccgagggaaaaaagtatgctatgaattatcaatgaactatagaactg

SEQ ID NO: 14264 - DNA, 795 bp, Arabidopsis thaliana landsberg
ctttgcgttacctcttgcgattctgcagatagttattgttatagttctcactcgtgtttttgcttaccttttaagacctttgagacagcctcgtgttattgctgaagttattgtaagttttttttcttttgtcaatttcttgactcttgatcagtactgtttttttggtgaatgatttagtctgttgatttgcagggtgggattatgcttggaccttctcttcttggtcgttccaaggcttttctagacgctgtgttcccgaagaaaagcttgactgttcttgaaactctggctaatctcggccttctcttcttccttttccttgctggtctagagattgataccaaagcccttcgtcgcaccgggaaaaaggctttgggaattgccttggctggaataaccctcccgtttgctcttggcattggttcttcattcgttttaaaagcaacaatctccaaaggagtgaatagtaccgcgtttctcgtcttcatgggtgtggcactctctatcactgcattccctgtgttggcccgtatcttagcggagctaaagcttctaactactgagataggacgacttgctatgtcggcagctgccgttaacgatgtggcagcttggattctacttgctctagccattgctctctcgggatccaatacctctccccttgtctctctctgggttttcctttccgggtgtgctttggttatcggtgcgtctttcatcattccaccaatctttagatggatttcccggggtgccacgagggagaacctatcgaggaaacctacatct

SEQ ID NO: 14265 - DNA, 817 bp, Arabidopsis thaliana landsberg
aaataagacaaatttacaagttttaaatccaaagcaatttaataatcttctttggttccagccaaatgtgaaatgttttttagaagcatacttttgcattacaagcaaacccaaatggtgaaactagaaaaccctccaacagtttggtgaaaggatacaaccctcaatgtggaacgatatggttatgagtaattgatctcaactactagctaatgcagagattggtaagtgtgactaattatgatccgttacagtgttacatactgctctttaatttcggcattcataacaacaaagattttttttgagatttttgccaaacgcgttttacaaatctttttgctcataaacttcttctttgttctccacactcgcaaataaatttggtgtcgctgttctacacagtccaactctaaacacagatatgatatcttaggggtctttgatttgacgagccacactaattttgtagccatccatcgtcaagccacggaggcaatattcgcatccttacgacggaggagctcgcagtcactggaggcatttttgacaacaaccgttaatctctccggcgtcccgctaattcaaaccctagcttcaatttcaacagagctcgtctcgtgctttatctcttcctccaccgttccaaatttcaaagagactccaaacttgacctacctaaaattcatttgcaactcttgatatttcttgagaacgagagatggtattagttcttttgccaccgacgagaagagaataaagctttgagctcgagcgtctctaggctaaacttttaaacacttctcataaaactaac

SEQ ID NO: 14266 - DNA, 660 bp, Arabidopsis thaliana landsberg
tacctgtttttccgcactaactttccctaaccattactctatcgtcacaggtctatacccagcttatcatggaatcatcaataaccactttgttgatccagaaacagggaacgttttcacaatggctagtcatgaaccagagtggtggttaggtgagcctttgtgggagacagttgtgaaccaaggacttaaggctgctacttacttctggcctggctctgaggtacacaaaggctcttggaattgtcctcaaggtttatgtcaaaactacaatggctctgttccttttgatgatagggttgatactattttgagctatttcgatttgcctagtagcgaaatcccgagttttatgacgctttactttgaagatcctgatcatcaaggtcaccaagttggccctgatgatcctcagatcacagaagctgtagttaacattgatcggttaataggaagattaattgatgggttagaagaacgaggcatgtttgagaatgtgactatgattatggttggtgatcatggaatggttggaacttgcgataaaaaattggtggttttagatgatttagctccttggatcaaaatccctagcagttgggtacagtgctacgttccgttgctagcgattcagccccttcagggcacgatgcagcggat

SEQ ID NO: 14267 - DNA, 638 bp, Arabidopsis thaliana landsberg
gaagacaaagaaaccagttttttggggttagagggtgaaatcaactcccaaatccagacacaaggaaggaaaggtaaatcttaccaacaaaatgagaaccattgttatcaacagttatctcaacacgtccatctttcaccaggaatgaaagtgcgaacatattctctgctgtctgagcaaatgatttcctattgagcaccaaattctcaatcttgacacgtttgtttttccgcaagatgttaaacattactgccatgttattgtctgtatcacttttcttttcagcttctgtatcatcaacctcctctggcttaacaccagcaccaggctttgtacgttttctgttgcccactctacttttcctttgtttcatttcactatacataggacccatcctagaaaaacagatacaaaaacagaacaataagttaaaatattatcgatattgtcgaataaggtataccaattccatatcctaacattaagcactagtaaatgagagaaagaaaactcacattgttgtacaaccacatgataccaaaaccgtggaacagaccgtaaacccaagatccttccacttcattgacacttgtgtattttcatcagcatcaattcttaaagaagttttgccaaaccca

SEQ ID NO: 14268 - DNA, 743 bp, Arabidopsis thaliana landsberg
gtagattcttagcaaaaaagcattgagatcttacaagagtgtgagagaggggaccattccttaatgttatcagctcttttacaattttggttccatcttcttcaacccattagatattttgaggtttaatgtgaaacgttttacttgatacaagtttgtactgtacaactgtcttatagaacaaacttaatgatcttcttatctgttgacaaacgaatagacagaataaacggtagattggatatgatctttgtgtcatgactcattagacctttaaattgaagattcttcttttctatcttttgatgtaaacgtactttatgatatctcaactcatccatctggtgtgttttgattacatcacatgaaaaggtgttgctgcttttctattaaaaggtaaagttaaatattcttataatacacatgcatttagaccccaagtgtttttgactaaactttgcaaaaatccaatattattatcaaaagatgatgatgatagagaagatagactagttttgatcaacttccttcatttagaccaacatgggtggctctctttacctatctcatgtccccattcttttactcatcaaagacaacatcacattcaagtttggtggatctcctcctaccactaaagtaggtgagagagaacaattattgacatcagacatagaaaacaataatcatatttttactcttagtgagctaagtttcacttgtaatttaagggaactggctac

SEQ ID NO: 14269 - DNA, 449 bp, Arabidopsis thaliana landsberg
caaacgcaacagcattggcgacccacttaactggaatgtagcgcggaggctttaaaagggagccacctggaggagtgaagaagatgtgaaggattataggaaaggaacggtccagctaggcggagagacgctacccatcggtcaggttgcggcagtcgcgagtggaggaccgacagtggagctttctgaggaggctcggggcggtgtgaatgcgagtagtgactgggtgatggagagcatgaaccgtggtacggacacatatgggatcaccactggatttggttcatcttctcgtaggaggactgaccaaggtgctgctcttcaaaaagagcttattaggtaattcatattcatagttgaatcagacgaaaaataaatagaatcatagaaaactaggtttagaaacccgtacataaactagtttttttaaaaaggaatgcatatttata

SEQ ID NO: 14270 - DNA, 184 bp, Arabidopsis thaliana landsberg
  unsure (1)..(184): unsure at all n locations
tcatgatcctttgcttnnnnnnnnnnnnnnnnnnnnnnnnnnnnnnnnnnnnnnnnnnnnnnnatgggactgcagttgtgattgtgatgctcttgacaacgcttctcatgatgttgattatgatacttgcttggctatgccattggtctcttgtcctcttatttactcttctatcccttgttgt

SEQ ID NO: 14271 - DNA, 686 bp, Arabidopsis thaliana landsberg
tcagtgtatctcttcgataagatcgcaatggcgactctcgattcctcgatcctgctcaaaagattctgtatatctctacctctgacttcgatctcatctgtaaagacgttgatcttcgcgtctctcatggccttcaacagaaacccgaggaagctttttcgtagctcctctcctctgaagttgatgaagacttggtgctgcggtgggatttcttcactgtagatggagggaaccgccatgggaagtggatttttcgtggatcttaagcttttaatcgctctttacattcttttgtaaaaagtcttcgctcccaaagtcattagttcaaatttgcataaagtcaactttattattcgacagcctcacgacgacaaatagaaagtttcaaaccctctttctccgatagagagttttggtttattagtttttatttttcctgactttcgatttcggttagcgatttcctttaatagaaagactagtatgcaaaatattctaaattgcaaaatcataattttttttgtaaaacaaaaactatcaaaaataattatgtgattcttatttatttgtaaataatcaaaatctaaatggaagcgtaaacttccaaaatgaaatctacagcttccaataagttttgaaagtggttttttcagaagcgttatggaagtgagaatctaaaaacttct

SEQ ID NO: 14272 - DNA, 676 bp, Arabidopsis thaliana landsberg
  unsure (1)..(676): unsure at all n locations
aatgtttatacattggtttatcttcaagttaagaatcttaatcttttgataacctttttattagttagctatcctgtataccggatttagaggcacattcttgttcttcaagacggtactcgtgcatgacccaatcggtacgagagccatgaggcgctcttcctcggtaataaactaatgttttctttgttccaaccatccgtgaatgtgaagtcactttacgatctttcccggtggctttccagtaacctgctttggtcgcccggtttgttcttgatccgtttggatatttccggtctcgaggactgaaaaagaaccattctaggtctttacttggcagcaaggacttccctgcaaggatcatacaattaagataaattatatccaatcttaatttgtacacactacttaaagattccataacatgtcatgagaatccaaaagattaaaaaagaaaagacaaataaagagaacattagattgttttatatttaaaacaaaaagttgaaggtgaatgagaagcttccaaaaccctaagcacatgtgaaattattggngagttacttattatgtttttttttttcaatcttcttacctttattgaacttcggtcttacgaaatttgtatcacactagtcaccaacgcatcttttgggttttattacaatccttttaa

SEQ ID NO: 14273 - DNA, 497 bp, Arabidopsis thaliana landsberg
ctttagtgaaatcctgaagctgaaatatcattctaggaattctgaaaaggaaaagtaccttaaaaaaatttcacattcctggagatgaaaaccacattactctcaatatccatcagcttataccccttatatccagtcggatatccaaggaagacacaagcccttgctcgatcatcaaattttgttcgctgcttaggagaggtgcttgcataacataggcagccaaaagtgcgcaaatctgtgtattcaggtggtgtcttagtgagcctctcgtaaggtgttttgttctccaatagtggtgatggagttcggttgataagaaagactgcagtaagtatgcaatcaccccagaaagataaaggtaccttggattgaaaaaggtgagcccgagcaacattgatgatgtgctgatgcttcctttcaaccacagagttttgttccggtgtctcagggcaagagtggtaggcaatgatccctagtttgctgtaaagatctga

SEQ ID NO: 14274 - DNA, 657 bp, Arabidopsis thaliana landsberg
tgtctctggttgagtttctcttaacggcgctgcgtaaatctgtggtttcttgccgtgtggacaacagacaagacgacggcggagtaggcggagggatttcgtccgccgttcatcacatggagatcggttggccaacaaatgttcgacacatcactcatgtaacattcgatcgattccatggctttcttggtctccctcacgagcttcaagttgagattccatgtcgagtccctagtgcaaggtaatctctcaaaatttcactactgctttagaatctgaaactggatctgaaattgtagcttcttatttaatggtggattctctttgattaatgcagtgtgagtgtgtttggtgtatcggcggaatcgatgcaatgttcttatgatgagaaaggaaacagtgtcccaacgattctattacttatgcaggagagactctattctcaacaaggtcttaaggtaatgggaattggtaatcaattttgttgagaaatttgttgagaggagactgaatttgatatcttgcttttgttgtgtaggctgaaggaattttcaggataaaccctgagaatagtcaagaggaacatgtaagagaccaactaaacagaggtattgtacctgagaatattgatgtgcattgtttggctggtcttattaa

SEQ ID NO: 14275 - DNA, 433 bp, Arabidopsis thaliana landsberg
tttccttcttgaatctggcgggacaacatgtaacaacatgaaattaattgttgaaagtgaaattaatgtccaacaaactaagaagtagacaatattattagaccagtagacaacattattagataagtggacaacattatatcacacaaatttattgttgtcatcagatactgagtcgaaatccatcacctttggtaacttcaatgacgacaaccaaaggtgagctgatggaccttatttctgagagagaaagtgtataaattcacagtccatattaaacatttacaaagaaatcataaaataaatcatataattgatgattcaattgcaaagtaccaataatcaaaataaccatatatcttaagactgaaaagaaacctaagacgctggaaacggaaaccgaataccaaagcagaatccttcagtctccatg

SEQ ID NO: 14276 - DNA, 769 bp, Arabidopsis thaliana landsberg
cccgtttaagtctggtttaacgattaacagatgataaagagagacatactttgttgactattagacaattttatgaatgattacgaacaaccatttgagttttttttgggtgtatgtttagagacggagaaaagacaagatctcttctaaaattatatgtacggaagaaaaaaagcatttatcttttcattaaataaataaaaaaaatcattcaatatgtgaatggatgaagacaatgttgtggggttcagcccaatatagaattttcatatgattctctaatgcgctcctaaattatttattgggtttagctttttagtgacttaccaaatattttttatatagtatttattacatattctataaacaatcataaataatattataatgagtattatacaccaatatgtcttcaactgtccaaattatttatcggttaccaaaaataatgtatttaacatttactttctagtcaaaatttagaatgaatcaaacaaaaaacaaatttgtatgccaaagtttattaattataattctccccttaattttttaattttaggaaatgtatacaattatctaatacaccacagaccagatgattatttgttaattacaacattatacaaaaatctttttaatttattgtatccagcaaaatttcttaaaataggaaaatttcgcaccgtacgtgccaggtaatgatctagttttataaagaacttttgaaagtacctaatgaattaatgaattctgactgggtttttatttt

SEQ ID NO: 14277 - DNA, 496 bp, Arabidopsis thaliana landsberg
gaaaatataacacaaaacccagtagaatagaacaataccatgcttcgggccttttggggacaataatgccggcccaagcggtcccaaaccgctgcttcatattcaaccattggcaaatctttccacagtctaatctatcagcagttataacctggcccacatgttgcctgtataacatcaaataaagaaaaagttaagcatcaccaaaagaggtaattgtcaccatcaaaaccaaacaattacaataggtggataagagaatatagagatgtaagaaattgggaaacttgcataacaaacattaccctggaatatagctaagtaacaaaaacaccttcttaaattcaagttcacccaaagctaccagcctggggaatgtgcagagaacctcctttgtcttcactttttaaagacttacgagaaggagcattagaatcaacagacatctattctgcactcgccgaccatcttaagaaaagtgaagatttttactatc

SEQ ID NO: 14278 - DNA, 641 bp, Arabidopsis thaliana landsberg
cttatgagtatttaggcaaaatatacatgagatgagatacaattacaataaatctaaaatagtaacaagtttctcagattatacatgtacgggtagtgaattggattaatttgtgtttcgctttttctgactaacgctaatcttaccaaacgaatgtgagccatatttttttggtcatatctcgcatgacaaacgcatatagttaagtagggggccctatgctaataacgtttatgtttatttggaaaaaatatctctaacaagtaacaactatatcaactatattggtttagtacataattaaattaaatgttatcataaatgaattggctatacttactatttaattagtactccttctgattcactatatttgtagtttaaggttttttcacaaagattaagaaaacacaaaaatcttatttaatttatctttttttctataaaaatatcattaactacatttaattcaaccaataagaaaatatactgtaaaatataattggtcaaaaattattaaatatattaatttttgcatagatgaataaaaataacattttgcaaaaaaaacaaaattccttaaactacaaatataatgaaacagagggagttgtatattatgtcatttataaagttactat

SEQ ID NO: 14279 - DNA, 752 bp, Arabidopsis thaliana landsberg
tctttggttatgtgtattacattaattaaagtgttatgaagattgaagagttgtttttatatttgtagcaattctgttttgcgttctcattgatcaaagagattttcaagcaatacccattttctattttggttcactagttcttagatcatattattgatggtcgaggttggattactcccattaattaatacaattcgatcaaagccaacatgaacataaatcaatagaaacaaaaaaaaaacttatcttatatgagaaatacgttttgcccaaagcttagggttcatttcatcagccaaaaacaacagacacctacctctctgctttcatggcaacatatatatacgcattagatccaatcagaagatgtaagactagacaggccgtagtaatgagtgaagcttttggaattgatgaactgtgttacgagcttcttcgttttctcagacatggcgggagagaccttgttcacgcctgaaacagcaaaacgaataatatataatcagcttgtaaaatgcagattctttagttatagagtttgaaagattgatgcaaatgtaccaataagactttcaacaaaagtacgaaacagaattccaggaaagagtcgagagaaaactcacctgtagcttcttcttcttaggccttctcttcctcttgggtttgtgagcatcagaattagaactcaagttgctactctgacttgtatgcgaactagtggcagcatgtgaagactggcttcttctatg

SEQ ID NO: 14280 - DNA, 203 bp, Arabidopsis thaliana landsberg
tgagatagaagtgaggaccggctgagtcttccttaacaatggtcaacgcctgaaagactgaacaatacagggcggaaacacgtgaccgctgtggtgctgcgtacgaagtcgaacattgctactagacactctcgctctgattatctgtaaggtcgccgttccctctatgggtcactttaacgtaaggaaggaaactaggaact

SEQ ID NO: 14281 - DNA, 969 bp, Arabidopsis thaliana landsberg
tttctagttataacaaaagtagaatataagttcaaaaatttgaaatcaaaaatgtaattaaatcataatataatacttaacctagacaatgcttgagtcattttctagtattcataggaaaataatttaacagttcaattttcacttcaaaacataaaattagagattttaacttctctcctttcatttttcataaaacaatcctatttttcttttcttattataatgaaataatattctctttcgtagatcattcaactaaaatcaatgattagatcaacaaaggtacttttgggttgagattgtagtttttggatattcatttatttctgactagtataaatatataatagagtaagaaattgaccaaatataaaaataatagataaatgtaaggcttgaaatatttatgtttataggagcgcatgcctctttcctgagatgatatatgtataatattaaaatacatgtgctcatttcgtattatttcatacataacaataatatagttgttgtaatccttattgtaacccttattgtaaccgccctgattctatattatagctgacatcctcaatgtgactattcaccccttttacatttgataatgctcttccttggtgatgtaatgaacttgcttttgttgaattagatacaacttctccaacttatcattcaaagcattgatctccttccaaggcttctcatcagaatctcttgagcttcttacagtcttctcaaaatcctcattatagttcccatctgattgagccagattctctactaattcccaacctcttcaacttccttattcaggaaattcccattaaaggctgtgtcaaacaagatcttgatctttggaagagctcctctgtaaagggtgctgagtaatgatgccttcttgaatccatggtatggacactgagtagtggagcatttaaatctctgtcatgcctcacgacaggattc

SEQ ID NO: 14282 - DNA, 899 bp, Arabidopsis thaliana landsberg
gttttgcaattacaaaacttaaatatgaatttaattattactaagccagtgtaaatgatgcagttaactgccttgcttgctgagcttgggctgaacattcaagaggcacatgctttctctacaactgatggctactcactagatgtttttgttgttgatggctggccgtacgaggtactttttccttgttctgatccttatccttttatagttatactttatcgatgctctatagaacataagcgtgttggcatgtggctgtaatccatttcttttcaagaggtccatttatttatagaatccttggctttatgctttttcgaacttttagtgatctagtagctgaaacgcaactattttgatacgcatacgcaaaaggttccggattataattgtggccgtcatgctatcttcttaattattcaggaaacagagagacttaggatatcattggagaaagaagcagcaaagatcgaggtacttgtttccaattgcaaacttaattaacgtcatgcaaaagatattgaaatttatgattcattgacaaccttttcttcccaaagcaccagattctgagtgaaatggaattagatgctttatgtgaagtcttaaagtttttcatagtgacaccatctgacgcacaagtgttgtgataagttattaataattcgtttttatcacactcaggtgcagagccaaagctggcctatgcagcaatccttctctccggaaaaggaaaatgggcaaacaggtgccagaacgcatgttccaatacccaatgacggaactgatgtttgggaaatcaaccttaaacacctaaaatttgggcataaaatagcgtctggttcttatggagaactgtaagttggctgtatctatcaaactcatgttttatacta

SEQ ID NO: 14283 - DNA, 323 bp, Arabidopsis thaliana landsberg
cgagaaagaaaatgtagtagaaaagcacactatgcaataaggcattagaaacgtcaatttgagttaaactccaacccttcttggcagcacaaccaagaaccagcttaacactagctagtttagcaacaggagagaatgtatcaaaataatccacaccttcttgttgtgtaaattcttatgctaccaatcttgctttgtatctctcaatagtaccatccggattgtacttaatggtataaacccatttacaacctattacattctttcccggaggcaaagaaccacactccaagtcttattaagctccatagccccaagttcct

SEQ ID NO: 14284 - DNA, 921 bp, Arabidopsis thaliana landsberg
  unsure (1)..(921): unsure at all n locations
acttaattgcctttgtaagagaactcaatgtcaatgtgtatcaaattaagcgacaaatgattagtcaataactgatgccgatgactaagcatcattgatgacataatcgtctactatttgtcaacaagtactatcttcaaacctttaccaagcgtaaatggaatcaatcaaagtccaaagtgaaaatgcaagatatgatgggagtttggtatcgggtagggtgatgcgagttactctttctacacatggtaatcactcacttgcacttgtgtttacatatataatttacattagttagtttgcaatataacatttttgttgattcatgtgtannnnnnnnnnnnnnnnnnnnnaccatcatgttttacaaaaaagatggtcacgttttgcttaattccccgtggagactggagacgttttgtttgatttcaaaaatgtcccatatcgattcagttgggaatgagatctttggacaatatataaaagatatattaatttttaactcttgagctagctattaggttaagttaggtcgcgttcctttaaattttggtttaatttttttctcaatgacttcaaaattgaattatatatatcactttttattttcgatgtannnnnnnnnnnnnnnnnnnnnnnnnngtaattagtaatctcaaaacaagaatttgtaatgtggctaaagaaaaaaatcttcttattattatcatcaaattttagtacaaaacaatcttcaagatgatcataatatagaattatatcttcatcaaagatgttataataagagtaaaaataataaatgttgtcctcaggggaatattccaagaacaagctgtcctgttccccccagatccaattctcaaatcctcaaacttcatcttcgtcctcctccaatgacgttgcttcaacgcaattctgatc

SEQ ID NO: 14285 - DNA, 688 bp, Arabidopsis thaliana landsberg
caccatcaacttctgtttctactttataaactccgacgaaaacggaggctgggagagaggccatgctaccttctatggtggagctgatgcatccggcacaatgggtacttaaaagatacctttttcttcatttgcacacacacaattaaatcatcacaaacggatatacttttaacagtcaagtattgatgtttttttaggtggtgcttgtgggtacggtaacttacacagccaaggctatgggctacaaaccgcggctttgagcacggctttgttcaatagtgggcagaaatgtggggcctgctttgagctacagtgtgaggatgatcctgagtggtgcatccctggttccatcatcgtctcagctacaaacttttgtcctccaaactttgccttagccaatgataatggtggttggtgcaaccctcctctcaagcactttgacttggcccagcctgccttcctccagatcgctcagtaccgagctgggatcgttcctgtcgcattcagaaggtaaaaacaattctatatacggctccttagttgtcttttttagtatacggttttttaaagactctaacgtaccattttctgtcctcttataatgatagggttccatgtgagaaaggtggagggataaggttcacgatacacgggaatccgaattttgacctcgggctgatcacaa

SEQ ID NO: 14286 - DNA, 418 bp, Arabidopsis thaliana landsberg
  unsure (1)..(418): unsure at all n locations
ttttgacgattagtctatcggaaaatgtttgtgatgttgaccacatgtcatcatatttttagtatatgtgggcatgcaatacatctagttcgttgtacatttctaaactttgcatttgtgaccatatgtttcgtcctaattggtgtagctgagtatctttttttctttttgaatatctaaactatttcaattctgttcgggttctatgagattctagaacttaggatctattttagtattttcaaattttggtttgggtttggttctttttgcttggttattatgcccaagtctaatttgtatagtggaaagagggaacanagcatagagcaattttggcttctttggttttggtcaaatatactgattcaagacaaagggtaaaaaagaaaaattcactcacgcccggtgggactcg

SEQ ID NO: 14287 - DNA, 626 bp, Arabidopsis thaliana landsberg
tgattcaccgacgcatcaccgtctgttgaccttcgaaaaggcgctggatcttgcacgctctaaggagtgagctcatagaggtttctagagatgatgaggcacagccaagagacaaaacatacccatccaaccaaattctgatctttacgcgtttggtgattggcaatcgctttccttccggtgataagctcgagaaggactactccaaaactgtatatatcggatttaaatgtgagctgacccgtcatagcgtagtcaggagcacagtatccgtacgttcccataacccttgtcgagacatgggttttatccccgcttggtcctactttagccaacccaaagtcagatagtttcggttgatagtcttcaccaagcaaaatattccaacatttaagatctcggtaaatcacagggggcgtcattctgtcatgcagatactctaaacctcttgctgcaccagctgctattttcatccgggtgttccagtcaagaggctttttaccagaagggagaacttgaaacagtcaaaacaacaatgtaaaagttagatgagacacgggggtagctgcgagacaaacaatacagaggcaaaggataggaatgttgatcttaccacaaaccatgtt

SEQ ID NO: 14288 - DNA, 583 bp, Arabidopsis thaliana landsberg
gccggcccagacctaaagtcccaagaagcagatgctttaggcagcaaattttatatgtatattaaaggacatcaaattcttagaaatatcttgtagtctagtggtgttaggtgtatctgagggtatttggttaggcctgggtgttcggctaaactgggttgttcggatcggtttgttcggtttggagaaaatttgggtttttaaaaatttcaccgaatagacccgaattaaaattcggttcgggtcagttcggtagtcgatttgtttgggtcggttattagctagaattaacgttccaaaatttgaaccatacaaaaatttatccggtttattcggttttttattttggtttacataattaaaaatgaaaatttacagtttacaaatccaaacctaatcaaattaaccattacaaataaataaaagcccaacatacaaaggaaattatgaaaagcccaacaaacaaagacaattatcaaaaccctaacttataaaggtaattataaaaagcgcaaaacctaattagtagcccaacccaataaaatattagggttttgacagtaatgtgagcagcccctttacg

SEQ ID NO: 14289 - DNA, 754 bp, Arabidopsis thaliana landsberg
tcgggatctggcagtgaataagacgcgctagtctcctttggaaatttagatacaagaatgccaagaccttgtcttcgttctctcaatacctataacaataattaaatcaattttacttagatgattgaacataaattatttaatttaatctaataaatgattactaaattctgtatataccttgaatgcatcttcgtcggtgcgatcatctccgatataaagagggaaaacgtcggtacaattagcgtatcctacacaatccaatactaattttaattaatactattgatataaaccatttctctcgtcattaaatagttaattagttgaggaatattttaccaagtgactctaataaaaactcgagtgctttgcctttgtcccatttaataatcggacgaacctccaaaacctgaaataatatacgagaatataaaccagttaataaaataaattatagttaccttatactttaataaaataataattaatacgatatcttacttttcttccttgagtaagacggagcttagggtagtctttcattactgatcgaacttggttagccaaatcactccagttctgttttcaaataaataaataaatgaagtggttagttttcttttaaatacatgagtaatcggatattgaaaaagaatatcatcgtacattttcatctacgccgtgggaagtgaacagagacacaaaaatttgttggtctcttattggggcttccgggaggaagattttggtt

SEQ ID NO: 14290 - DNA, 755 bp, Arabidopsis thaliana landsberg
cttttttttttcccaacatcgaaagcaaaaatatttcaaaaagtttaaagtgaagttataaataacactgctactcttacttacatcacaatcaagatatgaggttgcatatttgaaagcccgtaatttaatttattaagtggattatatttttagaggttcacaacagatgaaaattttatttgggtgttaacacagcctatattacttaatggtcgatactacgtgcaacttcggttatttgtagttgattgggtagggtatttcattttttggtttttagattttttaaaaacgtttgctgaatttaactgaaatcagaaatcggttccggtctgtttggctctcgggaaattcggtttatgggtctgataaccaaatataacaaaaaaaaaatcgataactacataacaattaaccaaaattagaaatcggtttggattggtttggttcccggctaattcggtttatggatctaaaaagaaaaaaaataaccaaacaaaattcagttttcctagcccaatttgttgaattgacttaactaaaagaaatcatttgatctcataggattatggtacgaaacccacgttttctatcattttcctacgaaaatatgtcgtagaggatgtccaataggaaattgtaattggtaaaaattttgtaggaaattttttaggaaataaattcgtaggaaaattcgtaaaaattttataggaaataaattggaatattttcaccagtttcttatcagatat

SEQ ID NO: 14291 - DNA, 567 bp, Arabidopsis thaliana landsberg
tgatagtactatgtctaatgactagagacctgacccttgaaatagtggtgaagaaatcacgcgttatgcttctattggataagtcgtttggatcaagcaagttgacgtcaatatctaccttggtagtgaaacctagattgatgaattcaatgctctttattgagtgagctttaatactcaaaaactggagtagaggagtatcgataacaagtccattatgtcgatcaaaccgccgatgtatttcgactctctttagtgtctgagagcgtacttgtataacctttacattatcttcagaagatttgacaatggttaactcttctagaactggggagcatgagataattttatccaacgtggtctcattggtaaaattaacaaaatctaagtccagaatcttcaggcaaggcaaggaaacaaactcgacgttaaccatggtgactcgagagagttttaagtgtacgagtgtatcacaagtatacaagcttagtggtatgacaccgaagccagaacaggtaaaaacactaatatcaatatgctgaatcctatgcctagtcacaagatcta

SEQ ID NO: 14292 - DNA, 457 bp, Arabidopsis thaliana landsberg
ttgttcaagtggacatcgcctatcgtttgagttttgtgtgaacaaccttaacacaaccgtcatcaccaccagtcatcaaatgccccatcaacttgtgcattgtaataacagatatcttgtcggcaggcaactgatcaaggtaatgtgcataagttgctttgctcttccctaatctatacaactcctggtctttagcaattgcatctcttaatggttcgaaccaacccagaaataaagacttcacataaggcagattaggcgcaagcttttgctcacacatatctgtcaaaagctccatgtactctgcagcagctctttcccattcttcagtctcgatcttaacttgtcttctccataaattctggaacttggtacgacccattccaaattggtcttgcttcttcatccgccacgaacgatgactttctctcttcttctctttcttcatctccttcaa

SEQ ID NO: 14293 - DNA, 718 bp, Arabidopsis thaliana landsberg
agtgcttcacaccaggtggacaagcttgggaagctttagcctctccatggcttactggagtagagcttgaagaatgtgcaggaccatcgtcagccattcttcttatacattccagtctctttagttgactgtgatgcacaccacttccaatcatgccttaactctctttaagcatgctccatggtgaacttctcattgtaatcattctcgtaaatttgatgggctacttcatcagatcattatcatttattccatatatgagttgttgcaaactcatgggatcccacaaacttgcatacactcttgttgatcttttcccacttttgtttatagtgtttctctctttttcagactaccaactgagggactatatgcaaaataagctgcaatgcttcataaggcatttggtcgttgcttattaccaacaatggcatcattgcttgtgtttagccacacaaagattagcacagcagtgtctctcactgaccacttggtccatgttctttgtatgctgaagatacggacgtcagattcattaattccaagacttggtgaaatactctcatgaatgatgggggtttcttgttgactggctaaaatatccatgaagccgacaaatgaagccgacaaagttagtatatggattcattaagagtgaacagagagtttttgggacttttaaaaaagaggatgaaaggcaataaagattgaaaattgt

SEQ ID NO: 14294 - DNA, 607 bp, Arabidopsis thaliana landsberg
  unsure (1)..(607): unsure at all n locations
ctcccctttctctgatatgaatttcttttctttgctgttccagtgaagtgatttggaattcttcaaataagttcgttgttggatctggagctgcttttggtagttttttggcattagcatgaactgttctacttggaggcttcttgttaagctgaaaccatgctaaaaattgtgttgcttcgttacttaatcgatccattacactctccgttgtttcacctagaatataacaatatcttaattacacgtacataggttatgataatttttatctaaaaaaatgattccattatgcgcatgctacaacaacattatatactgtatcatgtttctatttttacgaagtggcccactacaagaaatatctacattgatagcatatgacgatagctcatttttcgtcactgctatgaaaaatgaattttactttttcattactatataatngcagtactacaaggcttagatcaaaaatcactaaaccgaaagcttgaatcacttattccgccaatacttcgatgaaaaattcacttaagcgccataaattttcatattcaaaatttttttagtctcacaatctatataccccaagcaaaaaaaaaaaact

SEQ ID NO: 14295 - DNA, 502 bp, Arabidopsis thaliana landsberg
tttaaagacaaatgctatacacgaattcaaatcaaatggtattataagctgtgatggtacacggataaacataaactacgaaatctatgtaacaatctaattcgtgttgacttgacaaaaatttggttttggctaggtatgatgatagaaaaacactgataaattatttaaggaaaaaattaggaaaaaattcgactaatttttatttgaaattttaatattcaactgttttttattggaaaacaaaaacataatatataaaattgatcttaaaaaatacgatataattttgattggtgaaatcatacatacaagttaacaaacgttaatttggatgacataattgctaaagtggagttaatagttaacaagccagtttgaaaacaaatgaggggactgtaattttttacttagtccagttaaccacgggtttttaactattaatcttggtttaacgattccgttacccaaattaacgtctcttaactcgtacgtatgattt

SEQ ID NO: 14296 - DNA, 754 bp, Arabidopsis thaliana landsberg
  unsure (1)..(754): unsure at all n locations
gacttttaaaccctgcaggctgcacacaaattctgaagaacattctaacagagggcttgatgcatcacttgtgtaaacaaaaacactgaagaacattcttaatgacgtggggctccatctttacaacagacctgtaaaacagagcttccacactgattaaaaactagcttgtgactgctacataaaacagaagaacaaacattagagagatctgcttcaccatcaacaaggaactgctgtcgccaataagaacaggatttgagcctgccgtacgcacagaacagtcacttctgatgtgatagcagttctaagaacagattgtagaaccaacttccaacagcttacgaccaaacttgcagaacaaccattaacatcaactcttgtattgatccgctcttctttgtaaccatagcaacatctagcatatgaatatatattcgatctcttcgttccatctcagattaatactccaaacaccttgagacaaccacataaaccaccagaacaccatgtttctgcttaagagcaacattgaagtcaagtccagacgaataccttgagacaacctttacctagcatcttatgtgcctaacagtgagccagagtagataaagcaggagaaatgcacttctgtaatagttgttgtagtatgtggtacgtccaatttcaacacaagaatctcatataaaacccatagattntaagaactagagcaacaacgattcatcgaaattcaatagtgatgtcccaactt

SEQ ID NO: 14297 - DNA, 966 bp, Arabidopsis thaliana landsberg
aagaactcgttgactgtgacagaggttttgtcaacgctggatgtgatggaggtatcatgaactatgcttttgagttcattatgaaaaatggtggtattgagacagatcaagattacccttataacgccaacgatcttggcttgtgcaatgcagataaggttcttaaaccaaacataatgactttagtttagttatgactcaatttggtgtgggaatattaacatttcatctgtgactgatattgcagaataacaatactcgtgttgttacaattgatggttatgaagatgttcctagagacgatgagaagtctttgaaaaaggctgttgctcatcaacctgttagtgttgctattgaagctagtagccaagctttccagctttacaaatccgtaaattttcaatcacttaaaaagcttgattgattctttattcttgattcgattattggtttttctttaaaccacaaaattatatgttttgtgttcatttttcagggtgtgatgacaggaacatgtggaatatctttggaccatggtgtagtagtggttggatatggatccacaagtggtgaagattattggatcattcgcaattcatgggggttgaattggggagatagcggttacgttaagctccaacgtaacatcgatgatccatttgggaaatgtggtatagcaatgatgccttcttacccgaccaaatcatcattcccatcgtcatttgatttgttgtctgagatttgatttgatcttcctgtaaatgattaataactaaatattttttattacataatccaatgggtcaagtcaaatatttgaaagtctcacaacatgttcacattaatgaagattccaatcttgtcttgtgtttgaaggaacctgtttggcagccgcagcacaatctaagttcagaaagaaatgtgatgctgatggttttggttgttgtcacatgctttgtttttttt

SEQ ID NO: 14298 - DNA, 718 bp, Arabidopsis thaliana landsberg
taagatactaaatgacgaggtccaagaacaagataaaaatgaaccagagaccacttcagaagacaattttttttgcgagcaactatcaattaggtgtcctaggttcctagcacttacataataggaaaattatactacaaactatcattgatctagatcataaagtgtgttgctctcaataaaagctgagaaaaaaaattcatctagatatggtaacaaacaaaagaaaccaactcactcaaagctactccaaagtatgctatctatgtaaaaacaagctaagaacttccaaaaagagaccctccacgatccattgattagatatatttaccttgctagttatcactggagttgtcatttccatcttctctccaacagattggactttccgagtaacaacaggggtcgtcatctccattttctcctttattgtgttctattgaaaacacaagtatccagatttaaagcaaaacaagattcaaaaatcaaacaaaagtacagcaaaaagtcataaggaatggttcatgagtaccttaccaaagaggtactcagctaaaacattaaaagacttggaagcaccataagagtcaaatccagtttcccctggcattatagtctcggccacaaaataaggctgtatcaaagtcatagcatcaaacttacaccatccatgtttaaagagagaggaccaataggaccaacgtagagaaaataagaa

SEQ ID NO: 14299 - DNA, 520 bp, Arabidopsis thaliana landsberg
gtggaatattgtgggagagctattctggtgagtcctaatgatgggaatgttctagccatgtacgctgagttggtgtggaagatccataaggattcatctcgtgctgagaattacttcaatcaagctgttgcagctgctcctgaggactggtaagaaaaagattctaactttaaaaatcaagctctcttctttgggactttgatagtagttgtgtgactcttgtgcttgaattctgactaacgtacttgttgttttctgcagttatgtacaagcttcgtatgcacggtttctatgggatgctgaagaggaagaagaagaggaaaaggaagagagacatgaagaagaacttgagcatcaaacttctcgaatgaatttcttcaccggaccttctccaatcacggccatgtcttaaacttgtggtcggcattaccatccagtctttttatagatttagttaaacttgtcacgtctatgattttattatctaaccctgtgaattctttagttaagccttttctgg

SEQ ID NO: 14300 - DNA, 580 bp, Arabidopsis thaliana landsberg
actactatgtattttgggcaaaatgaagcttgcaaaaaaaatcatgtagtgattcataacgaactcggtcctggtattgatctcaacattgcatgccgacaattcagcatagagcgcacaccttcaatgtttcacaccctaaagtacaaagatcctttttatatcattgagttcgaggataataatcagctacctcatggtgaaagatggtattgtctgcttagtcacggtactagaccaaagtattggtatgatattgaagtatatcgtcaaggctattatccaagttgtggtcagctacgctcatggattgctaaacaagatggaatttggtttacaagaagatatgatagcccgccaggacatgttcttaattggaaaattcagtaactaatgtttatgtatgggggtatttcattttgctgtcatatgtactaagctgtaagagcgaattaagtcatcgatctaattcggtggttatatacaagttcatttgatatatctctatgtattttgcatcaacgttttcaataataaaatagtatatttttatactattttgggttatatgtttggatcg

SEQ ID NO: 14301 - DNA, 527 bp, Arabidopsis thaliana landsberg
  unsure (1)..(527): unsure at all n locations
tgcaacccaaacataaatcatttaatgaaatgaaatcatctcaagattcagttttgagaaatctgaaaaaataaaatcatcactatatcttctatattaagattattttacatcttcaatccaagtttccttaatttattaaacttttcaatcataattaattatttaatcaaaccaatcagttccaccgtataaacgtaaatagtatggcatcaaaatagaatagtacaaatatagttacaagtacctctacaataaaacttaaatagattattggctaaatttcatttcaaccaatcgagaatctcttatggaattttattaatcatttaatgtgcaatttcttagattgtgaattggtggagaatcgttcggtagtgaaggcaacaataagataaaatcgtttgggtccttcgatctctctgaagcagatctagaatcaatattaatactaaggctagagtttggttaagaagaagaaatagtggccatgacanaataaatatgaaggaatcatgagatatata

SEQ ID NO: 14302 - DNA, 911 bp, Arabidopsis thaliana landsberg
  unsure (1)..(911): unsure at all n locations
ggtaggagattctgcgttttcattttgtagggtaaagctgtagtaacatttttcgatgcaattttggataaggctctccgcagcatagttgctttgattgcaagtcgaggacgtggaaaatctgctgcacttggtttagctgttgccggggctgttgctgctgggtagatttcttgaattaattttactatatgttcttctactcatcagtattaatttttctggatgtttgtgagaattattgatgtgtgatttacttgctcttaggtactcaaatatttacataactgcaccaagcccggataacttgaagacattctttgagtttgtttgcaaaggctttgatgcacttgaatataaggtaatgcaaagttcttttcctacagattatttttatattgtatttgttctatttcattgagaagaacctgcaaggtgagagacatatgcatagttattgagataattattgaatagacctacactatctcaaggatagaagaaatcattaaaccattttgcgatgtggtcatatatggttctaaattacgttccattattatttttataggagcaccttgattatgatgttgtgaaaagtgcaaaatctgacttcaaaaaagctgttgtacggataaatatcttcaagcagcatagacaaactatccaggtttgttaatccctcaattaattcatgatcttcaagctgtgatttgagtccctttccgacgtgttccatgctcttgatattttttatgcagtatatacaaccacacgaacatgagaagctttcacaagtagagctgttggttattgatgaagcagcagctattcctttaccagttgtgaagtctttgccccctccttatntagttttcctatcctcaactgtcagtgggtatgtgagatgg

SEQ ID NO: 14303 - DNA, 769 bp, Arabidopsis thaliana landsberg
cttaatagtgaacaaatatatttagaatgtaaaaataggatgtgtagtgtcattttatttgctctccattttacatgttgatacatgacatctgtatggtccaactttcctaatttgcgatatgaaaagattgttttggtaataaagttgttatttttttttaatattacttttcaataaatttgtctgcgaagaaggttcttttctatctatgatcctactatattatttgggaagtacattttaaatataaccttaatgtttgtaagtaattacataggtatgccattagaaataaaattttaaagagtaaattaatttatatttttaaggattaaaaagtcaaatactaattttaattaattaaatttaattaaaaaacgaaatacattattaatttccaaaaataataaccaatcaaaatcaacatataagatttgatatctaaattttaattaatttaatttaattagaaaaacgaaatacattattaatttccaaaaaattaaccaattaaaatcaacaaattatatttgatatctaaattatcatattaatttttttataattattatagttcacttcttatctttatatgattctattcttgcggaagaataatatcatcattataaaaaaataattagagttttttcccatatgccataaattgaatttttaaaacacatataaactgttcaatcatacaaaatattataccggtaaaactagtttaagaacttttactgagaacggcatattgaaatta

SEQ ID NO: 14304 - DNA, 657 bp, Arabidopsis thaliana landsberg
tactatattttttatttgatattatcaagtatacatattatatatgattgatatatagattggtttatacgacttcttcttagggggaatgaaatattatgtgttgctgttggcaagtattgtgcggattttgtacacaagtgatttaggaaaatcagtttgatcacttagaattacgagcccattgttgatgtcttgcaaatttggagaatcacaaattatcatggtattactttttctcatcaagtggacttggaatatatcatagtagaaaaacttatgtgtttgagaatgtgcctattttcttctaggatctaatgtcttaatgattgaacatggatttttaaggctttttattgatcctaagttcaatgatcttgatataccagcctatatgtaagtgtcaattagccaatattaaggtgtttttaaaaaagtgaattttgtagagttaattgttcacacattgttcgcatttgtggattccctgatcaagaagatgaagacgatgatttgatgatggagatcgttgaagagaactgaaattgcggtgtactttaggatataattttctcagccgatggaacttatgctctatttatgttttgagtttatatattaaggatcctaaaatttttattaatgtatttaatgctt

SEQ ID NO: 14305 - DNA, 451 bp, Arabidopsis thaliana landsberg
ctcctcctctcgctctcttagatcacaaagttttcgtttatgttctctcatcgatctcgtaacaattcctgtggaacccttttttctttctttaatcgggatcttcattttctctgttgtttgatgttttttttttctcaaaaaaattcagggtttgtgatcttcttcttcatcaatggcgtctagtgataaacaaacaagcccaaagcctccaccttcaccgtctcctctccgtaattccaagttttgtcaggtaaagttatgatttttattcgatttttggcgatacccattaagttctgttgatttcatgtgttgaatctcgttttgcccatttggagtctgccgttacggagataatcactttagttctctcacgagatcatgcgtaggttaatactttatatggttggagtgtgaatctcgtgttctgatccttgtttttaggtcg

SEQ ID NO: 14306 - DNA, 824 bp, Arabidopsis thaliana landsberg
atcataaaaaaatttaatctcaattcttaaaacgatgtcggttttaagttatagcatcaaatacttgttatttagactcagcaaccgtaacagttgactattacccattatttacgattttgaattgtgcactaactgaaaagtccagatataaaattcaaattttttgaagtttggatatgaattaatcctattatttattcgcgtatgaaaatatacttaacagattttaaggatatgaaaatactttttactctatatgcatatgtatatacttgtttgaactttaaagtcaatggagaaaatacactagaggttacaggtgctgccgctgcaatgcaacatgtcgtttatatagtaactgatagaaactatcaactaaagtctcatcactaaattttccttaaaacttattacattactcactactacacaatgcattaaaaataacatatttgaaagtatattgtatatgctaatttttgatgtgtacttaaatctcattattggtatataagtaaagaactttaaaaactaaagataggcagtaaaacaaatcatacataaaatttacgttgaaattagtttgaatcaaatttgtgatctacagttttcgtgtaaaactaatcaaagaaaaacgattcaaaataaccaatatattttgaaatgatgattaaaacttggcgacaaatgaaataaaaataaacaatgggaaaaagatttatgttgttgaccaattagagaccaaaagactggtttttgtagtaaaaagcagaatacgtacaaaacaaatttagcgggtgggtatatgaaatttaggttca

SEQ ID NO: 14307 - DNA, 747 bp, Arabidopsis thaliana landsberg
tttttaaaaccgttttcgtccatgaccgatcaactaacgtttcttcatttcgtcaaattagttatatacaaaacatacatttgttgttggtgtattttattttatttaccttacacaatatatgccgacaaaaaaaatgtgtttaatttgaaaaagagccagggttcggatgtttttcttttatgttttaaaacaaagcaacactatattataaatataatatatacaataaaaatataattaaggaatagagattaaaaaggaagaagtgcaaatggtttttcttcccagaattgtaagcaaaccatacaaccatccctttctcatcatcatcattctcccttcatcaagtcttctctcttttctctctctattataaaacaaacttcactcgttcacatcaatggatccttgagaaagacaaacaaattgaagagaaataataacaattaactcacccaaaaatatgaggaagccagaggtagccattgcagctagtactcaccaagtaaagaagatgaagaagggactttggtctcctgaggaagactcaaagctgatgcaatacatgttaagcaatggacaaggatgttggagtgatgttgcgaaaaacgcaggacttcaaagatgtggcaaaagctgccgtcttcgttggatcaactatcttcgtcctgacctcaagcgtggcgctttctctcctcaagaagaggatctcatcattcgctttctttccatcctcggcaacag

SEQ ID NO: 14308 - DNA, 477 bp, Arabidopsis thaliana landsberg
ttctcttttctatcggccatatttctctaatatattggatgtatcccatcgtgactaatgtcgagcctatttacagggatctgcaaagagtctacctgcttcttgcacctcaagtatgaagcctgaattggtaaatttatcgaaaacatacttgatatacaaggcaataatttttcgagttcgttgtattgtctaaacgctatgtttatattttcacagggtggcttccctcaatacggtgctaagaccttacaaacaccgcttttcgtcatcaatgccgccttcgattcttggcaggttcgattttgtttttattgagttattgtttcggtaggaatagtaaacactagacatgatttggatctaattcttttttcctttttttgcagatcaagaatgtattggcaccaacctctgttgataaaagcaaagcgtggaagacttgtaagctcgatcttaagaagcgcacggccgccc

SEQ ID NO: 14309 - DNA, 527 bp, Arabidopsis thaliana landsberg
atatgataatcaaaaattaacgtatatgtatataacttagttcatcttcaagacaagaatttaccttcaaataaggggacaatgtcttatagacttgaatgtttaccatatgttccactctcccaattacagatgctttcaaattttgctcgagttctgttgataagaacaagtatatgtaattattttcaaaaaaattagataaaacttctcaatctaatccatgatatattcacaaagttatagagatacaaaaatttcatatcaatatattattcaaatcagatacatgttatatgatcaccatactaaaaacaatcttcaaaacccaatatttaaaactttcaatttaaacaactctgaatagttttgataaacagatgatactatcataacttagttcaatacccaaatacaaacatgaaaataaaacaatacgaagttcttttgaaataaatttggaaacttacctttgtctaaacgattaattgattacagagatcacaaagtaaccattgtcagaatga

SEQ ID NO: 14310 - DNA, 511 bp, Arabidopsis thaliana landsberg
cgatatatagctatatagcttaatatctcagtcatctccgccgccgacttcttggtgaatgcttccttctcccttctttgagccacgtctcgctgatctttttccgacaagcgcagccgctgcctcatcgtaagcatccgctgccatctctgccgtcggaaacgttccaagccacctccttgttcttgtactcggatcccatatttccgccgaccattttcctgataataacttagtaaagttataaaccgatggaacaaactcaaagatgttggaacataacatattcattggaacaaaatttatttacctgatggcttcttcctcactcctttatgcttcttctcctgcttaatctcttcatgctgtgggaatgcgcacccgtagcaactggtgacgccgcaaagaggacaagggccagcgtccgaaggtggaagagcctcacttgcagcaatgtagtgagatgatgacgtatcacctccagtgttggatatcacttgtcggaaagtag

SEQ ID NO: 14311 - DNA, 873 bp, Arabidopsis thaliana landsberg
catgacttcctttctccctcttaatttctaaaatcgaaatgaagatgcaaagattgtagtagtgattttcgaaatgtcgagtagatggctctgaaatggggaacaatgtagaagatgcagcaacaatgaagtaagtaaagaaatattcaaaagctgtcaagggtgaaaccgtaaaaaactataacgtataagtacataaatttgtgagtactatgagatatttctatatccacaaaggcataaattttaatgtgccaatcccataattgatccctaatttatatccaaaaaataatgtttaaccatttgtgtatatatatatggaagtcaaatctgctatctatcgatcttccacccagtacttaactagtagaattataggggcttttataagaatgggcatatattgggctgaaaattagaaaatgaacactttcatagagagtttataggattcggcacttctcctgacatactatgacgattttgccctcagaacaattaaaggaagatgacggtgaaatcgtaaactgataaacaccaacttcagatttcttgaaactttttgatggaataattccaaatcataactagttatcaccataaacaaattttgcttgctaaatctaaaccataaagataattagaaggaatccccaatcaaaaactaaaccctaaagataattgaaagggaacccaagtaaaaaaaaaaaaaacgcacattaataaatccatctccaaacatgaaattcatcttctatatgtgaggtacagtgatcttcggcggaggtgtataattgaaattttggctttgaaattttggatcttggttttttcgtggatgaaagagatttaacaagggaagcttatcaa

SEQ ID NO: 14312 - DNA, 768 bp, Arabidopsis thaliana landsberg
cacaaacatgggcgtgcacaacattttcaacataagtgaaatcatagaagttctcccatcccttaatgactggcaataaaatcaaacatcataagagtcctaatattttttgggggggaaagcaaaaaagacttgagacaatgcatctttagcttatttattcattttattgagatctattttcttaggaagcacggcattttgttagataaatatacacatatctgcaaaatatcatatctttcaatatgtatatacactgtaatggaagtagcaagactgattaacatcactaaaaaaggagagaccagagcataataggtcacaaggaaaatagatagcatttagaaggccaaagagataaaacaaagaaaatagaggcaaccttggatttcccagccctggcagcagtaacaagcgatggaaccattaatttatcaccaggaccaaatatgctgctaggacgtatgcaacaagtgagtagtccacttcttccattcgctttcaaaatcaaagcttccccttcagctttagtagctgaatatgaatcattatgctgaaaagatagacattctcagtgacagaagctcaaaaacctctccaaattttcacatagtcctgtgaaaatatcaagttcttaacaacataacaaagaaccttaggtggataccgcagtgattcatcagcattcaaagtaccatggaccccgtcaaacacaacacttcggagacttgtatagattagccttttactccacctcatacaagc

SEQ ID NO: 14313 - DNA, 545 bp, Arabidopsis thaliana landsberg
aagggaaactgtgaagaatgtctgctttgtcattgtctttcactccagccatgtaaatggtcgacttctcgagactaatctgtaaaccggagaaatctgcaaatttaccaaagatctgaagaattccttctatagaacttttcttgccatcggtgaaaactaacaaatcatctgcaaaacacaagtgtgtgagcttgagatgttgacattgcgggtgataccctatcctcctgtcccaggcagccttattgagcatgtgagagagcacattcatacaaatcacgaacaaatacggagatagtgcgcagccttgcctaagacctctttcacttcgaaataaacccattaattcaccattcacttgtacagaaaaagatgctgtggtaacacaaagttctatccatttgataaatttcggtggaaggttgatggcagtgagcgttgagagtagaaagggccattgcactgagtcaaaagcctttgaaatatcaatctttattgagctacgagaggagactgtttctttgtgataggttcgtaactat

SEQ ID NO: 14314 - DNA, 521 bp, Arabidopsis thaliana landsberg
cactttcgcttttcctctctccaccgactcacgctggatcgtcgacgacggcaacaaagggcggcgcgtgaaactcacgtgcgtcaactggccgtcgcatctcgaaaccgcggtggctgaagggctgagcaagcagccgttggaagcgatcgcagggaagatagtctcaatgggtttcaattgcgttagattgacttggcctctctacttagccaccgatgaatctttctctgcttttatgacagtgagacaatcactccgcaagtttcgtctctttgaagctgtttctggttttcaaactcataatccaacgattcttgatcttcctctaatcaaagctttccaggtaacaaaactcgataaaatgtttacctttttcagaatttccctggaaaggttttgacttttctatcttcttcttaggattcttgaattcttgtgtagtttgtaatctattaattagggtttcaggatcaagacagatgagaaatttgttgttctttctcttaaaacaggaagta

SEQ ID NO: 14315 - DNA, 728 bp, Arabidopsis thaliana landsberg
gctcaaatttgatatcgaagtttctggtattattgtcttgaggtggaatggtgagaagtattatggtgacatggaactaagttctggtagaaagacatcgaatttcaaattagaagatcaaacgaatgatgttgtttcggatagtcaattcaaaggcttatggagctatatgattaggtaaggttagtaaatttaattttgtttctctgtttttaactaaaattttacatagaagaaagtagaatgtagggaagaggaagaaactaacgatgacaatagtcataaatatttgacaattaagatgacaagaaggaatacaagagtacgaaaacgatgaatgtgaagagaaatacgaaaatgtatgtattggctgctaattgaatatgagaaaacaagattgatttatgattttttatatcaaatttgattttagacaccatagaataaaataaaaaactcaaactttggattcaaaacctaggaaattcatattcatgtggttaaagctctaaaccaaccaagtttgttgcaatgggttagagaccgaaaataaatcagtgagtgctcaagtagcgagaagtaagataaaaacagctctaacttgagttcattggccgaagactaaaacagatccaagagagtcaaagtgggatttagaggaagtttgtgaagaaaaagtaatttctgttgtttttgtttttgttttttgaatacaaggaagttttgag

SEQ ID NO: 14316 - DNA, 460 bp, Arabidopsis thaliana landsberg
ttcttcaactactagattgtgtgtatctctattataaccaaagattacaaacctgaaacacttgaatcaaatttttgtgattccagggaaagtatgttggcattaaagagataacttacctcttgagatgtaacaagctgcgagtacataggtaatatgaatgaccaagagctaagctgcaatacattttgtaacacatgtttagggtataactttttttgctaacagacgggaagtcgagtaggtaatgtgagaataagtacctcgagaaaaatttcatcttcaggcttaagttatattgtttcctcgttctcttcttcaccacgacattgttaaaacaagaaagagaattcgaaaaccggaaataaaaaaaacttaccagaacacttaccttgtagatcttagcgattagaatatatgacttgaagcggaatgaccctcgaagctcttctgtaggctg

SEQ ID NO: 14317 - DNA, 599 bp, Arabidopsis thaliana landsberg
gcttcttgttcgtgtttatggccaaggtgttgagcttttcttcaatagagacgatgagattcgtactttttagtatgttgctcgtcatggtcacggtcctacacttcttggtcgcttcgccggcggtagagtcgaagagtttatccatgccagggtaaataaaatattattctttcacttttatttatttacttttttatcatcaaccgaccaatctagtttttagtttgttttttcggtttggagtttggtttactagttattcggtttatgaaattttgaaaccggattggaaaatccggtttgatacagttcttgtttcagtatgaattccatttttagaaaatatttgatgattttcatgtgtaagtaaggatgtaatttctccaatcctgcttttagtttggttacggttttctagttgtttggtttatgaaaccggattgaattcaaatagcagtcggttttggtttgatattgttcatgtttggtataaattgggttccttacaaaatatttgacggatattgatcaggttttgatttgtcaatgattttcagattttactgtttatttttcatcaattccgatttcgttcg

SEQ ID NO: 14318 - DNA, 841 bp, Arabidopsis thaliana landsberg
tgtaaataaaatcccaaaagtggaacactaaagatataaagccgcgagagaaaaaaaacgtccatgctttcatattcattgcttgaatctctctctctctctgcagacatagacacagataagcttaccatctgaaaggagtataatgtcctaaggaccatattataacactctctatctctctctaagtatcagcaaaaaaacagagatttatagagagagaaaaaaactatggctcacataaagacctaacagacacagtagaatagtcccacttccccaccaccaaagctcagatcatgatcatcatcatcatcatcatggatccggatccggatcataaccatcgacccaacttccctctccagcttcttgattcttctacctcctcctcttccacttccttagccatcatctctactacttccgaacctaactccgaacctaagaagcctcctcctaaacgaacctctactaaagaccgacacaccaaagtcgaaggccgaggccgtcggatccgtatgcctgccatgtgtgctgcacgtgtctttcagctcacacgtgagcttggtcacaaatccgacggtgaaactattgagtggctactccaacaagcagaaccagcggttatagccgctacagggactggaaccattccggctaacttcacttctttaaacatctcacttcgtagctcaagatcttctctctctgctgctcatcttcgtacaactcctagtagctattactttcattcaccacatcagtccatgactcatcatcttcaacatcagcatcaggttcgtcccaagaacgagtcacattcttcggcttcttcttc

SEQ ID NO: 14319 - DNA, 473 bp, Arabidopsis thaliana landsberg
gagatctcacgtttggagaaaatgtgtacccaaagcgctcgtccctttcactgtcccaacaatgcttggataattaggtgccacgacaggtttcccacactgcatcgcctcaatgatcgtcaaatcaagcccctgtggtctcaacgtcggattcacaaacacatctaaagcgttgtagaaaccagagagctcctctggctctaaagctcctaaaaccctaacgttgtcgtctaattccgcgtatcttttgccccaaggaccagatccagccacaagcaaatagactttcgggtgcattttaacgagcaaagcaaacgcttcatatagaagtggatgtcctttgtctctcaccaaacgttcagacacacccatcacaatatatgtcccattgtcaggaataccgagtttcgccctgaacctagctccagattcaggagaatacacgaactttgtttggtcacaccgttgactat

SEQ ID NO: 14320 - DNA, 479 bp, Arabidopsis thaliana landsberg
cattcaagattgcggcaacattcttcaaccaacctcaacaatcaccaaagaagggttgccgtggaagaatggatgcgcaagccagggaagagcacgagaagagaatggttcaagagcttcaaggagaagtcatggcttgtggttacgacgacgtcctcgtcatgtggtctattcttgacaaatctaactcctcaaataacctctcttcttaaccccaaaaccaaacacaaagaaaaaacggtttcatgatcaaacattttgtacatatcttaaaagcggtattagcccaccacaaccatctcctactcttcttcttcttcctccttatcctttttttttaaggtctagtgaatattttttccggcgagatatcgtcgagaattttagatggtactgtcttcccctttgataatccctgaagagtaaatcacggtgggaatgtttttttgtatttggagaaaaaatgtctttctgaattc

SEQ ID NO: 14321 - DNA, 872 bp, Arabidopsis thaliana landsberg
aaggaaaatcatatttttctatgcatttatttatgattgttttatttgttttttaattcttaccattaataaaattatattgtcaaataaattcatttataacattatttatattttaaaaacatatataatttttaaaaaataacagtcacaacttctacagttttgttataccaatcagattttaacatccaaagttcttaaatcgaaagtctttgcagtcaaagtttgttataccaaagtttttaaagcgaaagtctttacagtcaaaactaatagtcccttccaatcaccccctttacaacactcttaaagccttgaaagtctcctgccaatcaccattgatgtataggatatcatatttacatgatatgttgatggtccactaacaaaaggtccaatacacattttgatatcaccggatatagttgtatttggtaacttatgtaagtgataacgatggaaatattttttcctcaatcctcctcctactaaaaacttttgaaaaaataataaaaccaaaataaattgtgtttgatatcttatttatcatcattaggaaacatttttttgttgtagtaagattataagatgtaatatagagtcattaacgatcaattagattttcctttgagttggtcattgttgtttaccaattaccacaatatctttgagaagcaacatggaccgaatagtagcgactgctagttatggctttagaagatttgactttaaaagtttgagctgcaaagaatttcgttgtaaagacttcggatgtaaaaactttgactgttaaaatctgattggtaaatcatagcgatagaagttgtggatgttatttattattattatgtatatatattataataaat

SEQ ID NO: 14322 - DNA, 646 bp, Arabidopsis thaliana landsberg
aaattaaccgcgacgccctcactggaacaattccacggtagatcaacccacgtctggccacatgagtcgcagattctgagcacgaccactcgaaatcatcggtacgagtaatccacgacacaatcaccgaccaccgtcgcgagagagagaggaaaattaaagaatcagttttgtttttttttaggcgaggaacaatgaacaacttctttagtttttgcttttgttaaaaaataaaacccaatcacaatatgacatgtgtcgcctctctcaatctcaataatcactcttcagagagctggctctctcaattttaatcacttatgatttatttttttgccaacaattcaagagaacctctcaaaatttggattacatcctcccattggaggtgctcttatgaactagatctatgaaactgaagagatcccttcggatctctatctatgttgtcactttgtcgtatttgtacaagcagtcgaagcaggaggctcctagtgtctgtttcaatcaagccgcccttgatattgcttcagctacaattcacgctgattatatttgatgattttgccgagctttatgagtaaaacgttggttgtagaggaagtagcttcataaaatttgcaatttacattcatgacatatgtga

SEQ ID NO: 14323 - DNA, 817 bp, Arabidopsis thaliana landsberg
gaaaactgggaagttttctctaacgaacaaaacattcgtgacctttttttttatatggagactcaccaaatactctacgcgttgtcttgactcttacacttctgatcccttttcttccggaggaagaagctggtacgtgtgactttcttcctcttgtatatatataacaatacgtacaagatgtgttagtttagtaatgtgatggttgtgtattgtgaaggtcattgaaagtgtatccaaatggagttggaaatgctacgggtaattcgttgtcactctatttgttgagtgatcagtcaactgataagggttatcttgaagccaagttacaaattactgaccagatccaatcaaaccatttcgtgaaaaaaggtttgacgatctcctttctcatcgatcatctactactagtactaatttagacctaattattggtgaccctttttcttacaaaaaattaactttggatttgttcctatatatatagtggcggcatggcccaatgcaacagagaatggatggggtttcgacaggtttatgtctttttcagatcttagaaacgcatccaaaggttacctcgtcaacgataccctcaaatttcaagtacagatattgtccttctcgaaaaccgactactactcttataaatcgtctgttgctcttcctatttcaaatggagatagtacttaggtgactagtcttcgcttaaactggcccatatcactttgcttaattgttttaattttcttatgtttctgttcaaaaaaatgagtacgagctagctttctacctaaaacttgatcaatttatttaacat

SEQ ID NO: 14324 - DNA, 603 bp, Arabidopsis thaliana landsberg
  unsure (1)..(603): unsure at all n locations
acaaagccttcaccatgacattcttaggaagataaacatagagaagtcttgcttttatcttaagaaaatttaagtcaagtatctgtctgactgttcatcctaataaaagtgttactagttcttaattctcttgtgaaagatgagaacaagagatggagaaatttgcatactccatgaccagagtgcttatgactttttcaagttgnnnnnnnnnnnnnnnnnnnnnnnnnncaaaggacaacaacaaaatcaccaacttcacttgttttccccacataatggaatccattttccaaagttccaaaccatgtaattgccattgaactatttttaagtgtaatatatatttggattgttaaatgcccatgcgttttgggccttaggtttacctcctccctaagattaactaaaatcatctaattaggttatcaacactagtgagagctgtctctgcgatttgtatcctcaaatatctttttccgtccgatcatggatagtggaaaaacttttgattccatttctaatgatctcttcctcgagatattattgagattttctacaaagtcaatcgctaggagtcgttgcgtgtcgaagcaatgggcg

SEQ ID NO: 14325 - DNA, 663 bp, Arabidopsis thaliana landsberg
ccaagcaaggatacacccagtttggtggtctccgcccgtttggagtttcctttctttttgcaggctgggacacgaaccacgggtttcagttgtatatgagtgacccaagtggaaactatggtggatggcaagctgcagctgttggagcaaataatcaagcggctcagtctattcttaagcaagactataaggatgatgcaacgagagaagaagtggttcagctcgctatcaaggttttgagcaagacgatggacagcacgagcttgacagctgaaaaactcgagcttgctgagttgtatctgactccttcaaaaagtgttaagtaccatgttcactcgcctgactcgctcactaagctcttggtgaagcatggtgtgactcaaccaaccgcagaaacttcctaagcttgaaactggtgacagttttatctgacccgcctggttactgtagatgtccatttgatttatttccctttggatttaaagatatcgtatcagaaacaatttaccactctgattatgtcatgtgattcatttgggttgactatcttttatcttgagattgatcttcttctagtcaaaagtaaagttagactttagaggttttattcaataaatgaatgagcaatcaccaacgggcccattagaaagcccataacattca

SEQ ID NO: 14326 - DNA, 626 bp, Arabidopsis thaliana landsberg
acttggattcagatctacatcaaaatgggtatagacggtggtggagcttccccgaatttggtttttgacagaaattttttaaagctatgatgatctctcaatccggtagattcgatgcttttttgggttggattcgagatcggacagaaggcaggcggatacacatcgatccaggactgattagcggcggctaattgaagatttggcgatgtccggcgagctcttgacggcggtgctacaatcctcgacacgtagttaggcggagacacgtcctatgcacgtgttgttattttgttaatcataatttgtgtttaattatggtttaaatgggccgtttttattttcgttgtatcgactagactaaccttctgtactaccttttgggctttacttaatgaaaatttggtcgacagaaaaaaaaaaaaaaaaaaaagagcatatttagttgggctaacacgtgatcagcgaatcagccctacaatagcccaaatatgtacccagtcattagattaatgatctctcaaaacggtgtcgtttcaaactggaccaccttataaatacataaatcccagcagtgtttgccatcagctacaaaatagtaattcacgctccttgaacaatccacc

SEQ ID NO: 14327 - DNA, 563 bp, Arabidopsis thaliana landsberg
aaccgacacagagacgaattttatttatcactcgaaaactcatcaaatcgggaatgaaacacagagaatacaaaatggccgcagaaggagaagttatcgcttgccacaccgtcgaagattggaccgagaagctcaaagccgccaacgaatccaagaaactggtaaaaactctcgatctaaggttttaaatgtttctttctgattgatttcgctgcttttttagcttttgatttggatatgaaggattcagaattaggtttgaattttccccaatcgaattttcgaactccttaatgtgaaatttatgaaccctaatagtttaattggaatgtttagaaacccagaatctcagaaattgaaaccctaataacttgatagaacttgttaaaagcatcattagatatgaacatgttatgtgaatttctcaactatgcaaattcaattttatgcttcatctgttagggatcacatgaaaattgtctttaaagaaccccaattgtccctattgtttgtattatcgatcaatctagctaaaattcttaaatttggttgtgtgccaatga

SEQ ID NO: 14328 - DNA, 927 bp, Arabidopsis thaliana landsberg
  unsure (1)..(927): unsure at all n locations
tttatggccttaatgaatgcgttagtattggcctattgggctgaacaagtccatctccttctgatctcacttctaaacatagagctccattgaaggagaccggtccaccatgtgaaatgcttccaccagctaaaagactcatataattgatcgtgaagtcgttgaatttactatggatgattcaagaatcacggagaggtgcacgtgccaatggggatctnnnnnnnnnnnnnnnnnnnnnnngcttctctaagcacaagaaagggatccatatttttttttgatgtaccctatcggctgatttggttagctttattaggaatgcaccgaagtgttatagagtagacttctctcgatacaggtagaattgagctaccatacagtctgatccgaatttataatgttttccgactaattataaaagattgtaaggccgcctacatttctaactatcatgtaaaccagttgggcaaagacccaagtgacagacttcccaaacaaatgtatttttgtttttagggataatcgaacttaggtatcagagttttaccatttaccaaaactttcttttgccactaaacaacataggcttgggcagggatccacatttttacactagaaattgcaagtgatctttgttcattatgatgaaagagcttcgttcctttttttttttatcatacactcaaacacccaaaatccataagtgtgaatctccgactccacatgtacaacaagttaattttcttcactggtttatgtcatttaatattttgacttacatagaagatttaaaatttcgaagaagattatattttcgattttttgctgatatgtaaattttttgaatatacttttgtgttcttatgggattacatcaaaataagaagatgcgatctttttgagtttttgctcaatacttacaat

SEQ ID NO: 14329 - DNA, 583 bp, Arabidopsis thaliana landsberg
tactgaatgtctgagaagtcgatggataaatgatctgaaagtcttccattgacatggtgtgctgagctattaacacccttgagcgggataacagacacatcatcttctagctcatcaaattccagtctatcgctcctataaccattgaactccatcatatgattcaaaacactgaattctgactcaacatcggctccaaatccatcaaattgtaaatcttcatttacactggctgagtcctcggaaattagagctgatagcaatctctgataaaggggggcagctttagaatccactttgctacttgcaagttcctcgggaaatatttcatgactatcaaagtctgaagatgtcccaccaggtgtagtacccatgaaggagagttctccctgagagagaaaatggttataacatttatctaaaatgaagagtcaacatattattagagccgtaattgtctttacaaaactgtgggcaaacagctcacaaatgctatgtatcatcagatcacgtaacattacaaatctacacacatttcctaccatatttcacatttttggatttttctttttcacatttaggg

SEQ ID NO: 14330 - DNA, 877 bp, Arabidopsis thaliana landsberg
  unsure (1)..(877): unsure at all n locations
ttaaccgattatatttaatccggtttgacttatccataatgttgaccaaaattaatcgattttgactctattttaatccaattttgacgcaaaaagaaaacagatgtcttctctacaaaaaaaaattatttatttattattgataaacaaaaaataatatatagaatagaccataaaaaaaattattataaaatttggtgtatacttttggcaatataacaaaatataccacaaaatagatcacaaattcatttttttagtgctatattttgttataaatttttggtaatataacagtatatacctttttcttttggtaatcatttctttttttattttttgctaagaatcctttgactttacacgcattctcaaactcgaactagggaggagactcacataattacgtctccactaatgcatatatcgtctactttggtaaaagtcctatctcttggtctgcaaacaaacaaaatggtgttgcaagatcatccatagaagccgaatacagagcggttgcaaacacatcatcagaaattcgttggatttgtagcctactcacttaatttggaatcatactaccagtgtcaccagtcatctattgcgacaatgtcagatttacgtttctttgtgctaatcttgtgtttcaatctcgaatgaaacatattgccatcgactnnnnnnnnnnnnnnnnnnnagttcaaaacggtcttctccgcgtctctcatgtcaacacgaaagatcagcttgcatatgcacttacaaagccattaccacgcagtcggtttctcgagctaagaaacagattggtgtgaccatagtccctccatcttgagggggcgtgtcaaggatatgatatgatcatatcatcattccc

SEQ ID NO: 14331 - DNA, 656 bp, Arabidopsis thaliana landsberg
actaagagaagacgacggagtctctagctgcaatggcttatatgttaacgcaagatacaatccgggatttctgctttctcaacgctgatttgatgttattgatcagtgatcacattaaatccacgagctgaattgcggtttggggccgcgttttgttctcctctgaagcttgacgtatcgtctagcagaatcgaatcgtcacatccctatatgtaagtatgaaaacgtttagaagtaaagaagcaaaataaccattatactaagtttcttgaaatgcaaggaaaacaaaagaggtgaaagaaaaaaatgttatgctgacaaggttaatttttttgcagagtttgatatataagtcattttggtccttttttttaagtttgagagatccaaaaggaagtcactttgaagtcaaagtcacatgagttttttctagagttaccgaattacatcttctgaagtttatatactacaaaacgactaccaaaagcgacaatatcgtaggtcgtcttcttgtgcgactattttacaactattttacgacaacgacgtaactagtcgttgagttattcgttcaatagcgactaacaaattgtgtcagaacataatcgttaattaacgagtatttgatgcctatgatattgatagagattatagtc

SEQ ID NO: 14332 - DNA, 712 bp, Arabidopsis thaliana landsberg
cagagctaatgaagataagcgtaagaccaatagatgagcattgcaactttagctttaagcttttagtaaaattgtaaagtagatctttaaatgatttctccagatgaatacacctccatggaaagaaaattaaacgctagattgtatctttactaaaaccgtctccagaatcttaaaccgtattacaagaaatattcgaccaaatgtttgcccttgcttcaaaactactctgcatggtttgctttcgaaaccactacgctgatttcaatgcagttacaagaaaacacaatccatatcagtaatctagtgtttctgtgttggtctaagaattctccagggaaacagataagataatgaaactctcaggcaaaagatctcacctacgagcaagtctctgtccagctccaaccattaacgccttacctatagcactagaatgaagcccacaagccaaagctactcctcctacaacaacccatttccaatctacactgcactgatctttttgtttcctcgcattctctactgctcgtccactctcttcttcctctgctccagatgttaccaccaaatacatgttcagctttgtggtgatacttgccatctgcgcactccgtgagagcgacgtccctggttttctagcgctttggtatgccctcaaaccagaggttagcttctttacagctgcccacatgccatgacggacttctaa

SEQ ID NO: 14333 - DNA, 649 bp, Arabidopsis thaliana landsberg
agtaaaatagaagttgagactttccgtcttactgtactttcctccttcgtcttctgtgtctctctgtctttctttttcgttgaaaacacttgttccttcacaaataaatctgaatttggttaatagataattgtgtcatttgtctctggttttgtgtaattataaatcttattttgtgtcatgtagacataataattgtctcttttgggtaatgggatgcttgaaatcatcgcctgaagctagaactaatgaggtcaaacgatgtctgggtttataaccctattacattgaagtaactaacaacaagcactacaatttttgaacttattgttggagaattaagatctctctactattcctcggtaacaacaacaccaatctcgcctctctcaagcaaatcatagaagactcttgttttcctctgctcgttccagtgatgcatcttccatagcccaccagccgctagtcccagtgtgagaccaataactaactccttcacaacacttgggccttttaaagttgcgtgtgctatcttgtgcccagccatctctttgccactctcctgctcacactaaaccaatcaaacattgcaatagatcatgaatatacaaaaatccattctctttgataatctaaacatcaacattta

SEQ ID NO: 14334 - DNA, 617 bp, Arabidopsis thaliana landsberg
atggcttacgacgtggggatctgtgtcgcatgggcctgcacccttcccaagcttctgctactgttttgtgcttacttattccaagatcgatttgccccctatcacctgcaatatcaatcaatggacccatattggaccagttatcaaaccaaaacgacgttcgaccaccatttaagacattcattctcgcatatgggacaaatttgtatagttacttggccagaaagcaatgcatataacttcttgaatataacgttgattcaagctttgatgttgattcttgacaatgagatatgttcagagacaccatataacttatgtttttagaaagggttatgcacatgtttagagttccaattactaactcattaaagttcacgcatttgattttcttcataactgaaaacccaataataaatcctagaaaacataatgcattaaatcttacgatttatgtatatcaaagaaaaaaaagttggatattttgtgagttgtttatctactttttaacttgtaacgaatctttaagatcaatcatacgattgttttggttcgtgcatatttgaatcttaaatgctactgtaatttcactatgcacctttattttttgggtgaaa

SEQ ID NO: 14335 - DNA, 608 bp, Arabidopsis thaliana landsberg
attaagtattaacaccatctttttacttttaacattctacatcatattctttctcttaataaaattgaacatattatcccaccactttattatcattttcaacataattttgtaactacatattaattacaattaatttttctccattataggtgtaactcaactttaggggcattttgctctaatgtattcctttaaaatagaggttcctctaaaataaaggaaaactatattttagaataaactatattttcttttattttagaataaactatattttaaaagaatacattggaacaaaatcaactcaatttcctccaaaataaagttacctctaaaatagaaaaaaaatagaggtatattggaaatggtctaacatttaaagtttcttttattaaaagtatgaatgtaatatacattaaaccaaaaaaattctacctaaaaacatataccccaaaagcggacatgtgtacctaaaaacattaaaccaaaatttttctattttggaaataatccgtatcgtttcctttcgcttagcttatgtatattttggttttcaattcattttgaacaacctgaaaacaagcgattgggggatctatttgtcc

SEQ ID NO: 14336 - DNA, 726 bp, Arabidopsis thaliana landsberg
  unsure (1)..(726): unsure at all n locations
gaagaacattttgtctctatcactccctctctcactctatctctttcttttcacttacaacagtgaccttttttttggttaaaagataaacaaacaaaaaaagagagggtaactattatcaagaactaagaactaattgtctctgtaatatttacaaaattaacagaaacttaggtaaaaaaattataaagtataaccttgagaaacattttacaatgatccctttcgattttactccaagaaataggccctgcaacaaaagtgcataaaagtgaaacaatatcaagaattgtctctaaattctgaaatcttgattggattatgaactacttcactctgtaaccatacaaaggcgctgtaataaaacagataatttggtaagaaggaaagaatgtttatgagaagagtgcgtttgatgagattcattcaagtagacttttaaagaacttgcaacacacaaaatggaaagcatattctcacccacatggagatgaaactattttggtaatatgctctcatacttttaactcaaagattatgataggttctttcttcccgaaaccgaataaagtgttttgagaaatcacaaccatgagagatcgcctaaaaagtttggttcggtataaaataaatgcaaagatatcattcaagagaacattatatttgntttttataccttatgaacaatagaccatatcaaagcactcattaagcaaatgtgggact

SEQ ID NO: 14337 - DNA, 1004 bp, Arabidopsis thaliana landsberg
ccgctgagatattgctttctgttgaaatgttaacatcagaagctgttcagatctagagtctagacaataagattcttaactttgtttttttcataggtttttagataatacagaatctgctgtattaaaaggatattgatttttatagatatctataaattccaaatctgaaattgtatcatcttattgataaaaggaaattaagcagcaaatagcagaaagtaatacatgattggaaggataagattaataagattagagagactaagcatctgtgactgcaacagcttctttgacctcagtggttccattgttcttctccgttgcaggcttctcaacttcaggaacaacgaaagcagacactgggaaagtcctggacagaccagttggtgtcctgaaattgatcttccctgaacttgtcggctgctccaagacaagctcattgagagtgacccaaataagaagctccttggccttaacaccggtaagcttcttgatctttccgacctccacctgtgcaatgacctcggtggcgtaagagacaagtttaccaatggcttcaaacttgtgggtgatgctcttcttctgcttcagccagacaatacctgtctctctgtcgtaaccaacttcttcaatgtccttcaatggcaataaaccattaggcatagaaacttccttgagaaactcctttgtcttctcacggcatatctcatctcctgtgtatttctctgccctagctctcacttcatctgtaaccaaacccatctctgttttttttggtgtttgctttgttttgtgttaagatctctctgtctcttaggtttattggggagatctttggcttttaatttataggtggtgtggtatgaaatcacccttgtattctctatttaattacggaatttgccattgtatgaaatttaatgacatgtgttagggtaagaatatgaaagctcctacaacggtttatgggtataaagtcaaagatttaaggacctttggat

SEQ ID NO: 14338 - DNA, 869 bp, Arabidopsis thaliana landsberg
ataaaggacattcaacttcgtttttatgtgttttgttttaaattaattttattccctttgtccatcaataagtattttataaatttcaaagacttaacattagtctcgctgctggaaactctggttttgaacctcctcaatagtcatctgtccacttctcaactcaacatgcatcagggcactttccttgtttctcaagaaactccatatccttgtctccataattaaatctgcggctcattacgatcagggctcgtgactaaggctcaatcttaataagcattgtcccttgataacgtgccctctaagtaatagcctaaacggctgaacgtaaacaggaaagtcgaaacagagtggaagaagaagaaatctttatattgttgactatagttactaccataactgataccattgtttaccattcatagcccttatttcagccagtttcttcatggaactctctctcatttccctatgatgtcgaaaaactgggcacaaattgatgtcagaagctgaagttcctcaacaggaattacatttcacaataacaatgaggactcaagtttcatgttttagtcaaacagtaaacacgaaacggagctaaagagagaaacgccaacaatactctctggtttcttttttttcttttgttattttccttaactcatttttttcgatttttaattcaaaataatatatggataactatatatatttttaaaaaaagtctatacctaacaattaataacagtatatatagctttccaatattcaacttttcgcacgtgatccatatatatgcatacctagtttttcgcacgctcataaacccctctattctctcttccttcttcaatacaatctctatc

SEQ ID NO: 14339 - DNA, 544 bp, Arabidopsis thaliana landsberg
ttctaaggtatccgattttcgtttctggacttcaagatctctatctgtataacttggagctacaacgattccatagaacattcttgtttctctatctgttggacttgaacctttaaagaagctataaaaagatggaggttttattttgtgactaagttggattatattttgtaactaatataaaaagtgtgacacttctcatttaccgaattcgtgtgagctttattactctgtttgcttagcatattgtttattttctggttatgatcgcgacgtgtttacatgttactttgaatttacttttaccaaattactatatgatcttgtatataactgtcgttttaatccctatcttaaataaacattgtaagaaaaggtggatataatataagctagcaaaaatgtttcacttgatatttttggagatatgattgctgagaagctcaaagtttttgatttctcaaattttagtctcttctcagactcaaattttggtcgtcgtgtagtgcaaacgatatttttcttttgatataatttagcatta
